United States Patent Application Publication US 2007/0083945 A1 - sequence listing, part 19

SEQ ID NO: 127681 - DNA, 476 bp, Glycine max
  unsure (1)..(476): unsure at all n locations
actcagctanacgatgcccgagtcattcatccctatgagatgttgttgttgtattggctatcagaantgccattccctggattatagggttgaacccagctcatgcttttacaaaaaggttcatcaagtcaagtngaaatatggaaagtaccatctttgcaaaatggggcaaaagatgaatcgagtcacatcactgcttcgtctactgccaaacatatntaggattattgatgtccttgttacttccagtttcaccttgacaaagatgtcatggaccatgttgaaaatctaaattgattcaaccccatatcttgcgtaaaaattcgcaatacttcaactgtacatcattcgcatgcatccatgctnttcattggttgcattgctcgntgcattctttccttgaannaataaaataaatgaacttaatcattnngtataaannagaaaaaacatgctntacggcatcctcaccgaac

SEQ ID NO: 127682 - DNA, 450 bp, Glycine max
agcttgagctcactgttgctgtcccacaaatttctattgtaattgtctcggccatgctcttccttgcgagccctcttggtttcttgttcaagggctcttgcggtagctgtattttcttatcgtaactcagcacactctttccggacgtctgtagcgaccaacttgaatttttctttggcaactctcgcttttcctagttcggtttttagagctcggacttcttcatcctcttccggagcttttaagttctcttcgttgataatctttaacttggagagccaatctaactcttgtgtacgaactttcagccattcatgataaccaccgatgatgccattacgaaagcccctaagttctttatctttccttaacgggctttcccacgccttatggactctttgtataatcttgaaactctgcgcaccgaaatctctcacaaggaaaggagag

SEQ ID NO: 127683 - DNA, 468 bp, Glycine max
  unsure (1)..(468): unsure at all n locations
ctcagcttaacaatggatattcattttagaanagttgggatgggtcttcttcctncaatctatcagaaaaatgggtttccgtttaccttctatttgacgggcaccaaaagtggttcatcattgccataccatacttgaacctaccttcattccaggacttgttgagtcaagctgaggaagagtttggatatgatcattccatgggtggcctcacaattccttagagtgaagatgttctccaacatataacttatcacttgaatgtacaataaatctcgcactggtgcagacactgacttatttaatagacattntatacaataggcatcttctcaacctaatggtaaagattaccaatgttgggaaaaactcgatgggaggaaatnaccgggagaatcctaatgtgggacttcacctcacacttgtaatccaacacatctncccctcaagtgtgagtctcttccacat

SEQ ID NO: 127684 - DNA, 454 bp, Glycine max
  unsure (1)..(454): unsure at all n locations
agctntgaactgacaatttatatcatcggatcttttttttcacaaggattgtgaattggatttttttttttgattaaaaatacaaggtaaaatgagatttaggttttggtattactgccctttgattcttttctgaatttcccttctctgagtttttttaaactccactcccctcactgccaaaaaaattacaagcaaaaagattgcaagagttatctagtttctagcacttttgttctctccaagatccaaagagtcccattatcttcatgaacatgtgaaaaaaatgaaataaaataaaanttatataattaaaaatatatgctccaggaaagaaagctgaatacctgtctttgttcaaaatctgacaactgcagagccttggcctcaaaaactaaaaccaaacagtatttaccatcttgcgtgacctaagaagtaaccacatcaccagaga

SEQ ID NO: 127685 - DNA, 375 bp, Glycine max
  unsure (1)..(375): unsure at all n locations
ttacaccgctttaatttaaattgaattaggttataaaatgatttttggttcttattaaaggnttatggttacttttgaagcttttagcctgaagtatgatattgtataatggttgtttaagttattgttttaaaatttggttttgaggtttttttgtttgtattaatgtatgaaagtataatgtttgtttaagatattttgtttggtgtgaatttatattttgaaggtttcagtggtctattactttatttatatcctgtatggtagtgaatatgcaattgaaaataagaacacaaacctaatggtgcagccttactttgaacacacactattaagcctcgctcacgnttctcctactcatgtcgctccaaccct

SEQ ID NO: 127686 - DNA, 492 bp, Glycine max
  unsure (1)..(492): unsure at all n locations
agaaactaagctgagtgcaaaatatacctacaacanattctaattgttatcatctgaagactaanaaggacataaattgaaacacttttttttgcctttaattgtgtaaggccaagccaattatagtgagaaaaataaaatgaaaaagaaaacaatagaagaagcatttaattatgtatgaaaattgttcacagttactcatgaaaatgtggtatgtgtttcacaataattactccctacttggaataatgttcaagaatatgaactttgaaacaaagtgtttctcccatcaattctaaattatgttttcataggtttttcactaggtcacctttgaagttacccatttcaatgatccgaanatatcaagtgcaaatcttaaggatattcttggtaacaaacgcttgcataagtgatgaagggttgttttcatcttttataaacagtctgttcaatacacttagctagaccctgatttgaatttcaatacac

SEQ ID NO: 127687 - DNA, 356 bp, Glycine max
  unsure (1)..(356): unsure at all n locations
agctncatgatgatgatgaatcaagattgtttctttttttttgatgacaacacagatgatgacaaaaagcccaagagaatgatttcaagattgagtcaagaacaattcccaagagaatgattttcagattgagtcaagaacaattcatgaatcaagagagatttgatttcaagattcaagaatcaagtttcaagaatcaagactcacgattcaagaatcaagataagaactaaaaagtttttcaaaacattgagtagcacatgaagttttcacaaaagtttttaccaaagagtgtttactctctggtaatcgattaccagnttactgtgatcgattaccagtagcaaagtttggtt

SEQ ID NO: 127688 - DNA, 379 bp, Glycine max
  unsure (1)..(379): unsure at all n locations
tcatgatgatgaatcaagttgattcaagtatgtttgatgatgatctatacccaaaagaaggatttcaagattgagtcaacaagttcaagatcaagattaatttcaagtttcatgagaagaaatcaagaagattcaagaatcaagagaagtttgatttcaagattcaagaaaagatgaattcgagattcaagagaagaaatcaagaagacttcacaagggaagtattgaaaagattnttcanaaaacaaacatagcaccaatttgtttttcaaaagagtttttctcaaaattttctaagttacccgagtttttactctctggtaatcgattgccaattacctgtaatcgattaccagtgacaaagttggatttcaaaagc

SEQ ID NO: 127689 - DNA, 448 bp, Glycine max
  unsure (1)..(448): unsure at all n locations
agcttcgtcactaatgggcgataaaattctttttttaagtattnnaaacacaattacatattcaaaattgaaactcaagacttctaattaagccaaaccagttttaccacagttgatctaaacgttcaatggtaaatcttgttccattttattgaaaaataaatttaagagagaaaaaaaagatattagatctatattagtttcccccaaattttctcttcatttatatctcaaattttctcatgcattctctcttcattttatatcctaagttttctcttgctattttctttagtttcatcaagacaaagatggcattcaggacaaaaaaagacaaatttaagcattaacatgcatatgtataacgacaacataatgtgaataaatgagacaagattctttttttttttactggaactatattacctaattgcattaatgatcaaat

SEQ ID NO: 127690 - DNA, 472 bp, Glycine max
tccattgtagaaaggtatgttgctgaagttgctattgagttttgttcgcagtacatggaaacagtcgaagctgtgggggtaccgaaaagtcgtcatgaccggacacgaggaggtcaagggacacgaggcttcaatgttgttaccatgagtcgacaagatgtgccacaagcgcatttgtatatcttgaataacacacaggaggtcgttccatacatacaaactcaaacaatatatggcatctattaacccaaaattgaacatgatgaaattgttgcaaaatcataatagaactttcataaactggtttaaagaaacaatcatgagtgatgacaatgcttccaaaacattaagattgttggctattggtctgaatctaaatgtccccacttggaaggggtatgacatatacaattattcgttctatacaaagtcacatgatgataaaagtagtgtgcataatagtggggtgatg

SEQ ID NO: 127691 - DNA, 447 bp, Glycine max
  unsure (1)..(447): unsure at all n locations
agcttgatcaaaacaattatctaatcattttttctactcaaatcatacagttgctcattcaaatcattcgcagacactcgttgcatacaaaacaaaccactgcatatcaaattcaactaattcactgttcaaacaagctttctgtacaatcaatcaactcaaagtactaaaatttaaataactaaaatttaaagaactgaaacataaacattgaaatttaaatgactgaacataaatcataaaataactgaaataaactaaattgttcaaaatgcacaaatttaaatgtcttgctcctgtgcatgctcattgagatccaacacctgagcagctagtgaatcctgagggataggctgctntagctcagatgctggtgcagatggcatggaatcatcatgtatgggtgctggagatggctctggaatctggtctgtggcagtcttcttc

SEQ ID NO: 127692 - DNA, 495 bp, Glycine max
  unsure (1)..(495): unsure at all n locations
ggacctataaaactcaagcttaaattgaattaaaatgttcaataactgctggtaatctattaccatatatgtgtaatcgattacacagtgcaaantttgaattcaaattttaatagctgttgtaaataatttttggccactggtaatcgattacatcctctggtaatcgattaccagagaataaatctcttgaaaaagactttttaatttaaatttcttggccaaaccttttgctacttcaattaggaattcccttcctatttaatatacccttcctaagactctagagactatcttgatcatccatcttgaatatctttaatttctttgtcttgaataaagctntgagaagcatgtgatcctttggcatcatcaaaacattcagcttgatcctttgtctgcaatctccccccttttgatgatgacaatcccttgaatcaagacnagctatatacaagatgatagcatgttcacacanacccttactcccctatc

SEQ ID NO: 127693 - DNA, 402 bp, Glycine max
  unsure (1)..(402): unsure at all n locations
agctntaaggtgtgggacttgttgagttacctgngtttggagtccgntaaggcgcatgaggacgctattaatgccgttgccgttaacggcgacggcaccgtttacacggcgtccgcggacgggagcattaagaattggaggagggaaggcgaggcgaaacggcacaagttggtgagcaccacagggaggcggaagtcaacggtcaacgcgcttgcgttggacggcggtggtggcgcggggttgttttccggcggttgcgacggcgagatctgccggtgggagtgtgggaagaacggcgtggtgaagatggagacgctgaggggtcatggtggggccatactgtgtctaatccacgtggcgggtttgttggcgagtgcgtcagcatatctaacggtttgatct

SEQ ID NO: 127694 - DNA, 440 bp, Glycine max
  unsure (1)..(440): unsure at all n locations
agcttcattcagcacacaacgctggcatttatattcattcttttgagcagnngaccctctgctcgcnttggctagcttgagaaatgtgctatcaactaccattgtcttctctcacccatcctgtaagcaagggaagggagattacagagtgagagattataaaactaaccaaaacacccaaccaaataaaattaataagtacaaacataattactaaatgttggccatgttaatctctaatgacttaaatatcttanagatatcttatacatgatncaaatttgtttgagtttctaataattttttcattattttaagttcatgatatattaaagtttctgtttttgttttgaaattgtattcttaattaaacaatgacgtgacactaattaataatgttaaaaaaatcacaatttaaaatgatatattatcacttaact

SEQ ID NO: 127695 - DNA, 417 bp, Glycine max
  unsure (1)..(417): unsure at all n locations
agcttgcctaaggtgtngntcttttcttctttctttgngnccttatggcatttcttattctgtttagtatcctagtagttaattaacctgttgcaacatgttaggagtcatttcagctgtttttggttataccattcaaattcttttctgtattcagtgctatgaatctgtaaattctgttatatggtactcttttggtgctttttaataacttatgtatacactgcaggaaggtgatgtaattgcttatcgattgattgagttaacagcatcttggactccggaactttcctcctttagggtgcatatcaactatcaagtctgcttttggattacattattaaaaaaaattgcatcagaagttcaatacgaattacatctatgtccttgcaggttgggaaaatatctcggtatgat

SEQ ID NO: 127696 - DNA, 440 bp, Glycine max
  unsure (1)..(440): unsure at all n locations
ngacatcaatgggcttagtcctctcattttatgtttaatttttatccaaangtataccactttggttgtggcagtagaccttatcatctcctttctaagcctgtaaactcactgccattcctatcgtccatattgcttctttcactgcctcagtcacaacaatgaactctgctcccattgtggacaatgagaacaccttttgcaggttgcacttccagctaacagtgtttccacagaactgaaacacatattatgttaatgacctcctagtatcaatgcatccagcataatctgggtcaacaaatcctgtcacattccctgcactttcttcatgtttcttgtacaacaatccagcttcaatggttcccttcaagtaccttaggatccacttcanagcctnccaatgtnagttttctatgttccccatgtatctactgact

SEQ ID NO: 127697 - DNA, 298 bp, Glycine max
  unsure (1)..(298): unsure at all n locations
ttactcccttattttcttctagtcattcaatcccttcttccatccatattagcccctgaagtgaaagcctctcatggccatgagaggctaacccctctgttggtagcctagcagccaacacccttgtaatgtaactgctcttattatctattaaatgccaattctatntctattgcttctttnttgctcttcatacttattgtatggtctaatcatccatgtattagcttaggggttatacatttggaaatggttaattttaaacaattggaaaaggacatctaaacaatttgatcgc

SEQ ID NO: 127698 - DNA, 341 bp, Glycine max
taccctaatgaggatgtcccatatgttcttaatactggactgttctcatttgcttccaaagtttcatggccttgcaggtgaagacccacacaagcatctgaaagaattccatattgtctgctccaccatgaaaccaccagatgtccaggaggatcacatatttctgaaggcctttcctcattctttagagggagtggcaaaggactggctatattatcttgctccaaggtccatcacgagctgggatgacctcaagagagtattcttataaaaaatttatcctgcttgcatgaccacaacctatagacaagatattcaggcattagacaactcattggtga

SEQ ID NO: 127699 - DNA, 462 bp, Glycine max
  unsure (1)..(462): unsure at all n locations
agctntatgaattttttttggctgagtgatgagatataacgtggctttttataagaaagaatgatttccttttcctattattttattttctaaagcacttgccacttgtcccattttgagtggaacaaaaaggacccacttttgctcttgatgtgactcatactcagccacaagaagagaaaaaatctgaccttttgaaatgctaaaatcatgcctcgatttgcgtgtcacttctctggttccagtccctcgcgtttctctgcacccatcggggcccgttttcgaaagtaagcaatatatatatcaaaacgctcaaaatgaaaccccgagcatggttcagaggttggttnntgttaaatttaagttgcacgcaaaatgataattnttagactaattaattgagaatntatctataactggccagttatggatttctcttctttaattagtctaacccgcgta

SEQ ID NO: 127700 - DNA, 405 bp, Glycine max
  unsure (1)..(405): unsure at all n locations
ctcaagctnntaacctcatgtctctcacagtctttagaattgggagcctatccaatccttgtgtccggactctcagccacttatgatagccgccgatgatcccattactgcttcccctaagctctctgtcctttcttcacgccgcatcccatgccttgcgaactccttggagtaccctcgcgttgtggtcactgaaaccccgtgcgatgaaaggcgtgatgctttcgtttgatggcactcctctcatggngtagccaagctgtcttatggcgaggacgggattataattaatacaaccccttgttcccatcaagggaatatttggacatccttcgcatgaagatagaatcctgattcttccttccttctagcgagggaaccaattaacagacgcccctccatgct

SEQ ID NO: 127701 - DNA, 463 bp, Glycine max
  unsure (1)..(463): unsure at all n locations
agctggttgcaagtggttctcgttgttcctctatctttgatataacaaaaacctatctgccaacaatgggcacctccaaaagcaacatattatcaatgaacaaattaaccttatccatttttgaacaagaatatgaagatatactatattcccttcttcgctccccctagaggaaactatgctaaaatctctagtgatgccaaaatctccatttcttctccaatgaacaaggtgaatatacgttaataatcaacctatgcctcaactccctattccattttcctctgagccccaaaaaccatatctagcaaacatttttcatccacctcaaacttacctttntcctagatgcaaagcaaactccccgtctgatgcaatcctacctccccaagggcattggatagaagactccaagaagattaggccagagatgcaagagaaggccctaggattctcatgggcc

SEQ ID NO: 127702 - DNA, 435 bp, Glycine max
  unsure (1)..(435): unsure at all n locations
tccnctgcaccanatggccttttcctataaatagccatgcatggtatatggttcatgggatgattctctgaggaacagaaggaaaaatgcaggaagaagaagaaaaaagcaaagccgaggcactgccgaatcgcgaccgtggatcgtttcatacatcatttctcttgctaaccttgtaccctatgcaatagtcggttagtttttcttaagattctgatgtaatctatgtacccttattatgtcctttgtgatattatgtgtgcatttatcttcttcacttatcgttggtaatttcatttcatccgtaaggcttggttctaatcggtcactagtgtcatngaaatggttttttaagtatgactggaaagaaataaacaaaaccaaaatgaaaaanaatcaattcacaatcaagcttcttttcatcaatatcactta

SEQ ID NO: 127703 - DNA, 378 bp, Glycine max
  unsure (1)..(378): unsure at all n locations
agcttgtgcatccaataccctgatgaggatgttttatatgttcttaagactggactgattcatttgcttccaaagtttcatggccttgcaggtgaagacccacacaaacatttgaaagaatttcacattgtctgctccaccatgaaacccccagatgtccaagaggatcacatatttctgaaggcttttcctcattcattagagggagtggcaaaggactggctgtattaccttgctccaaggtccatcacgagctgggatgaccttaagagagtattcttagaaaaaattttccctgcttccaggaccacagccatcaagaaggatatctcangtattagacaactcagtggagagaacctgtatgagtactgggag

SEQ ID NO: 127704 - DNA, 484 bp, Glycine max
gacactcaagcttcgaagggaagaaagagaccaatcacgagcacataacatggtcttaaaagatgagttagctacttgctcaaggtccaagagaatcttgtctcagtgtttatgtgagacaaagaccaacatgttagccatcatcagcaagtaccaagaagaattaaatctagccacggcccatgagcacaaagtggcggacgagtatgcccgagtgtacgcggaaaaggaggctagaggaagggtgatcgactcgttacatcaagaggcaataatgtggatggaccgattcactcttactctgaatgggagtcaagaacttcctcgattgctagccaaggccaaagcaatggcggactcctactccgcccccgaggagatccacagacttctcagctattgtcaacatatgatagacttaatgacccatataattagaaaccgctaggaaatttgtattgcactcagatcttgactagtataa

SEQ ID NO: 127705 - DNA, 382 bp, Glycine max
  unsure (1)..(382): unsure at all n locations
agcttcgactttggagccatgcgtagtgtttgttttttcaattctccattctcaatctttgtaggagccccatgaattgcgttttcgttcatgtgtcctcgtccttcgagtttggagctttgcgtagtgattgcttagttcaattctccatcctcaaccctttttcaaagcccatgaattgcgttttcattcatgtgtcctccaccttcgagtttggagctatgcgtagtgattgcttagtgcaattctccattcttaacctatttcggagccccatgaatatcattttcgttcatgtgtcctccacctacgagtntggagctatgcgtagtgatagcttagtgcaattctccattctcaacctttttcggaaccccatgaa

SEQ ID NO: 127706 - DNA, 476 bp, Glycine max
  unsure (1)..(476): unsure at all n locations
taactctctcactgtctnnttaagttttgtagttaggctattctcggnctgtgcgctaagcctgagtgtcattctgatgaggctgagctaagcgcgtcatgctgcgataagctcagactctcttctgttttgaaaattgtagacttaggctaagctcagcttgctacgctaagccaaatctgcagaaaaatattttttgtgtctttcggctaagcgcgagtctgctgcacttagcccctgagtaaaattntataaggcgtgctaagctcagcctactgtgctaagtgcccagtcaaaattttagtgttatttttttctggttttgttgaaaataacctatgctagtctcttgtgttttggcttatatnttgtaggtggaatctaagaaaaggaaggctccttctacaccttcccaagttagaattgaccaatctaggttcacatctcaagaagcttgngagaggtataccgatatt

SEQ ID NO: 127707 - DNA, 438 bp, Glycine max
  unsure (1)..(438): unsure at all n locations
agcttcananatatatgtacatatgtattttatttattatacagaacaaatatatagttgcagctgcaattatatatacaattcatattaagaacataacataagattactaaaaacaaaatgagaatgataaatcataaactacttcctattgtctaagaataganataatattatcaatcgtatttttttcttctgaaatcataaggcaatttccatttttcataacttctttcaaatattgagatatcgaacagtcgacaaagtatctaaaagtatcggtgtcaaatacatatcggattagaattcataaagcaaattaaagcattgcgcgtttatagtatcatatcatatgcatggtccacaatgatggcatcaaagaacagtagacaaagaatgaagaagtcatgaacctttgctatagacatcataagtgtc

SEQ ID NO: 127708 - DNA, 480 bp, Glycine max
  unsure (1)..(480): unsure at all n locations
tcaagttgccgactggcagaaattatgattcagagacgattcagtttntggttttaaacaggggaaggaaatcaaccacacatgcaaatcacgtgacctcttagttaggtgtaatcaaaccagggtttgctttttacttaacctatttatttttattttctttctttttgaaatgatataaaaagtgacgaagtatttctttcttacttttttctctctatctatttaatatatccttttntgttnttatctttcatatttctttctaatccaaacaaaaatttaaagatgaaaattcccagtttttctatgagaaacaattattaggataaggtaataatatttatgattaaaacttattagagtcagcttaacgataaagagtgatttagaattntagatccatttgcacaaagtcagctcaaatcttggtgatgcaattgagcataaaacaatattattaatatgttcttattatac

SEQ ID NO: 127709 - DNA, 474 bp, Glycine max
  unsure (1)..(474): unsure at all n locations
atccnaagagncacctgctgcatgcaactncaaccacagcagcacaannatcttttgtttcanaacccctcaantcaacggctgttctatgcttgaaaggtggaatcttataatgaggtaaatttggagcaaactctcacctcacacaagtctataacatcaatctaaacttgctcaaactggatttacacctaaatttccaccgaatcaaaatttgactcctcaacacccaattttgccctagaaatggctcttggttcactttggtcattagtttttctctctagctcaccctaacctttctcacatgtactaaatgacatttcaagctattattaactcactttaacctccattgaccacataattcagacttatcctttcaactctcaaagtctaactctcttttcactcataacatcacattctcactttctaaccttgtgatattctaccctttgactctacagattt

SEQ ID NO: 127710 - DNA, 395 bp, Glycine max
  unsure (1)..(395): unsure at all n locations
tgtgactcttggcatttcttaaaaatctttcactnatttaagnnangactttncaaaaaatcttcagaaacaagtcacttgaagaattgtgacttttggaaatgtatttttcgaaatcagtcactggtaatcgattaccattaagatgtaatcgattacacatcaacagatgtgactcttcattntgaattttgaaaatcttaacattttaaaacaccggtaatcgattactaccttctggtaatcgattaccagagagtaaaactctttggtatgactcaagtctaaatgttttgaccgttgggattntccagataacatttatggaaatctctnttatcaagacaagcacgctaggtgcaattcccaacccccgagagggaaattcactgagc

SEQ ID NO: 127711 - DNA, 352 bp, Glycine max
agctctatcgatagactttgtttgtattcattttgtcttgctctgagtgagaagtaataacttatcataaagagatttaacctcgatgctaagaaagtaatctagttgaccaagttgtttaagagaaatttttgagtttagctgagtggtaaggtgttgaatcaactaaggaggagtgatgtaaaaaggtaagagcaagttcaaccacatgtgttcattttctttccaccacccctttttgatgatgggtgtgagggaaaacaattttgtgattaatactacaatcaaccaaaaaaggtgctaatgggacaaattctcctcctaaatcagtttgcaaggtagagaaacacac

SEQ ID NO: 127712 - DNA, 455 bp, Glycine max
  unsure (1)..(455): unsure at all n locations
agaaactcagcttctcgggcttcttgagaagnntctttgaggcttctttgataagctagatccttatctacccatacccctctattaactaaattaacctccttgaaaataattacagataaaaataacgcaacaaatataatcaaacataattactaataaaatatagatatatattagggtgttacactcaacaatctttgacccaaacaatcatgtttgttttgggtgcctctacaatcacagggtctcgaaaatacttaggcctcccttctatcataggcaaatgaaagaaagcaattttcagatcaaactntgaaatgcatcaatcactactcgagaaagtatctttccaaagctagtaaggaagttctaattaaatcctgctctcaggcaatcccttcatattgcatgagtatccacttgcttcanaccactctagaggatgatattcg

SEQ ID NO: 127713 - DNA, 342 bp, Glycine max
  unsure (1)..(342): unsure at all n locations
tataactctcttgggcctgatataattaccattgccatctgctatcggggccttgctatcatgtagatgtgcataccattcaaagaaaaaagcaaaagggataacgaatatggtggttgttgtctgtctatataacacaaagatgaaattgttcatgccatgagcaaatgctacttgagagcaacaacatggctgataagaaatnatgaccttgagagcataaagatanaatgtctctagcgttcatgtattgctacttcactanaattataatctagtaactaaacacaaataagtggatgcatgtggtgtgtccactcctgtgttattttctttcttttg

SEQ ID NO: 127714 - DNA, 467 bp, Glycine max
  unsure (1)..(467): unsure at all n locations
ntacatttcgaatgcaatgcagnnnacgtcttactttatattttctgnctttnaaaagggtcattcgatcgaatgaactcgttgagccttttaattctgcaatttacctttcccttgtcaagttacttccagcatttcgattctttcacagaatttttactttccgcaaacctcaaaaccaatgaatgttcgttacaacgatgaacatcaaaagctgtacatttaatgcaaacacacaaatggcatgctcctgagattcactagttgatctcgcaagcaattaacttagaactagcggtgtttaccaaattccagcgtaaacaaattggcacgcccggtgggaccggtcaattgtgtgttnttggtttaaattattattaaagntnnntgttagtgcaagtgggttattgcattcttaattggtttgatcttggatgcatttaagaagtggggaaatctgtccacac

SEQ ID NO: 127715 - DNA, 312 bp, Glycine max
agcttgacagcaaacacaatttcatgatttgacatattaaagatgggactaactatctaactaccttgcctagagggggtcctctgctcgacagtatgtgccatgaaccagccattaatacctaacttcttcttgtatggacacaggtgaggactactcttcacaggcgaatcttaatcgtgcatagggtgtgactaacccatgcattgagagcttctaatttagcaaaccgctcgtgccttattatggaacaaattgaactgacaaatattgtggtactagggaccactgccattcgtcaatatggccaca

SEQ ID NO: 127716 - DNA, 442 bp, Glycine max
agcttcagaccaaagcaactcataatctatgtatctaaaacccctcaatttaatggactttcaaggtttgagaagtgaaaatgagaatggggtaaatttggagcaaactctcacctcaaacaagtctatatcatcaatctaaactcgctcaaactggttttatgacgaaaactctaccaaatcaaaatttgactcctcaacacccaattttaccctagaaatggctcttgttttcactttggtcactcatattcctcatttgcacagtctacactttctcataagtcctaaatgacatttcaaactaggattaactccctttaacctccaaataccactaaatccagatttggccttccaacactcaaagcctcactctttttccactcataacactacattttcactttctaaccctaggttaactctacccttcatctct

SEQ ID NO: 127717 - DNA, 426 bp, Glycine max
  unsure (1)..(426): unsure at all n locations
tatagggtttgaactttacttgttgttttacggcagccctatcaacgtgcaagacgagtaatctctgattgaacggtcttggaagtccaaactcaggagcacaggtcgcttcagcaaacagaccaatggcttgcacccacattccggtgaaagttgaataagcaaagatgcgtttgtgagaggacgagggacaaagatatcaactntatccattntatttaacattgtaactgtggtttacaataatggtacaaacttgaaaatcctgatgagtcattagagacatctaacaacagctttcaaaattgccccatgtgtggcatctcttggtaatgtcaggatntacacacgattcttctcaattttcagccagcccgcatcaattagaccttgcaccttacgcttcaggcccctacaatgctcaat

SEQ ID NO: 127718 - DNA, 464 bp, Glycine max
  unsure (1)..(464): unsure at all n locations
agctntatggtttgaacaacactcaggttatattatgtatgagattacaaaanttgtaaatagtatttcacttacaaaaatcatatatctgaattactttttttccagcaagatttagttaaaatccatgtcacacaaataggtatcatgcactagactagatagtcatgcattatttctactatcattactaaaataatgaatgcttatttgtataatgtctaatgttgatacaggaatacccttctcccatccaaccactgacacatttcaatgcatgattgtgaagctgatactattttcttgtacatcagaaaacataagaaacttatagaaatttgcaacagaagaattctatttaaaatgtgacaatcagagcgtacagaaatcaattcaatgagaagtgagaggcaaggatgntgggaataaatntgtatgcccacgatcaaagtcatcatgtaatc

SEQ ID NO: 127719 - DNA, 483 bp, Glycine max
  unsure (1)..(483): unsure at all n locations
gcttctcctctgttgcataggtgaatttcctgaggttntgagctttgccttgttttgtcataacgtcaactgggttggtagccgttgtctcatccctttgacgcgccggctgatcaccattggtactgctctgtcttccatcgtacggccgcgggataaatcctttacccaatgggtcatcgcgtttggtctgaccgcagggtaaagcatgggtcccaaggtcgttgctgttggcgatagtagatcctgtagttccgcgcagtttggttcgccggtccggtgctatccctttgggtaggtccccttcgagctccggcatgtccatcgacctcaggctaaggctttcgaggtagttgtcctcggaatggacctcgtcggacgatcccataaagctgcgttgacctatgtggtggtcgtggataccacaaccgcattcctncactacataccactagaacactctcaccgctatgtgaacgttca

SEQ ID NO: 127720 - DNA, 408 bp, Glycine max
  unsure (1)..(408): unsure at all n locations
ttaagtcacctgccgcatgcaagcttggacgaatccgaacctaagtttctgttgtgtatccactanaaaccagacactatcctactttttctctccctttctctctctctctctctctctctctctctaatccaacgatcctagcctctcttccttctctttctctacccttcgccggctctatttctactcggaacccttcttgcccttgcccttcctcctctcacctccatgacaacctcgatgacaagttgttcgccttcccctctttctttctccctccaaatctacgactccgacaatgacttcctcctcatcaagacggaccttccacctcctctattggctcaaccctgacactgtgcaccactgtctcttcctccgatggatgcctctacatcgacaacc

SEQ ID NO: 127721 - DNA, 445 bp, Glycine max
cactcagcttccatagaggccaacttcaggctcacaaattgcaagtccaccctcgcaaagcttctttcctacaccctcgcaaatctggttgtcgatgtagaggcatccatcggaggaagagacagtggtgcacagtgtcagggttgagccaatagaggaggtggaaggaccgacttgatgaggaggaagtcattgtcggagtcctagatttggagggagaaagaaagaggggaaggcgaacaacttgtcatcgaggttgtcatggaggtgagaggaggaagggcaagggcaagaagggttccgagtagaaatagagacggtgaagggtagagaaagagaaggaagagaggctatgatcgttggattagagagagagagagagagagagagagagaaagggaaagaaaaagtatgatagtgtctggtttttagtggacacacatca

SEQ ID NO: 127722 - DNA, 454 bp, Glycine max
agcttctaaggaagctacctagtctataaatagaagcatgcgtaacacttgttgtaactttgatgaatgagagtcttgtgagacacaactcaaagttcaacttctctccctttttcttccttcaatttcgtgctcccccatctctctttctctccctctttcttttcctccattgaagcatcctctccaagcttcttatccaaggctcatcttggtggtgaagctccttcttccatggcttattccctagtggatggcgccgcctcttacctcttctcctttgtcttccgctgcatctccatggtggaaaatcaccattaaaggacctcattgaagctcaaagatccagccttcatagaagctccacaagcaagcttccatcagttagccttctgatgaaagacaagtttgtcaactgccagctaaaacttagaattggtggtggccacacatg

SEQ ID NO: 127723 - DNA, 495 bp, Glycine max
  unsure (1)..(495): unsure at all n locations
ggatgtcgtgacatccggtacgacatctgacctctgtatcataatttcacacaacaaaggttgcatgcgtctgcatccctaaaaatcatgttaactggatagagtttctacatctcgtgtccaatctttttggatgacctgccctctcgatgagtcgatctcttgctttctcataaaggtgaacccttgggtactagtacctatcaccattagaggactatatgtcctcgcctgcagagggctgcacgccctcgcctttagagggctacgcgtcctcattttcagtgtgctccatatccaaacattaagagaatataaggtcctttgcccttagatgcttaactgagacttgcgctcccggttaaggggccagtagtttccttttatcagttcctgggccacccnctgatattagagggcgaccaactgtgcgagcacatccagagagggaggctatcacgcatctactatgcataccggngcaagattcacccg

SEQ ID NO: 127724 - DNA, 460 bp, Glycine max
  unsure (1)..(460): unsure at all n locations
agcttctcccncattntcctacaaatagggttttatgtgaagagaaaaaatgttcagccctcctagtaaatcgagaaccacttgaaattagtgaaaaaaattggttccgtgaagaaaatccaagccgaggcgcttccgtaacgtttccatgggtgatttcgcgaagatcttcaaccgttcttcaacgttcttcgatcgttcttcatcgttcttcggtcttcaaccggtaagttcccgaaatcaaacttttcaattcattctatgtaccttagtggtcttcatttgtttcacgtgcttttattttcatttcatttacttttcataccccattttaacgtgctttagtcatttgcttaagtcattctcttgcctaatcaaaaaataaaataaatttccaccgatcatttgaattgtaatatccgntaatttctgttaaaaaggaatccgaccgttcggtcgt

SEQ ID NO: 127725 - DNA, 488 bp, Glycine max
  unsure (1)..(488): unsure at all n locations
ctaagcttctgtctttcttgttaattatatatatttntaagccttgtatttgctatgtttntatgacatttgaacacttagtatttcttttattatttgattagtatgattgaacatgatgattatatttacttgctcttggttgtttatgattatgtgttttaaacttaattactttaatgatatatgactagtggtatgtacttacanttggtattgggttttatgtatatttttttttaattattcatatatgtttatttgaatattgtggatgattntctagtttgtttgatgttatgaatgaagtattgtctatctaagtttcatgaatggttaagttatcttgtttgattgttttctattcttttgtatgtagnttttatatattngatctattcatgtttctcgcttcatgaattggttatattctccaatgtatgccttgtgaatgaatatattgttgtcttatacttggtacacacttt

SEQ ID NO: 127726 - DNA, 479 bp, Glycine max
  unsure (1)..(479): unsure at all n locations
ctctagagcaccgcggctgcagctattaagccatttgatacaactttatcagataataaaaatcaaaatttgaagcaacttagttcaactcaaccaaagatgttaaacaagtagtactcacattgacagtcttgaaaatcattggcttaaaatacttgaagaaccctttggcattctcacacgtatgcagttcttgatgtcttcaatctcctgtgtcttactagtacccttgacatttttggccccttgacattcttccagctactccatgtatgtctgtaccacctaacaacatacacaattcccttactagtacacaggactcacaaactcccaaatttcaaggtagcaagaaaaccaaactctcttgggcctgatgacaccacccatggnttttcctgatctgctcttgagcatcattctccacagaaaccctggatgcacctacagggtgtgactctcttggacactgatcaccc

SEQ ID NO: 127727 - DNA, 474 bp, Glycine max
agctcgtggagcttctatggaggctagatctttgagctttttgaggtcctttaatggtgattttccaccatggagatgcagcagaagacaaaggagaagaggtgagaagaggcgtcatccactagggaataagccatggaagaaggagcttcaccaccaagatgagccttggataagaagcttggagaggatgcttcaatggaggaaaagaaagagggagagaaagagagagggggagcacgaaattgaaggaagaaaaagggagagaagttgaactttgagttgtgtctcacaagactctcattcatcaaagttacaacaagtgttacatatgtttctatttatagactaggtagcttccttgagaagcttgcttgagaaaacttccttgagaagcttctttgagaaaaattccttgagaagctagagcttagctacacacacccctctaataactaagctcacctccttgag

SEQ ID NO: 127728 - DNA, 306 bp, Glycine max
  unsure (1)..(306): unsure at all n locations
ngcacaacaaatagcttaccatgttattattataccggacatcactcaaagccaccttgctcccatctactcttcttatggccaccttgccaattcctttatccattatagacctgccatcaccaaattcgatgttccttctaacttgtgcatcaattatacagaaccaatccttatgtcctgccatatggttcgaacaaccactgtccaaataccaccattactactcaatgcttgtttcaccgtttacagtggccattaacatcactgcttcttcatcattagagtcacaagcgagttgtgctt

SEQ ID NO: 127729 - DNA, 428 bp, Glycine max
  unsure (1)..(428): unsure at all n locations
ctatgatactcagcttnaggcacgtttcgttntctttactcgttntagttcactctgtattataattgngttgntcacttccttttctatggcgtggtgagtgttttatggaccaccagctacatcgttatcttatccaatggctttttaaacttgttatgttggcttcgtttcctctgaactattattaagtgaaccctgaattcgtgaggccttgtcatgatagtctctttggaattagaaaaatgtcaaataaatctttgaaattaaaactgctgccctaaaattattattgacagtagttntaatttctaggatntatttgacaattttttattccagagactactatgatagcgtcttacaaattcaggcactaaaaggaggctctacttgaattatcttctatttggagtggtattgctatg

SEQ ID NO: 127730 - DNA, 440 bp, Glycine max
gcttaagaattgtctcactcagttcaatgttcactttataatcactcaatgatatgtatttcaagataaaccaagtacataacaactcaagtggaccatacatcacacaaacaacaaggtgaggcccaaaacttatctaactggttcaagctcaagggacttctcatacgtgactttttttgctagtgtcttacctctatggaaaagtcttatattgaagtggtaagttcaaaacaaaaagtttcaaaaagtgttttacacaaaatgaattcctaaaaattaacaacaaaccaatgtagagtaaaaaatagaaaatcacataaaggtcataaaaaaatatcatcaagttgtgagtgaagtgacaggtcacgaatgcccactgtattacaacaacccaaatgcaatgtcctagtgcatacatacaacatatagaatgaaaa

SEQ ID NO: 127731 - DNA, 479 bp, Glycine max
  unsure (1)..(479): unsure at all n locations
ngcggactataccttcgaccgaacacggtcgtgtttctgtctatgcccggattcaaggcgggctgcagcaccggctccgcttccctaactgtactggaggcggttgtcgnggctttatcctctatggttttctggagttttaacatgacctccgagatggaagccatttgatcttttaaggccgatagatcggccttcatctgttcctgcacacccgcttcattatccatttttctggatcgagtgttataggggtgccttggtgttttcttagttatgatgaaattcctaaagaaataaacaacggtgagtatgccaccaaaacatgagtatgcaaatggatgatcggagcacttggatccaccccaaggtttttagataacgtaatgagtccagaacttctcattntatataaagaacaaagctttcacctagccaagattatacanaaggtgttacaagagaacctaacgattcct

SEQ ID NO: 127732 - DNA, 446 bp, Glycine max
agcttctacttatgtggcagggtgggtttctcttattttcttgtctcaaccgcgagctttgaccaccgctcttcctttccgcgatgcttctctttatatctgcctgagtgggcttatagcctaaaccatacttcccacgatttcctttggcatttatcaagctagttatgccgccgttgtctttgcctaaacccattccgggttcgtaaccgtaccccaacataactcgggccatcattactgctgcatcggacaggcaaggctgcccagagaaggagtccacggaggaaatgcttaccacctcaaaagactggaaagcagtttctaatgactcctctgcggcttccacataaggcatagaggatgggcagctcaccaagatgtctttctcgcctgacacgatgaccagatgccccttcactacgaatctcaacttttggtggagt

SEQ ID NO: 127733 - DNA, 425 bp, Glycine max
  unsure (1)..(425): unsure at all n locations
ggtgcaaatcaaatcactcctacatcttatctctagcatgtattttctttctttacccactcctcacgtttggttttttagggaaaaacaccataactaaacgcgccgcaagggatccctatcgcaccagatccaaatctagaacgatgggtgatcaagaggagacgcaggaacagatgaaagccgacatgtcggctctgaaagaacaaatggcctccatgatggaggccatgttaggtatgaagcagctcatggagaagaacgcggccactgccgtcgctgtcagttcggctgccgaagcagacccgactctcttggcaactacgcaccatcctccctcanacatagtaggacggngaagggacacacntgggcacgatggcagccctcacctgggatacaaccgagcggcttacccttatgga

SEQ ID NO: 127734 - DNA, 463 bp, Glycine max
  unsure (1)..(463): unsure at all n locations
ttaagtcaccgcggctgcagcttatacaactaggttcaactgatgttgtttttctagttagctcgntatatggctcattctacttgattcggtcttttggatttgaggttntatttgatgggacttaagatgtttatgatataatacttcttcttttgtaatttgcctcattgttgtttgtcacgtgacacagtatagttttaatatattaacctgaaatctagttctagttctaagtttttaaaagttggctaatcttttttaacattttcttcaacctttaaccttttgcctagtcttttcccttctttgttctttaaattcttgctaaatgtcacaaaatggattgagccaactgacctgacctaaacttgtctaatgagatgtatgaattaagggttatattttgatcatgtcttaatctaagcttagcgcttattccacaaatgcccatacaatcaag

SEQ ID NO: 127735 - DNA, 451 bp, Glycine max
  unsure (1)..(451): unsure at all n locations
tgttaaagaacttagaananatcaagaacaagcttgttcgttcatcgttcacgtgtatgacatccactccacaaggtttgaagtagaggagaccttcaatcctattacgcaacgtggcggacaaaagtgggcagttaacttgaacggtcattattgttaatgcggaaggtattttgcgcttcactatccatgttcacatattattgcagcttgtggttacgtgagcctgaactactaccaatatatagatgttgtttatacaaatgggcacatcttanaagcttactctgcacaatggtggcctcttgggaatgaagcggctattcctccttctaatgatgcatggacacttatccctgacccaaccacaattcgtgcaaaaggtcggcaaaaatcaacaaggataaggaatgagatggattgggtcgaaccgtctgacacccaataaaat

SEQ ID NO: 127736 - DNA, 457 bp, Glycine max
  unsure (1)..(457): unsure at all n locations
agctngntcttgattnttcctaagttctgtttctatcttagaacaataaacttggccttctcttaattgtctttgggcttggcgaccacgatcaacaaagtactttcagcacctattatatgttgacttgaccaacgttgttattggaatgctgcgacaatctttcaacaccttattcacacattctgataggttggttgtcatgtgaccatatcatcgtccagatgtatcataagccatggtccatttttcctttgaaatgagatcaatccatctttctatggctggactcaattgatgaattttttctaagttttgatcaaacacatgcttgcaaggagtgtacgctgcatcaaattngttatcatcaaaagttgtacgtagacatgaaactcacattaaattaatgtataaaataaaccttacccaatntcttgaacatctcttttgtttcgcg

SEQ ID NO: 127737 - DNA, 296 bp, Glycine max
cgcgacctatgacactcagctcgttaattcaccctaataccgatgccatatgctgacttactgttatatgtactcattaaggcaatgtggcataccctcattatgaccggagaccattctctgatgacatgcgaccctcactttaccacttctaggtacttggcacccatcgttacgcaattcgagaaggtccgtgatatgccaacagacacaggataacagtgctgcacaatccgtgatattgcgtgagatgccgcatattctaaggatgtgttagtgcgcactccgagaagttc

SEQ ID NO: 127738 - DNA, 453 bp, Glycine max
  unsure (1)..(453): unsure at all n locations
agcttacccttatggctggcctctctacttttctccccgngccgctccggaagatttgagccaagcccctacctttgaggggcaactcccaccttatgctgactatcccctgcaagaagaggatgaaggagatacccatctaggccctctgcttcacgtcaaagatccatccccccatgaactaccccaacaaaacatagtccgccatgtctcgtcttcacccgcacccgcaaaagaatctgttcctttcatggaagataaggggaagattgaggcgcttgaagagaggttaaatgcagtcgagggcctcgacaattacccattctcggatttagcggacttatgtctcgtgcccaatatcatcatccctcccaaattcaaagtaccggactntgataagtacaaagggacaacatgcccgaaagggcatcttctgatgtattgccgaaagat

SEQ ID NO: 127739 - DNA, 446 bp, Glycine max
  unsure (1)..(446): unsure at all n locations
ngcaaagcanaagttntggatggagagcttcatatcttttattgttttattctaattaattcttatttttttaaactgggtcatggtgagtttacggtaatgttgcatctttcattgtgtgggtctagctatgatttgtccatggtcacaattatctttttcctttctgtttaggtactctgcattgtgcaagcacatgtcatcacaacttatacatatgatattcttttttctttaaccgttaacatgaattacttattctgtcgtgggtaatttcatagcttacatgatcgacatctcacgtaaataaaaattcgtgttattcctgggttggtttcttataccataggtatagtagcacgaatgcatangtatttntctacatgattcatattcagaagatgtttggataattcgatgtatttgttatttaagtctctggagtc

SEQ ID NO: 127740 - DNA, 372 bp, Glycine max
  unsure (1)..(372): unsure at all n locations
agcttcgnctcaataccttacaaacttgttttgttttttatcgngactaaaatgtatggcctaaaaacaaccaccacaatgagaagacccagttctattcactacacttcacgacacgtttttctttctttcttaaatattataataaaaaaaccattcactaaaaaagaaaaattcttgcgtacgtacatatggctaccatttacagttgttgttggtgagattgaaagtgccagagtatatcttaaaagaaaataaaatagggagaaaaaaaaactttgaaggtacggcggggtgtgaattctccaactttaaaatcgagacccttcatttttttttgacatggacaataatagagagggcctagcaatt

SEQ ID NO: 127741 - DNA, 448 bp, Glycine max
  unsure (1)..(448): unsure at all n locations
ggcaaacatcacgaatggcagttaggatagcaagatgagttgtgacatgaatgttgtttgatgcattatcatacaaacccctgaaaacctgtttaaaaatttattaattgtcaatcccttcaattgagagtagtatcaaacataggacagacaattagtatgaaactgctgaagtaatcaatttatgataatacatatggcattagacattcagcaaagttcacgaatcataaaattcccagcagaggaaagtgcaccttntgagccacagctaaagctgcctcgtctcgactaacacatctaagtatgatctcaggaacctcagaaatgacaccctatacataagaacccaaaacagatattaaaacgtggaaaagaaatatcaaggtaaaaaacatagcagcatagcaatcatattaggataacagcaagactgttgatttgaaag

SEQ ID NO: 127742 - DNA, 458 bp, Glycine max
  unsure (1)..(458): unsure at all n locations
agcttctacaaaacttgtattgctatctcttgactttaaacctcactcacttagaagaaaaaatatacttaaatgggtcatattcatatacctccccacggaatggctctggcgacctgtaaatgtgactgtgcatttgtttccttttccatatggccattcctgagcatcaatgacagaaataaagttagtttatacaggagatggagtttcaaatgtgtatgatattcacatcgtttttcttttgcatgaaatatatagatgagtggatttatttttccttttcttttggtgagaaaaaacaaaaactcttcattcatgtatctatacagagaattacttggttattgttaaaaacaagatcaataaataaatactactatattaagattgaaaagttcttaanatgagtactatttngcatgttgtctaatatattgagccagagagacaggaag

SEQ ID NO: 127743 - DNA, 482 bp, Glycine max
  unsure (1)..(482): unsure at all n locations
ccgatttaccctcgccaccgcaacccccgctttcttcaacatgtctctcgattgggagtcttcgaggattccgaggatcaactgatcaacggccaaatgcgtgtcgccacgtgatttttgcgccgcctgtgctctcctgatggccctcacgaggttggtgctcgccggcacctcgtccggcggaggggactggcagggtagcttcttcagagcctggttcaacactcgctccacggcgcgtgccgattcctcgccgccgcccgcgctgtttatcgctagcacgaagatgccgttgggatcggaaatcagcgcgtgggccaagtggatgggagtcaattgcgcgtggcctgaactcatcgcgagctcgtgggccgacgcaagagcttcattagtcttgtgagtaaacttctcaggattcatttcanacctgcacgataacaatgatatatgagtcatgcaaaacaacaataataacactaagc

SEQ ID NO: 127744 - DNA, 460 bp, Glycine max
  unsure (1)..(460): unsure at all n locations
agctnggactgtgctagggagaaaaacaaatgttctagtgttccaagagccatttctagggcaaaattgggtgttgaagagtcaaattttgattcggtggaatnttaggtgtaaatccagtttgagcaagtttagatggatgttatggactggtgtgaggtgagagtttgcttcaaatttacctcattctcaatttcacttctcaaacctagaaaacccattgaatggaggggtgttggacacctagattatgtgttgctgtgttttgaagcttggttttgggttagacatgattgatgcatgatttgggacttgtaggaagtgatttgggcaagattggatgagaggaagtgtgattttcgaaatctgcactttgtgcagatntttgctgtgaaattgtgcagcaggattttgcacaagtgcagaataatgctatgtatttactgngtgtggaaagagc

SEQ ID NO: 127745 - DNA, 446 bp, Glycine max
  unsure (1)..(446): unsure at all n locations
atcctatctccgacagccaatgggtgagtcctgtcccggtagttccgaagaagaccggccctacagtgataaaaaatgagaaggaggagctaattcctactcgggtgcagaacagttggagagtctgcattgactataggaggctgaaccaggttaccaaaaaggaccattttcccctgccattcattgactagatgcttgaacgactggcaggtaaatcccactactgtttccttgatggtttttctggttatatgcaaattactattgctcctaaggatcanganaggaccacattcacctgccccttcggcacttttgcctataggaggatgcctttcggcctgtgcaatcccncttgtaccttccagcggtgcatgattagtattttcagtgattttttagaaaatngcatagaggtggttatggatgatttcactgatatg

SEQ ID NO: 127746 - DNA, 464 bp, Glycine max
  unsure (1)..(464): unsure at all n locations
agcttcttccactaaacagggaactccacttttatgggtagctcactacttcgaccttcattntccttgagggcatttctttagtgtaataaaatttgaccctttttgatgaaaaccttttttcatagatcacaatttagcatcttaacgaacccaaaattaaaggaaaattttatagaagaaaaggaaaaatggattaaggtgagaaatggaaatgaacaatgccacaatccctatggattgataagttgaggagaattcaccataaagaataggaattcttggataagaatttagggttctacataagaaccaagatagaacaattctcacacacttagcacagagctaaattctgatttcatgcaaatctaagtctccttcattgataaatttgtttggtagatatagttgtcctaaggcataccaagagtccctaattataatgaacttctaatgatagt

SEQ ID NO: 127747 - DNA, 383 bp, Glycine max
  unsure (1)..(383): unsure at all n locations
gacactcagctgaatgagaaggtgaaggtaaacttctgctttattgtgaccatttatggtacctggagatatgtcgcggnggtcatgagaccttgtggacgtcaggtggggtgctattgcccaaaaccaagcttgaccaatcccgacccaacccgggcatagtcggtcagtgagaacctgtgatgtacctaaacaggcgagctcctggcagtcaacagataaaaggaacaaagaccacaaagcacggaggcttgtggtagctggccagctgtgaaacttgattgatatgtgagatatggtctctggtaatcgattaccaagggtgggtaatcgattacaaggcttaaaaatgaagacagggggctaagatggtctcttggtat

SEQ ID NO: 127748 - DNA, 368 bp, Glycine max
  unsure (1)..(368): unsure at all n locations
agctnggacaaatcctgaccaagaggtgatctggtctttgcgatatagccattgatactagcataaggcaggtccgtcaagatagaaggaagctacctgtacgtgttcctttttcgagatgttgtgataatcaaagaattgattgattttaaaaatccagaacatggcatcaattccactgaagtgagggacgtcaagcttcatatggggtggagcttgccgtggagagtgacctatagaagcgcttttgagggaagtgaggtgagagatgacttcgtcaagtttggagtggacggagctctggatggtggtgagggcgctctatttctggtttagtaatgtgcctacttcttcaatcctaatatttg

SEQ ID NO: 127749 - DNA, 476 bp, Glycine max
  unsure (1)..(476): unsure at all n locations
actcagcttcttatgaatctttanacaacctatcttagntaatttcatgtagttatatgatcaaatgtatggcataacctaccacataaattaaaacagcttgttgaataagaacttaattaagctttttacctaaacacaccctaaatagactaaattaaagtaagtagttgttgaaattaagttttcacctttccccacaatccagatgctttatcataccaataggatcctggcttcagttgttntggtgggtttcgacagttgaggagcaatttaagctgttccctattcagagggtgcaagttgacacaaacaagctccggtggtatttgattggcttcacaagacctttcatcatccatgacttgagtcacagtcaactcagacagcaacaatttcatcatacgagaacacttccncagctggcttctatttctctcataaattctgtagccaatgcaagtcacacattt

SEQ ID NO: 127750 - DNA, 454 bp, Glycine max
  unsure (1)..(454): unsure at all n locations
agcttgcattgttaatagtagnatgtgtgactcnttgtttttctcactgaaattcatttgtctcatcatattgggtgctaagatattgtttacttttggggtaggccttggccagattagcagaagaaatagctcaatgtggtattccagaaggttcaaggaagatcaatggaaagtacattcattctcaccttgttgctagattagaaggtatagtggtatttgctctgactactactcatgattagagccaaccctatatgattaacaagtgtacttcctagttctggataactgtgttaatgtttgtgtggaatatgctaataaagcttctcagcaatggccttttcttgccaactttgccccatttgtgtccttatcagtgcaaatgtgttgtttctgcctacatagctgtnaatgaacaactgaaggaacaaataaaggatgttgatgc

SEQ ID NO: 127751 - DNA, 415 bp, Glycine max
  unsure (1)..(415): unsure at all n locations
aaaaatgagatgaatttttaattggttggtanggaaaaaatggttttccttcctcctaattgaatgggaatgggagaaaaaaaaacttatattaccgaagaatatccctaattaaaatgaatttttttcagtagaatgaataaagatataaagatggttgtggttcttttggaaaaaatatttggttattcctggattcataattagaataataaataagtaaaaatatattgtcccactctcttanaactttntttatggtatctctcttntctctttggagtgggatttcacaatactcttgccactagcaaaaaaaaaatgtttccataacttcaaattatcatccctctaaattattttatattgaccaaatatttttaactacatatttcattcattctatntttcttta

SEQ ID NO: 127752 - DNA, 457 bp, Glycine max
agccccgacaacctcagatatcgacgctctatatgctgatgacccactcaaacaatcacaaacaagctgatcttaactatatgcaatgatcaatgaaaataaaaagaaccgggttgcctactaggtagcgctcgtttaacgccattagctcgacgcatattacctcatgggtctggaacaagcttggttctggccatcaaaaccaactcattcataagttcctcaacctttaaacagacaattcggccaagaaagtgcttctctgaatcaaacagatcaaacttgatcctctgatcatctatgccagcttccagtgtaccctttctaatatacaccacacaatcggcggttaacatgaagggatggcccaaaaacaacggaaatcaagcgtcctcttcaatatccattacaacataatctacagagaacgtagaatgctgcacctaaccagaacatc

SEQ ID NO: 127753 - DNA, 485 bp, Glycine max
  unsure (1)..(485): unsure at all n locations
ctttagatgccttcaatgaaaagcattatatgatctaaagttatctcaagcctataactctctcaagggaaagatgagatggcatgtggataaaattataagttgtcagaaatagttatctagtttgaaattaaaagataaggaacttgaaaaagcactagaaaacttttcttgcaatgaaaaaactatctccacatattcccctttccaatgtgaaatgtgtaaggaacctaaatccaaaaatgaatatttgctaaaaaccttgtccagattcacaatgggaagagataatctagatgcacttctttcacaacaaaagttcatgtttaaaaaggaaagactatgctatacttttggcaagaaaacctttatcacattgaggggttaattntaattgaatcttatagaacaaactggtaaacacttganaagaatctattcaaacccncttctagagtctcggttattccaacattggatactct

SEQ ID NO: 127754 - DNA, 378 bp, Glycine max
caaaccctcaacgaaaaagggacgaccactccaatgcgagatatgcctaacccaagagaaccctgtaaggcgcatagtgacgcaccaaagatgggcttaggaggagtgttgatgcaaaaaggccaagaaacggcctatgctccaagacaactcaagactcaagagaggaaagatcccacccacgagctggagatgcaactgcactttctgccccaaagaagtggaggcatcacctgggaggctcccagtcagaggcggcaagtgaacataagagcctaaagaactcgttcagccagatagagctgaacacgcatcaaaggagatggcgatatcctcttcacgattatgatattgagcttagccgccaacacgacaaag

SEQ ID NO: 127755 - DNA, 458 bp, Glycine max
  unsure (1)..(458): unsure at all n locations
ctcagctttacacttggtaacttggaaatacggctggaggcatttatcttaggtgcatgtcatacttgcgaatccctctaagcacctcttccaagtctgccacatgttgggccatgttatgagacttgacgaccatgtcatccatgtagacttcaatatttcatcctatctattgtttgaagacctgatccataagcctttggtgtgtagcccttctgttcttctgtctgaaaggcacgaccctgtaacaaaaatgggtgtctttagtgatgaaggcggttntttcctcacctagagggtgcattctgatttggttgtactctgaacaaatgtctaggaagctcaataattggaacccgaatgcaccatccanaggcctatctgaagtgggcaaagcatagtccttggggcatactctattgaggttggtatagttagtgcacatacgccacttcgca

SEQ ID NO: 127756 - DNA, 447 bp, Glycine max
  unsure (1)..(447): unsure at all n locations
agctngcgtggatattagagataaatatttttttttttgtcacacgctacgcaaagattagtgtagttggttacaagttaattattaccataggttggtacaaattaggcacaagtgtaactatataagacctaagggcttcatataaaaattgatttgctcattttgaacattatcgaaagtaatattcaacctgttttttctcttgcttctatctctctaccttaaattttattaaacaaaaaaacaaagagagtgagcactcagtaatgcggcattgcaaaccacggtttgtgcatctccttagcagctattagtcacaaaggaaaaacaagcgcaaggagagcttgactctgcttgattgagtttcaattcaattnttagcaggcatcctttattaataaacattctttaagaatggtgatgactgatatgactcacgtgcct

SEQ ID NO: 127757 - DNA, 439 bp, Glycine max
  unsure (1)..(439): unsure at all n locations
gacactatgaaactcagcttaggacttgganaaacctattggagaaanacaacgagcgttctataacactcatcaccaaagacgggtctagaaagtataaaatgcatgacgagcgtcgacaccatgctaacatcgcttctgctaaacaaacattctgaactaaaaagtgacgacattcactgttaaggattatcatttctgtgcgcgctgttcaccattttaaaattatattcaaatatcattgatattagttatgtatatgataaactattggcaatatgtgcataccaagaattgatgtggatattgaattgatggatttgacaataattttcttaaatcatattatgaggaaatataactcaaatgaataagaaataacagtgaaactaccatataggaagtgtgactatttttggagtgagataattagaacata

SEQ ID NO: 127758 - DNA, 415 bp, Glycine max
  unsure (1)..(415): unsure at all n locations
agctttngtattttttgtctcttgattttcttcttattttataatngcattctttgtttatatctccactattttctttcttttctctcctttcatgatgtcctctcttttatcactttttcttttctctcttgttctcttttcactatcatttttatttgatcctcacaaaccttacctggagaaaaagggttaagggtaacctttctccctctatgtacaaatgaaaatttgtttgtgacaccattatggacgacatccctatcacactgccaaagtcttccaagtaagagatggctagcctccatagggacaacatcaaacagtatctcatcgacatantttccaatggagaagcatattaaaacttgcctatctataactagctccctattctcactcaaccattgtagtt

SEQ ID NO: 127759 - DNA, 478 bp, Glycine max
ttagagaacggtaaggggtttataattatataaagaaagtatattagttgtaataaaataatgctttgaatatatatatatatatatatatatatatatatatatatatttgatttattcatttgataggaaataaaataaaattcctttgtataagataataaaaataaataaatagagtcactaataagttgtgagtaccctagatataaataacgatatgttaggaggtcagttttcagaccgacgatatctcctatttccctcgtttgtgtttttctctcttctcctctcaaaaccctctctgtttcctgtagaccaccaaacatgtctcggaaagatcatcgtagaatttaagcaccaagtttgcaaccaagttccgagcattcacaccgttggaaatattaaaatcatatcggagttgagagaaatacactttgcatcatagcctcttcttttccggtagaaatccaaaact

SEQ ID NO: 127760 - DNA, 457 bp, Glycine max
  unsure (1)..(457): unsure at all n locations
agctngtagaattatggcgtattcatcacatgtggtactaggnggcggncgggcgatggtgcacaacatgctntccacatccacaatgcgcgcataaacccaccatcccctgttgcccacctccatctgagctcacgtactcccacgtagcccatatcctcgtttctctcaacaccgggtccccatcaatcctctcaagcttccacaacatccaagcaaaacaacattcaaacagcacaagctatcacagccaagcaaaacagagcaaaggcagaaaactctgctcaacacatcaaccaaaatcacagcttttctcacttaaagaccccagtaacaattccttcgatccaattcgttaaccgttggatcgactccaaaattttactggaagtctatagtgtataagcctacattgtgagcgttgggatctactagcanacatccagaactcattctg

SEQ ID NO: 127761 - DNA, 393 bp, Glycine max
  unsure (1)..(393): unsure at all n locations
aaactcagctgtgggaacgacttcatgacaatagaatctcattgacggacgggaatccgggggtgctactatggtaagggagttattataaatttaccattntacaccatgttaggataaggaacctagctatgagattctgcctgccttgtgcatgctgattttcttcaagaaaattactttaactaatgggatgcgaatatatttggatgaagatttgtctggctgttgaggctggcgtgagaaatgatattgtggttcgttaattgtgttgagttctatcaggatttaatgattggatgaaatatgatatatgatttgattgaatacattgtaataagacatgcaacatgaatgtatattgtaattggaaataaatatgttgtgtgttgt

SEQ ID NO: 127762 - DNA, 453 bp, Glycine max
  unsure (1)..(453): unsure at all n locations
agcttaaagaaactctcaactatttgttttatcctcaaggcctagactccaaaagagtccgtttgggcctctccttcctgattccggtccaacccagagagcattttaacacgcaaaatttatctatgaattgtacaagacagaattcctcaattgttctcaaaataattatatctcgtcgcacctcacagtgattaaactcgtcgggttcccacagtggttcccatcacaatactcgtcgcatattaactcgtcgccctaaaaggtcttacactcgtatgatttgacggttcatagctcacaactcaatgcatacatctcaatacacatgtatcttaaaatncaacatatactcaatttatcacatacactcaatttcaatgttataatttcaatataaccaattatcacactaatctaataatatntgttcaacacacaaacaaataatac

SEQ ID NO: 127763 - DNA, 385 bp, Glycine max
tgtagccattagaagttaatgagcatgtgtttagaagtattatttacaaaggtaggcagcttgtcagattgattgtgaaggaatgcattaaccatatcatggtgagagtgtgatccttaaattttgagagaaatgactatcatttagtactgatttttgcgtgaatctctgagggagtctgttagtgatgtaagctccattggagcttctaggcctatgatattcttcatcaatggatttctttgcttcttggaagatgaatggcagcagaatggggaatgaagagagagacgagacaccacatcaaggagaagatgagtctagaagaagctcacaaccatacgaggccatggataagagctcggaggaagaacgagatcaatga

SEQ ID NO: 127764 - DNA, 456 bp, Glycine max
  unsure (1)..(456): unsure at all n locations
agctntctacgttttctggtttccaaacctttctctttacataaaacaaaagggtgctatatctttttattctcttctccctttgccaaaaagaattcgccaaggactaaccgcctgaattctttttgtgtctctcttctcccttttccaaaagaacaaaggactaaccggctgaattcttttgtgtctcccttctcccttttcaaagaattcaaaacgacgcagcctgagaattcttttgattcttccctttcccttaaacaaaatatttcaaaggactaaccgcctgagaactttgtcttaacacattggagggtacatcctttgtggtacaagtagagggtacatctacttgcgttgttgtaactgagaacaagagagggtacatctcttatggatcagttcaagtggagggtacatccacttggttgttcaaagagaacaagggagggtaca

SEQ ID NO: 127765 - DNA, 413 bp, Glycine max
  unsure (1)..(413): unsure at all n locations
ctcagctaataaaatcttgtatttgcgggtgtcatggattcaaaagattttttttgcttgtttgaaggtggagtttggtagacactagacgacccaaacatctcttaaggttttgatgaaaacaaatatattaatttgtgctaaccattttgttgcatgtaagtcaacaagtttgatgactggaagcaacaccaggtaagacttgtccatgaatggactttttgtctattagaagcatgaagtactcgtccagtccatccaaacactggtggaatatgcacatttatttgaatttaccagcttatgccattntatatgattctatttaaaaggaacatatctgngaatctatcttatatttccttttatatctctaatgatcatattgagttatgaatgacaattatggaaag

SEQ ID NO: 127766 - DNA, 463 bp, Glycine max
  unsure (1)..(463): unsure at all n locations
agctntaacctcatcatctctcatagtctttatatttgggagccaatccaatccttgtgtccggactctcagccacttatgatagccgccgatgctcccattactgcttcccctaagctctctgtcctttcttcacaccgcatcacatgccttgtgaactccttagagtaccctcgcattggggtcactgaaaccccgtgtgatgaaaggcgtgatgctttcgcctgatggcactcctctcatggggtagccaagctgtcttatggcgaggacgggattataattaatacaaccccttgttccatcaagggaacatttggacatccttcgcatgaagatagaatcctgattcttccttccttctagcgaggggaacgaataacagatgcccctccatgctagccaagagttggtcccaattcgcctttcttttttcgacgcacgagcggtgaccttgtagcgg

SEQ ID NO: 127767 - DNA, 451 bp, Glycine max
  unsure (1)..(451): unsure at all n locations
actcaagctntcttaagttntctgctnttccaaaccttgaaaacaaaacttgtgctatcattcttntcattcccttctccctttgccaaaaagaattcgccaaggactaatcgcctggattctttttgtgtctctcttctccctttttccaaaaggacaaaggactaaccgcctgaattcttttatgtctcccttctcccttgtcaaagaattcanaatgacacagtctgagaattcttttgattcttccctttcccataaacaaaagatttcaaaggactaaccgcctaagaattattttgtttcccccttcacaaagtttcgaaggactaaccgcctgagaactttgtcttaacacattggaggatacatcctttgtggtaccaagtgagggtacatctacttgggttgttctgatagagaacaagagagggtacatctcttgtggatc

SEQ ID NO: 127768 - DNA, 461 bp, Glycine max
  unsure (1)..(461): unsure at all n locations
agctntgaagaaagcaaacaattcatttgttgattgatggcctcgttgatcacatggtgattgataaactcttgactcgatttatataacttgggaaatttctcaatggtgagcaactccaaccttgcaatgtcttgcaatatgggaacccaatacccaatgaaattggcagcaatgtctaccaatcctatgctctgtcctccaaagatttcttgtctttcaatacttcctgcaggattttcaatgcttccaaggcttcctccactgctttctcacgcccattctcatcactccagctagcattccatataataggcaagatctaaaaccaaaaaagacaacttanaaactctaccctatagtagtacactgctagcaaataatctctgaacaacaaatagaagaagagaacccccaattccgatctctaacactatcattcactttgttatacaaatcat

SEQ ID NO: 127769 - DNA, 321 bp, Glycine max
  unsure (1)..(321): unsure at all n locations
ctcagcttctcaggaggtgagcttagttattagaggggtgtgtgtatttaatctctatcttctcaaggaagttntctcaaagaagcttctcaaggaagtttctcaagaaagcttctcaaggaagctacctagtctataaatagaaacatgtgtaacacttgttgtactttgatgaatgagagtcttgtgagacataactcaaagttcaacttctctccctttttcttccttcaatttcatgctcccccctctctctttctctccctctttcttttcctccattgaagcatcctctccaagcttcttatccaaggctcatct

SEQ ID NO: 127770 - DNA, 446 bp, Glycine max
  unsure (1)..(446): unsure at all n locations
agctngnggaataaagcctgaacaagtatttatctttttacctgttttgcagtccattctcctgcagagaatgggattttcaaagtcttaacatagtgttattgcaagcataatgatgccagcttttatcgcctttcttgctgaaaatattgactttaaaaactatcctgcttcaggtggaagtgactgatgctgctcttcttgccctaattgaaaattactgccgagaatcaggggtcaggaatcttcaaaagcacatagagaaaatttaccgaaaggtctgttaaaagtttcagttactaacacagtgaaaaggctatatggtgtatatggttgaaaagagaaccactcatgatttgttgttttcaactagtttggctgcattagttcactactaattcactatatctgaaattgaatatatagtgactgtgtcagtacctgtg

SEQ ID NO: 127771 - DNA, 342 bp, Glycine max
  unsure (1)..(342): unsure at all n locations
gtgaggatggaaatgggccgccttggcttatcgagacagttacttggacctgctcgctgccccactggcgagaagttgtctcgctgctcccacgggtaagaaggcttccacgtaagcaatgccgccattgctttctgcgagacaccttcaacgcatgcacaggccatagttctgaagatggcaatgtaggcttgtaatgtttacggttaggagttgcagcgctctganatttgtatgttatatatagatagcataatcttaaataaatgagttgataaatcaatattatttgagttaattattcttagttagaacgtatatatattatttggtagatgtagc

SEQ ID NO: 127772 - DNA, 415 bp, Glycine max
  unsure (1)..(415): unsure at all n locations
agcttcanaccacagcaacacagaatctatgttgttaattcccctcaatnnaatggattttctaggcttgagaagtgaaatttacaatgaggtaaatttgaagcaaactctcacctcacacaagtccataacatcaatctaaacttgctcaaactggatttacacctaaaattccatcgaatcaaaatatgactcctcaacacccaattttgccctagaaatggctcttggttcactttgggcatttgtttttctctctagcacagcctaacctttctcataagtcctaaatggcatttcaagctaggattaactcattttaacctccatttactacaaaatccagatttagcctttcaattctcaaagcctcactctttttccaatcataacaccacattctcactttctaacc

SEQ ID NO: 127773 - DNA, 447 bp, Glycine max
gcttctcggctcctgctgggaacgcctctagctcaacacccgttcagcctaaggctcctccccagagggaagctccccaagttccaactccgaacgcgactcgaccagccggtaattccaacacgacaaggaacttccctccgagaccgttgccggaattcaccccgctcccaatgacgtacgaagatcttctaccatccctcatcgccaatcatttggccgtggtaactcccagaagggtcttcgaaccccctttcccgaagtggtatgaccctaatgcaacttgcaagtaccatgggggtgccccggggcattccatcgaaaaatgcatggcccttaaatacaagggccaacatctaatggatgccggatggctgactttccaagaggatcggcccaatgtgaggaccaacccgctcgccaatcatggaggggggagctgtaatg

SEQ ID NO: 127774 - DNA, 452 bp, Glycine max
  unsure (1)..(452): unsure at all n locations
agctntcacctttggtcctcctcaatttgtttgttgaganaacatgctctattttcatctcccactccaagtaggcctccggatcaacaccatcaattcggttttgtctaggaacaccatcattccctcttctcctcctttcttcttcattatgatctctattctccatttgatccaacctctcatggagcgcatcatctcgttgtttcattaacctctccaaatgttgcatcaaagcttgcatttggaattgcgaaagccccactccatcattaggattagtacctgacatctcaaacaaacaaatcaaacgtaacaagacaattatagttgctgtttgaatacctcacccactcaagtgtatcacacaattatggcttttctctaatgaaacactcttgccgtttaccactctaattccccttgagttcttaggcaattcaagagattat

SEQ ID NO: 127775 - DNA, 420 bp, Glycine max
  unsure (1)..(420): unsure at all n locations
ctttgtttcaatttcgagcgtctcggtatattacgagacttaatctgatattggagnnataagttattgtggtttgcatttgctacgagcttttggtttcaattacgggcgtctcgatatattatgggactcaatcggacatccatgtaaaaatntattgttgtttgaatttgcaaagagcttccgttttcaattacgagcgtctcgatatattacgagagtcaatcgaatatcgaagttaaaagttattgtggtttgcatttgctacgagcttctgttttcaattacgggtgtctcgatatattatgggactcaatcggacattcgtgtaaaaatntattggtgtttngaattgctacgagcttccgtttcaattatgagcgtctcgatatactataggacacaatcngacaaccgagt

SEQ ID NO: 127776 - DNA, 457 bp, Glycine max
  unsure (1)..(457): unsure at all n locations
agcttaactattaagtttaacctcacttttattgttttatttaacactttctcacaccataggaagagactaaaagatgaaaattggctaaaaatacttagtgctaacaaaattaacaagtgacttgtttttcccattgaaccttcttcatgggatctctaatcacaaaggttgggctaccatcattngtttgttttcaagttgattaagtctcattccccttggtgtttctaacgataatttctttcctaggggtttaagtcaaggattggccgaatccattaatgacttcacataatcaaaacacttatatcttttaaacaattatttcaccaaaatatctctttacttttaattacaagatgtactcttattgttgcctgttagcattcacaacatataaaatatgcacttatccataaaggaatatgtctgtaaatttcttaactaatcaatc

SEQ ID NO: 127777 - DNA, 474 bp, Glycine max
  unsure (1)..(474): unsure at all n locations
ntataacgataaaaatagtagaaaattatcttanaattatattttacccttaaatgaaatgaattttcgggtttaacaaattagttcaataaaaacatactgatatttaggtacaataaaaaattacgaacatttgcatccaataatggtaacttatcaacatttttggtccaatggaacgtactgatatttaggtcaaaaaaaaattattgacatttttgtccaacaaaaaattactgatatttacgtttaaaaatggcatcttactgacatttttgtccaatctaatcagcatgaccacgttgacaatcatttcagtgacaaattcgtccttctatgccacgtagattattttattaacggtgacagacggaagttaacagcaaaatatatntgtcatactttttaaactttcggggaactaaatttgtattntcatcttttagtgacgcatttgtcagcggattacatatt

SEQ ID NO: 127778 - DNA, 460 bp, Glycine max
agcttagttaatccctcttctcctatgtgtctttattgtaaacttactaaaataggctcaaatctcttcacaaattccactttatacaagtccgtagtgggtgctttacaagacttgaccatcactagacctgagatcagttactctatgaataaggtttgccaatttatggaaaatcctttaaagtcacacttaactacaatgaaaacaatcttaaggtacatgaaaagtacagttttgcatggtcttcatcttcaagttattgttttaggtcaaccttactctgttcaagccctttgtgatgcaaactgggcatcaaatgttgatcactgaaggtgaatttcaggttttgccatatatttgggcccttatcatatatcttggtggacctgcaagatcaagtgcaaaggcaaaatatcgtagtttggcataaactactatagaattatcctggattgag

SEQ ID NO: 127779 - DNA, 400 bp, Glycine max
  unsure (1)..(400): unsure at all n locations
tctccccttatttgctataaataggantataagtgaagaataatatgttcagccccttaggcacttctctctctttcgaatttgcttaggaaaattgtttccgtgaagaaaatccaagccgaggcgctttcgtttcgtttccgtgagaaattacgcgaagattcttgaccgntcttcaagattcatcgttcgttcttcgtttccttcagacttctacaggtaagtaccttcaaccaagcttttcaattcattatatgtacccgtcggtggccacattgtgtttcatgtattttcattctcgttttcattcactttttatacccccttttgacgtgcttaagccatttatttaagtcatttatcacttaatctagtaatagaatatatttccaccgatcgt

SEQ ID NO: 127780 - DNA, 339 bp, Glycine max
gggatccttaagtcacctgcggcatgcaagcttacagcacaagagagaacagaatcttttttttatatttaaaacaaccaagcgccaataacctatggaattaaaataagctgaatggctgtgtgtggctgaaaatatggcgaccaagggtcgaccccagcagccagcaagtaatgcacacatacggtctaccataaagcttgagcctaagatggccagtgaggctctattacaacatgcactcaagctactagagccctcttatatgattaacccaaagcatattttaggtcaatcaactttacaagggatagagcccttgttagacaaactaaacac

SEQ ID NO: 127781 - DNA, 334 bp, Glycine max
  unsure (1)..(334): unsure at all n locations
gacctatgaaactcagcttacagggccggaggaaccttgtttgaaccgatttctttctcnggctcatgcacggattacctgctgcttgatgacatatgtatttatgagagtggagagaacttcaggactttgaatgagtttattcgaatcactaagcacctgaaaagttagatatatctattcttgaaattatatgttattctgtttagatgttgctttttgacttgtccaataccgacatattgctgctgtgtctcgtctcatactatgtacgaaagcttgtcgacattaacaactaatgatatctgctagagcattcactaagtgcgtgtgg

SEQ ID NO: 127782 - DNA, 438 bp, Glycine max
  unsure (1)..(438): unsure at all n locations
agcttatgagatatcttagggtatcactccattatttttaatgctaattacgggggntaaaaatatatatatggctccattgtagcatagatcccaatatattccttactatttgnttaaatttattttaaattacaaatttaataaagcttatcttttatttaatgaaattcactcgtaaatctataatttataattaagatataaaagtgtctcttaaaaaacgtgttggagtactttgataagattcttctccctaaagattattcgagtgtaaaggtgacttttaatcatactccatangcgagggaaagatttacttatatacttgattgttgttaagtaattacaactattcaactggccatagaagatctgtttaaaaaagtttgctcaccaagcacgtctcattagtgaacttaattcattacccccagt

SEQ ID NO: 127783 - DNA, 349 bp, Glycine max
  unsure (1)..(349): unsure at all n locations
gctgagttgntctttggagggtgtttatatatatgctccctcaccaggctaatttgcttaagagacatgtggctctacaggatattatgtgtcctctaagtggaaatcaccaggaggaggctgggcaccttttcttccattgcagaatgactgtatgggtgtggtgggaatccatgaactggacccggactttgggagctttcttagatgatcctgctgctcattntatccaattcagtgatgggtttggggcatataggaatcacaataggcgctgtatttggtggattgctttaactagtactatttggcagcataggaattccctactggttaagggcaccccatt

SEQ ID NO: 127784 - DNA, 455 bp, Glycine max
  unsure (1)..(455): unsure at all n locations
agcttgtaggattatggngtattttcacatgtggtactangnggnggncgggagatggtgcaaaacaattctccacatccacaaatcacgtataaacccaccatcccctgttgcccacctccaactgagctcacgtactctcacgtagcccttatcctcgttcctctcaatgccgggtccccatcaatcctcccaagcttcgacaacatccaagtaattcaacatccaatcatcacaaactaacacagccaagaaaacagggcaaaggcaaaaaactctgcccaaaacacaaaccaatatcacagtttttcacattcaaataccccagtaacattctcttcattcctattcgttaaccgttggatcgactcgaaaattntactggaagtctctagtacacaattctacattntgaaccgtgggatctgctagcaaatgtccagaaccccatatgt

SEQ ID NO: 127785 - DNA, 370 bp, Glycine max
ccgccccctctctccctcgcgggagactctctctctctctcctctctctcttctattttttcggttttagttttaggctctcttctctttctcttttattttcggttttttcaattccaggtcagacttttagttttatcaataaaatttcattctctatttggataatggaaggctaagtccgcagcgttgttttcccttgaggatcaagcacagttctctttgagggtctattattactgttaaattctggttagtttttcctcttcactaattactttggaattggtgcttttaattcatgcatgcttagtgctcgattaattgtctctacgcttaatttacgttcatgcttaatgatcggttatga

SEQ ID NO: 127786 - DNA, 445 bp, Glycine max
  unsure (1)..(445): unsure at all n locations
agcttctcccctattttgctatatttttgttttataagtgaagagaaaaagggttcagccttcttggcacttctctctctctcgaaattgcttaggaaaattgtttccgtgaagaaaatccaagccgagacgcttccgtaacgtttccgtgagtaattacgagaagattctcgaccgttcttcaagattcatcgttcgttcttcgttttcttcagtcttcaacgggtaagtacctcaaaccgagcttttcaattcattctatgtacccgtggtggtccacattttgtttcatgtanttttattctcgttttcatttgctttttatacccccttttgacgtgcttaagccatttatntaagtcatttctcgcttaatctaaaaataaaataaaattccaccgatgcgttgaattgatcatccgttatttctgttaaatgattctga

SEQ ID NO: 127787 - DNA, 455 bp, Glycine max
  unsure (1)..(455): unsure at all n locations
actataaatctcagctggctttggagttgttttagccttattttactttagttattagncaattcacttaagaaagaagaatcccaaagagaacgtccgattgattnttttgttttattttactaaaaagattttttattattatattattattttacctcttttttggtttccgacgtggttacggcacgaccgaacggtcggatttcattttaacagatattacaattcaaatgatcggggtggaaatttattttatttttttattaggagagaaaatgacttatataaatgactaaagcacgtcaaaagggggtacggaaaataaatgaaatgaatataaaagtacgcgaaataaatggggaccaccaagggtacatagaatgaattaaaaagttcgatttcgggaacttaccggttgaagaccgaagaacgacaaagaacgagcaaaagat

SEQ ID NO: 127788 - DNA, 479 bp, Glycine max
  unsure (1)..(479): unsure at all n locations
ttagagcacctgcggcatgcaagcttctgccctttcctccaagcgcttccttggtatccctaccaccccattcctgttttgcttcactcggtctaactcttgtgccgagatcttgaccactntttctactcttgccatggaggggtagaatccggaaaaaaaagatatggcttccttcctcctagagagcatcccaagatcccttcaaactcttctatgggttggtactaactagaagtccccaaacgtgaagcatctgagcgactagtcgtagtactgagcgagggatgcgatggcttcaacagactcttctatcatggccaaatcccaaattttcccatattccttgcagaaggcttgatgttgaacttgatccatccactgccctagctctcgcaagttggctagttctagactcttgactntgacctgatagaacctttnttttaaaaaagaaagcgcttggtttgaccccatgt

SEQ ID NO: 127789 - DNA, 479 bp, Glycine max
  unsure (1)..(479): unsure at all n locations
actcagcttcttaggaatcttcttaaggaagattctcaaggaggggagcttagttatgatatgggtgggtgtagctaagctctagcttctcaaggaagttntctcanagaagcttctcaaggaagtattctcaagaaagcttctcaaggaagttttctcaagaaagcttctcaaggaagctacctagtctataaatagaagcatgtgtatcacttgttgtaactttgatgaatgagagtcttgtgagacatacttcaaagttccacttctctccctcttttattccttcaatttcgtgttcccccctctctctttctctccctctttcttttcctccattgaatcatccttccaagcttcttatccaaggctcatcttggtggtgaagctccttcttccatggcttattccctagtggatggcgcctnctctcacctcttctcctttgtcttccgctacatctccatggtggaaaatca

SEQ ID NO: 127790 - DNA, 462 bp, Glycine max
  unsure (1)..(462): unsure at all n locations
agctntgatggtgtcgagaagaaatcacatgtttgtcatcatcaaaaaaggggagaatatgaatgtatgtatacatgattntgatgatgtcaaaagaagaatcaaacaaggctcatttgcttcaagattaatacaagaatgtttcaataaacaaagccttgattcaagatttcttcaagatcaaggcttgcctcaaaacgaaaggtttcaagtcatccaaggcacatgtaatcgattaccaatacatgtaatcgattaccaaggcacatgtaatcgattaccaatacaagtaattgattaccaatggtttgaaagtgtgtaatcgattacacatcatatgtaatcgattaccagagactctaaacgttgggaattcaaattttaaatgaagagtcacaattgtttaagaaaaataactatgtaatcgattacactaatgctgtaatcgattaccagagagga

SEQ ID NO: 127791 - DNA, 457 bp, Glycine max
  unsure (1)..(457): unsure at all n locations
actagtacaccacatggagatgtcatcggttataggatgttattagactcttgacaactgaacaggtaataaataaactatgagttacataaaaataatgttgagttttgtgtttttaataattaattaattatttattttgtattatttcagttcttgtggaatccatgtctccactttttggatgttntggagtcgacaactttcatagcatcctccatatggacaacatgtacccctctaatttgtttctcgatagtagaatgacaccaagaagataaagttaaacttcaattctgcctcggacaagacataccagatcccccaagaaacatggacaaacttcacaaaatcgatatgcgaggtcgaactgacacaaattgggcagaaaaagttgcaaagtggataaggtattgacaacaacgtcaatcaatgaatttatagggaaacctattat

SEQ ID NO: 127792 - DNA, 378 bp, Glycine max
  unsure (1)..(378): unsure at all n locations
tgtcgacatagtatgcgcctgtatcagactcncgngnctgtgctctaccttatgaatanctccactgaataccgggcgacgagcgatgaccatctgagattctcgagagcatacgctgtccaatctcgagagactcgatatattatgcgcctgaatttgacttccgtgtgacatgtcatgaacagttgaatctgtcgagagcatccgctgttggacattcagcgtgtcgatatattacgcgcctgaatcagacatcctacgcgacaagtgatggccatatgaatcttttgagagcactctgtgacaatttctatcgatgcgaatagtatgcgcgtgaatagacttccgtgtgacagtgatgaacttctgaattctcga

SEQ ID NO: 127793 - DNA, 377 bp, Glycine max
gcttggagcatgaagaagatctggcgtcttactcgctctcaccctaagagagagatatgtattgactgaggcatgctaacctctctcttttcctatggaaatcatgcatcatgaggcatacattagaagattgcttgtcaagtcataaactccctcagtgcataaatgggggctattttaagcgatcatcaggctgatcgtcatcgattacacacgtgtttgtagcttgcacagagattcgagttatggttcaatcacttactcattgactattattgatgacaaaagtcagcggagacttctgctggtctttatcgacgttatctttgattgatactagagaactgtgctcgagacttcggcttaacgtgtcccgt

SEQ ID NO: 127794 - DNA, 315 bp, Glycine max
  unsure (1)..(315): unsure at all n locations
gctcttaagtgaaagtcactctaaagaagagggttttgataatgtttatngagcctcaaccaaaggcggaatcatccacactaaaggcattaagggttttaataatgcggctaaagatctggtatgaatccactaacatgtgttttacaaagttcattttgttntacaatcagnatatttatatttaataattggttgtgattttttttatccaattatcccttttaattttttatctacccaactatccgcccccccttcccccaaattactaactacccaccattactattcataatgtgcatttcacaccct

SEQ ID NO: 127795 - DNA, 447 bp, Glycine max
  unsure (1)..(447): unsure at all n locations
ttaagtcacctgccggctgcaagcttgcggactataccttcgaccgacactccttgntttttctcggcccggatttaaagcgggttgcagtaccggctccgcttccctaaccatactggaggcggttgccgtggctttatcctctatggttttctagagttttaacatgacctccgagatggaagccatttgatcttttaaagccgatagatcggccttcatctgttcctgcacgccctcttcattatccatttttctggatcgagtgttataggggtgccttgatgtcttcttatttatgatgaaattcctaaagaaataagcatcggtgatgtatgccaccaaaacatgagtatgcaaatggatgatcggagcacttggatccaccccaacgtgtttagataacatgatgatgtcacaacttctcattttataaaaagaacaaag

SEQ ID NO: 127796 - DNA, 505 bp, Glycine max
  unsure (1)..(505): unsure at all n locations
cactcagcttgcttccacatctncccctttttgatgatgacaactttttttataagaattacacatacactntntcctagtcgatcactcttataaatgctccccgtttgtttttgaatttatgcttctcttaaaattaaattgtttactcatgtgagttcttgatttatccctatttctctccccctttggcatcaacaaaaagccaaagtgcgtatcaaacttaaagtatgcaaatatatcttaaacattcatacagtattcataaaaaaatattgaccacaacatgaagtaaaaaccatgaagtaacaatcataaacagattaacttgtaaaatccacatagtcaacatgaagtaaaaaccatgaagtaacaatcataaacagattaacttataaaatccacatagtcaaataacatacttgatcaaccaaaccatgcanataaggaaataataaattggtcaaataccatagtaatatagaaaaattatttgataagtcac

SEQ ID NO: 127797 - DNA, 474 bp, Glycine max
  unsure (1)..(474): unsure at all n locations
atcttaagtcacctgcggcatgcaagcttangaacccaaactttntagcttcattgctttataacatactcatgactaggaacccataatttggttttagaattagaaaagcatgaaaatagggacttcttgtaagaatttgggctgccccatgattggtactttgcacctaagtaacgtgggaaatgcttctcaatggtgtgtagatatatgtgtaaatataaggggcataaaattcctcgccaagtatgaataattgttttcctaaatgaatgtatgatagcgtggaatgcccttttgaatgcaaatatgtgcaggatgtaattagctttccaatatgcatataaatacatatgagtgaaacaataaaaatttgtatggtgtacttcaaatgtatgtaggtagtttgtgatagcaaatgtttatgatataaattaggtgtaaagtttgatgcaacactttgagcatgaaagt

SEQ ID NO: 127798 - DNA, 368 bp, Glycine max
  unsure (1)..(368): unsure at all n locations
tanggatggaacacttacttngtggtgatgaacaaaagcttctatctgaatcaaaaaaatgcgaanaatgatgaccctatggctgcaaactcgtcaatcccgtgggtatggcttttgaaaggggggaaaagaagtttttgaatgccaaaaccgtccccttttcgtcattcttataatttggtgcaggggtggctcgcccangcgagctcagcttgcccaggcgagctaacctgcattttttttttttgagaggaacattaaccatgtcccctccttccttttagcgtcttgcttaacttgaacttacttaagttagagttaggcattgattacttatttttaaaacaaacaaaaagtaaaagaaaact

SEQ ID NO: 127799 - DNA, 439 bp, Glycine max
  unsure (1)..(439): unsure at all n locations
agcttgcctcatagaggtccaagaatgtattttgcttgtcgaaggactagttccgctcctgagtatgacagtcaccgctttaggagcgctgtacaccagtagcgcttcgaggccatcaagggatggtcgtttcgacgggagcgacgcgtccaactcagggacgacgagtatactgatttccaggaggagatagggcaccggcggtggacatcactggttacccccatggccaagttcgatccagaaatagtccttgagttttatgccaatgcttggccaacagaggagggcgtgcgtgacatgaggtcctgngtaaggggtcagtggatcccgtttgatgccgacgctatcggccagctcctangatatncgttggtgttggaagaaagccaaaagtgtgagtatggccagaggaggaaccggcctgatgggttcgatt

SEQ ID NO: 127800 - DNA, 418 bp, Glycine max
  unsure (1)..(418): unsure at all n locations
ttggagaaccaagccaatcagaatgctatatgaaatatatatgggaatagaggtaacaatnggcggaatgacggaccgaggcagaaccgggttgagggagtaaagctcaatgttcctcccttcaaaggtagaagtgatccagatgcctacctgcaatgactacactgatgcgcagaaagtcaagctagcagcagctgaattctccgactatgcccttgtttggtggcataaataccaaagagaaatgttgagagaggaacagtgagaggtagatacatggactgagatgaaaagggtgatgagaaaaaggtatgtgcccactagctataacagaaccatgcgacagaaactccaagggctgtcccaagggaatttaaccgtggaagaatattataaagagatagaaatggcgctactg

SEQ ID NO: 127801 - DNA, 378 bp, Glycine max
  unsure (1)..(378): unsure at all n locations
atctaacccatgtctgagagacatacaagttcctagcgattctaattatgtgggccattaagtctatcatatgctgacaatagctgagaagcccatgaatctctttcggggcggagtaggtgtccgccatcgccttggccttggctaacaagcgcggaaattcttgacttccgttcaaggtaagagcaaaccgatccatccacatggttgcctcttggtgtaaagagtcaatcacccttcctctnagcctcttttccgcgtatacttaagcatactcgtccgcgatcctatgctcgtgagccgtggctagacctaactcttcttgtacttgcnatgatagctagcatattggtctccgtctcgcataaacgctgagac

SEQ ID NO: 127802 - DNA, 480 bp, Glycine max
  unsure (1)..(480): unsure at all n locations
tgtaacgttgtctagttttctttacgttgtttattaagactccagatctagntnnggcatcacgttgtctaattntctttacattgcaaatttcactgcttgcacaatttggactatttcttgggtggtttgtcaagttgacctcttataatattgtgtcccacaggccaatcaatctgcatctaggcatgatggtggtagtgatgtatgctttgggagatttcctaacacgttatagaaaaaaaagaaaaagtttataacatttattgttgcacctaattaaattattttgcttacttgtactgactagtgactcctctccatttcttattcttttattcttttggtcaattcaacttgtccttttctttaatagtgattattcgtgataacactcgaaggtcaccaaattgattattcgtgataacacaagttctgccagctaaaaagttggttttgttaatntagatatatangaat

SEQ ID NO: 127803 - DNA, 347 bp, Glycine max
agcttccatcctagaacatgactgattcgtctatctctgtcctctgattcttcgacactgacacattgataaggtatgggctcatccctcctagatccgaccatgatccccttttgaatctatgcgaacatctactgcgtgttgaatggacggcttacatagtgattctatgagcacccgtgctctatccaatatcctgaattcatcgacttcgtcgtcaacctacaacatctctcccatgatactgactatttgtccgatctctgccgagtgccatgctacgatccgcatgccacaccattgaacccatgtctacgtagtatacggccgcacgctcacgttacact

SEQ ID NO: 127804 - DNA, 402 bp, Glycine max
  unsure (1)..(402): unsure at all n locations
ntattctatgcatggctgaaccccaatattctatatcccttctttccttggagacacgcgacataccacctagtatagttggagaagtgcccacttactcgagtatgatctggtaaccaatggacatacaccacttagcactttaagcccctgctctcaaggtatgccaagagtattgagaactatgggactttatatgaatttagagacagcactacaagatagaaggaaccacatagacgattacaatcttgtatcatcaaagctgattctatgaataggcttcatcacaagtattcattacttgtgaccaagtaggattcgttaatngattcttcgatcgatgcctcgaacctggaggaacatatctcgcttgcattatatgcacaatctntcttcatg

SEQ ID NO: 127805 - DNA, 430 bp, Glycine max
  unsure (1)..(430): unsure at all n locations
agcttctacttatgtggcagggtgtttctttcttactatcgagacgccaacgcgagctctgaccactgtttttccttcccgcgatgctccttttcatgttcgcctgagtgggcttatagcctataccatacttcccacgatttccttgggttgttatcaggctagttatgccgccattgtctttgcctaaacccattccgggttcataaccgttccccaacataactctggccatcattaccgccgcatcggacaggctaggttgcccaaagagggagtccacggaggaaatgctgaccacctcataagactggaaagcgcgttctaacgattcttctgcggcttccacataatgcatggaggatgggcagatnaccaagatattcttctcttctgacacgatgaccaagtgtccctgcactacgaactt

SEQ ID NO: 127806 - DNA, 134 bp, Glycine max
tatgggaactaaagcttttattggtgtccaaatttcataataagggcatagccttggcatctattctccgtaaatgatgctttaacaaattaaagaagcattttcttttgacctgcattacttgggtttctggt

SEQ ID NO: 127807 - DNA, 435 bp, Glycine max
  unsure (1)..(435): unsure at all n locations
agcttattaagcttacgtctcttattantattttgtaaacattaaattacattaatccaattaatgagtgaaagtttgtactctgatatgaagattgaaagctttcattgggaacatcaaatttatatgatattatgaaatttatacttcatggtcaactttattttagcagatactacacttctaaaatataatattatggacctatgaatgctttatttatctaaaatttaatatgattaataatgtaatcattaatatagtattatatgatccaacaattagaattctcacatgtggtaattataaaaaactgttacattatgaaaggagtctttaaggttagtacccttcacaaagcatatgcacgtgtggaggaacagtatataaaaaatctcgagcatgaatattacacggaaacagaacgaaaacttt

SEQ ID NO: 127808 - DNA, 462 bp, Glycine max
  unsure (1)..(462): unsure at all n locations
taatatcaacacatgtttctaacattcaacagtggttggttattgagaggtacgncaatggtcattttcacttattcatagtcaaaaatcccaagatcttcaacaacacatacaaaatcttaatccatttattgattttttagtttacttaattgcccatgattataagattaaaccgagaaacaacatggcgtagagaaaataataaacagagaaaccagacactcgtaaaaagttctggtgggtgatgtcgagttatgacatacggctgtgctagccaagaaagctccatgtgatgttccttgtatagttcaaaagactattgattaatcaatgaaataaaatacgcgccacatacagttggaaccttcccacacacattatatcaatacatgaatcgatcaattagtagtattatacaaatgtgtattatattgatatattccttagcattcacataca

SEQ ID NO: 127809 - DNA, 359 bp, Glycine max
atccatcttgggcctttttcccacaactaccataaatgggagagaaatgttcatctaaagcatacaagtccctaatattatcaaatcctataacttgagctcctagggagcaaaacaatgtgtgtgtcctagagagggcgtcagctaccacatttgtggttccctttttgtatttgataacatatggaaattgctttaggtactctacccatttcgcatgcctcttgtttaagctgctttgccctctaatgtacttaagtgattaatgatcattatgaatgataaataccttggaaacaatgtattgttccccagattggacggctcttattaaggcataaagctctttatcataagtg

SEQ ID NO: 127810 - DNA, 429 bp, Glycine max
  unsure (1)..(429): unsure at all n locations
gcttatggaangnaactaaggctctcttacctagggaattaggattacgaaacttttattgactgattttaacctgagcttaaatgaagtatgtatgacacattaatgtgaaatgagagtaaagatttggtgaaatttacccgtgcaacgttttctaccaagtattttatcatctttattgctttgctntcactattacagaatatggatataacatcgattgtaatcaaaactgatgttaacataagtgcgacaacattattgtaaatgaaatgtcgttgttaactgatgttaatatctattattataaaatcaatgttgtgtgtgctatcttagcatcaatcttttataatatcgatattatgcgctctcctggtaacatttgagacctatgttgcaatgtatatttatctaaatgatgcattcttc

SEQ ID NO: 127811 - DNA, 426 bp, Glycine max
caagcttgatcattgaacagcggtgagacggtgttctgtctctctttgattcctacgccaagtttcacagtgagaatgttcatatacctgctacggtcttcttcacattgttctctattggagtagcgtctataccctagagacatgcacaacatatgctacgggaatcatcatcatttgtatcacgatatagaaaacgagatacatacacgaatgaactgaaattctgcttcacttatcgatagtagggtacatgtcatcataaatgcgttacccacagcacattattgtaagctttggaatagtttattgagctataccaaggatagtaacttgcctccgctttcacgtttgagctcaacagtgatggtaaaactagaggagggtggttctgattcgattatctcatcggaaatgcaccttctc

SEQ ID NO: 127812 - DNA, 247 bp, Glycine max
  unsure (1)..(247): unsure at all n locations
caaagatctgacaatcgacaagttgttggctactcacactcggattctgcaggccgtgttgactctcgccngccgagatctggatacatatacataacggctcatggagcactatcttggagaagtgaataaccatcgttatgtggtacgtctaccatcgaggctgagattatttcattattggaagctgcagcacagggggtctggttacagagcctcatggccggtctacgagcgatagaatcta

SEQ ID NO: 127813 - DNA, 398 bp, Glycine max
agcttgagatgaggaagtgttgaagggtgaatctttctgcttttattgttgaccacagagtggtacctggagatatgtcgcgggggtcaggagaccttggggacgtcaggtggggtgctattgcccaaaaccaagcttgaccaatcccgacccaacccgggcatagtcggtcagtgagaacctgtgatgtacctaagcaggcgagctcctggcagtcaacagataaaaggaaaacaagaccacaaagcaaggaggcttgtggtggctggccagctgtgaattttgtgtaatatgtgagatatggcctctggtaatcgattaccaagggtgggtaatcgattacaaggcttaaaaatgaagacaggaggctaagatggtctctggtaatcgattaccac

SEQ ID NO: 127814 - DNA, 272 bp, Glycine max
atttcttttgttcattgatccctattctataatattggtctgtttaactaaccctgtagatattaatttcacaatggaagtaaaggccattagaaatctagttgcctaattttttataattagttaatggacaattgtactaggatactctagttgataaattcataacccttgccgatagcaatgcggggggtggatccggagagctcgggcttgcgattccactggaggagggcagaggggggtttgggttttttgggggttagggtttt

SEQ ID NO: 127815 - DNA, 254 bp, Glycine max
gatcctctgagcgacctgcggcatggcaagcttgcgagtaacgggcctggaagacggtactctggcggcatcctgtcgcgggagaaattcccccggatgccttcattaactttgccgaatcgcaaaagatgattgtgccgctgactcagcacctgtttgagttaattgcccgcgatgccgcagaattagaaaaagtgctgccggtaggcgtcaaatttggtattaacattgcgccggaccatctgcacagcgaa

SEQ ID NO: 127816 - DNA, 232 bp, Glycine max
  unsure (1)..(232): unsure at all n locations
gctntcgctgtgcagatggtccggcgcaatgttaataccaaatttgattctctattgcagcancttttctaagtctgcggcatcgcgggcaattaactcanacaggtgctgagtcagcggcacaatcatcttttgcgattcggcaaagttaatgaaggcatccgtgaggaattctcccgcgacaggatgccgccagcgtagcagtacttncaggcccgttactcgcanagct

SEQ ID NO: 127817 - DNA, 434 bp, Glycine max
  unsure (1)..(434): unsure at all n locations
ttaagtcacctgccgctgcaagctttcctagttgctctgtagggtttttttctttgaagaagtggaaagattgtagcctccattcaatgccaatatgcgagactaatttctctatgcaagaccattatttcgcacatcccaacggcgagactctgaaaattgagttatgtaggtggtgtccaaatttctagacgatactatggttaacaagaccggaatcgtagttttattgggacaagtttgggtgtatgcaagacaagagaaaacttaatacgagggatatttcttccaccataagaattatcttgcaaaattgaatggtgagtttgtgtggaaacaagttccgaaccttgttttcaaattgcacaacaatccaacaattaanaagtcatggatcattggtttactgagacagatttgagtgtatgcggaaa

SEQ ID NO: 127818 - DNA, 368 bp, Glycine max
  unsure (1)..(368): unsure at all n locations
tggctctgccgctctccatgtacatggctattaactatggtaacgtatcaactgtagacttccagcaactaaaacgacatgctcgggcaactgaaacggcatgcccaaaatattttaaattatgttaaaaaaaccatagtataattaatataatcttaaatatcatatagctacatatcaacgtttaaagtaatttaaaattattattttggaaaaaattgtgcctagaaaccacacagctaataatattttactagcccaagacttcaaaaccaaaatgtcatacaagtctctcacattaagataccaacgagtagaaaacatatactangggaatgtgaggagtgatttcctttccatcttcatct

SEQ ID NO: 127819 - DNA, 402 bp, Glycine max
  unsure (1)..(402): unsure at all n locations
agcttcaaaatagaaaactatctcggtctattatctattaacgatgaagaacgacaaagaatgttcatggaattgttcacagaaacgttatagaagcgttacagaagcgcctcaaccttgatttttcttcttnttttctccttcgtctcactaatttcagtgaaatgtgcatataaatgatgttgaaccccttcccttcaaccccacacctatttataggaaaatggggggaggaggttacaacatagctcgcccagacgagctggttgcttcctccaaaagcaacttgctcgcccaggcgagctggttatttctccttgaagacttctaatgagcccaggtgggcccaggggctgaagaatgcccctaaattgatcatcttgcccccattttgagtatttt

SEQ ID NO: 127820 - DNA, 423 bp, Glycine max
  unsure (1)..(423): unsure at all n locations
cggacctataaatctcagcttgcggattggactttccagcggattgatttatctggtctgaanagaggcaaatataatcatcccacttggacgaatgagaaaactggggccaatgaagagggtgagaaagagggagaaacccatactgtgactaccattcctatacgaccaaagtttcccaccaacccaacaatgtcattactcagccaataacaaacctcctccttacccaccacccagttatccacaaaggccatccctaaatcaaccacaaagcctatctaccgcacttgcaatgacgaacatcacctttagcacagaccaagagcaccaaccaagaaatgaattttgcanacctgtagaattcaccccagttccagtgtcctatgctgacttgctctcatatctacttgatagttaatg

SEQ ID NO: 127821 - DNA, 476 bp, Glycine max
cggatccttaagcaccgcggctgcagctttctacaacctttctccccttttgaacatcaaaaagccaaagaactcgggaatcaacacagatataacaaaggagcagaaagatataacaatggagtataaggcataaccatccaaactcacaaacaagaaataatcaaccagaatccaaataactcaaaacatcaacaaccacataatgtcaaagcagaaaaggctgaaatccaaataccgcaacataaataaataaagtacttattgtaataatttaaactctaagaaactaaacagccaaaatacacggcttataaaagacatataatcagaaactaaagtctaagaagacggaggtggtggtggaagatcgaaactctgacgaatgtatctgacatcctcttcaagctgtgtgaggcgaatgtccataccggcaaagcgtgtatctaacgagtagaagcgatcaccaacataag

SEQ ID NO: 127822 - DNA, 460 bp, Glycine max
  unsure (1)..(460): unsure at all n locations
tcaccttctggtcctcctcatagngggtgtatgataaaactttctctatnntcatctcccactccaagtaggcctccggatcattctttcctttaaatggaggaatgttgagtttaataccatcaattctgatttgtctaggaacaccatcattccctcttctcctcctttcttcttcattgtgatctctattctccatttgatccaacctctcatggagcgcatcatctcgttgtttcattaacctctccaaatgttgcatcaaagcttgcatttggaattgcgaaagccccactccatcattaggattagtacctgacatctcaaacaaacaaatcaaacataacaagacaattatagttgttgtttaatacctcacccactcaagtgtatcacacaactattgcttttctctaatgaaacactcttttcttttaccactctaattcccttgagttct

SEQ ID NO: 127823 - DNA, 481 bp, Glycine max
  unsure (1)..(481): unsure at all n locations
cggatccttaagtcaccgcggctgcagctacaattatttaagccagcccttttcttatataaaaaaaatctggacaagataagataagaatggatgaaataaaatcgggataaaataaaatctagatgaaataaaatctggataagataagatttgataaaataaaattgtctgctctcttcaagtccaagcccaatttcggattcaagcccaattgcttataattctcctgaaattaaattaaaaacacaaaattagtcaagtaggcccaaatgataaaactgcataattaatttgacaattaagtctaatcagtaattaaaatggtgacaaaaagggttaataaataggagaaaataatgacacatcatccatcagtgggtaataagccaaactaagtctcaacttagttcccaaagccttttgcaaactctgttaaaaccttgatgtaaacctcgtatctcggtcaanaaataatgcg

SEQ ID NO: 127824 - DNA, 442 bp, Glycine max
  unsure (1)..(442): unsure at all n locations
tgaccaatcccgacccaacccgggcattgtctgtctgtgagaacctgcgatgtacctaagcangcgagctcctggcagtcaacagataaaaggaaaacaagaccacaaagcaaggaggcttgtggtggctggccagctgtgaatattgtgtaatatgtggattgtggcctctggtaatcgattaccaagggtgggtaatcgattacaaggcttaaaaattgaggacaggaggctaagatggtctctggtaatcgattaccaaggggtgtaatcgattaccaggcttgaaaacgaagtcatgatacttacggagcctctagtaatcgattaccagcctgtgtaatcgattacacagaggaatgggtcactggtaatcgattaccaggcatgtgtaatcgattacacagtgtattatngcatatttcatgtcctgaggctgtgt

SEQ ID NO: 127825 - DNA, 444 bp, Glycine max
  unsure (1)..(444): unsure at all n locations
agcttgagcttccctcagaacccccctttcttatcttcatctcaatctcggttcctcttctccttccagccacaaccctcagaaaccctcttggaacgaccctttcacttcttcaggtgtgtgttaagattctcaatctctcgtttgtttccagatctggtccaatttctttacgcacttcccttttctctnttactttaaccaggcacctactagctcgcttatttctcagaaaaacaaacgcaccttagcggattaaccttttaattacccccttttttctctttccgttcttgcttttcatttccacaactnttgcagtttaacaatcattntcacttcttttcacgcctttcaagctcattcaaagcttcctaattttccccatccccctctttttacttcatactttagtatccaacattgttttaatcaaattaaaga

SEQ ID NO: 127826 - DNA, 485 bp, Glycine max
  unsure (1)..(485): unsure at all n locations
tgtnggttctagaacaatgaacatgtttataagctccatttatgagtttatcatgctgcacagataacaaaatggagcttataaacatgtttaggcaaaatgtttttattaagtgaagctgaaacattagggtgtgtttggtttacattntcattttctgttnttattttctggtttcattttcaaaagattagaattctgaaaacatgtttggtttgatttcttgttttctgttatcatgaaataaaaatactgaaaatttatgatatattgacttcttgtctttntgtatttttagatttacttaaaattacattcattgccaccgcaatttcattntacccaaaatgaggtttctgttctcaactganaacaagaatttattggtttcattnntctggtgtttcctggtttcattttcactgcaaatttnttcagaaatccaaccaaacacattnntcattaccgttttctgtttcagtaaa

SEQ ID NO: 127827 - DNA, 456 bp, Glycine max
tcttaagcgacgcagctgcagctggagaaggctcaaggagattttttataaagaggagagaggggagatgatttgaagtataaaaaggaaacaagttaactttgaagattgtcacacaagactctcattcatgaaagttacaacttgtgtgacacatgcttctattgatagactatgcagcttccttgagaagctttcttaagagaactttcttgagaagcttctaatacaacaagttcctactacaaagactactcaaaatgccctgaaatacaaggctaaaaccctatactactagaatggccaaaatacaaggccctcaagaaggaaatacctattctaatatttacaaagataagcgggctcatacttagccaatgggtccaaaatctatcctaacgcttatgagaaccctagggccttaccttggatctctaacccaatatacttggagtc

SEQ ID NO: 127828 - DNA, 400 bp, Glycine max
  unsure (1)..(400): unsure at all n locations
ntcgcaagagagaacaatcgcatccattcttgatgatgattctcatttgtctgattgatcatcacctgattgaccatcatcaagggaatcctctactcaattgactgaaaccattatcatggcagacgagcaacaccagaggatcacccttgaggattattcaagcagctcattgccacaattctttactagcattgcacgtgctgtagtgcaaactcacaacatcaactacccatattctttgattcatttaatataggggaatttattccaatgattacctaatgaagacccctatgcacatttggcaatgttcatcgaaatatgcaacactgttaagattgctggtgtgccagatgaagctattagactcactctattctcattatcattggcacga

SEQ ID NO: 127829 - DNA, 350 bp, Glycine max
  unsure (1)..(350): unsure at all n locations
acctccattaattttttgctttaccttctcttccattaggagattcttcattttttctccatgtatctcctcacatgtcttgtgataaatgtttttaacatgactctttagagtntccaccgatttaacttgctatagaagctagatttgattttctatggttcaaatttcttgttcttgttcttgaaccatgaattgcgttgagtttaagttccttcgagttttgncttgttattttttggggctgaaacctaaaccataaaattcttacaaaactattaaagtagaagaacaccctagaaatctagagtgacttgttcacctattgtagntttgtcatagaagtcatg

SEQ ID NO: 127830 - DNA, 293 bp, Glycine max
  unsure (1)..(293): unsure at all n locations
cacccttatgatggntagtagcccgggaagacctcaccttaagatctaaagtggtacaacaaaccaccgagaaggtaaagttgatctatgaaaggatgaagactgcacagagtangcaaaaaagttatcagtataagaggagaaaagacctagaattcgaggttggtgatcatgtattcttgaaagtcgctccgtggactggggttggtcgagcattgaaatcccaaanactcacacctcgctttatgtggaagtaatgacttccaagattattttgatgatgccaaagaatc

SEQ ID NO: 127831 - DNA, 445 bp, Glycine max
  unsure (1)..(445): unsure at all n locations
agcttcatgctatagtatgtatggcataactttattactgntgntcaagacatacaagtgagcttgtaacaaatcttctagacttggagtgatcacatgcagtcctcttgaacccttaccacccactctgtcatcatgtcgagacttatgaaggccaacaggtttagccttctcaacgtattctgaacaaaattcaatggcttttctgcaatgtacctctcaacaatagatgcttctagacgatatagattctttgtatacccttttaagatcttcatgtatcactcaaccgggtacatccaccgcaaataaacaagaccacaacattcgatttctttgaccagatgcacaatcaagtgagtcatgatgtcaaagaaagcacggggaaaatatatctccaactggcacagtataattgtggccttatttccagctcatcaacttg

SEQ ID NO: 127832 - DNA, 448 bp, Glycine max
  unsure (1)..(448): unsure at all n locations
ctttaaaaaagcctaagtctatccttntagttaaataggttatgacaggccagactttatgtangccaggtcgtaggcccatgtangccggcctagcctattcccacccctagttgtcagcggtatacttgggctttggtcaatcattaaggttacactnggaccttattgaaccttcattaatcataagtgctacacttgagccctnttgggctntgattaatcataaatgttacactntgtagtctttagggatatacttaggccttggtcagtcattggtgttatatttgggtcttactgggttttggtcagtcgttagtggtatactnggacattaataagccttaagtaatcatcaagattacagtcnggccttaatggaccttcatcaatcttaagtactacactntgggccttttgagccttgataataataagtgcacac

SEQ ID NO: 127833 - DNA, 439 bp, Glycine max
agcttgctaacccatggaagctcctattatttttctacactttgtgagggtggccattctaggatggccttgattttctcagggtccacttggaccccatttctaccaactacagatcctaagaaaagtatattatctacataaaaggtacatttctctatattggcatatagagtgtttttcctaagaattgaaagaacttgccttagatgtccaaagtgatcatctatgctcctaccgtacactaaaatatcaacaaaataaacaactacaattctacctatgaaatcccttgagacatgatgcataagcctcatataggtgcctggtgcatcagtgagtccaaaaggcatcactagtcattcatacaaaccacaactggtcttgaaagtggttttcactcatcgacctctatcattctgatttggtggaaccactt

SEQ ID NO: 127834 - DNA, 396 bp, Glycine max
  unsure (1)..(396): unsure at all n locations
acctatgaatactaagcttgtagggggatccttttcagcctctacggncaagtgatacatggatgggagcattcatggcaacccaggaaaggcaggttttgacgggctcattcgggactttatgggacaatggatctctggtttcataggctcttgtagctttaaacctcacttgtgactgagcttcatgccatcttgttcgggtagaggctagcgtgggaagttggccacataaacttagtttgtgaatctgactcgctntgtgctattaatttggttacaagaggagtgggcttacaccatcctcactttcctctcattgatcacatcaagacattgttggctgaaaactggagggtacttcttcatataccttgagtaaaggagtacctatgt

SEQ ID NO: 127835 - DNA, 361 bp, Glycine max
  unsure (1)..(361): unsure at all n locations
agcttgtanagaggctcgacttgagacatgttatggatagctcagcacccatgataccatggatgcccctcactatccatgacacataatgcttatttgaagatttgcaattactatgctggactgatcatgcctgcaccgatgcacgacacttatgtgtcgaaactatatggatatgtgatgctagggttcatgattctttntctctatgtaatcaaccctatgtggttcaagaatgaacgaatatcaatttgagcatacctcgagatcattacgagctgcccgggaaatttctcatcattcaccctgtaagtgtatagacgtttttatcttcaaaatcgggattgatctgtgatggaat

SEQ ID NO: 127836 - DNA, 377 bp, Glycine max
agtgacctgagcagttcttgttttttcaccagatgtcgatcttatttcgtctaggaaggaaccacatgatatgcgactttcacacctagatccatagctatctcactgcgactctattatgcatacacattgttctcttccttgaagggcccgcacttactattgcggacacactgctgtaactattacttggtgcttggtggtgcattctggaccatcaagtggtccgtttgctaaatgcctaacctctacacatttctctactacagaccactgttggagcgggtggtctgtgcttacacttttgtgccagtttccaccctatactctggctccacttgatactctggatcggctgtttgcccaatgtgggactg

SEQ ID NO: 127837 - DNA, 146 bp, Glycine max
tgttcaattccgagcgtcctaatttttatgcgcctgaatcggatctccgagagatatgttatgaccgttatgtatttctagagtccatccgctgctatatatgcagcgtctctaattattatgcgcagtgaatcgaactctctaag

SEQ ID NO: 127838 - DNA, 476 bp, Glycine max
gctttgatgcatcatatggagacgttcatgatacagcgagattatgctctccatgagaggttggatcaaatggagaatagagatcatactgaagaagaaaggaggagaatagggaatgatggtgttcctagacaaaaccgaattgatggtattaaactcaacattcctccatttaaaggaaagaatgatctggaggcctacttggagtgggagatgaaaatagagcatgttttctcatgcaacaactatgaggaggaccagaaggtgaagcttgctgccacggagttttccgactatgctcttgtgtggtggaacaagctacaaaacgagagagcaagacatgaagagccaatggttgatacatggacggagatgaaaaagatcatgaggaagcggtatgtgcctgctagttactcaacggacttgaaattcaagctccaaaaactaacccatggcaaccagggggttgatgagta

SEQ ID NO: 127839 - DNA, 403 bp, Glycine max
  unsure (1)..(403): unsure at all n locations
agcttgttcagaaacgtggcatttgtgcgctatactcaatgcctggtacaccacaacaaaatggtgtatcagaaaggcgtaataaaattttaatggatatggtaaggagtatgttaatcaattcaactttacccgtatctttgtggatgtatgccttgaaaactaccatatatttgttgaatangattcctagtaaggcatttccaaagacacctttagaactgtggacaaatatgatacctagtataaggcacctgcatgtttggggttgccagacagaaataaggatttataatccgcaagatagaaaattggatgcaagaacaatcagtggatatttcattgtttatccagaatagtcaaagaggcagtatgtttactgaccttatcataatatgagaat

SEQ ID NO: 127840 - DNA, 326 bp, Glycine max
gtgaccttcatactaagctatatagactctgtcatgcacaattctactttatcctttgctatgacatgaactctgatgggattagtttttttattgaatgagtgtctaattaagttacttacccagattgcattctgaatgaaacatggattaatgcttcttcattttcatgatttggtttctaaatagttaacaatggttcaaattcctctgttttggcaggtgctgtctgcatgctttaccgtatgcacccttggttatgcagcagcaggtgttttgggctacttaatgtttggacaggaggttgaatcacaagtgactttgaa

SEQ ID NO: 127841 - DNA, 488 bp, Glycine max
  unsure (1)..(488): unsure at all n locations
cctgacgctgcagctatgctgcnacacttatatagaccttctttctagcaaaccaacaacaatagaataattatgacctttcaagcaatagatacaatccaggttggaggaatcatccaaatctgagatagacaagtcctccacaacaacatcagcctgtccctcctttccaaaatgctactggtccaagcaagccatatgttcctcctccaatgcaacaacaacagtagcagtcacaacaaagacaacaagcaactgaggctcctcctcaaccttccttagaggatttagtgaggcaaatgaccatccagaatatgcaatttcagcaagagacaagagcctccattcagagtctgacaaattagatggggcagatggctactcaattgaaccaagctcaatcccaaaattctgacaaattgccttcacaaactatgcagaatccgaaaaatatgagtgccatcaccttgaggtctagcaaccaaatt

SEQ ID NO: 127842 - DNA, 420 bp, Glycine max
  unsure (1)..(420): unsure at all n locations
cggccttgatctagctctaggaagtttcaaaacttcattagtagtacctttatacattgaacacttgtcataactntgatgaatatgaaatctcttggtggtgaagctcttccttccatggcttattccctagtggatgacgcctcatctcacctgttctcctttatcttctgttgcatctccatgtntgaaaatcaccattgaagcacctcattgaagctcaaagatccaacctctatagaagtttgtcaagaaagcttccatcaagtgataatcaaagcataagagcttcacgtacacctccttaaatatccattaattntcagctttactttttcctccattgttgtttcttcatttttctccatgtatctctgatcgaggcccgacccgaatcaaataaacattaaaaatgaagta

SEQ ID NO: 127843 - DNA, 450 bp, Glycine max
  unsure (1)..(450): unsure at all n locations
agagaagagaaatatgattgattgaatatatacaagtggtgagaatgtctcctccacctctggaacctcacaatcactcacaaactcgtctctagctcttaggacaacttcctcttcaagctcggttctctgccggtcttcgcacagcaaaaactctcaaaactctctggaacttggacctttctcgctctagaaatctctcgacatgcagaagtttcaagaacaggctcaaactcccctccaaaatctgatttgaggcttaaataggtgactctgtttgtgctagagcgcttaacacaactcttgaccgcttagtgagcattagtggatttcggcttagtgcatgcttctctcgctcggcggatggactaaagcggngcgcttagctgaatgatccttcgctcagcgcaaatgcacagatcatccttcttccagaatcttcctcgcact

SEQ ID NO: 127844 - DNA, 443 bp, Glycine max
  unsure (1)..(443): unsure at all n locations
tgaatgctctattcaatggagttgacaagaatatctttatactgatcaacacatgcacagtggccaaggatgcatgggagatcctgaaaaccactcatgaaggaacctccaaagtgaagatgtccagattgcaactattggccacaaaattcgaaaatctgaagatgaaggaggaagagtgtattcatgacttccacatgaacattcttgaaattgccaatgcttgcactgccttgggagaaaggatgacagatgaaaagctggtgagaaagatcctcagatccttgcctaagagatttgacatgaaagtcactgcaattgaggaggcccaagacattngcaacatgagagtagatgaactcattggttcccttcaaacctttgagctaggactctcggataggactgaaaaaagagcaagaacttgcgttcgtgccaatgat

SEQ ID NO: 127845 - DNA, 405 bp, Glycine max
  unsure (1)..(405): unsure at all n locations
atattctcaacagtcacatctctctatgtggttcttgaatggctatcataggcctatatatatgtgacttgagacacgaatttgatgagagtttttcagaacaaataggttttatcctcttataaagcaaatcgtttatcctcttacanataccttggccagattacttgtgattcaatatggaattatttgagtgctcaaattgttcaatctatctctttcaagagagatcccttcttctcttcttctttattctgaaaagggattaagagaccgagggtctcttgttgtgaaagaattctaaacacaaaggaaggattgtccttgtgtgcttagaacttcgtaaaggatattacaagatattggaactcttaagcgggctgatcgcggactggacgtatgcac

SEQ ID NO: 127846 - DNA, 417 bp, Glycine max
  unsure (1)..(417): unsure at all n locations
atgccactctactccaagttcttgtatgatatgttaacaaggaaacataagtatattcaccaggataacatcgtagtggaaggaaattgtagtgttgtgattcataagatccttccccccaagcataaagaccctcagaatgtaactattccttgttcaatnggagaagtcactgtgggaaaggctcttattgacatgggagacaacattaatttaatgtcactctccatgtgcagaaagttgggagagttggagatcatgcccactaagataaccttgcaactggctgactgctccattaccagaccatatggagtaattgaagatgtgctggtcagagtgaaacactttatcttcccagcagactttgtggtaatggatatctatgaagaatttgacattccggtaatattggga

SEQ ID NO: 127847 - DNA, 415 bp, Glycine max
  unsure (1)..(415): unsure at all n locations
ggatctctaagtcacctgagggcatgcaagcttgagcaacttcaaacaacaataactttntactcggatgtccganngagacccgtaatatatccagacgctcgaaattgaataccgaagctcttaacaaattcaaacaacaataactttctactcggaagtcagagtgagtcccgtaatatattatcgagctgctcaatatggaataccggattttctgtgcaaattcaaaccagcaattactttttactcggatgtctgattcagtcccgtaatatatcgagacgctcgaaattgaataccgaagctttgagaaaaattctaacgacaacaactcttcgttcggcttacgattgagtcttgtaaatatcggaagcacgaaatggattgggatgctttgagcaaataagacgac

SEQ ID NO: 127848 - DNA, 465 bp, Glycine max
  unsure (1)..(465): unsure at all n locations
tgtaggattatggggtacccatcacatgtggtactatgtggctgtcgggcgatggtgcacaacaagttttccacatccacaatgcgcgcataaacccaccatcccctgtagcccacctccaactgagctcacgtactcccacgtagtccatatcctcgtttctctcaacaccgggtccccatcaatcctcccaagcttccccaacatcaaagtaatgcaacattcaaacagcacaaactatcacagccaagaaaacagagcaaaggcagaaaactctgccaaaacaccaaccaaaatcacagctgttctcacttaaagaccccagtaacaattccttcgttcccaattcgttaaccgtggatcngactccaaatnttactggaagtctctagtacataagcctacgttntgaccgttgggatctactagcaaaaatccagaactcattcttgactgcgtctttca

SEQ ID NO: 127849 - DNA, 409 bp, Glycine max
gcagctggcttcacaatctaccccttttttatggtgacaatcctgaaatcaagaaacacatacacttgcttcttcctaggcgattactcacttaatactacatattctccccctttgattttgagttcaagcttcacttgaaattaagtaattttattatttgagtttcttgatttaatccttatttactctcaccctttggcgtcaacaaaaagccaaagtgcataacaaatataaaacattcacgagggactaatcatacataagtcattcatttgaaaaagctataccaatcatgaagcataaaacatgaatagaaatgactagtcatacataagtcattcattcgaaaaatctaaaccaatcatgatgcatagaaaatgaatcgacccaatattaatcacatagt

SEQ ID NO: 127850 - DNA, 478 bp, Glycine max
  unsure (1)..(478): unsure at all n locations
actcagcttcttataagctngaaccatttatcaataaacacaagttgttttntattcagaaaattagagtttatctcttttatcttagtgagagtgattctcctaaattcttgagtgattcaagaacaccttggctgtatcaaaggactttcacaacctttgtgtgttgccctcgctggaaagagtgattctttccttcctttcatcatcacccttgttctttcaaaccacaattccagaaaatccacctctgcccaaaattatctcgtggccataactcccattttacgcactcaaattaagtgattcttgagcctaaattgaatttcaaaacgagacctttcacctcgttttggaatcacctcatttggagccctgtagcttcagttattgccatttctatatttctgtccagccaccacttaacctacgttntaccatcccattcatcccatttatgccaagaaccaccttatta

SEQ ID NO: 127851 - DNA, 421 bp, Glycine max
taagcaccgcggctgcagcttgacgcgttgttctacatgattatttatgcgaatgagccttccctgtttggtgatagctttccttatgagtagtctttcatggcatctccttggagcctccaaaccaaggcattgggcttgaagctacatttcttgagctctgagatgcatttccaagttattctttgtttgcaggcattttcttgaattcatggttcacttctgacttcctcagtcaggtccaactccatcgccaatgattctgagttgttggccacgttgaccatgcttttgcggagtgaaagttcgccaatttccataggtatcataacattggcgttgtagctaacttgaatgagtgttcttgtgtggaagactggggagtacagcggtatccccatagcatgctcgggagctcgtc

SEQ ID NO: 127852 - DNA, 466 bp, Glycine max
  unsure (1)..(466): unsure at all n locations
ntgataccactggttgggtattnnttggatgttgtttgtagagatattatacctgataatatctctaaagtgagaaagtgagaaagtgagaaagtttgtgtgttgagttggttttatgcttttgaaagattcatttttattacaaacaagaaggtcgttaaggcattggaccttgaaacaatcttaagtgattnttgatggagagaagtttagttatgagttggttttattttggttctgtttattaactttcaatatctttaaagaccattttacaacactagagattgttagtcgatgaataggactaacttttgtgtaagaaatctgtgagaattgtatctaactccttgcatttatggttattntgtagtgttgcaattactttttggtaaatatacgtaataagtagttagtgcttccattttgtgtatttaataatcatttcctttcaatttcagggtaa

SEQ ID NO: 127853 - DNA, 375 bp, Glycine max
atgctaccaaagccgagaagtccgtgaatctcctcgggggcagagtaagagtctgccatcgctctggccttggctagcaatcaaagaaggtcttgactcccgctcaagggaagagcaaatcggtccatccacattgttgcctcttgatgtaacgagccgatcacccttcctctagcctccttttttgagtacactcgggcatactctgccgccactttatgttcatgggtcgtggctagatttacctcttcttggtatttgctgacgatagctaacatgttggtctccgtctcgcataaccgctgagacaagtttcttttgaaccttgagcaagccttcaacgtatcctttacgatcagactgtctactcatgat

SEQ ID NO: 127854 - DNA, 368 bp, Glycine max
  unsure (1)..(368): unsure at all n locations
ggaaggtgtgtaacccaccatttccataatagatcactgtttacgtgtctactatcattgtgataatctctntctctgttattgagggcgctacttgagctgccaagtctctccatctttgggcgtatcctttgaaagatctgttccctctttttgcacatgttttgtagttgcatcctatccgaagccattatactgacacagcctaacgaaggcaaccattatgtccttccaagaatggactcgggaaggttccaagttagtgtaccacgtaacagctaccccagtaagactttcttggaaggaatgtatcagcaattcctcatcttttgcgtatgcccgccatcttcgacaatacatctttagat

SEQ ID NO: 127855 - DNA, 374 bp, Glycine max
atatcttccgcaatactcatcacctctatcatatctaataattctcacatttatgtctaattgcccttctactccattgtagtaaatttctaacgcatccattgcctaaaagatctcgggaagtaagtagacataaactgcaacgtgaattatcatcaataatgatgataaagtatcattcctttctgaaagaactaacatcataaggtccacaaatatcagtatgcacaatttcaagaagctgagtgcttcttgtagctcctttctttgtatggtctgattggtttccttcaatacaacccacacaaatatttatatccgtaacatctacataatgaagagtctcattttattaatcttccatcccttctcta

SEQ ID NO: 127856 - DNA, 428 bp, Glycine max
ctttacttgtgttcatttaaataaatgatctctagcttgtgttcattaatttttttctagagtcaagcttaaattttcaatgttcggctcccgctcagttacaaccctatttgtaactgattattttaatcttgactctgcaattttattttatttttatcttagtctgtgattctataaaacatcatccacattttttatgctaagcgcatatttggaccagctttcaaatgtgaatatacatgcatcgatcatactttattatgtgtagcttttgcttaacgtggggcgggaacgcacgtttaaacatatctaagtgaataaaattctgtaaaatcgaagactcactagagcttttaatttcatggactaattaaaattgacggttagttattccttttacaaaaagtaccagtgtaacactagat

SEQ ID NO: 127857 - DNA, 286 bp, Glycine max
  unsure (1)..(286): unsure at all n locations
tcgcattgttgccttttaatttccctcataaacccanaactgtctcggtaaaactatgatcctggttttgttaaccgttggattntcatgaaatttggatatgttgttcgaaattcaattgggcacaccgttgggatttgcgagataatattcttggagggagaaaaaggaatctcatgaagacaatacaagtggaggtttcaatctcttctccgtctctctgacgtttgggaattctattggagcagtaggaggaataactgaaggaatcttcaggaaccgctag

SEQ ID NO: 127858 - DNA, 476 bp, Glycine max
  unsure (1)..(476): unsure at all n locations
aagcacctgagctgcagcttatattataatcatcanaagttttttttagaggcagaaccaatttatttatagtcttaactctaattaaaggtcctaaatatgtttttgagtgtttgagtctctctaaaatacaaaataggccctttattggctttattaaattcaaaatatgaaaattcgactcaaaatgtgtaaattcaactttggtgtcaaggacactagagttaagcacatgttaagtcaaaagacatttgtaccttaagatgaatcagaatccttaattatttttattagaagtaaacaaatacaaaggttaaaagttgagttttgtgcactatcagaacatgccttgcaaaatttacgtttgatgtttcagacgatagccaaataaaagcatgatcagatacaacattaaaagtgaaagtttaaacttcatttaatattctatgtcagatattcgttttgtaaaaacattc

SEQ ID NO: 127859 - DNA, 371 bp, Glycine max
  unsure (1)..(371): unsure at all n locations
ggcattctatcatcacttccatatagagcagggtagcgtttaatgcttctatcttgcatttntgcgagctccttggctaatggatagcttatagcaaatcctcccccaccatatgccatagcataagagaaatgaatgttttgaacgtggctctcagatgagctcccaacataatagaattgagtgtggtcatacttagaaagaattctaaccacattatccacaataaatattgtatcatcatctcccatcatgaaccatctcacgtcttccattccaagcttcaatgtctgtgttccacccttgaaatcctcaaagcagatctttgcccttgtgtatttgtatatntaaatttagaggtgtgcccagaa

SEQ ID NO: 127860 - DNA, 185 bp, Glycine max
  unsure (1)..(185): unsure at all n locations
ttttcagatcttgcaaaaatgtaaaatgaggaacattcaatngtattcatttggcccgttgaggtctcgtgcacccgagataaagcatcagcaacagagttggcttttcccgatcgatactggatggagtagtcatatcctataaggcgtgccaagtaaacttgatgctctggcgtttgtatgac

SEQ ID NO: 127861 - DNA, 380 bp, Glycine max
cattctacccacccatgccttcttgagccatctttggcccgtcgtcagggtctccaagttcacctcacatgtgtcattggaaccgatacactcgagattggctggagttctcctcggagctgactttgggatatttctgttgaccacctccgcatatgagcatcgctgagttaccatcttctcttctggaccctgttttggacgttgtgtcttacctttggcttgacttgatctgtctcccttctctgatggatgtctttttacttccatttagacgtacatcatgtaaccttaaacatttgcaagcgtgagtgtgacatcaccctatcctaaaccaattgctgtgtgtgtttctggataaactctacactctgtgttaa

SEQ ID NO: 127862 - DNA, 256 bp, Glycine max
  unsure (1)..(256): unsure at all n locations
ttaaagatccactcgacaggatcgcgtccatcanaatgtgtgactttttatttcatatggngccaagaaggggatggtgaagttagtatcggaaaggaagaaagaaaggtagggacaatggtcatagtagctaagcgttcaagaatagactcgaacttagcgctcatggtggcttggatttgagcaagggtttgtgctatagaggactggccctggttcaagcgagtgaccgcctcatccaagcggtcaatggtgg

SEQ ID NO: 127863 - DNA, 410 bp, Glycine max
tcaaaaaacagacttgttgagattaagggagctagcatctttagtaagtgatccagtggattttcaaactcaccatgggaagttactcagaattcttagagtagatgttgaggaaggatgcctagagaccctggttcagttctatgacccgctctaccattgcttcacatttcccgattaccagcttgtccccacacttgaagagtactcctacctagttggcttacctgtgcctgacaagatacctttccatggttttgagcctacccctaaaccctccgacatcgcagccgctctccatcttaaaacctccatcatccaagcaaaccttacctctaaaggaggcctccaaggtcttcccacccactttctctaccaacaagccttcatatttgctgaagcagctagta

SEQ ID NO: 127864 - DNA, 317 bp, Glycine max
tgcaactacaatgggaaactccattcagagctttctactttttaaaatgaacttaagagtgtagagaaagagaaagttgtagtggagacccttaccatgttaaagggtcaacttactttgtctatggtatgtatgctcctatgtagtgtgaactttctcaaggaaaatgtttactgttaaacattagctaatttctataaatatgataagatcgtaagcattaaaaacattgtctttttatggtagtagtcctcattagtatgcacttatgaactattgctacaaagggtttcttaaagatattatggtttggatga

SEQ ID NO: 127865 - DNA, 270 bp, Glycine max
  unsure (1)..(270): unsure at all n locations
ttcttatttgttgattcggggcttcgatatttacttatttcaatttctatccttatacccgtaataagtattggcatttatccagattttattttttcattttcggctgacaaggttgaagctattctatctaattttttatagatagttttcacgaataaataaaaactaaaataaaaaagaaatcctatgcacaatacanaaacctatatttcttttgtattatattaattccataaaaatgaatttgaattctaattgaatatgttt

SEQ ID NO: 127866 - DNA, 341 bp, Glycine max
ttgatggctgcggacctagatgcacggaaaaatttctcctagaacaccctattaagggcatctcagatgaagatagacctgtgagcaacgtagtatagctaattttttgcgcctccctcccagatttaagaaaagcttttataaagataagatttttttggacatcagggggcttcatggttggacaaacattatggcactccttaagatgcttatgaggatcttcacctgcaagaccatgaaatttgtgcagccaatgtattattccaatcttgataacatatggaataccctcattaagatattgaatgcacaagctgtcataattgaaatcatgtgca

SEQ ID NO: 127867 - DNA, 246 bp, Glycine max
tgtaatcgattaacacaattgtgtaatcgattctctgactttattaattcaaatttcaagactgaagagtcacaactcttcaaaaactagctgtgtaatcgattaccacttttatgtaatcgattaccagtaaggaatttttgaaaataactcccaagagttacaactgtttaagaaatttttgtatgaccatctaaggcctataaataggtgacttgggatacaaaatttgttaagagtgttttt

SEQ ID NO: 127868 - DNA, 477 bp, Glycine max
  unsure (1)..(477): unsure at all n locations
agcttttatttatgaacaccatggacaaaccttaatatgtttggcaacacacatggcaatggatggcagatgatatcatattcaatcatagaaaacaaggtgattttatatattataaataaatattggtcactcataaccattatgtttattattttgctaatcacatgtattcgccttactgaaaaggaaacaattcatttatgcttaactgagattgagaatatgctacaagcgaacagaagaagcttgcgagattttctatccatcccatacccaattggatatgcacgaaaccaacatcataataatctgatccataatgaaatggcatatgacaaagaaatgttagcaaaacaatacaacacggcataccaattgctgacaggtacttacannatatgacacgtttgatatatgaacttcttaatcacaatagtatataatactatttgctaatatgcgaatatataaata

SEQ ID NO: 127869 - DNA, 339 bp, Glycine max
  unsure (1)..(339): unsure at all n locations
ggaagactacaatatntatgagagcaaaattcccatctattgtttcaataagctcctgttagtctataaaaaaatccaacattgcattctaaagctaaacatatagaaattaaaaacaatttcataagagattatgtttagaataagacagtggacttacagttcatacccactgatgatcaacttgctgacatctttacaaaatcattaactaaagacaggttaattttgttaagaagtcaacttggaatgatctctgttaatgaatgatttaatctctatatgttgtccactattacatccaatgatttaatctcaatatatggatgacatatcaag

SEQ ID NO: 127870 - DNA, 460 bp, Glycine max
  unsure (1)..(460): unsure at all n locations
ctcagagtcacctgcggctgcagcttccttgcttgtaccttttatttagtttaccataagngagaaaaccttgaatgtagcttttgatctttaaggtgataatgacttctaaaagtattcagagactaagactatatatatgtttatactatatagagcatttaagatggtttgcatgtccgatatgtctttcaaaggctagaaaaatggagaaaaacgctctgcgttgtctgcctttatcttggaacacttgatgaactctctaagcgagcatgttgtgctaagcgagttcatcacaaattcattgaatatatgtgttctcagaagaactcgcgtagcatgcctaccgcactaagcgagttcatctcttgaggatgaacacttcatctcttactgagatgtctctggctaaacgaggcctgaacactaaacccagttacttattaaaattttcgttgaa

SEQ ID NO: 127871 - DNA, 392 bp, Glycine max
  unsure (1)..(392): unsure at all n locations
tctcngctcagactgcgaacgcctctagatcaacaccttgttcatctctaaggcacccacccagagggaagctccccaagttccaactccgaacactactcgaccgggcggcaattccaacacgacaaggaacttccctccgaagccatatgcagaattcaccccactcccgatgacgtacgaagatcttatgccatccctcatcgccaatcatttggccgcggtaactcccggaagggtcctcgaaccccctctaccaaagaggtatgaccctaacgcaacttgcatgtaccatggaggtgtcccggcgcattccggcgaaaaatgcgtggcccttacatacaaggtccaacatttaatggatgctggatggctgaccttccaagaggatc

SEQ ID NO: 127872 - DNA, 400 bp, Glycine max
caagtcacctgagctgcagctatttccttgttttatatgaatgttaattgcttaaaaatgaattaacaattagttcaactccatttttatcgaatacgttctattttaaaaattatatttaaaaatcgaaaataaaaaactcgcaattgccttgaataaaacctaaatatgcttgacggtgctatgaggtttttttcctagagctatgatttgttttggtttttcgtcctttgtaacaaaaaaaaaacaaatattaatgctcactaaaaataatagagcaaacatggttgaataacatttactctaaaaataaattcatttttttaacaaccgttacttaaaagtgataataagaaatagttatatgtatctcacaaatagaaccattttcataaaaata

SEQ ID NO: 127873 - DNA, 260 bp, Glycine max
  unsure (1)..(260): unsure at all n locations
tgtggaataagggaattntcttccgtgtattcctttttattatcctagatctttgtcccggatgatagtttgatattataatatttctatcagtgttcctcccgtaataataaaaaagtcaagcaagtgccttaatacaaacgagaatgacaactaaataaaccgctggaggaaatattgtctagagaatgactgtcttcgaatccatctgaaaatggtgacctcatgtttattagtacttctgtcatcctaaatatttt

SEQ ID NO: 127874 - DNA, 345 bp, Glycine max
ccggatcttaagtcacctgggctgcagctgatacgcaagctattaattttcttttaagatgcatgcaccgattccttcgccaatgttacttaaagatgatatcctagagcttgtaggttacatgaaaccacccttgggaattatcactcgaaggggacttttggatcctttccattagattcctaaactatggggcacatagaaaactcactctggcctgttctttgattgcatcatacatcccttcatggcatcgtaatgggcatatcattcttgccattatcatgttcatgcattgcattttgcatgagtcattgcattatcatgcactcttatttaacatgc

SEQ ID NO: 127875 - DNA, 346 bp, Glycine max
  unsure (1)..(346): unsure at all n locations
ggtcttgtgcagaattagggtaaaaaggtgtacattcacttctttngagaattccagagcacaccacagttcctatttcgagaaaagagctctggaggtagcaagaataacaacttttgcagagatacctaggttttgtaattataaagagattagtgagttgtaaagtgattgtgagatgctaagaagaggaggagggatcccccttcttgtgtaaggaataattattctctactcttaatcttaattgtgttagggtttttctgtatggctggctaaacactcttgttgggaatttctaaggaacaactgatgtaattactttaatatttatttgattgtgttt

SEQ ID NO: 127876 - DNA, 481 bp, Glycine max
  unsure (1)..(481): unsure at all n locations
gcaagcttgtgcaatcaaatcactcctacatcttatctctagcatgcattttctttctttacccactcctcacgtttggttctttagggaaaaacaccataactaaacgcgccgcaagggatccctatcgcaccagatccaaatctagaacgatgggtgatcaagaggagacgcaggaacagatganagctgacatgtcggctctgaaagaacaaatggcctccatgatggaggccatgttaggtatgaagcagctcatggagaagaacgcggccactgtcgccgctgtcagttcggctgccgaagcatacccgactctcttggcaactacgcaccatcctccctcaaacatagtaggacggngaagggacacactgtggcacgatggcagccctcacctgtgatacaaccgagcggcttacccttatggattgccgcccaactattcaccacccatcttgcaagaagatgctggccacat

SEQ ID NO: 127877 - DNA, 299 bp, Glycine max
  unsure (1)..(299): unsure at all n locations
tgcgcatcttcttacgaacgtacacttgcacaagattttcttatattttataaaaatgcacccatatacaatcaatgcaccttcgttacctacattatttacatgtacttccaaggtgtatntgttacatacattacacacatctcctttgctacattcacatacatgcatactctaagcactgtggctatcaaaaattgcatacgtgcacatcttggtattgctaatacctatacatacacaaacttcatgatgaatcttgattattgatcgaagccgtgcacgaattaaattaacat

SEQ ID NO: 127878 - DNA, 310 bp, Glycine max
cttgcttctacgggaagtttcattgacatgtagtctataaattgtgtattgatgtggaatgtcccctgcacacgtggatttgaaacattagtaaggacgtatcacatatgcactcaatgttaacgaaaacagaagagacttgactgtattactaaattgttagtacatatataaaaatatgaactaaattgataattttcataatataggaactaaattggcaacgaatgttaagtacgagggcaaaatttatcatttactctttaaaaaatagtatttttcaactagataggtttttttttttaaaaaa

SEQ ID NO: 127879 - DNA, 375 bp, Glycine max
caacaaccatatggaggaatcttctggagggcccaagtgggcctggttgctatttagacccctatttttgataaatacacccgcctgcctattttcggtgattcatttttcgtaaagttacggaaactcacggatttcgcaacgatacttgatttcttttcgtaatgataccgaaccttgcggattacataatcatcccctttctgactcacgggatgttacggaacctcactaattgtgcaacgatgcttccttttgatatccggtgcgtcacagaaccttacggattgcgcatcaatacctacttttgattgccggcatttcccggaactttacaaattgcctaatgatgggtgccaagcacctccatggacc

SEQ ID NO: 127880 - DNA, 280 bp, Glycine max
  unsure (1)..(280): unsure at all n locations
tagttcctagcttagcccataatgttttccagaagnggctaaggaacttatcatctctatctgacacaatggtcctaggcaaaccatggagtctcacaacttccctaanaaagagttttgagatatgtgaagcatcatccaccttgtggcatggtataaagtgtgccgtcttgctaaacctatccaccactacaaagatagagtctacacctctttgggttctagggagcccaaggacaaagtccatactaatgtctacccaagtgcagatggaatgggt

SEQ ID NO: 127881 - DNA, 267 bp, Glycine max
agcttgcggactatacctatgatcgaacactgatgtgtttctgtttaggcccggatacaacgcgtgctgtatcacctgctctggttccataactgttcttgaaacagttgccgtggcattattctctatgggtctctggagttttaacatgacctgccgatatggaatccttctgatcttttatggccaattgaatcggccttcatttgttcctgcgcaccgctgtcattattcatttttacggaactagtgttaccagggtgccct

SEQ ID NO: 127882 - DNA, 292 bp, Glycine max
  unsure (1)..(292): unsure at all n locations
acaagaacagtggattaatacttattagaagaatgatgaanggatcaaaatcgcataatttatgtgagatctaaaggatgtgcaattcatgcaactaaaacctagggactaaaatctcataattngaatacctaagggataaaaaatgtaattaacctagaaaaatttaatgttataggtactaaaattgtgtagtanggactaaaatgaaataaaaaataacatgaactaacatgaacaaaatattgaacaaaattaattttattttgaagaaagactatttaagtaatat

SEQ ID NO: 127883 - DNA, 260 bp, Glycine max
cattcacatcaaaagtacctcagcattgatgctgttttttaaatggggctgcttgattagtcaaagaataacctataaagtgcagctccgtagtgtgtgcttctgaccctgccattttgaaaatacaacgtcttgtttcttccttccccgctaaacagactcccttttataatgaaattcacagtttattatttaactattaccgcctccgttgagactcatataataaatttaagatactggattgagtacactttctt

SEQ ID NO: 127884 - DNA, 381 bp, Glycine max
  unsure (1)..(381): unsure at all n locations
gttcaggaattcaacgaatngaatttctgtgcaaaacccacctcactaaacaaatgggctgatcttgaatcatgtatagctagatcgatttgatcgatatatgaatgtgttatatgaaaaaaaataatttttattcatatacaatactacaaactaaataatgtgtagtttttacttatgttggaacnataatattattttttaaattcaactcctgattattaatatgctatcatattataaaatttcactaattcttagtctgacacttataacaaatgtccaatcttaaatgataatgtgttagttttaagaaattaaattatattagtatctgagggcaactagagtgtttaaaacattgcatggactgtccaactg

SEQ ID NO: 127885 - DNA, 344 bp, Glycine max
ttacttgtgtcattaaggctacttataagagctcatataaacatcaaagaagacaatcacggcatactttgaccggaggcattatgtataaatatcgaacgtcaaataacaacgaaggctcagaattaaagggggaacttttcacttggatgccctattcaggcgcatagtatatcaagatgctagatattaaacattaaagtgcaagggtaattcaaaccgccataacttttgactcggatgttcgattcacgccaataatatatttgagccgcctcacaatgaacaacagaagctctcatctatctcatatggcagtaatatttaaccagaagtgcgattca

SEQ ID NO: 127886 - DNA, 328 bp, Glycine max
tgagatgaggaagtgttgaatggtgaaactttctgcttttattgttgaccacagagtggtacctggagatatgtcgcggaggtcaagagaccttggggacgtcatgtggggtgctattgcccaaaaccaagcttgaccaatcccgacccaacccgggcatagtcggtcagtgagaacctgtgatgtacctaagcacgcgagctcctggcagtcaacagataaaaggaaaacaagaccacaaagcaaggaggcttgtggtggctggcgcgctgtgaattttgtgtaatatgtggattggtggcccctggtaaagcattatcaaggtggg

SEQ ID NO: 127887 - DNA, 483 bp, Glycine max
  unsure (1)..(483): unsure at all n locations
ttaagtcacctgccgcatgcaagctctgagagttctcactactctagattttcttataacgttctagagaattctacacttttccagaaagctccagaattttctagaacctctccaattaaggagggatcccaacaaatctccccctcccgacttaattggggggtagtagcaaaccggctccttggataccttatgtcaatgtgctttggtcatcatgcaaggattgcttctcttcttgcatggctcttctccactccaccaattcataggtgttattctcatgcaaggatttcatctcttcttgcatggctattctccactccaccaattcatatgtgttattctcatgcaaggatngcatatcttcttgcatggatcttctccaccaccaattcataagtgttattctcatgcacggatttcatctcttcttgcatggctattctccactccaccaatncataggtgttattcctcatg

SEQ ID NO: 127888 - DNA, 277 bp, Glycine max
tggtttctttctcattctctcaaccaaaggtgaaagttataatagagtgagagaagagaaggtgctcctcatctcaccgctctttagttcttcttccttcaaaactcgaatgacccatttctatgtttttcgtactcttgcaattcctgaggtaaagatacaagctttgctcttctgctcactggatcgggttccaggaattcaagggtaggttcaaaaggggttgtgttgatctgcaccaagatgcttaatttacgttgaaaaatccattcatttg

SEQ ID NO: 127889 - DNA, 432 bp, Glycine max
agcttccttcagatataatccttctaatttattattgcggctgaagcagcacacttggaccatgacgaattcatgaaagttaaatctgcttctgtgaagattgtgcatagcaacaataaacgatgacgagggagtcgttgtataaggacggggtaaaaagctttctataaccatacaaaatactggccatcgtggtgctaaagttgctgggaatgcaagtcaaaggataaaacaacaggaagtgggatcacaatgactagctggtggacgtggtcgtctaacaagtttgataagaatagtggggaagaaagctgttgaagatctgttgctgggccatatgggtgccactcatagctcgagcattggtagagaatcgttgagaagcatggatgaggactgggaagattaaaatgcaagtcccgtgacacccat

SEQ ID NO: 127890 - DNA, 278 bp, Glycine max
ctcagctaataagtccatctatggattgaaacaagcctcttgctttggtatttaaaatctcatgacgtcatttcttcatttagctctgaagagaatgtcatggatcactgtatataccagaagattagtgggagtaagatttgtttccttgtattatacgtagatgacattctacttgcgactaatgataagggtctgctatatgaggtgaaacaatttctctcaaagaactttgatatgaaggatatgggaaaggcatcttatgttataggcataaa

SEQ ID NO: 127891 - DNA, 377 bp, Glycine max
caccgaagcagcacaaccgaactagtagagatacgttttaagttattttacaaaaagacacaataccaaccgccactcgatgcgagccatattataataagtcatgatattgcatatgaaaagaaccgtcctcagtgatgcttaatgcctaccattatcaatgctatctcccatgcgactattgctgcagctttaacaggaaatgcgtcgacttacagaatgacccaaacctgaataacatcacgtgaatccagccatatgatagatctacctataaaacaacttttgggacatatttctcttataaatgatgggcaggcaaagaaataattcagagagatgacagagcttactgaactcaagacctcgaaaggata

SEQ ID NO: 127892 - DNA, 345 bp, Glycine max
tgtgacagatcgatcaagtgtgggcgagagggtccatattatttctcccgccaatcacgggagcagacgttgttaccaatcacgctatggaggtgctcgccggcacataggatctgagccatgccctgcatcattgactgaacactgcgatcgagtgcggtggcgtacaccgtcgtgtcttggtttcctgcgacttcccataccacaccagtattcttgtctttggaagcataccacaccaaccatatctactattctcttggcattcatgttctttcaccctcacaaatctaaatttttttcatccaatacaaaattgtgagataaaagaattccttgaagtat

SEQ ID NO: 127893 - DNA, 423 bp, Glycine max
actaagcttgaggacatacacagagcgagactatatgatgtttaatcgtgtgtagcgcgcatatactcacgtcgctctctaagatttaagtggactgtgcttaccccaatacaagtatatttatttcccaatacatacatcaaatattcacttaatgcatgtgaaattacaaagcaacccatgatacacaaattagtctacggtatgctataatataaaggctgaaaaatcctatatttctacggtaccctacctacattatgaaaccctaaatacaaggcccaaaagaaaatgaaaccgtaatataatatgtacaaagataagtgggctcatacttagttcatgggcccgaaatataccctaaggccgatgagaaccctagagccttctctagcatctctggtctaatgttgttggagtcat

SEQ ID NO: 127894 - DNA, 280 bp, Glycine max
tcaaactattgctatgggcggcttttaacaaaccatcttctttgattctttttagacttgctctcctaaggacttaagtacgggcaacatctgatatttaccccttgaataaagatatcttctgaattgtgcttttgagcatacaaagcttatgacatatgcgctttgatatcagataagagtttgaccttatcacaaacgaggaaacaaacttgacgtgatttgcttttgaacaatccccaccatatatgagaatttacccgcgacgtgtgagtttaac

SEQ ID NO: 127895 - DNA, 245 bp, Glycine max
  unsure (1)..(245): unsure at all n locations
ntgcagaattggtcttcgccagtgaaatgatcaatgtgtttccgaaaagaggcaaatttgatcatcctactgggacgagtgagaaaactggggcaaataaagagggtgaggatgagggagaaacccatgttgtgactgccattcctgtacggccaagtttcccaccaacccaacaatatctttactcagccaataacaaactttctccttacccaccacccagttattcacaaaggccatcccta

SEQ ID NO: 127896 - DNA, 321 bp, Glycine max
gctatactgctgcactcctactgtaatgacttgcctcagtcaaatttgataataaaatgagatacataaaatgaactcttgcacctgatgtatctggcatcaaacagtcgcctatcagcatcatgatatgagctatagcatgttttgcaatgacaacatcagcagcattaactggaagttgctgaaaatattgctgcaaccaacttaaataaatcattttaccctttacatacttaccagagggagtgtcccttagtaatgcttgacaagcaacacgtacatcaccggtgatgatactagttatcaacaattcatcaatcc

SEQ ID NO: 127897 - DNA, 323 bp, Glycine max
  unsure (1)..(323): unsure at all n locations
ctattacgtgacctatgaaactcagcttatggattcaggtattccttanaacctcttgataatcttatgtaatgtgttntggtgctcatttggtattttataaggttttttaaaaattccaacaaatatatctctattaacattcaaaccattcatctttctatgccaatccacgtaatgatcatgcaatgattatgcatttatcgatatttgttagttntataagtactatcattgagcaagtgttgcatttccatcctatgacctttttgagaggattaataggttggtcgggcattctaaatgtgcttcatagtagtaac

SEQ ID NO: 127898 - DNA, 488 bp, Glycine max
  unsure (1)..(488): unsure at all n locations
ttaagtcacctgcggcatgcaagcttgtcanagctgatataaatggaaaagtatatgtgtagaataacttctacggatgtcagcttctgctcatcaaatagtcttaactttnttttataagtgcaacatataatttagcattttcttgctggtggtgttattattggtctttttttttcacgttatatagattgcaacggatatttatgcttaaaaaccattgaattttctccgttgcatagntagcttgggtgatgttctaaaaatatttctatgttgntgattggtcatggagggccgtgttgcagatccaaaaaggcttggactctgccagcaacatttttaaatctgttattntttgattattttagttggtttttataattagtcataaatggataaaatcaggctcaataataattctccttgtaaactgagttctccaaccattangttctcgaaggcttttggtgggagtgggacaagct

SEQ ID NO: 127899 - DNA, 283 bp, Glycine max
  unsure (1)..(283): unsure at all n locations
tattattattattattaatgacggccctatgccagttttcttttttatatttgtagttattatgtagatgtatcatgagtgttgaggtaatatagcagcatcctagcttgcaagatgtgaacgaggtggcagatacatgaaaaatgagagacatttatataatatttggatatatgtttgaagatgaaattgtattaactganactatcaaaaatgcattctaaagtaaagggacccatgtaatccactccctttattgatagtagtgagtatatatggaaaa

SEQ ID NO: 127900 - DNA, 484 bp, Glycine max
  unsure (1)..(484): unsure at all n locations
agcttccttctccctttcttcatcgatcccactctttcattgggctgccacctctacaccaccacaatattgccttcttcactaaatccctctcttctgtccacatgttggagcctctcgctgatcctagagaatacaccatttaggatgcatagattgctggtgcagcaagtcccgatcacaaggccgaagctacaccaatagtgtgcgttaacaaatattggggaggatttgaaattcattacccataattntttctctttgtttatctcactcatgttttctctctaatttatagtctcatggtttttttctctgttctacctttcaatatgcatttttattctgtaaaattgacccaggtgtctcttttttcttttctgtaaatgacaaagagaaaaacatttttcttttatttaatttttgtctgcaagttgcattatctnactctttttttgccagatggattgcagctgntatgttg

SEQ ID NO: 127901 - DNA, 292 bp, Glycine max
  unsure (1)..(292): unsure at all n locations
nntgggatntatacgttgttatctattccgaggataatgtttatctattaacatttactggtgtccttttttgggttttttggatgtagccgtattaaaggattctgcttataatgaagttgatagagctgaatgtcaatttgctactacagcaactgttcttgacaatgacacgcaggtatgttctttcctggtacctgaatttagtatgctttattttctatgtcgtgaacacaatggtattatttaatccatgtatctgactcagatttgtattcacataaaacgtgaa

SEQ ID NO: 127902 - DNA, 427 bp, Glycine max
agctggtcttcacactcggagagaggagtcatctgttccgtcttctcttcctcttgcggaggtccgtgacaagctgagcagcttgtgatccattcttcaatgggtcagaagacttcatgtcccactgatcccagacacattgggggaaagcctggcctgatgttgcatccctcattgcgctcctgaaaccaaaggactccatgacagggaggtatccttgatgttgtaagagtggtcctggcctctgcatttctacaaccatgtcaccttttggttagaacgtgtgattcacatagctgctaggacctggattcaccagtagaatgctaataacctggtttgcataatctggaagctaaaactctctgcagatggagattgcccctcttgaggtagatagcggctaacacatacatactcaagcaat

SEQ ID NO: 127903 - DNA, 295 bp, Glycine max
  unsure (1)..(295): unsure at all n locations
ctgcatacgtgaccttgaaactcagcttaatggaagaacaggtgaaggagcttcaatggaagaatgatcattcagtttccgaaaatcagnagggttcatgcaagcagaaagcgaagatcaatagggttcaaacacaaaggtctaggattcaaagcagaaaacgaaggagcaagcacaaaggtctagggttcaaagcagcgcaatctcgaaagctagcagatacgtgcacacccgtgaggtctangagcaatttcccttatttgtttttacaactacgaacgtttttttttaaaaa

SEQ ID NO: 127904 - DNA, 430 bp, Glycine max
tcagagtcacctgcggcatgcaagcttgcggactataccttcgatcgaacacttctgtgtttctgtctacgcccggatcaaggcgggctgcagcaccggctctggttccctaactgtactggaaacggttgccgtggctttatcctctatggttttctggagttgtaacatgacctccgagatggaagccatctgatcttttatggccgatagatcggcctttatctgttcctgcacgccctcttcattatccatatttctggatcgagtgttataggggtgccttggtgttttcttagttatgatgaaattcctaaagaaataatcaacggtgagtatgccatcataacatgagtatgcaaatggatgattcggtttctaggatccaccccaaggtctgtacatcatgtaatgagtccagaacttttta

SEQ ID NO: 127905 - DNA, 415 bp, Glycine max
  unsure (1)..(415): unsure at all n locations
gaatacaagactaaaccctatattactagggtacccttaacttgtanggtagggtaccctacaaatctaaaatggctaaaatacaagacccaaaagaagaanatcttattctaatatttacaaagaacagtggataaatacttattagaagattgatgaagggatcaaaatcgcataatttatgtgagatctaaaggatgtgcaattcatgcaactaaaacctanggactaaaatctcataatttgaatacctaagggataaaaaatgtaattaacctaaaaaaatttaattttataggtactaaaatngtgtagtanggactaaaatgaaatataaaataacatgaactaanatgaacaaaanatagaanaaaataaattttatttgaaagaanaacttatttaaagtaatata

SEQ ID NO: 127906 - DNA, 455 bp, Glycine max
  unsure (1)..(455): unsure at all n locations
taacctatcaatggtgttatgcccatatttgttactgatcagcgngactgttgattcgcattcttcaagtactccttcaagggttacatcaaggtgctcattctgcgaaacgaaatcaccgatagacaacaaacaatcgatcggtgtttggatgctaagaacaatatcagagaccgtgcaattatcgagagagagattgcgaagctccatacggagtagccttttcttcgcacggatgagagaatgaaaatgcacatggagtttgttctataagtgccacaaggcctatcaaccgatgagcctgngaagaacttcgccagaaattgtggactgaagccatgaaagcaagaggttatcgtgttgttcccaacggagaaactcatgtgaaacattcttggcatagcaattggtgatagtcacacaccgtggtggaatttgcagattttccagaaatg

SEQ ID NO: 127907 - DNA, 502 bp, Glycine max
  unsure (1)..(502): unsure at all n locations
atctcagagtcacctgcggcatgcaagcttccctacaagcagccctacttatgtctgatcaccacggatctctctcttcccttcagcaacgttgattccaaactttgtagccaattcaacctcatctctcacccctcccttcagagcctgttccacaattccatacaagaacacttaatcatatcatattatattatattatatcatatgtatgtatgatcaaagggcaaattaaagcacaggccaaagcaaattataactaaattgaaacccaaacacttttacatttaaaaaattggtccacgacaatggtttgggccacctatgaagcacggacactccagccccttaccgtgtctagtgtgtctagtgtgtccgacacgcatccgtgtcagtgtccgacactaacacgacacccgtattacattntatantttgaacattacaagtgtccacgtgtcctgtgtccgttcttcattgtgggccacaacatcaagatatt

SEQ ID NO: 127908 - DNA, 265 bp, Glycine max
agacaacaatgtcagtgaatagtacaacaactgtttgattgtgtgagccggcgacaacattcctagatggactcctttggaaaaccagtctaccaccaccaagataactatgttgccatgaaacggcgacagtacaacgatgaagtcgagtgagagatcctcccagggtcgatgtggcactggcaggggacatagcaaccctgctaacttctttgtttcatacttagtacattgacagtcaacacaatttgccacgacttgggtg

SEQ ID NO: 127909 - DNA, 437 bp, Glycine max
  unsure (1)..(437): unsure at all n locations
agctngtgcattgaagcctaagtttgtcattttatagagattatccgagagagagtgagtgtgagatgttgagaagaggagggggaatcccccttcttgtgtaaggaactatcattctctgattttaatctcatttattgttggggtttctttgtaatggctggcttaacaccctagttggggatttctaatgaatagctgatgtaaatacctaatatctaattgattatgntttctgtgttcaatgcttccttcaatgcttaatgtttgtatgctcttggtctgatcaaccatttgtgtgcacaattatgtgactttagcattgggaaatatactgttgccttacaacttgattgaagcaggatcaaaacttaattttacatgagggatctgccggttaagtcttgttttaattatgctgatacattcatgctatc

SEQ ID NO: 127910 - DNA, 307 bp, Glycine max
  unsure (1)..(307): unsure at all n locations
ntatatgttgacaagtntcanaagggttactgttaaatgaatgatttattaantncataaaaaggtgttattgtgttctgacaaaataaggtatgtgttactatttggtttattcctaattatgtagattattacttgtgcattgtgatactattccattaattagactcataatgcttattgaataatgttatatgacattgaaattatgatgagaagttggaatgaaatttcattacgagaagtgataaattatgaagaggtggtaaataaagatttattaatgaagtaattggttgtatgttgt

SEQ ID NO: 127911 - DNA, 449 bp, Glycine max
agcgtcgtcaattaatcactgcctactgtgcagtacctattctgccttaaaagaatggagacagagctggattgcaaacatagttccaatgtgggggcaagtgtaaaactgcctattaactataatagtatgaacgattgcttggaatatcgaagaaaaaagacctgacaaccagctgtcgtgaatgaactaaaattatggaatccaacgaaaactctgcatgctacctgcatggatatcatcaataacttgaatagctggaggattgacaatcatataaatataaggagctgttaactaacttgcatagctggaagactaagctcctcaggtacatgccatgctcgatctttctcgaaggtcgacaaaggctctggtccagacagcaaccgatagaagaatctgaatagtgtagttccaaaataatatcaattactgcacatgatcat

SEQ ID NO: 127912 - DNA, 285 bp, Glycine max
taactgacttcccaactgcgtattgcaatctttttattttagcttccccattcttatcaattaaaaacttttgtcgatgatcttctaaataattgtgcattctagtaataaagccatcattattctgaacagcagaaaagcattacagccattagcaagaacttctcacaaaatataaataaaaaaaaatagagatacctctttaggaaatgtcttggtaaagagagacagaaactcgccataaagggacacatacacagactgagcatccataggcttaaaacc

SEQ ID NO: 127913 - DNA, 221 bp, Glycine max
  unsure (1)..(221): unsure at all n locations
agcttatcaaaattntagaatggacttcattagattataaacaacttcaagggaaacacaaagaaaagatagataattcttcataaatttccactcaatcatgagatgactttgaaattctaaagttaacgacaacaaagcttcaccttgaaatgagaattgtaagaagactattatgaagacttaaagtgaaatcataaagtacaaaggtgcctctataa

SEQ ID NO: 127914 - DNA, 330 bp, Glycine max
  unsure (1)..(330): unsure at all n locations
tctntntagaatgagtctntatataaatttgntccgtgaataacattaagtattcactacttcagcccagaagtgtttaggtgtagagttgtcattgagcatggttttagccatttctttcaatgatctattctttatttctacaacaccattttgttgaggtgttctagcaatagagaagttatgaagaatttcattctcttcacataataagcgaaagctctcattttcaaactctccactatgatcacttctgattgaagtaatgcatactcctttttcatttagaatcctttttacagaatttaaagaagacttcaaaggactcat

SEQ ID NO: 127915 - DNA, 377 bp, Glycine max
aggggcctcatggctatcacttgttagaccaatacaagatctcctcgcagaacaaataaataccgggattatattgtgagataaaaaaaaaacgcatttggatgcatacgaaatccgatagattggcacatcatcctggatgttagtttgcgtgtatgacttgcttaagtcttctatgtctagctgacgaagtaagaagactcaccccttacttttttctaagactagatggcaggtgaggagccgacactccatctcgaggatgagagcacttggaggtgatagatacccgacgcgactaaaggtgtggatcacttccttggatatctctattatgtgtggacacctaatgacttatgcctcttgtagtttaacat

SEQ ID NO: 127916 - DNA, 427 bp, Glycine max
  unsure (1)..(427): unsure at all n locations
tcttagtttcagatgatgcagatgggtttgtagctacctcatgctctcctctaatgactatggcatcatttctagcgctaaactgctgggagttggaagccatcttctcaattaaatttctagcttcaacaagagtcatgtctccaagggctccaccactggcagcatctatcatacttctctccatattactgagtccttcataaaaatattggagaagaagctgttctgaaatctgatggtgggggcaactggcacatagtttcttaaatctctcccagtactcatacaggctctctccactgagttgtctaatacctgagatatccttcctgatggctgtggtcctggaagcanggaaaaatntttctaagaatactctcttaaggtcatcccagctcgtgatggaccttggagcagngaatac

SEQ ID NO: 127917 - DNA, 294 bp, Glycine max
  unsure (1)..(294): unsure at all n locations
taactaaccaatggcttattattctcgcaaaaaacagttcaccttgtattctaagtgcgtaactgcggtatcagaanacaaagtttcatcgggcttttaattgtttgaagaatgatgaccaaatcgnncnctttctttgttgttttttattttggcctggatggtggtgatacaacatggctaaaaaattgaaaattgttttgaaatgcctctgttttttaacaaatttgaacctgaattgatcaatataattaaacagcagctggacatccaccccttctagggtcacttact

SEQ ID NO: 127918 - DNA, 477 bp, Glycine max
  unsure (1)..(477): unsure at all n locations
acctctaagncacctgaggctgcagcttgacacacagatttatatacactttattctggttgggatcaaacactttcatgggaaagcaaatagaaggccactacctatgatgataaggaacataaatgaacttctcccttgctatcattctgttactctgtgtatttctgccttgctaacaaaaagatcacacatttcttacaagctgtgtgtgatcagccaatatgtgcactgattagtgtgtgtcatcactcatcatccaatttgtgcacaatttctaacaatatcatgcctatgctaggtataaggtactacacttattaataggcagtcctgagacaacaatgattgtttccatataatactctgggcttagaacctagcactgaaactatatatggcctagatcatggttttaacaccttctctaattttcataaaacatacatctgagcaaaaattctcaattgagtatat

SEQ ID NO: 127919 - DNA, 339 bp, Glycine max
  unsure (1)..(339): unsure at all n locations
tcactagatgcanaatcgctcccgccctccctatcattgtcttctcttcctccttnttttgggataaccaaatcaaaacgcacactgcgttctcctttgcctcctttgccatcattgtctctttctccagggctaccaccagcgccttcaccgctccataggaatgcatggtagccgccgatgaaggaggtggaaggcatgaaaggagttgttgaagaggatgggaaagaagattctgtcgaggagagcaatgactctagggtttgaggaaatgaaaagactgggtggtatgttggttctgaaggagtggagaaggggttttggtgtcgtgagtggaca

SEQ ID NO: 127920 - DNA, 482 bp, Glycine max
  unsure (1)..(482): unsure at all n locations
gtcacctgaggctgcagctcaactgatcaagaaaggagcttttctgttatgtgtattaaggggaattataaagctagtcttatgtccactgttctgaaaagaaatctgtaacagttgaacttaacagatattatttactctgtctgactcattcgagatgagttctcaattctttgtggaggttctgaagataaattttcaattgtaggttttgatggccacaaatcggattgatatcctggatcaagccctccttagacctggacggattgaccggaagattgaatttccaaaccctaatgaagaggtttgcattcttgctttcatgctacttattaatatatatgtactgcgagaaaaagatgcacctggtgcattcctaataaagtattcctgaatatggctatttatntatgcagtctcagctggatattttgaacatcccttcaagaagaatgaatttaatgcgtggcattgatctg

SEQ ID NO: 127921 - DNA, 157 bp, Glycine max
ttcaactgtgtccttgtgggtagtttagtaattagagctagtggtgaggttagttgtgccagctgtcactagctaggcttatagatactcagatggaagcttctgatttggtgaaatgaaccaacacccctcccccccccaaagaaaaaaaaatttt

SEQ ID NO: 127922 - DNA, 479 bp, Glycine max
  unsure (1)..(479): unsure at all n locations
aagcaccgcagctgcagctttatacctcctgagagtgagatctatttgttttagntgtgtacaagcatattctaactgattctagaatattctacactctctaacagaagtgattatctgcttcccactccatgcaaagctctacccgattcgcacataatcctccatgtacgttggagctcttgttttcctcttgggcctctcttcacgttgctgcccatttacttcctgcaacccttctccattactcgtaacactcccctccccttcaaatagcaccttgtcctcaaggtggtgaagctttttgaagttggaccattcttcccacgaagcttcctcgattggcaggtctttccattgaactaacaccatgcgcttaggtcccatctctgaaggaatcagcttggacgcgatgatggctaagggagtaacgactgggtcactatccatagctaccggaggaagatcaacagaatctt

SEQ ID NO: 127923 - DNA, 345 bp, Glycine max
  unsure (1)..(345): unsure at all n locations
actaagctggtactactattagatagctactaatactatggcanactgtaattgnntttttaacttaannatattacactcggttatgtatgtgnttttctcttgacttanatataattntggtcattttattttactcaatacgtaattntggtctctctattttaaaattaaaatatttgatactcctatttttaaaaatctacaactttggtctctctattttaaaatacaaacattttgtccctatattttagaaaattcataattttgattctcatattatagaaaattcacaatttggtttaatatataattttcctatgtttattcttttatttttta

SEQ ID NO: 127924 - DNA, 283 bp, Glycine max
cctacagctgaccaaacaaaatgatcctcattgaagccccatcttgggttgtgatgtaataaaaagatcaataccatatccaatgaggctgcttatcatggaccaatgccaatgtcagctgatacaccattttcatgaatggatccatttccacctaagcacgcagataactcttccattcctgtcttagagatacatgaagtccagacttgatgcaagctccattggagcttgtatgcctaagatcttcttcatcaatggcatcctttgctttttggaagat

SEQ ID NO: 127925 - DNA, 431 bp, Glycine max
  unsure (1)..(431): unsure at all n locations
aaaactaagcttacgactngctgtntcccccacttaagatatacggtagatatcatttatataaaatcaaataaaaaagtgttcagcactgaattgtacaacgaatttggttttcataataatttgatttaatgcacatcaaccaattttttcccacataaaaattagtaataattaaacaacttcatctttgggcattactccttttgtcaaccacacaagaagtaaattaacaacttcatgagaagacaattaacgaaaatccttcatctaaaaaaatatataaatccaaaaaaaaacacaaaaagagtgtatataataaaaaaaataatgtataaaaaaacacagaattggaatctggaaccggatccaacattagggtcatctaagcgaatccaaatctcacgcgctatatataccaaacttatagc

SEQ ID NO: 127926 - DNA, 340 bp, Glycine max
  unsure (1)..(340): unsure at all n locations
agcttgtatgaaggagtcgccgtatactttctctacngcaccaccacacaacgagccactcaacaagaacgtggcctcctcctgtggtgaaaacatcagcacgcctttgctttgttcaaagaacagcttactaaggcacctgttttagctctttctgacatttctaagacatatgatctaaaatgtcctgtctctggagtgggacttggatcttgatttgttcagagcggtccccctattgttattctaagaaaaacttcctggtgcgaccctcaacttcctcatctatgatagatagcttcgtgccttcataagagcactatgaactnggtaacattac

SEQ ID NO: 127927 - DNA, 301 bp, Glycine max
cctatgatgtcagatatgagaacaatccacgactgcgacatatgaagaaatgcgagatatcctatacacagacagtcagcgtatgtattaaccttagctgccgcatccgaatttagccagtaccaatagagacactgtgcctcgcactatcaactgctatatgactcaaaaacagccatgcacccttggtggacgaacaatgaagtactgactaacgtgatagactctatctaaaataggaagatgccctcaagaaagctaaagcttcacttgacctgttcttaacacatgagtcatggct

SEQ ID NO: 127928 - DNA, 179 bp, Glycine max
gttacatctcttcggcgtttacctatacacctactggaactttcattttttttaataataaaattataaaagttttttagtgaacttgttaaaataagtaattggggcaataatagggggaatatttccctagctataaatagcaacatgctaggtttttcagactgactcctcagcct

SEQ ID NO: 127929 - DNA, 422 bp, Glycine max
acacacattcaaagaaatatcaccttgtttccaaataataatttattttttttaaaggcaaaataatatattctttgacaatcacaagattcacatcgaaatgtaagcttatctatgcaaaatgcatggcaacgaaatgctgtggttttgactagttattacttcatcattaatttacaacgtcattgatttgacacaaattgatgatgatcgatgtaaattgttttttcacaacaaagcaaagagattgttcaaaggttttaataggaaagaattttcggtcaaaaagttcttatattgttaatcaataaaaaattattcttaacatcattttaaaataattattataagattaaataaacttataatattttatagttagataataatataatagagtaacaatcaagtcggtattgcat

SEQ ID NO: 127930 - DNA, 293 bp, Glycine max
  unsure (1)..(293): unsure at all n locations
ngtataattccctacattatggttatgttggagtatattttatatataaatcttattttatggttaacgctgtctctagaacatttccattggatttaatgatgaaatctgtgcattttcaggtgaaaaagaggctaagttttgaattgcaaaatgttgcagttgggctaagtgcatattcaccactaagcgcagattcagcatgcttagcgcanaggagaatctggcagagcatcaacatcaaagtcactctctaagcgcgagatcagtgcgctaagcacagcaggtgcttt

SEQ ID NO: 127931 - DNA, 453 bp, Glycine max
agcttggaatgactcacaaagtcaaaagattgttcactgcttgaagcagggaagaatttaagaagtgcactacagatagttttaatagttgagaaagttgaaaatgagaagtttgacttaaagagacagactaaaatctggcaggcatattttttatgtttccattttcacatttaggttctatagttaactttaagcacttaagccaatttataacttccatgaacacgaggagaacaaaatcttagagaaaacacatcatcaaaagattttggaagttgaaaaacttagccaaaccatccaataccaatatagtccaaatctttggtactcatatggtctgcctatttagtccaaaaatactattattttcattatccaagaccaatatgttggtaaatatttgtggtttaatttaaaatttataaatatatattaattctggtttataaa

SEQ ID NO: 127932 - DNA, 474 bp, Glycine max
agcttctaaggaggtgagcttagttatgttatggtgtgtgtagctaagctctagcttctcaaggagagtttctcaaagaagcttctcaagaaagtattctcaagaaagcttctcaaggaagctacctagtctataaatagaagcatgtgtaacacttgctgtaactttgatgaatgagagtcttgtgagacacaactcaaagttcaaattctctcccttgttcttccgcacacataaactataccctagacactagagcctaagcactacatatctataatttctaagaccaccaataacaaacaaccatatatattaaaccctaacatctaaactaacccctaacctaaaccctaatcactaaactaaacccgaagttcaaccttaaccactaaaataaaccctacgaactaaactaaaccctagcctctacgctaaccactacatatctaccattcctagactcaatacata

SEQ ID NO: 127933 - DNA, 429 bp, Glycine max
  unsure (1)..(429): unsure at all n locations
ttacggacctatgaaactcagcttgaggattatggngtacccatcacatgtggtactaggtggcggtcgggcgatggtgcacaacaagttttccacattcacaaatcgcgcataaacccaccatcccctgttgcccacctccaactgagctcacgtactcccacgtagcccatctcctcgtttctctcaacaccgggtccccatcaatccttccaagcttccccaacatccaagtaattcaacattcaaacaacacaaactatcacagccaagaaaatagggcaaaggcagaaaactatgcccaaaacaccaaccaaaatcacagcttttctcacttaaagaccccagtacatttccttcgttccaattcgttaaccgttggatcgactcannaattttactggaagtctctagtacataagcctacat

SEQ ID NO: 127934 - DNA, 161 bp, Glycine max
tgataaaaagcttgcctgttttttatgttcttttgttccagtacattgaaatttaaaagaaaaaaatgtatattatgagaattcaaattaatgagatggagaattttgcatgacatttaagataaagataattaccattaatgggattcagttaataaaaa

SEQ ID NO: 127935 - DNA, 263 bp, Glycine max
  unsure (1)..(263): unsure at all n locations
taaanaagtttanaaagataattaagttatacttattattatataattattacgagatgaaagtaaaatttatccttaatattatatacaatcaaaatcatattattaaagattagtgttattaatttaagagagatatttcacctaccactccaagtttggatttcacgtctttgataagatccaatgagaaggtgacatctgagatggtcatttggcgagtcttgaagtcttccgcacaagaccttattggtgtttgatca

SEQ ID NO: 127936 - DNA, 249 bp, Glycine max
  unsure (1)..(249): unsure at all n locations
aattggattcctaatattcaacttacctatgtggatgtgacatcatggcagataggtcccaactttccatcgtggattcagtcacaaaacacactttaatatgttggactgtctaacacgggagatttaaatnctattcccacttggttctggaaagcacactctcaggttttgtatttaaacctctctcataatcatatccatggtgagctggtgactacaataaaatatccaatatctatccaaact

SEQ ID NO: 127937 - DNA, 320 bp, Glycine max
actcagctgcttcttaattgccaaataagatataatttttttatgttgacactgatgcaacgaaataaaagatatatcgagcacagcttagataatggcatctggtttgtaggaatgacatcatgccagtgctgcctatagtataagcttttaatgtacacattctcttaatatcttctcatttgtgaagaagattttatcggctagctaaattcaacttaataatcaaataatacccccacacaaagctctaaataaatgaaaggtagtttaatgccaacacttcgatatctaaaaaaaaaaaacccttactgacacaa

SEQ ID NO: 127938 - DNA, 417 bp, Glycine max
  unsure (1)..(417): unsure at all n locations
agcacctgcgctgcagcttgttactgattganatatgtgttgtatatataatgcttgcaaggcagactgaacgatgcagaatatctgctcatcaagaagtgagtttatttgtgtttgtgcgcgcacgcctgcatgcgtgtgctttttggttatccttgcttagaaatttgcttcatatacatggaatctgcttttgtttgtggaggggattcgactgttgctgtctgttggtaattgtagatggctcttattgctcgaatccagcacccttacattgtggaattcaaggaggcatgggttgagaaggtgagagaccctttaagtntttgtgtaatgtaatcatatccttaatagttactacagtattgaactctctgttgtaaactatttctgctaagcacaatctacttctgttgc

SEQ ID NO: 127939 - DNA, 339 bp, Glycine max
  unsure (1)..(339): unsure at all n locations
tactcagcttatggcaagccagtggttagaggacaaggctggatggtttagttgatgtgtgggattcataatcatgaatntgccaagtcattagttggacatccatatgttaggcgattgagtaaagctaaaaagacacttattgctgatatgacgaagtgaatggtcaaaccaagaaacattctgctaactctgaaggagcacaatgccaatagttgtacgaccatcaaacaaatatacaatgcaagaagttcatacccttcttccataagaggaagtgataccgaaatgcaacatctaatgaagtttcttgaacgggatcgatatattcatttgcac

SEQ ID NO: 127940 - DNA, 233 bp, Glycine max
taatactaagctgatcaaagacttctgcttatatgccgaagattgcttttccctatgctaactgtctatgagactttgatgtttgctgctgatattcgtcttggaccacttgcacttgctgataaaaagcagaaggtggagaagctcattgaccagcttggcttaacggtaagggttttgcaaccaatgaaatagtcctacatgtactagattaatctgctaccaattaattg

SEQ ID NO: 127941 - DNA, 260 bp, Glycine max
tttagcaatcctttcctagatggctttgattatttattccagacagaattgttggaaaaactcatctttgatttgctcccatgaggacagactatggtgtggtcgagaattgagccattcaactgcactctcccctaatgaaaagggagaaagtagcatcttgatgtgactgtctttgattccgtgtattcatactaatgtgcatatttgttggaatcgagtaaagtgggtatgtggttcttcaatgttggataccctaa

SEQ ID NO: 127942 - DNA, 241 bp, Glycine max
aactcttggctgtactccactccatgcttcttgtggtggtcgatctttgacattctttgttgcggagcgattggacaaataaacggtgcatgcaacagcttcggcccaaaattcctttggcatatatttagccttcaacatacatctagtcatattaagaagagttctattctttctctccgctaccccattttgttgtggagatctacgaaccgttagaaggcgacgaatcccatatttt

SEQ ID NO: 127943 - DNA, 462 bp, Glycine max
  unsure (1)..(462): unsure at all n locations
tgtanaagtcgacactgcacgcattgcaagccttgtccgcgaacctgggtagcgcctcttactttttctctnttacctgacaaaaacatcctcctttgacctcaaattcattaatgttcttgatcaacatgaaacaaggatgagtattgggacactccttaatatactcaatgaccaacacgctgactcaactatgaactccttgaatccacgactccaagcatgctgcaagccaagacaaatcgcccaaagttctgctgcaaaacagaacagcaccaatgtccgatacgatgggaattaaccaaccagtgtgatcactaagactctccagctgttgcttctcgagctgatgacagctggacacagttcaattgactgtttgtggaagaaggaaccctgatgctatactagtccaagatgcaatctgggaaccaactttattgctctgcaactcactgagat

SEQ ID NO: 127944 - DNA, 283 bp, Glycine max
aggaaaataacatcatggaaatcaatcatatataacatggagaatgtcgtaagtcaaaggaaattaattaattgtcttgcatcgtactactatgtgtcaacaagtatctggctcacttttgtttggagctgaactctattcactttttgtctggccatgattatatagacttggatttaataaagattcactgtagaactttatatattgtccaattataaaacaaaatattagtatgatctcttttaaagaaatattatcaaacattataaacctatcataa

SEQ ID NO: 127945 - DNA, 359 bp, Glycine max
  unsure (1)..(359): unsure at all n locations
atgtgactcttcttcattgaatttgaatttcaaagatcaaaggcactggtaatcgattacccaaacattgtaatcgattacagctttttgaaaataattggaacgttgttaattcaatatgaaaactntttcacaacaatattgctactggtaatcgattacaataatctggttatcgattaccagagagtaaacactctctggtaaaagggtttgtcaaaactcatgtgctattcaaagcttgaaaaactttttaatactcatcttgattgagtcttctcttcattcttgaatcttgagtcttgagtcttgatcttgattcttgagatcttgaacgctgaatcttgattcttggctct

SEQ ID NO: 127946 - DNA, 247 bp, Glycine max
  unsure (1)..(247): unsure at all n locations
tactcagcttaaccaaaggatggtcatttaagaccttanatatttatgacaatgcatacaagattgaattgcccggtgagtataatgtgagtactacatttaatgtgtctaacttagctctttttgatgcagatggagaagtcaatttgaggaaaaatccttttgaagagggagagagtgatgaggacatggcaaggactaagggcaaggaacctttagaaggacttggaggacctatgacaagggt

SEQ ID NO: 127947 - DNA, 265 bp, Glycine max
tctcgctggcaagacgagtcactaaacatttaatggttctttgggtttgcaaggaaacttttgcgcagaacatacatcactttgatcaggactgcatgttgtagttccttttaaagccccagactggatccttcatagtgaatctctgtgtgtactttcctgattgagacattggtgtgtcaacgtcattgtcatgatgaagtacggttgaaagaaagaaatccctcaatgccccgggaggtgccaaatattctttcccaaataa

SEQ ID NO: 127948 - DNA, 268 bp, Glycine max
ctatctgaggcccttaccgggtaaatccaccctttcatgtaaaaaactaatgacgttgaagctctgtggtgtgatcaattaactacagttgtcatgacgtgactatgatctagtgagtttactacaaccgtcatcagaatgctaacgctatttgtagagggtcattgtcccctcaccatggtcgttatgctcaccacaaccgtgttgtatgcactacgaccgtggtcaagtgatagaagtcttcaatctttgggtaaaagtgaaaatt

SEQ ID NO: 127949 - DNA, 390 bp, Glycine max
  unsure (1)..(390): unsure at all n locations
agctntgaaggcatctacctcttcaagatgtatatggttatgcatagagagaagtggtagaggcataggacggtgaaatcaaatcaacaatagtggaaggggagatcaaaacaacaacggtggctgaggtagaggacgaatatttataatgaatgatatactgttacaatgtttattntggtatttcggtacaatatttatcttggataatttatattgtgatagataaattatggttcctaatcacaattattgatacttattattttgctttaaattatgtttgctaaaatattctttaagtgattattgtgatgctatccttgtaaagataaaaataaataatgaaaatctatcataaaattatattctattctaaaatgaaacaaa

SEQ ID NO: 127950 - DNA, 319 bp, Glycine max
tgtgtagcggtaattctagctgtgagaagaatttcgcactctgttacctagatgtcggtgcagcttgataatagtttcctcctcttccttggtgtagtttcctcttttgaggtttggccttaggtaattcagccaccttaatctgcaactctttccacatctcgcaagacctgacaaattaataacaacaacaacaacaaagtaaaaccaattacaatggattcatatatgatttaggtataatctgtgcatgtgtataattaaacattgaatatatggttcctacatattgatgtagaagttaaaccaaacctgaaaa

SEQ ID NO: 127951 - DNA, 290 bp, Glycine max
tctgatacatacgttattagaaaatgcagatgagaatatattgaagacacgttgcttttaacgtgcatctccgaagaaaacaataaaacgatctctgatagaaataatgaaagaacagataacatcttatatagacttactcgaatatgatgtgcacatatataaatgttgcaattcaactgttaggtcgatgaaactattaatagacactcagatgataattttttttctaggtaccaagattgcacaaacttcatttacactaacacaccttacctaagaaatggcta

SEQ ID NO: 127952 - DNA, 328 bp, Glycine max
  unsure (1)..(328): unsure at all n locations
tagggggctacatggtaagtttgggcagtcatctggtttttctgatccggntccattatcttccctggctgcaaaatcccttttcttgactaggcctagtctaatgcaatatgttgtcactcgggatgagctgttggaggctgctggagaggtgtttgctaacgttgcttctggtgtgttgaaggtccgtgttaatcatacttacccattgtctgaggctgcaaaagcacacgaagacctggagaatcgaaagacatcaggatctgttgtgttgataccctaagactctcagttgtgtatgtgttatacaccaagtccttgtttgctt

SEQ ID NO: 127953 - DNA, 441 bp, Glycine max
gtacactatgaagactcgagcttcttagttacagatgatgcagatgggtttgtatctaccttatgctctcctctaatgactatggcatcatttctagcgctaaactgctgggagttggaagccatcttctcaattaaatttctagcttcaacaggagtcatgtctccaagggctccaccactggcagcatctatcatacttctctccatattactgagtccttcatacaaatattggagaagaagctgttctgaaatctgatggtgggggcaactggcacatagtttcttaaatctctcccagtactcatacaggctctctccactgagttgtctaatacctgagatatccttcctgatggctgtggtcctggaagcagggaaaaattattctaagaatactctcttaaggtcatcccagctcgtgatggaccttggagca

SEQ ID NO: 127954 - DNA, 253 bp, Glycine max
ggagcacgaaattgaaggaataaaagagggagagaagtggaactttgaagtgtgtctcataagactttcatgcatcagagttacaacaagtggtacacatgttcctatttatagactatggagcctccttgagaagctttcttgagagagcttccttgagaagcttctttgagaaaactcccttgagaagctagagcttagctacacacacccctcttatactaagctcaccttcttgggagcttccttgaaa

SEQ ID NO: 127955 - DNA, 266 bp, Glycine max
  unsure (1)..(266): unsure at all n locations
attacgtgacactatccaccactcaagctngagatgaggaagtgttgaagggtgaatcttcctgcttttattgttgaccacagagtggtacctggagatatgtcgcggaggtcacgagaccttggggacgtcaggtggggtgctattgcccaaaaccaagcttgaccaatcccgacccaacccgggcatagtcggtcagtgagaacctgtgatgtacctaaacaggcgagctcctggcagtcaacagataaaaggaacaaagacca

SEQ ID NO: 127956 - DNA, 335 bp, Glycine max
  unsure (1)..(335): unsure at all n locations
attccctgtggatacgatactcgatcttaccgtcttatactacttgtgcgaatcggtacacttgttgacacaacgaacaatgtctaatgcaactttaaagcatgaaacaacattgttgtacttgacaacacataggaagtggtacacatctattttaaaaaaaatattgcaccaacagaactgacattcacttgcctactcagttatntaagtctaattgaacaacatctataaatacgacaaaaacactcttaacaatcacacattcttacccaatctacctatataaaccaatttgtagcctcgaaaatatggccattttacgagaaaacaag

SEQ ID NO: 127957 - DNA, 295 bp, Glycine max
gcagctttaactcgaggtccgaacaagcttctttatatcgatacgctcgaaactggccaacggaagctctcaagatattcaaatggtcataactcgtaactcggaggtccgattcaggcgcataatatattgagacgctcgaaattgaacaacggaagctctctagaaaatcagatggtcattacttactcacttcggggacagatttatgcgcataatatatctggacccttaacattgacaacgggagctcttcaaacaacccccgcgtataacttttcactcggatgtgcga

SEQ ID NO: 127958 - DNA, 174 bp, Glycine max
atctgctacataacctgacatttagtttgtatctacctcgagcaaaaaagaatgaggaatttccatcagaaaaaaaggaaattccatgagccaaaaaaaaaaaggaatttccctcaaagggggaaaccaaaaaaaaaagggatccctcaagatgggaaagttaaagaaaaaaaa

SEQ ID NO: 127959 - DNA, 373 bp, Glycine max
agcttcggtattcaatttcgagcgtctcaatatattacgggactcaatcagacatccgactaaaaagttattgtcgtttgaattatcttggaggttcagatttcaatattgaacgtctcaatagattacgggactcaatcatacatacgattaataagttattgtcgtttgaattagcttactgcttcaaaattcaatttcgaaccctcgatattttacgggtctaatcaacatctggtaaaaattattgcgttgatttgtgaacttccttcattaagcttgtattacggatataactcataaagttgtttgattgaactactcattccgtgttttagctataatcggaatattcgtattccagtaatatcac

SEQ ID NO: 127960 - DNA, 229 bp, Glycine max
taactttttactcagatttctgttatagtcccgtaatacatcgagacgctcaatattgaatgttgaagctctcagcaaattcaaacgacaataacttttttactcagatgtctgatagagtcccgtaaaatgtcgagacgatcgaaattgaattctgaagctctgagctaatacaaacgacaataatgttttgctcggatgtctgattgagtcccgtaatctattgaaa

SEQ ID NO: 127961 - DNA, 320 bp, Glycine max
atcctgactcaccataaaccttgacccattgtgagtatgtctatccttaccctcggaagcaaaaaaagaatagaagggaaatttccaatcacagaaaaagagaaggaaaatttccaatgaaagcaaaaaaagaatagaagggaaatttccaatcaaagaaaaaaaagaatgagaattccccattcgaagagtgggagatagcaaaaagaaaagaaaggaaattcccaatcaaagagtgggagaaagcaaaaagaaaagagagaaaattcccaaccaaagaatgggagatagaaaaaggaaaagataagaaggaaagaaag

SEQ ID NO: 127962 - DNA, 429 bp, Glycine max
  unsure (1)..(429): unsure at all n locations
cgcttatgaatcagatctattcatatcgataactatattctatttataactataattattntacatatttcttatttacttattctataccagaagcaactaatgtgaaattaataagaatttaattattcgaagttaataatataaaatatatcatttaatcctataccttcattgtatttttgtcatagattaaataatacattactgaaagagaatatgctcgagtaagacatatctctattaaatcaatcattcatctcatattaaagttcaagagcttgcataagtttgggataggtacatgtattgtttgtattgcatgaatcggaatgggtacagtaatacccatcctacaactggccattgtcattcctattgatgacccatctttgagctcaagagctcgtcatgccgatgatttctata

SEQ ID NO: 127963 - DNA, 353 bp, Glycine max
  unsure (1)..(353): unsure at all n locations
ggcttgtggnggcttctatggaggctggatctttgagcttcaatgttgtcctttaatgctgattgtccaccatggagatgcagcggaagacaaaggagaagaggtgagaggaggctccatccactagggaataagccatggaagaaggagcttcaccaccaagatgagcctcggataagaagcttggaaggatgcttcaatggaggaaaagaaagagggagagaaagagagaggggggagcacgaaattgaaggaataaaagagggagagaagtggaactttgaagtatgtctcacaagactctcatttatcaaagttgcaacaagtgttacacatgcttctatttatagact

SEQ ID NO: 127964 - DNA, 440 bp, Glycine max
  unsure (1)..(440): unsure at all n locations
aacacacaaaatggaagtactaagtgtttattacctatacttaacaaaaaatacttataacactacataataaccataatttggaagagtttgatacaatttacacaagttttatacacaaaagttagtcattttcaccgactaacagctagcagagaataatttatgagcaacctcataggtatagatcttcgaacaccggtgtctacttatgtgtacatgcaaagtatgcccatacctttgtttgcttcctttcaccaacgtataacggtagtttttccactaatgacctcctncaagaagagcaacctattgttgctgatgaacaacctcaatcacaagaggcggatgagtacatcttaagccaacaagaaacagacaaccttctagatgttaaactagtggatacaaataacattaatttcccttgttaattatgt

SEQ ID NO: 127965 - DNA, 409 bp, Glycine max
aagacaaaagatgtaactcttcataaggcttttgaatttttcaaattggttttaagtttttctaaaagttataactcttttaaatggtcttcttgaccagacatgaagagtctataaaagccaggctttgttttgcaatttaataaaaattcattcaaatcatcttgaacacatattcatacaatcctttacaagccttgaacctctttgaacttcttattctttgtaccaaaagctttctaaagttttctggttttccaaaccttgaaaacttgtactattcatcttttcattctcttctccctttgcaaaaagaattcgcaaggactaaccgcctgaattcttttgtatctctcttctccttttcccaagaacaaggactaaccgatgaattctttggtctccttct

SEQ ID NO: 127966 - DNA, 456 bp, Glycine max
  unsure (1)..(456): unsure at all n locations
ccggatcttnaaccaccgcggctgctgcttgtaccctagggaccacactttttcttaattattcaaccaagttattcgtcaaacgttgtgatcatagtggagaagatcacatacgtgattaactcactcacagtggagagtatcatagaggtgatcaaatcactcatcatcatgtttattaagagagagagagagagcattacaatgaagaggtaagcatccatccattgtagatcgataagaacaattggcgtttatcgtgggactaggcaaaatattttcctttgaccttatgagtctatggtagagatgaggagtttgatgattcaatcagtagcaacggaagaaagatcaatgatgcacgggtctaaagtgcaactagaagcatttacaaaaacaaatgtctaggacttgaaagcaataagaccaaaccatgatacacatgtgcaagcatta

SEQ ID NO: 127967 - DNA, 178 bp, Glycine max
gaaagaaaatgtaagtctatgaatatgaaagttaaatacctaacgtcaattctcatgttaataaataatattataagcttgttaaaagacttgctttactattaaagtatacattactccctgatgtatttttgctttattcttagttagggaattgtatcactagttggtaggacta

SEQ ID NO: 127968 - DNA, 354 bp, Glycine max
ctcaaactacactgttcagttggatctatacactacacctaccggttgaatagaattcccggtgctgaaagaggatgattatataatgcacaatcttgagaatatcgttgtatgattgcgctatacctaactgtattgagaatattgctacatgatcgtgttgagtttaaatgagcctattcgtattaactcgtattgtattttaagtgtattttgcatcttgatcatcttgattattgcgatcacatcatttttaagatatatagttgtatcagatatgtctgtaaaagtcttaagagatatcttatttaggcggttggatgaccttgtatttatatttatcaaacgattcta

SEQ ID NO: 127969 - DNA, 267 bp, Glycine max
  unsure (1)..(267): unsure at all n locations
tgatgtgaggaagcgcggaagagtcactctatctattncttgtgtgttgaccacacaatggcatctggagatatgacgcgtggggcaggacaccttgtagacgtcaggtggggtgctatctgcccaaaaccaagcttgaccaatcccgacccaacccgggcatagtcagatagagaggacctgtgacgtacctatacaggcgagcttctggcagctaaccgatataagaacaaagaccacaaagcaaggacgcttgtgtggtggctg

SEQ ID NO: 127970 - DNA, 446 bp, Glycine max
accggatcttagagcaccgcggctgcagcttaccattaccccacagaaatattgttttgtttcggtatagcatatagtctatgatcaacattcaacaaaggtaacatgtaacgggttatgataaaagtaagggaaaaattttaatagagcaagagtcaacgatagcaacttcgatatcagaaattcaacagaattaaagttagacggttaagatattcaaattcaaagtgaatagaatcatgccttaattatagtgaaaatacaagagaactaacttatgtcagcaaaaaaaaaaaaaacagaagaaaaatgatgaagtcttgcctgcaaatgaagcaactagggcttggagttcctgagtccaatcaaaggcacggattgcctcatgcactccagcatagtcacgtaaccagagcttctgaccaattttccaaaccgcggtgact

SEQ ID NO: 127971 - DNA, 397 bp, Glycine max
  unsure (1)..(397): unsure at all n locations
tgccgaagcccagcaggcaaatccatcatagtctnttgttactcatttaacacagcatccacaaattttcggtcaaatagcttcaacaaagacataatgaatttcatttctttatgaaacatcaaattaaagcaattaaaagttgtacgtttcataaaggggtaaaaaaacctattcttatatataaaacaaataatagtaattctaacctcttcaaaaagtatccgtctcctaaacaagccaccctcatctccctcatcaccatcatcgaagtcatcaaagtaatcgtcatcatccccatcatcatcacctccatcaccaccaccatgattgattntctttccaatgtctcctccacctcccccaatgtctagctgcanattaaaagcatgaaaat

SEQ ID NO: 127972 - DNA, 501 bp, Glycine max
  unsure (1)..(501): unsure at all n locations
gggatctctgagtcacctgaggcagcaagcttacaaagaaatcatctttgtatattctacttggtagacctcttacaagtttatgtttctctagctttgagattaacctcaagctagcataaccgagtttttcatgtcacccagtgatattctttgacagacaacaagcaagatgcattttgatatgatatctcacctaatctaatcctataaagattacattttctcttagcagaaaaaaggaaagacctatcattgttttggataatacattcatccttgttaaaggaaacaccatattcattgtcacataattcacttatgctcagcagattgtgttttaatccttcaacaaataaaatgttatcgatatgtggatatagaggtatacctatcttacccactccattattagcccttttttattccctcttgaagttacagttccaccatgcataaaggttagacattggaacatacancctttctttgcatgtgtcg

SEQ ID NO: 127973 - DNA, 464 bp, Glycine max
  unsure (1)..(464): unsure at all n locations
cgtgacactatgaaactcagcttctcaagacagggatttccagttctgaaatatctttaatctcgccagatgacgatctttntctttcttggaaggtaccatanggtacggtactgtcacaccttcatccacagctttttcactcctactcttctttgcattcttattatttttttcttctttttcattttctatttctttttctttntcttgggccttcaattctttatttttgaccattatttgttcctctttttctttattactttcacctctcacctcatttttcttgccatcagtacttttcttgtcagcagttttcttcttatgcacaacactgtagaagcaaagcttcatggtgaatcaaaggtgattcanagggtgtttgatgataacaaaagatgatgacaaaggtgatgacanaaagctcaaagatcaatcaaagaacaactcaagtgaatcaa

SEQ ID NO: 127974 - DNA, 339 bp, Glycine max
  unsure (1)..(339): unsure at all n locations
ctttcagagttttctggacnacaaacacttgttctatatattcncnccancnatactgcctctgccaaatagaattcgccaaggactaaccgcctgaattctttgtgtgtctctcttctgccttttccaaaagaacacaggactaaccgcctgaattcttttgtgtctgccttctcccttgcacaaaattcagaacgacacgagctgagaactcttatgattcttccctttcccttatacaaaagatttcagaggactaaccgcctgagaaatcttgtctatccctattcacaaagtatcaaatgtttaaccgcctgagatctttgtcttatcacattg

SEQ ID NO: 127975 - DNA, 392 bp, Glycine max
agcttcacacatctgcatctctcgcacctttctaaggtaccaccctcaacattggacaacacttgttcaagctttgggggcttgagaaactcgtgaccctcttacttgtcaaggctactggccttgacaccaaacaatcttcctcgacgccagacaatcttcttcacttccaaactggctcaaaacttggggggcttatgtactgtccaggatccacaaaatggatgtggcaactaacatagcactccaacacacacgttatccctggcacaggagctcggacgcatcacccttagcagtcgagctgttgggccaacatgttatctctaatacctcattatttgaatattaatgataatgctacaacttcctcatcaagtgacagatactta

SEQ ID NO: 127976 - DNA, 377 bp, Glycine max
  unsure (1)..(377): unsure at all n locations
nnttgagcttgagcacccacgagtgtttcagcactctagtttctcacggaanagtgacaaacacgaactgtttcggcaccctagtacctagtggaggagtgtatgtagggttttgttcgagccatagttccaagagcagtgtagagttttcttcgacagggggttctgttggtttgagcgagcggttttcggtagtattgaaaacaatgtgggacaatgtgggggtcaagcgagcggtttttggcagatttcaggcgggaggagaaagagaagagcgagtgcagggttttcgagcacgtgggttgtgaaatttcttcaatgttttaacttataaacataacaacatcgatttttaaggatacccgatgttaacattg

SEQ ID NO: 127977 - DNA, 476 bp, Glycine max
  unsure (1)..(476): unsure at all n locations
agctngaatcaacccaatattctgtcttctaccaatccattactagctctatacaaatttgaaagaattgtcgnttttgtttgcacagcgactaactctttgagcatcttatacatgaatatacaatctcaacacttagtctattctctaaagataaacaaagtgctttaagagattttctaaactttacaagaatttatggatagcttcttaaagaatgtgtgtaaggtttgtgtttcattacttcaaagcttctggtatttataggtcttcatcttcaagtgtttgttgcttcataatagatgaacttcttcacttaagcattgtttgatgactttggtcattggagcatctaatgcttgcattaanatgcacttcttttctcatgcagagaaaccattcttattggtttttgtgtcaaacacataagcagaaaactacctctctttggtcagagcactttgcacaacagagtg

SEQ ID NO: 127978 - DNA, 491 bp, Glycine max
  unsure (1)..(491): unsure at all n locations
cctgaggcatgcangctctgatagaattattgttcatggataatatacttgtccatgtaaatttagaatagtcatccacaatcactaaagcataatagctcccttctatgctcatagttctagaaggacaatacaagtctaaatgcaagagttctagaaagttgaaatcatatttttagacttaaagaaactctagattgcttgcccttttgacaggcatcacataagccatttctcacaaactcaagcttaggaagttctttaactagctctgtagagatgagtttgtttaaatgatttatgcgaatgtgagctacccttctatgccatagccaagaagtatcatcaatactagttaaacatgtctagtgtgatgatgaaacacaatctgagcatgtaggtgttacttatccggttgccaacacactcaatgtgaatggntattggatctgaaatggtgtaacaatccttattaaaacaaatttataatc

SEQ ID NO: 127979 - DNA, 174 bp, Glycine max
  unsure (1)..(174): unsure at all n locations
acacttagatactaagctttatctnttcatctctctctcgaaaggtgaaagggggtttactttggagtctcaatttttgcaagcgaaatggaaagatntcatctttcctttctctttctcaaagcttcaatttcatcctccctttgctttttgtagtcgatgaatacgactaac

SEQ ID NO: 127980 - DNA, 458 bp, Glycine max
  unsure (1)..(458): unsure at all n locations
tgaagtgccatggacaaagaagctctagggtggntccaatcccataccattcttgggaagggttcaagatcacaatctcccaaaggtttcaaccgtttaaactagggaatccttttcgggcattactggtgctaaaacaggaagaaacaatgcaagaattcatgggccattttgagaagcatgtcgaaatggtgaaggggttggaggaatcgtttctggtggaggtgtttcccaaggggctaaaaaaagagatcaacactgaggtaaggctccatgaaccaaaaaacttgatggaatctatggtcaaggctcgatggtggaagataagaatcgagtcttatggaagttacccatgagtaatagtaaggggtatatatttcagaaaccctgctattcgggtcagagatatctaagggattgacaaccagcaaatagtaaggtagttgatcctactaatg

SEQ ID NO: 127981 - DNA, 480 bp, Glycine max
  unsure (1)..(480): unsure at all n locations
agcttaagcccaaccgtagagttttaaagctacataaggttacattatgcttttcgcgtaaacgtccgggcgttcctccacccgccaatttcctagttggaaaccgggaaggcatagccgtaccaaatccgatctcgtcggggagtcatcattgtatatcgcagcaactcgaccttcgcgtcttaaacccgcacatatgaagctcctgctgatgtggcctggcagggcctctttggctcgctgtcccaaccgcgggccctggcctttgttcttcctttctgagatattattccttatgtcagtctgcgtaggtntatagtctaacccaaacttctcgcagtttcctctggtgcttaccaggctggtcctgccgctgttgttcttgcccaaacccattccgggctcgtagtcgtgccccagcattacccgggccaccatcattgccgcatcgaacaggcgaggctgnctagagagggaatc

SEQ ID NO: 127982 - DNA, 437 bp, Glycine max
  unsure (1)..(437): unsure at all n locations
gggttcgagggtacttacccgtgaagatcgaagaacgatgatatctaatgaagaacgtcgaagaacggttgaaacctttgcgaaattcctcacggaaaacgttacggaaacgtttcggaagcgcctcggcttagattntcttcacggaaacaatttttccaagcaaattctaaagagagagaagtgccaagggggctgaacccttttcttcttcacttcctcccctatttatagcaaaataggggaggtggttgccgcccagctcgcccaggcgagccaggttgcttcctccagaagcaacagccttctggaggaatattctggagggcccaagtgggcctgggtgctattttgcaccccatttttactaagtacacccctcctgtttttttgtgattctnntttctaaagtaccggaactaccaatttcgtaacga

SEQ ID NO: 127983 - DNA, 330 bp, Glycine max
ccttatttcacttttctgatttacttatttcttcccattttacttgtagttcaaaaccttattttcattattgaaggttggaaacttgaatctaaactccctcatttttccttctaaattttgtgcagcctacaagagagaaggggatctctccaactcttgaaccatatgcttgtttgtgaacttccttgaacatgttgttgctttgaaatttttgaacttgttgtcatgtcctgaatctgtgtgctaagttgttttcctttgagttttgatgcaaaaatgatttatttgcatgttaaaacatatagttagccttaaattttacttaaa

SEQ ID NO: 127984 - DNA, 441 bp, Glycine max
  unsure (1)..(441): unsure at all n locations
ctataaaactcagcttagttaaaatagaatgtttttatttcttggaaatatttccaacttctctctntgaaaatataaaagccttcaattaatcagtttttttaatagtaaaaaatatattaactacaaactcaacaaatatatccgagagtttttttattagtgaaacctatttctactatgcacatacccatgttttcttcttgcaccagccaataataagtaccacgcccaatgggccttaataagtatcccgtgcatatcatacaataggatcaaaaggcttttaaattaatttgagtgtcatgctgataacgcaaaagtcctagattcgagtcctgtatgagccattattttagaattaattcgtaaacatattttttaaaaaaaattaaaaaaaaatctgcaataaaaattatatggactatatgatggcatcat

SEQ ID NO: 127985 - DNA, 474 bp, Glycine max
agccttggagtttccaagtgccaattcgttttcttctttagaccagacttcttctggcttcaattcatcagagggctttccttctgtgtccagcatcttgagatgttcccagcctttgatgacagctttccaggttctgctatccagtgatttgaggaaggccaccatccttgctttccagtattcatagttggatccatccagaattggtggtctgttcactggtcctccttctttctccatgttcatcagaatttatctccctaggtctcactcagtgatttcgagtgcccgctctgataccaattgatattctgataccgatgacagatgtcgtaccggatgtcacgacatcacgcttcataacatgcagattatatttgggagtatgaacagattaaccaagttaataacacaagagatatgttaacccagttcggtgcaacctcacctacatctgggggctaccaagcc

SEQ ID NO: 127986 - DNA, 268 bp, Glycine max
  unsure (1)..(268): unsure at all n locations
ntctttggaccttgaacaagcaactaactcctctttatatccatgctatgtgctcgcgactggtctctctcttcccttcgcagcttgagttcactatagctaccccatagagctccgtgaaatttattccggccatactcttccttgcgagccctcttggtctcttgttcaagggcccttgtggtagatgcattctcttcccgtaacccggcacactccttccgaatgtgtgtagcggccaacttgaacttctccttggcaagtttcg

SEQ ID NO: 127987 - DNA, 389 bp, Glycine max
tagcttcagtggtattaatcatgagatagctttcccatataatatataaactaaaagacaatactatatagaggtgtcttccgtgtaactattataccttgaaactctagagattttttttacaaagaagcgaaaaagtgcagaactgcacttcattctcctgtacatctctgaatatatatattcacacggcaaggctcctgctccacgctgaaacgaagcatcattatgaactgtgggatttaccaaaaacttaacatccagggtcacatttctaatgcttctatttcttttctgacataaaccaggttcatgagcccaaaaagcatctggatccggacaaaatagagaataatcttccatatctagattcgctatgtgccaattga

SEQ ID NO: 127988 - DNA, 236 bp, Glycine max
  unsure (1)..(236): unsure at all n locations
tctcttaacgatggcgattcgtgacgaaagtacgaagnttttcaatactatatagcagctctcacacgctaattataacatactttcaacttttattcttgtctacttgactcaacgtcaactctgtacagccttgtatttatacaaagtcacattttgtaatgatggatatgcatactctaagtatagtattttgaaacttccttatggtatcgacgagaactctcgtctttact

SEQ ID NO: 127989 - DNA, 404 bp, Glycine max
  unsure (1)..(404): unsure at all n locations
actaagcttggtanatccacatcttatagagacattttttctatgtgttagtgtatcttgaggcaaacacaacattaggaaattcataatccaccaggcgatgacacttcatcataatgtcttcaatcacgagtacccaattcatcttgatacctgatttcagagcacaaactatttgtagattataatgtgtcacctaagcatgatagctcgacctacgtgtgagaatgtaggtggtgaggtatactaacattttgtcctcggtagtcagtccaccaacttctaagtgattcctcaagttcctaacagggtcaagaagcattgccttataggtctgtatctttctatacccatcaggcattttatcgaacttgctgactgccaccatgtccagactggcttct

SEQ ID NO: 127990 - DNA, 177 bp, Glycine max
tctagatgtctttagaggttacttcctgcatgacaacttttgtatagtatggtacagccaagacgagttaattgttactctctgagaatttggtcctgataatgtgtgcaggaagtactcctgtaggatttactcgacattcttaacttgcccattggtcattacatctgttgtttg

SEQ ID NO: 127991 - DNA, 444 bp, Glycine max
gatcatatattctgaaatatagggggatgtaacgcacattttatctatatacaattgtttgttgcttgcttgaatcttgatttcagggatcgtattgtcatcattaaaaaaggggagattgtggatgcatttgcctttggtgttgtgatgatgatcatgatgatatgatgcaattgatgcaaatgggcttttcaagattaaattcaagacaatactttaagattacaagtcacaatatcaagatgatcactattatattaggaagggaattcctcattgaattaccaaaagggtttgcccagtaattttaatttaaaaaagctgttttcaaaagatttactctcttgtaatcgatttacccaggatgtaatccattaccagtcggccaacatgttttataacagccacttaaaattgaatccgaattttagactgtgtaatcga

SEQ ID NO: 127992 - DNA, 428 bp, Glycine max
agcttgcagcttgaccttatggttattaatttatgaattgttgcaattgcacctcttccttgtcaagcaatatatctgtttgcatttgggattccaattttcatcaacagtggctaccctactcctcacgtgaagtggaacttgtgggttatccacaagctgctgcttacccttgtttatgggttcatactgctcatgtatcattctagggggaaagaaaggttacctggttagtgccctggactgctatatcatcttatctttaattagttttatgatagcatagtttaatttcctctttttgcaacaacggcctgcttactataagtatgctaccattatgttcattctgaattgcaatgcgctggttgcttgggcatactggaaacggcccgctttggttcctggttaatcttttatctatacct

SEQ ID NO: 127993 - DNA, 288 bp, Glycine max
  unsure (1)..(288): unsure at all n locations
tacagagcanacgaacatcattcacatatttatgtctttgtttatcacatanggtgaagattttacataatctacatattaagttgactgatatatcatccacgcaaaattatccatgcttagatgttgtacctcattgttctgaattgcgcataaatcaacagcccaaggcttaaactacaataaccacctaacacactacttgctatctatcaatccctaacttattagcagaatagagaatcaaaacacttctaacagttaacgcacagctgacagcataccatg

SEQ ID NO: 127994 - DNA, 459 bp, Glycine max
  unsure (1)..(459): unsure at all n locations
ggatcttaagtcaccgcggctgcaagctgagaatggctagacatgatacatgtcatggcttggnttggntcaaggataaaagggatgccccacattatttccatgacacaaatgcaaaaatgatgatttggaaactctatgcaaaactggtcatgcatgcgcctatgccgacgctcaagtgtcaaatttttatggtcaggtgatgctaaggttcaagattcatttcctctaatttaaatcaacccaatgtttccaaaatatgttcttttatcaatttgtgcattcctccaagtccatttcgggcgtccggngaaattttcacagcattcacccttcaggtgtagacacgtttttttcttcaaaaatcggttatgatcaatgaatttttttcaaagaaaaatggaaatcactctctttaaaagcatgtcggttttagctagaaacttatttcttttctca

SEQ ID NO: 127995 - DNA, 446 bp, Glycine max
  unsure (1)..(446): unsure at all n locations
nnttggagtaganacatgggaccaactcatttatttattttaaaggaagtcgtatctagtcaaggtctgagagaccatacaagtttcctaacgatttctaattatgtgggccattaagtctatcatatgctgacaatagccgagaagcccatgaatctcttcgggggtggagtaagtgtctgccattgccttggccttggctaacaagcggngaagttcttgactcccgttcaaagtaagagcaaaccggtccatccacatggttgcctcttggtgtaaagagtcgatcacccttcctctagcctctttttccgcatatacttgagcatactcatccgcgattctatgcttgtgggccatggctagacctaactcttcttggtacttggcgatgatagctagcatgttggtctccgtctcgcataaatgctgagacaagcttcttt

SEQ ID NO: 127996 - DNA, 426 bp, Glycine max
  unsure (1)..(426): unsure at all n locations
cagcgaacgcggcagcagctaatctatccacctaaaagactagatttatctagcgcttcagacatcatcaagagaaacagcaaatatatactacccagctcaatcgtcttcgctgcaagcaaacgactatgaggataaactattaggcaaagcaagctgaacatccggcgcagctacaacaagaccaaacaagtacatcaattatcgacacagcatgaattggcttaccctgctctactaatgaggtggagtgaagaaatatagtcactcaacaaacgatatgccaacagaacaaacagtaccaagccacagaaacaacacatttgatactagacttatcatcggaagcaaaaaggcgctaataaagtctctaaaccanccatgtccatgctatggaccaatgggctaacatcatcacaaaagctc

SEQ ID NO: 127997 - DNA, 373 bp, Glycine max
ctctgggccggctcaccgaatatgatgcttcttgcatacaaaggggcttgtgcttagcgaatgatggaccgcttaccgctgctagcgccgcaaggaaattggcttagctggcatgagtagcacttagctcaatgaaccccaatttaggccgcatctaaatgggcttagtggcgacgtctcatgcttagccagtgaatacgatgcgcttagcgagcaggccatcgcttagccaaatttagatcgaattgaaacgggcttagcttagccttggccagcttagcggaccaaatcagcctgagatgcaagggttaagcgctaagcgctagagactctccgcttagcgtgaggctcgcgcttagcgaaaggactgatt

SEQ ID NO: 127998 - DNA, 501 bp, Glycine max
  unsure (1)..(501): unsure at all n locations
atggctagacatgatacatgtcagggtgtggtttgtttattgataaaagggatgccccacattatttccatgacacaaatgcaaaaatgatgatttggaaactttatgcaaaactggtcatgcatgcacctatgcggacactcaagtgtcaaatttttatggtcatgtgacgctagggctcangattcgtttcctctattntaatcaacccaatgtttccaaaatatgttcttttatcaatttgtgcattcatccgagtccatttcgggcgtccggngaaatttcacagcattcacccttcaggtgtagacacattctccaaaaattggttatgatcaatgaactttttcaaagaaaagttggaaatcgtctcttttcaaaagcatgctgttgtttagctagacaacctatnttttcctttgttctacctgtttccttacttgcccttcttccnctatttgccctcnttttcttgtcactttcttttcttctctatttcat

SEQ ID NO: 127999 - DNA, 407 bp, Glycine max
atggtctatgatgtagggggacacctttcaccactcataagagtatgctcggatgtatactttcaacactgcactagttggttccaacagctcactatgtgcccctgatggagcactcaagtcccaccttctcctctcttaacagtcttcagatactcaatgcttcgtctgcagtgcagcttcgactacagccgcattggcgtttatagagatcctcccatctctcctaaagagagaaactatgtaagagcatgatattgaagtggcacttgacgactgcacaccgacacgatatgatctcacagtccatcttacactcactgtacttacacctgtctctatgccagaattgattatcttcatgacagtattagcactctcttgtgactgcttacaaaatctacatt

SEQ ID NO: 128000 - DNA, 461 bp, Glycine max
  unsure (1)..(461): unsure at all n locations
agcttcgggctgctcaattgctctagggtgctttatttaanggcaaaagtctgtatggtggtcagcagaggagcacaaaccacatactcttgcgacaggtacatatttatgattcaaggccagctgggttaccaagttaaccaatgcatctagtttgccttctagcttcttagttttggatgatgcagctgagtttgtagctacctcatgcactcctctaatgactatagcatcatttctggcgctaaacttctgggagttggaagccatcttctcaattaaatttctggcttcagtaggagtcatgtctccaagggctccaccactggcagcatctatcatacttctctccatattactgagtncttcataaaaatattggagaagaagttgctccgaaatctgatggtgagggcaactggcacatagttttttaaatctctcccagtattcatacaggc

SEQ ID NO: 128001 - DNA, 456 bp, Glycine max
  unsure (1)..(456): unsure at all n locations
tctaagctgtcccccatattgtccgaccagccactgctagctcttcacataaganaacttgttggttagattgcacaatgactaacaccatattgtcttacaaacgaatgagcaaattaaatgcatagtctcttttctcaagatgaataaagtgttttgagagcttttctaaactttacaagaatatacacagagagattcttacacagaatgaaataatgagtgcttcaaatcatgctacatatcttcaagagcttctggtatatataggccttttttaatcaagtaattgttatatctaaacggacatatttcctctcttaagcttatgtctgaagaaaatggacgttggggcattaaatgtgtgcattaaatgcatgtactgcttcatgttgagaaaccactctttgtcgttggcatgttgaacactacaacaagaaatcactctcttttacg

SEQ ID NO: 128002 - DNA, 441 bp, Glycine max
ctaagcttgacgcccatatggagatggtaatgagacaacgagatgattctctctctatgagaggctggatcaaatggagaatagagatcataatgaagaagaaaggacgagaatagggaatgatggtgtttctagacaaaaccgaattgatggtattaaactcaacattgctccatttaaaggaaagaatgatctgcacgcctacttggagggggagatgaaaatagagcatgtgttctcatgcaacacctatgatgaggaccaaaaagcgaagcttgctgccacggagttttccgactatgctcttgtgtggtggaacaagctacgaaatgagagagctagatatgaagagccgatggttgatacatggacggagatgaaaaagatcatgaggaagcggtatgtgccggctagttactcaacggacttgaaattcaagct

SEQ ID NO: 128003 - DNA, 463 bp, Glycine max
  unsure (1)..(463): unsure at all n locations
agctntaccagcaatacatanaatcagtttgtgtatcanttggaaaattatctcttgtgaatggtcacaagaactgcgattaaagggtttgagttttgccggccgctaaatgagtctttgccacgttgctataagtcggtaaaagatgtagtggccattcatgtgaccaatatagagagaaaaatggccgctacaatgagttttggtgtttataagaaatttattgttttcttttggggtgatgctatttcgtatgaacaaaacttgcacgaaatgaaatatgtgaggctgagatatgtttaaatcgaatttaattaataaagattgagacataaacagtgtgatttgatataaatcaggattcatttcctttcacgaaaaacctttcgtaaaatttatcatttctctttcttttattacttcctttaaataaaaattaacctagaacagaagtagaataaat

SEQ ID NO: 128004 - DNA, 475 bp, Glycine max
ctcagagaatgtaactcagaggcgcgcaaggggtttatctcttgccacattcccgggctactccattgttaataacctgattctgcaccaaaagcgcatatggctttcccggagacttccattaatacccaccttgctcactaaattccattcaactcccataggggggcacatgggagtggctaataccctagctcgagtttcataaaacttcagttggcctgatcttcgaatggatgtaaccaaacttgttgcccagtgtgttgattgtcagcttacgaaatatgaaaccaagacaagtgcagggctgctctgccctttgccggtgccacagagaccttgagaagatctttccctggatttcataatgggccttccccctattcaaggaaagtgcagcattctcgcgggagtagatcgcttctctaacgggatacacttgggcaatataccatcttcgcacacagctcacatg

SEQ ID NO: 128005 - DNA, 465 bp, Glycine max
  unsure (1)..(465): unsure at all n locations
agcttgtgtgatcctcagcttacaagccaattttgtatagttgaaatagaacctacgcccaaattttaggaagttttactctggagagccttacattcaaatgaaaggcatcacaaaacagtaaagtttgtgtgatcctcatgcttccacaaacccttccaatccgtcctttgactgaaaccccaaaaatgaacactgagcatgtttcaaagcatttggacaaactcattgttagaaaatgtttgcaacacccaagccttctaggttctggctgcttcctgttacacatttgtacatttagaagcagtaatttatgaatcaatatgatatagtacatatatgattctgtagaatgttcaaactacttaattatcaatntatatttcattattggaaaatggtttaatgagaacctcttcctttttaaatactacaaatattaatttatggttcttgtgatcatag

SEQ ID NO: 128006 - DNA, 498 bp, Glycine max
  unsure (1)..(498): unsure at all n locations
ctctntntntctcaaccgctcttcattcttctttctattttcacttctggtcttccattatcttgcacacaatttcggagcttttccattggtgatgatcatggagggataaacaattaatcaatccaaggatccactccaagcaaggctgaatttgagttttgattcagtatttctaatctttgtgaatgttcatctttctcttgaatcctattttcgattttcatgattatgattatgcttaggattgaaaatggattacgttatggattcgtttcctaatttcagaatttaatcacagattgcttcgatgattttccaacctaatttgcaatctcaaacaatttagagattgattcgattgaactttctctaatgcatttgactaaactttcacactgaacatcattcgtagtaactgtgataattcgatttgcattggtttggtgaatnggattgatgccattaaacttgaattgtattatgttcttgttctat

SEQ ID NO: 128007 - DNA, 439 bp, Glycine max
  unsure (1)..(439): unsure at all n locations
agcttcctttacacaaagagaagagattaatgattgattgaagaaatacaagtggtgagaatgtctcctccacctctggaacctcacaatcactcacaaactcgtctctagctcttaggacaacttcctcttcaagctcggttctctgccggtcttcgcacagcaaaaactctcaaaactctctggaacttggacctttctcgctctagaaatctctcgacatgcagaagtttcaagaacaggctcaaactcccctccaaaatctgatttgaggcttaaataggtgactttgtttgtgctagtgcgcttagcacaactcttgaccgcttagtgagcattagtggatttcggcttagtgcatgctnttctcgctcggcggatggactagagcggtgcgcttagctgaatgatccttcgctcagcgcatatgcacagctca

SEQ ID NO: 128008 - DNA, 494 bp, Glycine max
  unsure (1)..(494): unsure at all n locations
tgctctattcaatggagtngacaagaatatcttcagactgatcaacacatgcacagtggccaaggatgcatgggagatcctgaaaaccactcatgaaggaacctccaaagtgaagatgtccagattgcaactattggccacaaaattcgaaaatctgaagatgaaggaggaagagtgtattcatgacttccacatgaacattcttgaaattgccaatgcttgcactgccttgggagaaaggatgacagatgaaaagctggtgagaaagatcctcagatccttgcctaagagatttgacatgaaagtcactgcaattgaggaggcccaagacatttgcaacatgagagtagatgaactcattggttcccttcaaacctttgagctangactctcggataggactgaaaagaagagcaagaacctggcgttcgtgtccaatgatgaaggagaagaagatgagtatgacctggatactgatgaaggtctgactaatg

SEQ ID NO: 128009 - DNA, 417 bp, Glycine max
  unsure (1)..(417): unsure at all n locations
agcttcctctaccgtanaanaacattgtctgttctcgcttgtaaaaaaattgcgcaatgtcggctgataaatatcagttggggctatttaactaccgatgctggctactgttctttctattccacccctgaataatacttggacgatgtcgatttggaaatgtccgatcggagtcatccggtcatgcttctttttgagacctcgatctgtcatcttttcctggccgacgtcggctggcatttttttcgatcaatatcggtgaatcatgctttttgccaaggtgggctaacgtcttcgtggctgatgaaatgagagcatgccagtgtcggccgaaacacaatctcgcacgaaaaaccctagccgacctacattgtaaattttgtaggcaataccgaacaacaaagaaatattatcgac

SEQ ID NO: 128010 - DNA, 397 bp, Glycine max
tagagctaattcaaacgacaataactctgtactcggatgtctgattgagtcccgaaatatatcgaggcgctcgaaattgaatgttgaagctctgagcaaattcaaacgacaatatctttttacacggatgtctgattgagtcccgtaatatatcgagacgctcgatattgaatgctgaacctctgagctaattcaaacgacaataactttttactcggatgtctgattgagtcccgtaatatatcgagacactcgaaatggaatgttgaagctctgaggatattcaaacgacaataactttttactcggatgtctgattgagtcctcgaatatattgagacgctcgaaattgaatgttgaagctcttaggagattcaaacgacaataactttatact

SEQ ID NO: 128011 - DNA, 469 bp, Glycine max
agcttatcccccaatttctataaataggggtgttaagtgaagtgaaaaagggttcaccaccttaggcacttctctctctttcgaatttgcttggaaaaattgtttccgtgaagaaaatccaagccgaggtgcttccgaaacgtttccgtaacgtttccatgaggaatttcgcgaaggtttcgaccgttcttcgacgttcttcattcgttcttcatcgttcttcgatcttcaacgggtaagtacctcgaacctagcttttcgattcattctatatacccgtggtggtccacattgtgtttcgtgtatttttattctcgtttcatttactttttatacccccttttgacgtgcttaagccattttatttaagtcatttctcgcttaacctaaaaataaaataaatttccaccgatcgtttgaattgtattatccgttaacttcggttaaaatgaactttcgaccgtcggtc

SEQ ID NO: 128012 - DNA, 449 bp, Glycine max
  unsure (1)..(449): unsure at all n locations
tcgcgacccaacccgggcatcgattacactgtgtttgttgcaggtttccatgttctgaagctgtgtaactcgagtttggcctctggtaatcgattaccaatgctgtgtaatcgattaccagagaagaaaacccttgaggcataccttntaactacatgtagcggttatgggacgcattgtgttgttacccgtagttagatttctcgtgaaagagtctacccccttttctcttatttcttgtagatcgtgatggcagcgcaattaatccatgatcgagtggagatggagtgcctagagggagtttgggagaccctcgaaggcaatgcgaggtgccgattccgtggcacgattcgattcacggctacttcattggtacatgcagaggaacccgcactcacgcttcagcgaactgtggagtggatattacctacacctactncatatcgact

SEQ ID NO: 128013 - DNA, 394 bp, Glycine max
ttccagcgcatactaattggttgggatattgattatcatgttctcttttgctcaagtggcattttctacttgaagtctagacattgaatttatgaggttttctcttccttattgctaaatcacatgaggcataattaattagaaagagcatctatgcctaaatataatattcaaagtgcatcactcttatttatttatttggataaacataattgataatttattaagatagaaaggagaggtacgaatgtgagagaataagacactaaatagtaacaaaataaaaaggaaaataaaaataataatgagaaacatacaatagaaaacaagccaatctttctgaacgtctaaccttcaccccttaagaagaaatgcttgatcctaaatgaatcaa

SEQ ID NO: 128014 - DNA, 452 bp, Glycine max
  unsure (1)..(452): unsure at all n locations
tgtaagaagtatacgcatataagagaatgttggtggttgattgataacgacttataatttaatcatgggttaaggagttgtacaactgatggagatatattacactcagttagggatgcttttgaaaatgagaatgagataaatgtgtattctcatcatgaagaagatccaatgttataagaagtcccacaaatgtagcacttggaatgtgatccaattcgaaaagctgttgagaatgaggatgatttatatgatgtacctgttgctggccatgaggaaggtaagctttaattcatctgtacttggtccgacatggttaccatagataattaatatgattaatttntactatatcaccattgatgcacatgttggtgctggagagcaaatagatgctggtgagcagatggatgctggtaatcacacggatggtggagagcagagggatactg

SEQ ID NO: 128015 - DNA, 463 bp, Glycine max
  unsure (1)..(463): unsure at all n locations
cgcttcagtgttgntgaaactcccttattgcttatcttttctttattttngangtcgctgcagaatcttctccttgatgtcctaaagttagaggcttcgcatatggtggatttcgtcttcttttgacactgctccctttcatctgaagggttgctcatgttggaagagatgaatagggtcgtgaactctgatgggccttgagactgtaaactcataagaaagacaggttgaaagggcttaatttgagtgttttgagtgtttacactactagcatttttctttttttttgtgtatttgtgaaatggaagtgaaggcacatttcccctttctttcaacatataaatgcgattctcatctctgtcatagccagaagaaaggcattttctatttttctttccataagtttgaatgagataagattctccaatgcataaaacttaatctcaactccttttatatatta

SEQ ID NO: 128016 - DNA, 484 bp, Glycine max
  unsure (1)..(484): unsure at all n locations
ctatcatattatttaccaccaaaaggaaattattgacatgaganaagtccatcatcttcctgttaaataagatcctggagatggctgaggagagttttggcagagccttcacttaaccaaaggcatatatactacacaaatagtgaaatagcccaatcaatggtacctttaatttcaaatagttatttatatatatcgtgtgtctgagtttaatttcaaatagactaagtttctatcctccttaccaaaagaaacttacataatgtttggtaaacaggctagaatgaaaaagaacacaagttctgctatgttagttcatttttaaaaatacaaaagaattgaaaatgaggttagaaaataagtacaattntgttccaccaatggaatancttgagcaattctatnttatctgcaattctgcaagccaaatgcctatttataggcaaatcttaacctttatgtatggactntcagtcaacaactc

SEQ ID NO: 128017 - DNA, 420 bp, Glycine max
  unsure (1)..(420): unsure at all n locations
agctngcctcaaagaggtccaggaaggacaaggctgttttatgaactacatccgccccggagtacgacagtcaccgattaaagagcgcagacaccagcagcgcttcgaagccatcaagggaaggtcgattccccgggagcgacccgaccagctcagggacgacgagtatactgattctcaggaggaaatagggcgccggcggtgggcaccaccgagtactcctatggccaagatcgatccagaaatagtccatgaatactatgccaacgcttggccaacagaggagggcgcgcgtgacatgagaccctgcgatagggggcagaggaacccgtacgaagccgacgcgatcagccagctccagtgataaccgaaggtgcaggaagagggccaggaacgcgagcatggccagacgaggaaccg

SEQ ID NO: 128018 - DNA, 507 bp, Glycine max
  unsure (1)..(507): unsure at all n locations
tatgagaacataatngcctcaatcatttccaaatatgcatgttaattatgaagcatcaacaagaatcaagccaaggctattgtgcaagaaatcaatggggcaaaacacaccaaatgattatgatgatggatggctcaaattgtcacaaaggtaaactcatcactttcaattgagctttcaaaactatcatgacatgtagaggagaatcaaggatttcaagtcacaaaatgtcaagaacttttattttcaaaacaattacccatttcttgaacatatcctataattcaaagaanaacatgcaaagtcgtacatgcacacagaattgacccacaatattaaactataaatccgacgaaactaacaacattaacaaattaacacaactaacaaattaacaaaaccaacaaaactagcaaaaccaaagaacactccccccccatacttaaacaacacattgtcctcaatgtagcacaattaaaagaatanaaacaattaaatcatcaaata

SEQ ID NO: 128019 - DNA, 478 bp, Glycine max
  unsure (1)..(478): unsure at all n locations
ggtgatatcttaattcaacccccccttcttaatatatctgatgccacttgtctaacacaagtagtgcatgatatgcttccagaggaaaacatgttgcctaaaagttactatcaggccaagaagatactgtgtccaatgggtatggagtatcagaagattcaggcttgtccaaatgattgcatgttgtacagacatgaatttgaagaaatgtccaaatgccctatgtgtggggtatcacggtacaaagtcaaggatgatgaggagtgtagtagtgatgaaaactcatagaagggccacccaacgaaggtgttgtggtatttgccgatcgttccagatttaagtgtctttttgctaatggagacaatgctaaaaaacttacatggcacgcaaatggcagaaactgtgatggaatggtccgtcatctggctgattgctcctagtggaagaagatagatcgtctgtttttggattntgaaaa

SEQ ID NO: 128020 - DNA, 446 bp, Glycine max
  unsure (1)..(446): unsure at all n locations
tatgctctntcatgtaattaattaacatttatgtatgtattattgtcttcaattncaggccaaatagaatgatcatacagtactaatttattatgtgaaattgaaattgaattagctggggcatgtaggtatgaatctttggcactagacataagtggtggacaccttgcagctggtgtggcttctctcttcatagatggagtaggttgaggtgcctgctttcaggtgtgtatacaattattatgagcaccacgtccaaccatattntatttcattaattattatattattgtcatgagtaattaacatatgtaattaatggataattctatttatcttatttggtccattagaaaccgtgcttcaattgttacacgcgatgagaaaagtacttgatccacgttaacaaattcattcgaaacacacatatagntaactcagtcaat

SEQ ID NO: 128021 - DNA, 356 bp, Glycine max
  unsure (1)..(356): unsure at all n locations
accttaagcaccgcggctgcagctgacgacttaaccgcagaatatttatcttcttctgaagcgancaatctagatagggatanacaccatatgatngcccagatttacttccataacaataaatttgctgattactaactgaatctatttcagttgattaaaaaatgtatgtcttgttgtacatttttagtattgaaggtcgatcatccctttatataaaaaatagcctatttattttataataattaacttaaaaatcatactaataaacatctagttaattgataatataaatatatattaactgtgctcgtaatacaataatattattcatttatcatgattacataatattt

SEQ ID NO: 128022 - DNA, 504 bp, Glycine max
  unsure (1)..(504): unsure at all n locations
agctnttatgctntatcgggtcacctagcgccagagactcttttttggtangtcgggtcgcatattagtccgtgatcgtgttaatcgatggtaggagtaggcacaactgtgtgtaagcgcgtctcttccgtcccttaggtactacggcataacccactcaacccttgcgagtggtggtaaaaaacggcaatgaggtgctctgacaacaactctatgtgggagttacaatcaccatccagaatcaagacttcaccatggatctttatgccttaccactgtgtggtgccgacatcgtgctcagagttcaatggcttaaatcattgggtctggtcctgacttattacaatgaccttactatggagctcatcactaatgggcacattgtcgaattagaaggagatacaaaatgtgaccttcattcgatgacacccactcagctacaccgcatggttcgaactgacagcgctatgcgcctgcttcacattcaccttataccacctgagc

SEQ ID NO: 128023 - DNA, 332 bp, Glycine max
  unsure (1)..(332): unsure at all n locations
agctnntagaattggatcgctgatggacatatttgattttataactaacacatacgcataatttttttctttcacattagaaaaacaacaactttctgtgtcctaggaatagtaacgcatttaatttacagcatttttttatgagaagttaagttttaggctaccagaacatgacggaagtctattcaaacggttataatgtccagaanagaaatcattaaatattcagatcactcagaaaaaaattaaattaaaatattcacacaattatactttgttgaaactgtctgtataaaatggaatacaattattgatattaaagacattgacat

SEQ ID NO: 128024 - DNA, 358 bp, Glycine max
  unsure (1)..(358): unsure at all n locations
tcaaactngcaacaaaggagttgagcatgttaaaattatttgtctttaaactcttagaggtgactctgagcgtttgtttatggaggagtccgagtcaatttctgattatttttctcgagtattggccgtcgtcaatcgactcaaaagaaatagtgaagatgttgatgaggtgaaggtcatggaaaaaatacttccaactttaaatccaacgtttgacttcattgtgtccaaccttgtataaaacatagatttaaccacctttactattgagccactcatgggatccttacacgcatactaagaacaacgaaacagaaatgatcaacaaatggaggcttcggagccactactactactc

SEQ ID NO: 128025 - DNA, 451 bp, Glycine max
  unsure (1)..(451): unsure at all n locations
agccttgacttatgtcatcaagagagcatannattgttatcatggcatgacatacaactcatcttttttcaacatctctttcgcaatcacgacatctatctttcaatcttctctctcaacatcattcaactttgtcaacaaaatgttttccgattcatcttctcttcatcttctctaaaagtttttgatcaaaactttttctttcaagaaaagttntttgatcaaaaactcgtgttactcatctttttcattctcttctccctttgccaaaagaacgaaggactaaccgcctgaattcttttgtgtttctcttctccctttccaagagaatncataggaccccgcctgagaattctcttgattcttcccttccccttaacaaaagatctcataggactaaccgcctgagatatcttttggtccttctttacaaagattcaacggactaacc

SEQ ID NO: 128026 - DNA, 453 bp, Glycine max
agcttgtatttatgaacacgctggactacccatattcttgtaggctaccaacatggctatggacggctgatgatatcatattgcatcacaaataacaaggtgatattatatcttctcgccgaatcttgtttactcatcaccattgcgtgtatgattgtgctacacacatgtgtgctccttactgaaaaggagacaattcgttaatgcttaactgagattggaaatttgctacaagcgaacagaagaagcgagcgagattttctatccatcccatacccaacgggatatgcacgaaaccaacagcataataatctgatccataatgaaatggcatatgacaaagaaaagatagccatcaatacaacacggcataccacttgctgacaggtacttacaacttatgacacgctagatctgggaacttcttaatcacagtagtgtctattactagtt

SEQ ID NO: 128027 - DNA, 374 bp, Glycine max
  unsure (1)..(374): unsure at all n locations
tgaccactagcacntttaggagagctaaactccgatctattgtctcaatccagctcctgccagcctatacagatatacctcatcgcactctcaagctctacctctataactctaatacaccttccttacagactatgtatacaataggacactggactctccgttcatacccactgatgatcaactagctgacctctctaccatctcattagctaatgacaggttccttttgctaagaaggcatcttggactgatctctgacaatgcatgatttactctctatatgctgaccactattacatccactgacataatgtctatacctggatgacctatccagcacttattcctattaccaataccctcaatattat

SEQ ID NO: 128028 - DNA, 452 bp, Glycine max
  unsure (1)..(452): unsure at all n locations
agcttgttggagttatcatcacaagatgctctgttggcacataataagtttctttctaagcaacttgagatcttaatagaaacacttagtaagttgccaactaaactgtctaccggtcaacctccacattcttctattttgcaggttataggttacagattgtaccatttgtggtgaggctcatgaatcaggtcattgcattcccattgaagagcacactcaggaatttcattacatgggaaatcaacaaaggcaaggatacaaccaaggaggattttcgggttccagcaaggtccctataattagcaaaggcaatggagatcacaccctggcaatcaattcaataaggaccagagtggaccttccaacaggccacatcaacaagggccaaatatntttcagaggaccaccaaactggaggagacactagctcaatttatgcaagtgaccat

SEQ ID NO: 128029 - DNA, 450 bp, Glycine max
  unsure (1)..(450): unsure at all n locations
gtccgcaanaattactannaaaatgttntaaggtccaatgccttaaacggtcctctttgcttttatcggtttacaaggaccgttcaaaagcataaaatcaacccataactttaccgcttttgtcgaccaccccaagagatcgttaatggtccaacgccttaacgtttctctcctttcaaaatcaaaagatcatttaatggtctaacaccttaaatgaccttttgttcggttaaaatatatcttgcaaaaagtgataaaaacaacttaaccaacgtttagttctcaaagaactaagtaggtcagatttcctcatcgcaattgaggatacgtaggagcgagggaaacacccttgttgaccagaataagataaaaaatacaaaaggcataaaacaacataaaaacgtaaaaaaggggaaaataaaacaaatcgaagacatgatattgcacact

SEQ ID NO: 128030 - DNA, 395 bp, Glycine max
  unsure (1)..(395): unsure at all n locations
catgcagctttagaaagatattggcttcctgtactatatttggttncataggggaatagacaatatggaactccttaagatgcttatgaggatcttcacctgcaagacaatgaaacttgggcagcaaatgtattattccagtcttgagaacatatggaacatcctcatcaagatattgaatgcacaacgcttcataagtgaaatcaggtgcagccatctccctaagagtcctctcanaaggtggagggtgagccatgttctcactatgaaaattagtagtccaatgctcaaattcagaatgttcagaatcaccatcaacatattactcagaatgcttataatgctcaaaatgcacagaatgatcaggatgcgcactatgcctaagtaatccatga

SEQ ID NO: 128031 - DNA, 397 bp, Glycine max
ttatatcgcgccaatcttcttgtaaagttctgtatagatactaactctcaaaacacattataaatcttgagagagaagactcaagtgttgcgaaatatatccatttttaagatgatttgttattagtcagcgtgcatacttccaactatcgcaacctacccttcggcaggagggcgacgcgggggctcacgggtgtgtcttccaagggaggaagcgcgtagagtcgccaccaatgtttattcgaggaaaacgtctgaagaaccggaaaggtgtggtctatgaactttaactgtgaaaggttcgggagttgtttctacgcacggaaaagggtttatcaccccacgcgtctgtgacaagggacgacaaccttcaatcaagtgtgcaatatcatgtcttc

SEQ ID NO: 128032 - DNA, 455 bp, Glycine max
  unsure (1)..(455): unsure at all n locations
agcttataacaacaaaattgcctcaatcatttttcaatatgcatgtgaattaggaagcatcaacaagaatcaagccaaggctattgtgcaagcaatcaatgggacaaaacacaccaaatgattatgatgatggatggctcaaattttcacaaaggtaaactcatcactttcaaattgagctttcaaaactatcatgacatgtagaggagaatcaaggatttcaagtcacaaaatgtcaagaacttttattttcaaaacaattacccatttcttgaacatatcctataattcaaagaaaaacatgcaaagtcgtacatgcacacaaaattgacccaaaatattaaacaaaaaatccgacgaaactaacaacattaacaaattaacacaactaagaaattaacaagaccaacaaaactagcaaaaccaaagaacactccncccccncccccccatac

SEQ ID NO: 128033 - DNA, 467 bp, Glycine max
  unsure (1)..(467): unsure at all n locations
ntctctttatgaataatgtggtatccactctacctctggagaattctttttcaagaagaaaattacttaatcgttcataccatgccctatgggcttgtttcaaaccataaagagccttttgtaatttataaacatgatttggtttgtcagaaatttcaaaaccagggggttgttcaacatatacctcttcttgaattaagccatttagaaaggcactcttaacatccatttgataaagtttaaagttcattatggatgcatatgccaaaagcattctaatggcttctaatcttgcaacaggagcatatgtttcttcatagtctatcccctcttcttgattatacccntttgctactaacctggctttatttctaataattataccatgttcatctaatttatntctaaaaacccattttgttccaatgacaggataattntcanggttttctactaatatccataca

SEQ ID NO: 128034 - DNA, 467 bp, Glycine max
  unsure (1)..(467): unsure at all n locations
agctggtgcacatcaaatcactcctacatctcatctctagtatgctttcnctaacnggacccactcctcacgtttgtgtttttagggaaaaacaccataactaaacgcgccgcaagggatccctatcgcaccagatccaaatctataacgatgggtgatcaagaggagacgcacgaactgatgaaagctgacatgtctgctctgaaagaacaaatggcctccatgatggaggccatgttatgtatgaagcagctcatggagaataacgcggccactgccgacgctgtcagttcggttgccgaagcaaacccgactctcttggcaactacactctatcttctctcaatcatagtatgacggggatgggacacactgtggctcgatggcagccctcacctgtgatacatccgagcggcttacccttatggattgccgctcaactattcaccacccatcttgcaagaaga

SEQ ID NO: 128035 - DNA, 420 bp, Glycine max
  unsure (1)..(420): unsure at all n locations
tatgcgcatacttcttcacgaacgttcacttgcacaagacattcttataactaagaaaaatgcacccatatacaatcaaggcaccttcgttacctagattatttacatgtacttccaaggtgtatttgttacatacatcacacacatttcctttgctaaattcacatacatgcatactctaagcactttggctatcaaaaattgcatacgtgcacatctnggtatttctaatacctatacatacacaaacttcatgatgaatcttgattattgatcgaggccgtacccgaatcaaataaacattaaaatgtagtaactaggaagtgatcctaggtcgtttcccaatgagcagtgacaagccaaatgttcataatatactngcagtaatagtaacagtaacgatggnggggggggggggtc

SEQ ID NO: 128036 - DNA, 393 bp, Glycine max
ttcaacggaggtgacatgaatatcttcatactgagcaacacatgcacagtggccaaagatgcacgggagatcctgagaaccactcatgagggaagcgggtactgcgaagatgttcgacattgctactctaggttacagaatatgcaaatctgatgatgaaggacgaagaatgcatgcatgactgccactagaacatgcttgaaattggcaatgcctgcgctgcctagggagagagaatgacacatgaaaagctggtgagaaagatcctcacaaccttgcctaagagatctgacacgaaagccactgcaatagaggaggcccaagacactgagcaacatgagagtagataactcattggtctctcaacacctttgactcgactctcggaagggc

SEQ ID NO: 128037 - DNA, 518 bp, Glycine max
gacctataaatctaagcttcttagaaggtgtgttcctaatttctctacaattgcatcatctcttaatgagctagtgaagaagaatgtggcatttacctgtggtgaaaaacaagagcaagcctctgctttgctcaaagaaaagcttactaaggcacctattctagctcttcctgacttttctaaaacttttgagctagaatgtgatgcctctggagtacgagttggagctgttttgttgcaaggtggacaccctattgctcattttagtgaaaaacttcatggtgccacccttaactaccccacctatgataaagagctttatgccttaataagagcactccgaacttgggaacattaccttgtttacaacgaatttgtcattcatagtgatcatcaatcacttaagttcatcagatggcaaagcaagttaaacaatatgcatgctaaatgggtagagtacctagagcaatctccatatgttatcacatacaaaagggaataacaattgtggtagctga

SEQ ID NO: 128038 - DNA, 415 bp, Glycine max
  unsure (1)..(415): unsure at all n locations
ataagcctgacgctcccactcatttccaaacagtgcgtgtgtgcggcctattctgctatttagnccaaacggcaagacatgggctcatcgtatgttagcctttcttactcagtttcacccgcggagagtagtcctgttattcacatatgcatcagcagtatgctcatgatataattacaatgggcattcaccactgataccaaatagcaaacttaaatatttatgagagtccacctaaaactcttctcagatcagactattgttctggagttagccttgaaagatactagacgactagcttaattcttaaattccgcatcctcccaggctcttttgatatacgcatttctttattatggacatcaacctcagcaccaggtctgacaatatctgtcaatgggagcatgaaacttct

SEQ ID NO: 128039 - DNA, 435 bp, Glycine max
  unsure (1)..(435): unsure at all n locations
taagctgcggactataccttcgatcgaacactgttgttantttgtctatgcccagattcaaggcgggctgcagtaccggctctggctccctaactgtactggaaacggttgccgtggctatatcctctatgggtttctggatgttttacatgacctccgaaatggaagccatttgatcttttatggccgatagatcggcctacatctgtttctgcacgcccatttcattatccatttttctggatcgagtgctataggggtgtcttggtgtcttcttacttgtgatgcacattcctaagacataacaaccgcgagtttgccaccaaaacatgagtatgcaaacggttgatcggagtatcttgaaccacccctaggctcttagataatggcatgaaacactaacttctcatgtatatatagaaacagctctatttg

SEQ ID NO: 128040 - DNA, 425 bp, Glycine max
taccccccatgccaacatatatgaaaatacagtaaagtccttattaatagactattcagaatgtcctgaaatacaagactaacaccctatattactagggtacccttaacttgtagggtaaggtaccctacaaatctaaaatggctaaaatacaagaccctaaagaagaaaatcttattctaatatttacaaagaacagtggataaatacttattagaagaatgatgaagggatcaaaatcgcataatttatgtgagatctaaaggatgtgcaattcatgcaactaaaacctagggactaaaatctcataatttgaatacctaagggataaaaaatgtaattaacctaaaacaatctaattgtatatgtactaaaattgtgtagcagggactaaaatgaaataaacaataacatgaactacaatg

SEQ ID NO: 128041 - DNA, 483 bp, Glycine max
  unsure (1)..(483): unsure at all n locations
tgcgaaggcaaacatttggaaagttatttntactattaaatgctactcttaaaacaaaaaatggcatacaacatacaaacatcaatgtaaatttagagtaaacttatgcacatacttctttacgaacgttcacttgcacaagacattcttataactaagaaaaatgcacccatgtacaatcaaggcacatccgttacctaaattatatatatgtacttccaaggtgtatttgctacctacatcacatgcacttccttggctaaatntacatacatgcatactcaaagcacttggggtaccaaaaattgcacatgtgcacattccggtatttctaatatttatgcatatacaaactatgcgatgagtcttggctatctacacaataaggtgatacatttgatgctctattcaagtgttnttgctacctagagccgcatgcaaactcaagtatatattcttttgctgactaacatagattcaaat

SEQ ID NO: 128042 - DNA, 506 bp, Glycine max
ctcagcttctagggaggtgagcttagttattagaggggtgtgtgtttctatgctctagctactcaagaaagtgttctcaaagaagattctcaaggaagttttctcacgaaagcttctcaaggaagcttcctagtttataaatagaaacatgtgtaacacttgttgtaactctgatgaatgagagtcttgtgagacaactcaaagttcaacttctctccctttttcttcctccaatttcatgctcccccttctctctttctctccctctatcttttcctccattgaagcatcctctccaagcttcttatccaaggctcatcttggtggtgaagctccttcttccatggcttattccttaatggatggcgcctcctctcacctcttttcctttgtcttccgctacatctccatggtggaaagtcaccattaaaggactccatttaagctcaaagatccagcctccatataagccccacaagcgagctttcatcatgtggtaatcacag

SEQ ID NO: 128043 - DNA, 344 bp, Glycine max
  unsure (1)..(344): unsure at all n locations
agcttctaaagagtctacactactctagagttcttcttaacgttcnagaaaattctacactctgccagaaagcttcagaatnttctacatcctcctcaatttaggagggatccaacaaatctccccctcccgacttaattggggggtcgtaacaaaccggctccttggataccatatgtcaatgtgctttggtcatcatgcaaggatggctctcttcttgcatggctcttctgcactccaccaattcataggcgttattcctatgccaggatatcttctcttctttgatggttattctcactccaccaataataggtgctttctcatgcacgatgcatttttct

SEQ ID NO: 128044 - DNA, 380 bp, Glycine max
  unsure (1)..(380): unsure at all n locations
ngcggnttctntctcattctctcaaccaaaggtgaaataattattatagtgagagaagagaaggtgctcctcatctcaccgctctttagttcttcttccttcaaaactcgaatgacccatttctatgtttttcgtactcttgcaattcctgaggtaaagatacaagctttgctcttctgctcactggatcgggttccaggaattcaagggtatgttcaaaaggggttgtgttgatctgcaccaagatgcttaatttacgttgaaaaatccattcatttgcgagacttagcttcgaagatgaaccatttagttgaaagctcaatgaatactcaaagggtctctagagttcaagctccactagtaacctcgacgacgttgtg

SEQ ID NO: 128045 - DNA, 249 bp, Glycine max
ttatttaacacaatcaaaatggtcattgttataattgcttatccttcatcccacacggggataaatttgcatgattcttacttgttagtagaattaaccttatacacactgaagataataagacttgtggttatagatacttaaccaaatatgctatgttgtgcactagacagacacaaatgagagagctttaactggatgatataatgccacgctatcctatagttgcgtggtttctttcattttctc

SEQ ID NO: 128046 - DNA, 340 bp, Glycine max
  unsure (1)..(340): unsure at all n locations
acacgagacttatgcacggcaccaacaacgcatcgaattcaggaaaccacacttcacctatacatatgagtctacgatcaaagatgactatatccgaactgagcaaacgacggttgacgatcgcctaccccgacccattccatatgtccggacgaggcaccgtattgaatctccaatgggaaactaaggtggactcatactgcacttagctcgagtaaaacagagtagtcataggtcacatgatacgagatctatacgcagtcgtgacaaatagccggctagatagaggatgaagcacattcctaccttngaggatgaccactaacaagctgcggcacaa

SEQ ID NO: 128047 - DNA, 389 bp, Glycine max
agcttgcatgatttacatctccctctatctctttcatattcttcttgagatcatcaaaatcttcatgatttacaaaaaggtacgttttattgcattactttccttatatttttaaatagtgatcaaggggttcccatggaccctaagagaataaaggacattcctgattggcccactccaccaagtataagggaaatctggggctgccatgacttaacaaacttttgcaaaaggtttgtcccatatttttctatacttgtagcaccactcattgagttggtgaggaaccatgttccctcatgggaagatgtccatgaaaagggttttcagaccttaccctactctaacatatacaacaccactaatacatatcgttttattctttttat

SEQ ID NO: 128048 - DNA, 448 bp, Glycine max
cgaaggacatacacaaagtgtgactatatgatgtgactttttttgtagcaagcatatactcacctccccctctaaaatttaattggattgtgcttcccccaattcaattaaatttatttcccaatacatacatcaaatattcacttaatgcatgtgaaattacaaagcaacccataatacaaaaattagtctaggtatcctaaaatataaaggctgaaaaatcctatatttctagggtaccctacctacattatgaaaccctaaatacaaggcccaaaaaaaaatgaaaccttaatataatatgtacaaagataagtgggctcatacttagtccatgggcccaaaatctaccctaaggccgatgagaaccctagagccttctcttgcatctctggtctaatcttcttggagtcatctatccaatgcctttggagggtaggattgcatc

SEQ ID NO: 128049 - DNA, 288 bp, Glycine max
ggctgcagctgaacttagaacatgcttttggtccttcgctgacacgagcttatgcatctgggtgtgctcttaacaaacatcatccttctcactccttttggagctggcatccactaagggcacctaacaacgggcaacttctgatatcgaccccatgactaaagatatatacgtaggtgagcatctgatcatacaacgcttatgagctctgtactacgctatcacaaacgagccaaaccatataaaaaacgggaaaacaaccttgatgtattatctataggacgaagc

SEQ ID NO: 128050 - DNA, 309 bp, Glycine max
  unsure (1)..(309): unsure at all n locations
ctcagcttcgcagattggtcttctccagtgacatgagctatgtgggttccaatataggcaanatggatcatcctacagtgacgagagataatactggggcgaaatcagatggtgaggatgacggagaaacacatgatgtgactgccattactgtactgaccagtcctcatcaacccaacaccatctttactattccagcaacaagctatatgcttactcaccgccccattattcactgaggccatacctaatctccactagcctgctggcgccttctatgacagctcctctttgcactaccaccaccct

SEQ ID NO: 128051 - DNA, 463 bp, Glycine max
  unsure (1)..(463): unsure at all n locations
catgcaagcttcacatcccgatcaagagctcgganatttgatgctaatactgctgcactcctactgtaatgacttgcctcagtcaaatntgataataaaatgagatacataaaatgaactcttgcacctgatgtatctggcatcaaacagtcgcctatcagcatcatgatatgagctatagcatgttttgcaatgacaacatcagcagcattaactggaagttgctgaaaattttgctgcaaccaacttagataaatcattttaccctttacatacttaccaggtggagtgtcccttagtaatgcttgacaagcaacacgtacatcaccggtgatgatactagttatcaacaatccatcaatcctcaggcccaactgtagggtcacatcttgtaaagttatggttgactcttcatgtgaaaaatgaaatgtgagactcggttctccaacgttcaaccaatgca

SEQ ID NO: 128052 - DNA, 467 bp, Glycine max
  unsure (1)..(467): unsure at all n locations
ntatggattcaggtattccttanaacctcttgataatctgatgtaatggtgtttggggctcatttggtattttataaggttttttaaaaattccaacaaatatatctctattaacattcaaaccattcatctttctatgccaatccacgtaatgatcatgcaatgattatgcatttatcgatatttgttagttttataagtactatcattgagcaagtgttgcatttccatcctatgacctttttgagaggattaataggttggtcgggcattctaaatgtgcttcataagagtaacactatgctcattatgatctttcaatgtaagcagtatgtttcttggcttcaccatgttctttgtgatatcattgactaaagacttctcttctacactcggtcgatcaacatatgaatgaccattaatgtntcactagtcatggtgtgacaccacatatcacctaacaatca

SEQ ID NO: 128053 - DNA, 411 bp, Glycine max
  unsure (1)..(411): unsure at all n locations
gcagcagcttgagcaaatcaacgacaaaacttttacttgatgttgatagagcccggagataacgacaccacgaaatngatgttgaagctcagagccaattcaaacgacaataactctttactcggacgtctaatagagtcagataatataacgagacgctcgaacttgaatgtcgaagctctgagctaattcaaacgacaataacgttttactcggatgtctgattgagtcccgtaatataccgacacgctcgaaattgaatgtcgaagctctgagcaaattcaaacgacaataacttttcactcggatgtctgatgtagtcccgccatataacgacacactcgatattgaatgttgaagctctgagccaactcacaccgacaataacttgctctcggaagtgtgactgag

SEQ ID NO: 128054 - DNA, 503 bp, Glycine max
cagcttaacattcaacttcgagcgtctcgttatattatacgactcttttatacatccgagtaaaaagttattgtcgtttgaatttgctcagagcatcaaccttcaatttcgagcgtctcgatatatgacgggactcaatcagacatccgagtaaaaagatattgtcgtctgaattggctcagagcttctacattatatttcgagcgtctcgatatatgacgggactcaatcaggcatccgtgttaaaagttattgtcgtttgaattggctgagagcttcaacattcaatttcgagcgtctcgatatgttacgggactcaatcatacatccgagtaaaaagatattggtcgttgaattggctcagagcttcaacattcaatttcgagcgtctcgatatatgacgggactcaatcagacatccgagtataaagttatgtcgtttgaattggctgagagcttcaacattcaatttcgagcgtctcgatatgttactggactcaatc

SEQ ID NO: 128055 - DNA, 392 bp, Glycine max
  unsure (1)..(392): unsure at all n locations
agcttacttagctcttccaaactaatacgctttctttctgttatgctgaaagtgtacttatctagagccactggctngtaatccttgaaacacaccttgtactcttcacacacacactctcacaagtcatgacacacacacacacacatcacagaatgctctaacttcagcctgtgcaattaagagcatgtttgattaaccattcgataaataaccgaaatatgttaatgtactaagtgcaacaatctgatcgaaactaaagttataatccagacatgcactatatttgcaaacttaacaatcgtagatgtcgtttctccctcggtagagcagaataagagatcttcacctcagattatcatctctctcatctcatttacttctcttaatac

SEQ ID NO: 128056 - DNA, 506 bp, Glycine max
  unsure (1)..(506): unsure at all n locations
tctaaacntatacaagaatgaagctctgataccacttgttatactttggcctcagatatcttaagaagggggggttgaattaagatattccaaactacttccccaattaaaaaagactatttcactttttattcaagttatgaattcccttaatgacaatcttcttaaatattgattcaaataaaacaatttgaatatgaatataaagaaataataaataaaggagattaagggaagagaaagtgcaaactcagatttatactggttcggccacacccttgtgcctacgtccagtccccaagcaacccgcttgagagttccactatcttttaaattccttttacaagttctaaacacacaaggacaatccttcctttgtgtttagaattcctttacaacaagagacccacggtctcttaatcccttatagaatgagaagaagaagaatgaatctctctagaaagagatnggatttacagatngaacactcanataattccttaatg

SEQ ID NO: 128057 - DNA, 387 bp, Glycine max
actttgttcaatgccaaaaaaactacggcacgtgaataggatgaaaacaacggagaaacctatgttgtgacagccattcttatacgaccaagtctcccaccaacccaacaatgtgatttctcagccactaataaaccttatccttacccaccgcccagttatccacaatggccatcctctaaatcaaccacaaagcctacctaccgcacttccaatgacaaacaccacatttagcgtaaaccacaacaccaaccaataaatgaatttttcagcgagaaagccttagaattcaccccaattccagtgtcctatgctgactagctcccatatctacttgataattcaatggtagccataaccccaaccaatgttatcaaccccatttct

SEQ ID NO: 128058 - DNA, 424 bp, Glycine max
  unsure (1)..(424): unsure at all n locations
ctaagcctggcccaacgctntgttcaggctctcccaaaatctagaggtaaacctatgatctctatcagacactatgctagatggcacaccatgtaatatgacaatctcactaatatacagagaggtcaacttttccaaggaaaatatgatattaatgggaataaagtgagcagacttggtcagcctgtcaacaataacccagatagaatcaaaacctttgggggttctaggtagtcctacgacaaaatccatagaaatatngttccatttccactgggtatctccaagggttgtaactttcctgaaggtctctgatatcttagccttctgacagactaaacatgcatacacaaactcactaacctctctcttcatgttgngctaccaaaacatcatcttcagatcttgatacatcttggtagca

SEQ ID NO: 128059 - DNA, 453 bp, Glycine max
  unsure (1)..(453): unsure at all n locations
tgataaaagcttanagaagttctgtcttttacatgcctctctcccttaagtggcattggtattagttnttatattgaatattgcatcttagtccatatggtatcttttgtgcatcatgcatcattatgagtaagtgagaagaaaaatttctaaagttagaaaagtttcttcggaagacaaaactctctgttctaattgattacaaccttattgtaattgattatacaagttgtctgaagcttgcagagttatatctcatatcagtttaattgattacagccttatcataatcaattatagagttgtttntgagacaatgactgatttattcaagagtctctactttaatcgattaccatttgatataatcgattactggcgtgtctataagtgtttctaaagtgaacaagaacactttaatcgatactttgaggagttatcattacttctttt

SEQ ID NO: 128060 - DNA, 510 bp, Glycine max
  unsure (1)..(510): unsure at all n locations
gacacttgaaactatagctgcccgtagtgccgaagcaggaggttnttgcccgctcctgtaggtcctattancgaagncatcctgcaataatacagcgaagaagtaaccggttacaaaagctcacacacacatgaaatctctgaacctatcaaataaagaaattaactcacacccatgataacattgccatcacgttgcaccctgatttcaaattactataactagtatgtttcacaattgacgatgtcaatcagaaaaagagaaataactcaattcacacggttgcgtaacagcaacattaacatgagagtgataacagggtaagaagtgagtgaaagctacagcatacacgaaagagagaacttactttgaaaggaatttataaaatcgaatcaccaaatcgaggtcattctcatataccgtactgacttttcccaggcatgagataccaaatcttgggtctgttgggataaatatattaataacaatgtttcataataaaatactatg

SEQ ID NO: 128061 - DNA, 445 bp, Glycine max
  unsure (1)..(445): unsure at all n locations
taatgatgctatgataccacttggtctattttgtgactagatacttgatatagacggggttttataacataaatctgactttctaattcataatatattctctattttacttagatgtggcttataaaaataaaataactactactcacggcagggaactacggaaagaataagtacgttagactatgtgcagatttgtctaaactaatttttttaagaatgtttttaagatgtctttctaaaagtagatgaagggtatctattaaaaaaaagcaattgtctgttttcttaacaaataaataatttagacaaacacatgaaaagctgcttaattattaattcgctaggatgttcttttaataaaaaacttaaacaaatgaaccttttataaacaatgagtctgactattgtntataatgctatctttaagtctaattaaatacac

SEQ ID NO: 128062 - DNA, 464 bp, Glycine max
agctggtcatcccatttccatcttcgtcctatctcttcaaggacagctgcccgagcttggcttctccttgcctcatcctctacccaagatctgcaacattagcattcttcattataaccacttaactccaaatacaatcacaatttctagcaggcttacttgggtgaaagtaattttacaaattagtacacaatcataattttctaatgccgcagactatatacttctaacataagaggaccaaccaagtactattgagatatgatgacaacatattttttattgccagaaacacaattcatgtccttcacaattttatatttggttatgcatataaatggaaccaaagacaagaagtaactccaaaagtaaaagaaatagttatgaccaagaatatgattgaacaagatgcatactatctagaagcacatggaaaaccaaagaagactttcagaacaataact

SEQ ID NO: 128063 - DNA, 424 bp, Glycine max
actcaactcttagcctggacactccttactgggcaggtctactttatctcgacaatctctagcaagatgatcgggcctctgacatctatagcataccatcttcttttgagggagataggtcattaagtgtggaccatcactaagtcattgagttcctagcaaggtcacaactaaactttcctgaggatgttggggtctagaatagggcttcttctaaagtttcccttcttagtgctagaggatccaccaccatgggttctgatcactttgctaccaccttctacgtgttccacagcttttgccttctttaccaatgcacgacattcccttatagccatagggaccaccatcttcttcaccttaagcctcatatattcttcaagattcctacacttccaagctatactaggagtgtgacaatgac

SEQ ID NO: 128064 - DNA, 447 bp, Glycine max
  unsure (1)..(447): unsure at all n locations
tgctctaagcgctgtccattgacgatgcatttcattctatttgtnatcttctctagggaccaccaatactactgctccgagaggtctgactccttgattatgaacggccctgaccatttggactttatcttacctgggaatagccttagccttgagttaaaaagtagtacatattgccctggctggaatacttccctttgtagctccttgtcatgatatgccttcatcttttgcttgtagattctggatgactcataggaattcagtctcatctcttccaattccaggaactgtagcttcctcttttctctgcatgcactatcatcgaaattaagcaatttgagagcccaatatgctntgtgctccaactccactggtaagagacatgcctttccatatactagctgaaatggtgatcagccgatgggagtcttgaatgttgctctg

SEQ ID NO: 128065 - DNA, 391 bp, Glycine max
  unsure (1)..(391): unsure at all n locations
ctagaggaataaaagtttgtggcatatatgtattttggacatactagaggaataataatataaggatgctctttgtttcagccaaacaacatttntctaccaacaaatcaacaatacattttcatgtacggcaaggtatgcatattttacaagcattgcagtcactaatgaatactactatacctttatcctttttattcaaaaataaaatcattcattaatagaaaaggacaaaagagtccatcattacagtcttatagaggtttgtcgagccaccaagtcttcccacacacnaatttggtagcacctaccaagtggtgccataacatgtgttggtttattcctatctcttttcttaagagataaagataaatagttcatagtctatgct

SEQ ID NO: 128066 - DNA, 399 bp, Glycine max
  unsure (1)..(399): unsure at all n locations
atcttacgacactaacatttattactgaccctctctactttaaaaccaacaacagcagaattattatgacctatcatgcaatagattcaatccaagttggaggaatcatccatatcagagatgggcaagaccttcacaacaacaacagtctatctctcctttccacaatgctgttgatccnaacatgccatatgttactccttcattgcagctgcagcttcatcaacatcaacgaatacaataaaatactgatgtccctcctcaaccttccttataagatgtagttgaggcatatgactatccataatatgcaatttcaacaagagacaacatccttcatttatagtctgaaaatcatatggggcaaatggctacttagtagaaccaatctctatctca

SEQ ID NO: 128067 - DNA, 458 bp, Glycine max
  unsure (1)..(458): unsure at all n locations
tctcaggaagttntcttaagatagcttctcaaggaagctacttagtctattaatagaagcatgtgtaacacttgttgtaactttgatgaatgagagtcttgtgagacatacttcaaagttccacttctctccgtcttttattccttcaatttcgtgctcccccctctctctttctctccctctttcttttcctccattgaagcatccttccaagcttcttatccaaggctcatcttggtggtgaagctccttcttccatggcttattccctagtggatggcacctcctctcacctcttctcctttgtcttccgctgcatctccatgatggaaaatcaccattaaaggacctcattgaagctcatagatccagcctncatagaagccccacnaagcaagcttcatcacacgtnctcgccttcatagggctacatgctctaaccttcagagaactacgcg

SEQ ID NO: 128068 - DNA, 458 bp, Glycine max
aagcttgtaggtggtgaccaactggtgctcttcacactgcgtggtgtggaaggatggtgtcctcgattgtctattcaacattgttcaataccaagtacaatgaaactccatagcgatgaagaacatgaaatcactgtgagatatatatgttgagataaaaaaaataacgcattatgatgcatacgagatccgatagataggcacatcatcatggatgttagttggcgtgtatgacttgtttaagtcttctatgtttagttgacgaagtaggaagactcaccccttactttttcttaggactagatggcaggtgaggagccgacactccatctcgaggatgagtgcacttggaggtgatagatacccgacgcgactaaaggcgcggagtcacttcttggatatctctattatgtgtggacacctattgacttatgcttcttgtagtttatcatacggtt

SEQ ID NO: 128069 - DNA, 497 bp, Glycine max
  unsure (1)..(497): unsure at all n locations
tcttagtttcagatgatgcagatgggtttgtagctacctcatgcactcctctaatgactatggcatcatttctagcgctaaactgctgggagttggaagccatcttctcaattaaatttctagcttcaacaggagtcatgtctccaagggctccaccactggcagcatctatcatacttctctccatattactgagtccttcataaaaatattggagaagaagctgttctgaaatctgatggtgggggcaactggcacatagtttcttaaatctctcccagtactcatacaggctctctccactgagttgtctaatacctgagatatccttcctgatggctgtggtcctggaagcagggaaaaatntttctaagaatactctcttaaggtcatcccagctcgtgatggaccttggagcaaggtaatacaaccagtcattngccactccctctaatgaatgangaanagccttcagaaatatgtgatcctcttggaca

SEQ ID NO: 128070 - DNA, 495 bp, Glycine max
  unsure (1)..(495): unsure at all n locations
ngaaccttgaatcttgattcttgattcatgaaatcaaattttctcttgaaccttgaaatgttcttgattcaatcttgaacatcttgaactcattctttgattcttgagatcatcatctntgttatcatgaagtgttcttgacctttgagctttttgtcatcacctttgttatcatcaaaacttctttgaatcaatcttgattcatcatgaagcttgcttctacaatctccccctttttgatgatgacaacttcggaaatcatgaaacacacacacacacactttttcctagtcgatcactcacataaatttccattctccccctctgtttttgaatatatgcttctcttaaaattaagttgattactcatgtgagttcttgatataatccctatttctctccccctttggcattcaacaanagccaaagtgcataacaagtttgaatcatacaaatacaactaagcatccacacaatattcatgaaaaatataat

SEQ ID NO: 128071 - DNA, 383 bp, Glycine max
gactaagcacgcgcgcagccacttagcgaaaccacttttttccctagcgacgcagctgcagaaatcaaagacaccagaggatgccatctgcaactgaacccttggctactccgccgcgatacaaagccaaacatagaaaacaaactcagtcaacaatgctgacgctcgtcacgatgatgcgcatccgggcaacgaaacacacagacccgttgcacctctcggctgggtggatcaatgaagcccgcggctggccggaccaataaaataataccggatcgtgctgctaggagcggccactgcgaaaccagccctctcactacagagactgacgcaaaggggagcagatacgacgcatgcgactcgagcatgtaaccaactgccat

SEQ ID NO: 128072 - DNA, 298 bp, Glycine max
  unsure (1)..(298): unsure at all n locations
tctaacaaggtatctgtattattcacgacgattntttacctgctgggctataataataaatcttcttggctgtgcaaatagctaaacttattggtaatgcctgttactgaactaaatagaaacaaaattctttaagctgagatctgctggagcaatagtggccttagattatgaatctgtgaaagatggtgatttaactgtaatgtctaatggagctactaagaggactttcagatttgatgatgactttggtccccaagctgagcaaggtattgatgctttcatgccatgaattctt

SEQ ID NO: 128073 - DNA, 474 bp, Glycine max
  unsure (1)..(474): unsure at all n locations
agctntagaaagttgcctctctagttgtgagtgtttttatcaaccccagcctcgntatgatcattaggaccatagccaccacgcccgccaccacgcccgccgccatagccaccacgcccgccaccatagccacctcgtccgccgccatatccaccacgttcccctccatagcctccacgcccacctacatagcctccacgcccacctccataaccaccaccatagccgccaccatagccgccacgccaatacttgctttcatctaccccatctgcactaggcttccctacaatcaaaaaaggaaaacaattacaataataattaagtagagactaaaataatctgccctaggcaaccttctcaatgcttaatcaaaatgcttatacaattagttctcagcgatattatatagtgagttgatattccaaataaacttattaatcatagaaatatttgacatgtagaattcttccg

SEQ ID NO: 128074 - DNA, 390 bp, Glycine max
  unsure (1)..(390): unsure at all n locations
gatgcctnccctaactcgtcgaggagtgcatctatcttttgtagtggaaaacgatctggaactgtgatcgtattcaacaccctgaaaccaatacacatacaccatgttccatctttctttatcaccaacaagttttgagcatagaacgtactgccacttccttggatgatgtccgaacttatttgggtcaataccggtgcatcaatatacgtgtttttacaatgacgccctctttgatgatgaccacttctggggttatgaagcacgcacacactcactttttcctagtctatcactcacataaattatcctgctccccctttgttattgaatttatgcttctcatacnatacagtcgattactcatgcgagctcttgattaaatcctat

SEQ ID NO: 128075 - DNA, 381 bp, Glycine max
catgccagcttgaacgcatgtaactgtgcacagccgtcttgtgttctgtatcgcacaagtagaataaaacggtgagaaccaagtatcgaactctcggggaactagagtcatctggcaagctatatcgataataaggagtctggtatgaaaatacaaatgaggatatggacaactatgtaaactatctaggcaaaaagaaagactatcatgcaagagaaacactgtgttaaaacaaatagagaaagcgctggacttcctcatacgctcctgatgcaaacaaggatgatctctatctaaccatgctcatgcggtgctatgttgaccctcggactgctagaccccgatcctcatgacggcctaacctagtcataaacaagcctc

SEQ ID NO: 128076 - DNA, 469 bp, Glycine max
  unsure (1)..(469): unsure at all n locations
atgacatgactnttacccaatcttagtatgttgttaagctgcngaagaagtntaattattctgatgtgaaacctgtttctactccttatgactcatccatcaagctaaagaaaaatttgggtaaaggaatttcttcacataaatattctcaaattatcggttctttgttgcatttgacaaacttctctacgcctgacattgtatatgcagttggtagattaggaaggtatactaataatcctgatcattctcattggattgcattacaaagagtttttagatacttaaaaggaaccatcaattatggcattcattatacatgttttcctgcaataattgaggggtttagtgatgcacattggatttctgattctgatgaaacaaaatcaacaagtggttatgtttgtactttagctggtggtgcagtatcatggagatctgctatacanactatnatatcacgttctac

SEQ ID NO: 128077 - DNA, 438 bp, Glycine max
  unsure (1)..(438): unsure at all n locations
cagcatgcaagcttgnagccattaaaagagaatgagcatgtgattttaagtatcgactgacaangctactcaatccgtcagattgaatgagaaagaatgcatcaacagtatcccggtgagagagtggaccttaaatcttgagataaatgactatcatttaatactgattctcgtgagaatctctgaagtatggaccgaatgcatgaaatcgaagatgacgaacgccatgttcgatcgcgatacgaacttaaccaaaaagctgaccacgtgcgagaatgaagaatcctttgcacctagttcgagcttaatgaattattgattgattgaagcctgagcctacagtgctatctcctgctaccttgacttaggtcgtaggagagcatcatccacaggaagcgcgattcaaagtaaattcgtcccaaattttgcggagtaatt

SEQ ID NO: 128078 - DNA, 330 bp, Glycine max
cagatgatgcagatgggtatgtagctacctcatgcactcctctaatgactatggcatcatttctggcgcttaactgctaggagttggaaaccatcatctctattaaatatctggcttcagcaggagtcatgtatacaagggctccatcactggtagaatctatcatactactctccatattactgagtacttcataaaaatattggacaagaaactgtactgtaatctgacggtgggggcaactggcacatagttccttaaatcatctccagtagctatacatgctttctccactgagttgatttataccagatatatatatcgctaagg

SEQ ID NO: 128079 - DNA, 440 bp, Glycine max
  unsure (1)..(440): unsure at all n locations
gtatcttgcagttgcacaaatatgtcaattattgttaggctatctgaaggaaattcttctatcaataaagaagttaggtccaactgcacttacagtggtagagcaagacacaaaccataatggccctttcttccttgggagatttttggaatcactgcactattactcggccatatttgattctcttgaggcacgtatgacaagaaatagtcaacacaggatgaaaatagagagattacattttgcagaggaaattcagaacgttgtagcttatgatggtccagatagaatagaaagacatgaaagggtagatcaatggagaaggcaattacgccgagcacgatttcaggtaatgccactgaagtgcactagtcaagttagaatgatgctntctgtttatgactgtgacggatatacattgtcctatgagaaaggaaatc

SEQ ID NO: 128080 - DNA, 422 bp, Glycine max
  unsure (1)..(422): unsure at all n locations
agcttaaacacgtaacaccctacatcttattctctgaataacagnctaacaaaatagccttgcacgaatccgaaggctgctatataaaaaagtcactcacagtcactgggccctattacattattctggcccaaaacgaaataagcactgaccaacataaaataaaattgcaatctcctacatagaattaactaaagtaagcggtgcattattngccctcttcaagtccacaaccaaagtctggattaagccccatgcttcatcaattcctgaaattagattaaaaacatcaaattagctgaatgagcccaataataaaactgcctaattaatttgacaattaagactaatcagtaattaaaatgaggccaacgagggttaagaaatatgaaaaaataatggcacatcacattggcttcatc

SEQ ID NO: 128081 - DNA, 441 bp, Glycine max
  unsure (1)..(441): unsure at all n locations
tcttgaaccacaaatcntgacctgtcgcaagggtctgtggtttgtgctcctctgctgaccaccatacagacctttgtccttccatgcagcaaccgggagcaattgagcagcccgaagcttatgctgcaaacatttacaatagacttcctcatcctcagcagcataatcaaccacagcagaacaattatgacctctccagcaacagatacaaccctggatggaggaatcaccctaatctcagatggtctagccctcagaaacatcagcagaagcctgctcctttcttccaaaatgctgctggcccaagcagaccatacattcctccaccaatccaacaacagcaatagccccagaaacagcctacagntgaggctcctccgcaaccttccctcaaagaacttgtgagacaaatgaccatgcagaatatgcagtttcaacaag

SEQ ID NO: 128082 - DNA, 430 bp, Glycine max
  unsure (1)..(430): unsure at all n locations
agcttagtattggtgggagaatactcgccagttcctatatgctgaaggtcaagatgtgacctgcgatgtcttcaagagggtatctttggagaaatattttcctgaggatgttaggaataagaaggagatggagttcttggagctcacgtacggaaacatgattgtggctgaatacgcagccatgtttgagaagttggtgaggtactttccccattatcaaggtagagatggtgaaagttccatatgtgtgaagtttctgaacagcttgtgacttgaagtgaagcaagcagtgaattaccaaggtgttcgtcagttcccactcttggttaacatgtgtcggatttgggatgaagactcccgacacagggcgaccctatataggagtatangtccaatgaagaacatanagaatggacctcaacatctggga

SEQ ID NO: 128083 - DNA, 428 bp, Glycine max
  unsure (1)..(428): unsure at all n locations
gtcataactcttcactcggatgttctattcangcacatcacttattgagaccctcgaaattgaacaacggaagctctcgagaaattcaattggtcataactttagacaaggaggaccgattcacgcacatcacatgtcgagacgctcgaaattgaacaacggaagctctcgagaaatttaaattgtcataactcttcacacggaggtccgattcatgcgcatcacatatggagacgcctgaaattgaacccaggaagatctcgaaaaatgtaaatggtcctaacttttcacacagaggttcgattcaggagcattatatatcgagacactctaaattgaacaacggaagctctcgagaaattaaattgtttaacttttcctcggatgtcgatccagggcataattatcgagacgctctaatgacactg

SEQ ID NO: 128084 - DNA, 457 bp, Glycine max
  unsure (1)..(457): unsure at all n locations
agctntgtgagtgcgggtttaagacgctattgtctttcgtcgcgatatgcgatgaggactccctgaggaggtcgaatttggtacagccatgccctcccagcttccaactagggaattggcgggtggaggaacgcccggaggtttacacgacaagcataatgtaacctttttagctttaaactctacggtcgggcctagactttggggtttgcttttgttaaggcattatgtcttttgttcttgaagttataatataaagatctttcttcatctgttcttgcgcctccacccattctcattcatttgcatgtttatttccttgttacgaataaatgatacagatctgatgacgaagatctcaagaaagatgcgagtcctacggaggatgaagaagacaaagatgtatgactctccctagagctagagaggataattgctcatgacgattgagagatga

SEQ ID NO: 128085 - DNA, 332 bp, Glycine max
gctctatgccccaggactcactatacctgctaatgaggctcttgtacccacagtcattttcagtgggaattctgaactcagattgcgtttaagtcgcgccaatcatagaacagcttttgagccacaacagcaagcacactatccttatgctaatgattcattctcctgaacactgagaatgctgcctacttgtgagattattgtgcttatctacttgaatccaacacgctcggatccttacttataattgtgctccagatgtctagaaaattcagtatatgcttcatctgaaaaacgtagcgagcagaccccaatcatttatacgagttcgg

SEQ ID NO: 128086 - DNA, 453 bp, Glycine max
agcttgtttatcataccacgaagaagagggctatcggtttcttttgccctgtcactgaaagaggattcaaggggcatgtatgcaattttgaaaaaaaaaatctttataatgctgcttttgtatgtgtgaagtaaatgtttgtgtgagtgtgaatctgattagcttgtgtgagaattcatcttaaggatacatgacaatagatataataagaatgaagatgatgaagcataattaaaagggcttatagactcaaatgctgaagtgtgcttatcatttcaaattatcaatttcccctaatgtgtctaaaaggctgaggctacaaatgaagcaattttgtgcacaaacatgcctgtttgggtagaacaaggacaaactagtgcagtagtgtatgataacaaaaattgaattaatgcagaaacattagcttgaagtttccgtggagttggttactac

SEQ ID NO: 128087 - DNA, 463 bp, Glycine max
  unsure (1)..(463): unsure at all n locations
tgtaccccaccattttttcatagtaaaacgctgtttatgtgtctactattattgggatcatctctttctacgtcattggaggcgccacttgagctgccaggactctccaccttatgccgtattctttgaaagattcgtgcccctttttacccattgtcgcaacctacccttcggcgggagggcgacgcgtgacttgcgggatgcgtgttccacgaaaggaatacgcgcggagtcgccaccaacgtttatttgatgaaaacgtcggaaaaaccgaanaagacgtgatctacgaacttttatgtgaaaggttcgggagttgtatttacgcacggagaatgtattagcaccccacacgtccgtcccaagggacggcagcctttaatcgaatgtgcaaacatgactcctgattttacgttccctttgtatgtctctatatcctttataccctctctatatnttttct

SEQ ID NO: 128088 - DNA, 470 bp, Glycine max
  unsure (1)..(470): unsure at all n locations
agcttcagaagcttaggaccaaaggtgggatgatgacttatactgttgntgccaaggcctccaaggcagagccaaacaaaaaagtcacgaagaaaaatagagtttgggatgaagctgcaactacagaaactaaactggactttaccgatcattccggtgaggatggggagaggaacatagattttgttgtggctgctgatcaaggtgaaagtatgatggataaagaagagattgttagcagtgaaagtgagcaggaagaggaggacgaggatgaggaggatgcatggaagaacagaaagcctgatgccaaaagcaagggttggttttcatccatgttccagaggtaagactaccctgtattctaatatatcttgcctagggtcatagcttatctttctgttaagttggctgaatatcttgctgaaactatctgttagttaacgtatatgctgtatactatngacctatgg

SEQ ID NO: 128089 - DNA, 488 bp, Glycine max
  unsure (1)..(488): unsure at all n locations
accctggaagttcctatatctcccacacnttttgttgtgtgccattcttggatggccttgattgtctcaaggtccacttggatcccatttctaccaactacaaaacctaagaaaactatattatctacacaaaaggtacacttctctatatttgcatagagggtgtttttcctaaggattgaaagaacttgcctgagatgtcctaagtgatcatctaggctcctactgtacactaaaatatcatcaaaataaacaactacaaatatacctatgaaatcccttaagacatgatgcataagcctcataaaggtgcttggtgcattagtgagcccaaaaggcatcactagccattcatacaaaccanacttggtcttgaaagcggttttccactcatcaccctctntcatcctgacttggtgataaccacttttaagatcaattnttgacaagatanttgcaccatgccactcatcaatcanatcatcaag

SEQ ID NO: 128090 - DNA, 459 bp, Glycine max
agcttctccgaagggcatggttatttccagtttcttgaaaatatccaaaaatctcgccaaatgatggtccttttctttcttggaaggtaccacaggatatggtacttccttacaataattaggttatcgtaccccgattcctcgtgaaaatatgacaaactagccctgtcctatcaagttctaagaatcagaccagtttccactgttgaatgatcctataaaacacatgcatctacgtgatcaaggaaaaagcatggtagaatgaagttttgatagcacagtgaacacacaaaacatcattaaatagataaaaagatatttacatcaagtacttacaaggaagatccaacagaggatttagctttccataactgggaagcttcctttacaacaaagagaagagaatgacagactgtagaaatacaagtagttggaatgtctcctccacctctaggacct

SEQ ID NO: 128091 - DNA, 485 bp, Glycine max
  unsure (1)..(485): unsure at all n locations
ctgtgaagacatcgcgtgtaaaggagcggntcatgttaatgcatactgcatntttttaaatattgtgaaagtttctatttacgcagccaagcttacactgttatacctattttcacaactgcataattaaatttagtcaaatntactttagaattttgcataaagtactccagttttgtttagagtttaaattgctcacataaacttcattttttatattttcaaaatttactttaaatgttttaataaattgtgaaaaacttaaatagttcttaaaatgtgggtttgagcctcttaacctcaaaagttaacttatagggtgaggcttgtccttcacttatatactcattctatcttggccttatctctagccgatatgagacttatgtnttctcccaatacgtttaaaatgaagaataattgttaaaaatagacatttataacttaatgcaaactttaagaatatactctaaataatgtactta

SEQ ID NO: 128092 - DNA, 444 bp, Glycine max
  unsure (1)..(444): unsure at all n locations
agcttgacatgagggaagacaacattgatttgttgtcacgattaaagatagagttcgtccaaatctagattggttaggaccctacatgaacgtttagattggagccaatttacaattagaagtcaaacgaaaagtgataaagtttttctcaagcaacactaacttatttgtatggcccattgttgacatgtcatgaatcgattataagtttataagcaatagctagacccatttgcacaaagacattcaaagatggacccataacattaaggagcctctaaaggctttttaagaaactaagggattttcttccagcatccaacaccatttcttctacactcaacatatggaatgaannaatcaatttgtccttcattcattgatgcttaaaatgtgaaatacagattgggatttcgtctgtctgcattattcattcacgctcac

SEQ ID NO: 128093 - DNA, 474 bp, Glycine max
  unsure (1)..(474): unsure at all n locations
taataagtagtagcatattactatttacacattatcatcttatgaaaacaactaanaataatcgatgcttcacattgtaactaatccatcatcaacactntcatttgttataatcactattactattcttgttattatcgttatcgcaccatttattataaataataaataatgatattaactttctattagacaagtaatcgttctatgattatcccttanaattatatgaatgtgttgttttctggtttctaccaatgatttgaatgtttatttggaatagtgtaaaaaggatagagaagacttttcaggtaaaccgatctatttctttcactttntgttnttattttttatatttgnttgattaagagacctcgctctttaactaacttcagacaacaaaaacacataatgacatcgactttgacagacactatatataannaaaatngacgtgacattntcgataattat

SEQ ID NO: 128094 - DNA, 382 bp, Glycine max
  unsure (1)..(382): unsure at all n locations
agcttcggaagaaagtgatgaggtacaagccctaaatgcagatctttaaagagcccgagnagntgaagagaagttcaagtccatagccatcaaaagtctgaaaagagtatgatgaactatgggacgtcaatatggccaccgttgaagccttggaacgagaaaccaagaaggcccgaaaggaataacacgtgccagcaaaggtttgaggggctctatagggcagcaatagtaagctcacgctccgaagaggtgaaaggaatcatcacgggtcaaaggcatgatcttgaaggacgagctaaaggcttaccttatgtcgaagagaaatttgtcccaacagtttagcgagactgaagggaatattgtgggccgtcatctatgagtg

SEQ ID NO: 128095 - DNA, 468 bp, Glycine max
  unsure (1)..(468): unsure at all n locations
tncatcattaggggtctctctgccctaactggtctagtcgtttatgatcttatgcgtttggcctttcttgttcacttcaaggtagatggcgaatgtgctgcaccactangaggagtangaggaggaggagagttgggtggtgtatccatttgcctgtaaacaaaaaaacattaatttaggatgtttatcaacaaaactcaataacttatgtaattcaatggactgaaattaaatatataataaaaaaattacattagacgatgttaattaattctccttcatcatgatcattacgattagcatgaatgtcgtcagcttcttcttctctgatgatgttaggcaacatttgtgtggacaaaggactagcataagtatcatcaatgtatgaatcatcgtcttcaacattaacacctattggtttcctatgtagaaccactgaccacctttcatcacaagggtcttcaacac

SEQ ID NO: 128096 - DNA, 462 bp, Glycine max
  unsure (1)..(462): unsure at all n locations
ncttnnttattttagcaaatgaagatgaatttgttgtctatcatggactcctctaaggacaatagcatcatttcttgcactgaatggttgggagttggaagctatcttctcaatcagattcctagcctcaacaggagtcatatcaccaagagctccaccactggaagcatcaatcatactcctctccatgttgctaagtccctgtcgcaacctacccttcggcgggagggcgacgcgtgactcgcgggatgcgtgttccacgaaaggaatacgcgcggagtcnccaccaacgtttatttgaggaaaacgtcggaaaaaccggaaaagacgcgatctacgatactttaagtgaaaggttcgggagttgtatttacgcacgggtgagggtataacacctcacatgtccgccccnagggacggcagcctttaatcgaatgtgcaaacatgactttgatttttatg

SEQ ID NO: 128097 - DNA, 451 bp, Glycine max
  unsure (1)..(451): unsure at all n locations
aaatcatatatatatatatatatatatatatatatatattatgaaatataataaatttattaattntttataataaagctaaaataacatctccatctctgtatagtactcatctacactctttaaagagatggagatgaaatataaagagatggaggtgtccttaattcttttatattgacaaggcctaccaagaagtaagtggcaagcctccataggcaccacatcacacaaaataacatctttatatttcccaatgcaaaaccccacttcaactggcctgttcacggtcatctcaccatcttcactaagccattgaagtttgtaaggctgtgggtgtgttctccaaattcagattttgaaatctatcttgcactatccatattagtgcaacttccgccatcaatgatcagagaacatacatttctcttggatgaggcaccatgtgtgg

SEQ ID NO: 128098 - DNA, 221 bp, Glycine max
  unsure (1)..(221): unsure at all n locations
gcgaataacagagagccagaagcagggcggaaaccagcgacggaaaagaacaccacgaatgcatggaacgtgagaacaaggaccgccggatgagccctggcaaagacccacaaaaaagatactggacanccagcgacggcgcctatcaagaccacatggggacgaagcggaaacagaggaaaccggacagccgcttatccccaggggaacagagacggcgc

SEQ ID NO: 128099 - DNA, 370 bp, Glycine max
  unsure (1)..(370): unsure at all n locations
ataacagatgggagaggaggttttaatggatgagaaaactctctcctcactacattgatatggcagcatcatttcatggcagacattggtgaggtctaaatccaaccttctagcagggaccttctcctttgggggcctgattctggtggaccctactccacaaagatagcatacaaatttcttaaggatgttgacactcacggtactgaagatagtgcctccaacattatctggaatctctaaattccacctaaagcaagcgctttctcttggagaatatttaacaacagaatacctaccacggcttacttatggaggagacatgtggagctgncttcttatatatgccgctgggggatgatgaagaaga

SEQ ID NO: 128100 - DNA, 213 bp, Glycine max
ctattgccttaaaccaatcttgaccaatcccgacccaaccctggcatagtcggtcagtgagaacctgtgatgtacctaagccggcgagcttcctgagtgccaaccgatataaggtaaactagatcacaaatcatggaggcttcgggtggatggccaactgttaattttgcgtgatatgcggacgatggcctatggtaatctatttccatcggt

SEQ ID NO: 128101 - DNA, 446 bp, Glycine max
  unsure (1)..(446): unsure at all n locations
agcttattagcctataggctttaagtttatnatcatttattgtacttcgctattcaatagtcaatatcttgaatgaagaacttaagcctttagaatttgttaaaagattctcctcctaacaaacttaagtaatctaacttacaacgaatcacaaatctatcatccatcgtatgtaaaatgtacacacataactatcacaaaacacatcttatgttatggttgtcctacacttactaaacacacataatatgcatcaaaatcattacatttcaaaattctctataagatacatgataattatctacttttgaaaataattacctttttatttgctctttatttgcagtcactcatactggtctgctattgctttctcttgtggatggtaaactcgaactctagacatacactgatattgngcaagttgcttttggtactgctagaca

SEQ ID NO: 128102 - DNA, 388 bp, Glycine max
cacacgtcatggcctatgttggtagttatttataacttgtccacctggctgtgcatgaagcaaaaatgcatgatgttatctatgatgatatctagcccaagacaactacgaaaggacattgatatttatctcagtccctcgatcgaagacttgacaaagttgtgggacaaggagggtactgcgttagatggactctaaataagacattttagttgcgtgcaatgctatttcgtaccattaatgactatccagcatactacaatttgagtggatatagcgataacggccatcatgcatgctctatatatgaacaagacacaatccgtgtacatatgaaacattgaagacaaatattatacactcggcatagacattttctaaaagctta

SEQ ID NO: 128103 - DNA, 448 bp, Glycine max
agcttaagaaaaatcttatattgggtgatgctctgtgttcataagggtcctcttgttggcttgaagatggagttatgaagatcagaggaaaagggaagtctgtggtaatgaagggaaccaagaagggaaatttgtacatccttcaagggtctactgtgacaagctttgtctctagtatttcataatctggaagccatgcatctaatggctcatctagtaattctttgtggcatctgcatttgagccacatgagtgaaaaaggtatggatattctaagcaagcaaggcttacttggaaatcacaagggggaacctcttcagttttgtgagcactgcgtctatgggaaacaacaatagattaacgttcaaaaggttgtacacacaacatgttggactacgtccattctaattgctagaggccttcaagaggttcatcattgagaggggca

SEQ ID NO: 128104 - DNA, 481 bp, Glycine max
  unsure (1)..(481): unsure at all n locations
atgttctgacatgacatanaacaggttatgataatgcttttattcttttcctatacatcctgttggctatgcattggccaaaatagaaagtctatttatgagttcattttgaaatgattgaggcataaaatactttaacctttcaatattttaattnttaataatgtgtgctcttttaaatttctgatctttagctgcttccctactttgtttctgttaacaataagtgatttcaactgcaattttaggtgtgatgtctaccgtttgttagtatggtttatgctgcgtactgtactatgattgtatttctatcatggtgaacaaatatattgagttcttttgtaatgtagatagctgccttcatttagaatttttattttaccacatattntatgctgaanactattatattgcagaaccaataaatattcaaggagaatggtgttcatgctgatgtgaaatatattgatccaacttatat

SEQ ID NO: 128105 - DNA, 471 bp, Glycine max
  unsure (1)..(471): unsure at all n locations
agcttcttatccaaggcacattcttggtggtgtatctctttcttccatggcttattccctagtggatggtgtctcccctctcctcttctcctttgccttccgctgcatctccatggtgaaaatcaccattgaatgaccttattgaagctcaaagattcagccttcatagaagctccacaagcaagcttccatcatatcatcatcaaggttcatccacgataatcatacgccatatttcatcatcaatgcattcacctaattaaacaatcttcatgtcattatcaagaaatcaaccaacacaacctcaagacattcaccaatcatcataattatctcatcatcaatatgatcatcatttcaatataacaatatntcatcaaattaccatacacaaaaaattattatatcaatgagaattacatgataataatgatgaaccaactccaatcatttcattaaagaccatacaat

SEQ ID NO: 128106 - DNA, 441 bp, Glycine max
  unsure (1)..(441): unsure at all n locations
acatggtggtctaggaattaaggatacttttattttattgaagcattgttggctaaatggagatgggctctatttcatagtaagggagcactatgggagaaattttttaggtcaaaatatggtggatggataggcttgttggaggagttccctaattccttaatgtctatttggtggaaggatttaaggtccatttatgaggatgaggaggagtccaagtggtttgataatatgatacaatggaaggatagtgagggaaacattacaagattttggtttgatgcgtggttgcaaggtcaaagtctcgttaccatttatggtaggatcttctccaactcaacacaaaaagatgattgcattggaaatataggtagttgggaggacgtggtgtgcatttggtgatganaatcctaataaggatcaaattacggatcttcatta

SEQ ID NO: 128107 - DNA, 454 bp, Glycine max
agcttgaagaggatgctgtaatggatgtgggtatatagagaaggggggagcgcgaaaccgacggagtactagacggagagaagtggaactttgaggagagtctcatcatacttacattcctcacagttagcgcttgcgttacacatgtttatatttatacactaagaagcctccttgagaagcttacttgagaaaacttcctcgagaagcttctttgagaaaacttccttgagaagctagagcttatctacacacacccatgtaataactgagctcaccttcttgaggagcgtccttgagaagattcctacagaagctagagcttagctacacacacctgtctaatagctaagcacacccccatgacaaaatacatgaaaatacaaaaaaagtgcctactacacagactactcgtaatgcctcgaaatacaaggctaaaaccctatactactag

SEQ ID NO: 128108 - DNA, 210 bp, Glycine max
aggggtgctattgcccataacacaaacttgaccaatccctacccaacccggacataggcgggcagagataacctgtgatgtacctaaacatgcgatgcttctggcaaccaacagatgtaaggaactgagaccactaaacacagaggcttgtggtggctggtcagctatgacactcgattgatatgtgagatatggtctctggttatcgat

SEQ ID NO: 128109 - DNA, 331 bp, Glycine max
atatccttctattaactaacacaacctcgatgaaaataattatggatgaaaataacataactcatactcaaacattgtacatgaatactcataatactgatatatatatatctatatatatccgcgaaggtgtcacaactctctcacccttttacagatttcggcctaaatatttaccttactcaaacaaggatgggcgagctctttcatctaactatttaattgccatgtggcatattctcctgtagcacctccctagatcaccttgaccaacagaatctgtcctcctcttaagagttaagctcagttatcctcgagcctcaaacgcaat

SEQ ID NO: 128110 - DNA, 474 bp, Glycine max
cttacgagggatcgagttgagttctttatgctacaccatagaacacaagaacatgattaattagagaaatatcctcatatgcatcaacttgtttgttagaaagacccaacactttttacctattgctgtcaacttttacttacttgcatttactatttttaccatagaatgagtttatttctgtttttaaccatcaattatcaatgtttgctcaacaatgccatacttctgaatataatctgtttaataagcaagatccctgagttcaatactcggatcattcccgtttaattttaaatacttgacgactcggtgcgcttgccggaattgcattttccttgaatatatttgttaaacattggagaaagacgaaccatatggggaagtgaacatatccataggttattttttacgaagtatactcctactagtctacgagtcgagttttctgagctctcacaagtctacgtagac

SEQ ID NO: 128111 - DNA, 427 bp, Glycine max
  unsure (1)..(427): unsure at all n locations
cctgactaccataaaccttgacccagggtgagattgncttctcttaccctcggaagcaaaaaaagaatagaatggaaatttccaatcaaagacaaagagaaggaaaatttccaatgatagcaaaaaaagaatagaagggaaatttccaatcaaagaaaataaagaaggaaaattccccaatcgaagagtgggagaaagcaaaaagaaaagaaaggaaattcccaatcaaagagtgggagaaagcataaagaacagagagaaaattccccaccaaagaatgggagaaagaaaatggaaagaaaagaatgaaagaaagctcctgatcaaggatcgaaagaaaacagataaagtgtgcagagaggtctttggaccggacatatctgatcaatacagaattgtcacccatgaaacaaaaagaatggaaccc

SEQ ID NO: 128112 - DNA, 463 bp, Glycine max
agcttgacttaagtactcaagacgctagatcattatatctgtataataaaggattctactttagctactgtttttttggcccatgatgttagctaatgataacccctacacaaaccatgtcttattatatgggcttgactgactttatataaatatgttagaagttgttgatattttatttttattaactaagcacgtgacaacatttaaccattatttttattaactaatcactgtgagatcgtttcatttttctgctctttacaatgttattatgagcaagataggcaactgtacatttttatattatgttctttataattaatacaacgtatcctatataacttttaattggctaacctaatatgtttgaagctaaacaaagaattgcgtatggggcattgtattgatggatggaaacaggggttgataaactttccacccacctacaagtacaaattaa

SEQ ID NO: 128113 - DNA, 329 bp, Glycine max
  unsure (1)..(329): unsure at all n locations
aacatattanattatttcggctgctaagacactttttattttagctatcacgtatattctctaaagtaatgaacaactcgaattctcaggcaaactctctggatgaataattcttattaaatgatgcataaaatgtacacctaactcacggcgaagtaaccatttacctacgaccacatttacaaataagttattagggcgaaactactattatttataaatttggacacaaagttttttcactaagcatttacaatggggcttcattttaaaaaactattattggcgatccaattcataattttattaaagtatacgcttgatgtatg

SEQ ID NO: 128114 - DNA, 407 bp, Glycine max
  unsure (1)..(407): unsure at all n locations
agctngccacccagctcgaccaggcgagcaatgttgttctctccaaaagcaacaaccttctggatgaatcttctggagggcccaagtggcgctggttgctattcgcacacccctttctactaaatgcaccccccttctattctttaggaattctttctccgtaacgttacgaaactttacgaatgccgcaacgatacttattttccttccgcaaggtgacgaatccttaccgagtatgtacttactctctcttagcttacagagaaggcacggacactcacgggatgcgcaaaaacacctcttttcgatttccaccacattacgaaaattcacggatcgcgcgagcctgcattcttttgatttctgagacgtctcaggacattatttattgcatgtcatcaactaat

SEQ ID NO: 128115 - DNA, 488 bp, Glycine max
  unsure (1)..(488): unsure at all n locations
aagataccacctaagccaaagatattgacctggcgtatcatcttagaccgcttaccaacgaagctgaacctaagagggagacatgtggagataactgacccaatgtgcttgctatgcaacaattccgaggaggatgcagcacaccttttcttcaactgcagcaaggtcctccccctgtggtgggagtgactntcatgggttaagtcagtgggtgctttccccatagaacccaaagatcattttatgcagcatactataaggaacgctacacgatcaaaagatatgagatggagctgttggtcgatagccctcacaaggaccatatggcaacacagaaacaagctggtatttgataatcaaactcttaacgcaaccaagctgatggatgaagcacttcttcttctatggtcctggcttatagcaatggaaaaagattttgatcacatttcaatcagtggtcctctaatctgcagatgcctctatgtaat

SEQ ID NO: 128116 - DNA, 377 bp, Glycine max
atgacatatattgtgcagcctgtctttaacgtcgacatgtgtgcctttcatcttctatatgacacgctcaatttatgcgattgcaagaggagttcgtatataactgggttccacttcctattcgtgtacatatatgctcaaagttgaagctgatgcgattgtaatagcatccagatactcatactgccaccctaatctatgtcatattcagaagcgtagtccttctggtattcggtatcatgcacaatatgatgacctgcatctctcccaccccgattgaatgtctatccatagtgtctatgcctgacaccatgatttctatggattagatgctgaacatggcttaccgacacttccacaaaagtatcttattgcta

SEQ ID NO: 128117 - DNA, 342 bp, Glycine max
  unsure (1)..(342): unsure at all n locations
ggatttgatattgtcttcaacaatatttctgatattgctttggctgttcatggttctggttatgttcggtcttatagacgttaccgataccgttncggttggattccacagtgttctcgatattgctctgatagttcatggctctggctgtttactataatggtggacttgctttggtgaaataagtgaaattctacttcagcactagtttacttaccgcctgtgttggatgcatcattactccgcgtctattgtgcatggttttgtgtccacttctcggtgttttccacaatgtacgcctctttttgatagtgcaatccatgaaacttacctatactctgg

SEQ ID NO: 128118 - DNA, 325 bp, Glycine max
actgagcagcagcacctgaaagcgagagctatttctcttcccgtccggaacgaagctcaccgccttgagaatagaaactagagcctacccacacacccctacgaatagcgaagcgcacgcgccagacaaaacacaagaatatacaaaaaagaccctaccagaaagactgcgcaaaaaggcctataatacaaggcggaaaccctatactactagaatgggcaaactacaaggcccaaaagaagaaaacaacctatcctaatattacaaagaagagtggagccaaccatagacgatgggcgcaaaaagccaccctcagggtgatgag

SEQ ID NO: 128119 - DNA, 456 bp, Glycine max
  unsure (1)..(456): unsure at all n locations
acactataaaactcaagctntatagcgcgggtctgggagacgaaggtcaagtgttcctatatgcgaagatgatgttccgagtactttggatttggtacgaccatgccctcctgatttccggctgggaaattggcgagtggaagaacgccccggcatttacgcaacgagcataatgtaaacctttacggttctaaaagctctatagttgggcctaggctatagagtttttcctttattaaggctttgtgtcttttgtttttgaatttataatacgaggatctttcttcatctgttcctggtctctacccattctcattcatttgcatgtttacttctttttctgaaacggcagatccgatgacgagtcccccgaaggtactaatacctgggacccgcctatcgacttcgagcaagaaatgaatcatacggaagatgaaggaactgatgatgtgggac

SEQ ID NO: 128120 - DNA, 497 bp, Glycine max
  unsure (1)..(497): unsure at all n locations
gctggtttgggcatagcacccacctgacgttctctatgtcttctgacccncgcgacatatctctaggtaccactctgtggtcaacaaacaaaagtatgaagactgactcttccactctttctcacatcaagcttgttggattatggggtacccgtcatatgtggtactaggtggcgatcgggcgatggtgcaaatcaactctcccacatccacaaatcaaacatgaacccaccatccccagttgcccaccttcaactgagctcacgtactcctatgtagcccttatcctcgttcctcttagcaccgggtccccatcaaccctttccaagcttcacaatatccaagcaattcaattccaactatcatgaactaccctaaaccaagaatacagggcagaggcagaaaaactctgccctaaacacattcacatattgcagcttttcttactgaaatactctagtaaactgctggatcaacttgaaaatttactggaggtt

SEQ ID NO: 128121 - DNA, 454 bp, Glycine max
  unsure (1)..(454): unsure at all n locations
gcttgcataccccaaggaaccatcatgagtttatcttgtgaaggagagccatgagggtaggctcatgggccactntgggatagacaagacccttgtcttactcgaagaaaagttctattggccccatatgaagaaagatgtccataatcattgcactaggtgtgtggcttgtttacaagccaagtctagggtgatgcctcatgggctatacacacccttacctattccatctgcaccttgggtagacattagtatggactttgtccttgggctccctaaaaccaaaggaggtgtagactctatctttgtggtggtggataggtttactaagatggcacactttataccatgccacaaggtggatgatgcttcccacatctcataactcctctttagggaagttgtgagactccatggtttgcctaggaccattgtgtcagatagagatgctaag

SEQ ID NO: 128122 - DNA, 480 bp, Glycine max
tcccaggaggagattcgagcttaatgttgatgggatttcgttgaagatattgtgaaagaacatgaccaccctagcttagacatggagcgttctttccttctctaacatgatccctacctcgcatacttctgatgtcaacctggacagagccaaactcatttatggcatcattatgaagatggacatgaatatagggtacctcatctcctaccagatctccctcacagctcagcatgacacatccagacttggattcccgaccttgattacaactctatgtaaggctaggggagtttagtctgactcgaggtccctggaaaacttgagtcctgccattaatttggcatacattaagaagaactaatggaatcttgatgatccaacagtcactttcagaggacccaggaaggccagaggtaagagatctgaggcccattacacaacaccatcagaggcaccatcaccttcttcttctacact

SEQ ID NO: 128123 - DNA, 407 bp, Glycine max
  unsure (1)..(407): unsure at all n locations
agcttaacagtatgctctggcatatatgtcattcatcgttggtgaaatatactaaagacataacaaaattagtagggtgttcatgcgcacatgtcactngttgtgggtgacatgtactggagtcacaatggtgatgcgctcttgcatgtatgccactcttcgtggatggcacacactggaggcttgttaagatgctcatgcgcacatgccacttgtcgtgggtggcacacactatagccgtgatagtaatatgcacttgcatgcatgccactcactgtgggtggcacacattgaaggtttagtaagatgctcgtgtgcacatgtcatttgtcgcgggtgacatgtattgcagtcaccatcgtgatacgttcttgcatatgtgtcactcactgtgggtggcacacact

SEQ ID NO: 128124 - DNA, 491 bp, Glycine max
  unsure (1)..(491): unsure at all n locations
agaaaganacaagatgttgcaccacttacagttatatgttttgaataaaagtaagaagaaaagttaatactactatattataaaatggtaatgaacctttaagtaattgctaattctccttattcctccaaaaatgatagtagaaatttaagtactttgcttgtcaattcggtttgcttctttgccaacttgttacttattatctggagtacttgtcattttctagttctcattatcttcaatgtttatatgaaaatttagcaaatataactgagggagtgaagcttggacgaatgattgggttcactcagaattatagcatataaacagaatcaccgctgtcaaataaaatctcanattctcacactataatgtttttaaaatcatccataggaagggtatcacctagaataacattctaaatcatccatatgaagggtatcacctacacaacaatttgtcctacaaagttgtctatcagccctcttcga

SEQ ID NO: 128125 - DNA, 315 bp, Glycine max
  unsure (1)..(315): unsure at all n locations
agctcggttaaagaatctaagcatctctgaggtgatgcttangtgctttaattgggccatggtctttgtcacttgctttgggccacgttcatacgtcgtatgtagtgtatgttcatgggggtggagtgcactgaccttgtcggatggcccattcgtgggggacaagcgtggttagagaatctaagcatttctgaggggatgcttatgcactttacgtggttagagaatctaagcatttctgatacaggaaatagaataattgcggtagagtgtactttgtattgagggggcctgccacctgttatgcaactcctt

SEQ ID NO: 128126 - DNA, 455 bp, Glycine max
  unsure (1)..(455): unsure at all n locations
cccagctcgcccaggcgagctaggagtgcttctcttcttattcaaccaccttctggaggaatattctggaaggcccaagtgggcttggttgctatctgcacccccatttttacttaatacacccccttgctcttttttggtgatttttttccgtaacgttacgaaattttacgaaattcgtaacgattcttgttttctttccgtaatgttacgaaaccttacagattacgtaatcatcccttttttcccttccagaacgttacggaactttacggattgcgcactaacactttcttttaatttccggcatgtcacggaacttcatggattgtgctacaatgccttcttttgacttccggcatgtcacggaacttcacgaattgcctaacgatggnggccaagtacctcaaagtggtatgacagttgcccctctttacttgtcttttattggagat

SEQ ID NO: 128127 - DNA, 334 bp, Glycine max
  unsure (1)..(334): unsure at all n locations
agcttaaagtccatcatcgactctggattggtgtggttgatggcacctatccgnatgcagacctgccgaanaacttacagcacgaactcttacttcacctgcacatatgtgacccttggagcccttgaatacctcgcccaccactgcgaccagcctttgatatgccttacaatttgcaacttacgatgaggaccacccggtcaccaaatggacgactctataggctgtactctcggtggaagaactccatatgtggcatgcagaagccttccctctatgagcagaactgccctcgaggtcggggatataaccagaagcttgcaccgtgtcaaac

SEQ ID NO: 128128 - DNA, 447 bp, Glycine max
  unsure (1)..(447): unsure at all n locations
agcttgcccagagaaggaatccatggaggaatatgcttaccacctcanaagactggaaagcggtttctaatgactcctctgcgtcctccacataaggcatagaggatgggcagctcaccaagatgtcttcctcgcctgatacgatgatcagatgcccttccactatgaatttcaacttttggtggagtgtagagggaacaactcccactgagtggatccacggacgccccaacagacagctgtaggggggttaatatccattatttggaaggtaacttgataggtgtgagggcctatctgtactaggagatcgatccctcccctaacctctcggcgggtggccgcgaaggcacaaattaccattgaactcggctttaggtgggaagcattgaatggtaatttctccaaagtgctcttaggcatcactttaaactggactattatcga

SEQ ID NO: 128129 - DNA, 478 bp, Glycine max
  unsure (1)..(478): unsure at all n locations
caccagcaatttcaacctaganatcattagttgtgtttatgttgcttaaggctnggatagttacaatttgtgtttgcttatgttcaattatcttgaataacaaaattcaagagagcttaagacttattttgattcacaaatccagcaacaactcagcaccacaactcaacttcatcataggcatcatgtaggaaacttagaaaacaaaaaaaaaaagaattcaacacgactacttctaggaattgatttagaacatgttatgaactaaataacatgcatgaattatactcaaaattcaaaagataggataagaatgacaagaatacatgaacaaatgtatctagaattcaataaacaaaataaaaattcaacacaaacttagaacataatgtgacaattactatgactaaacatgactctaagacaacatggatgaagtgattacacttagatttagtggtttttttctaacaatatt

SEQ ID NO: 128130 - DNA, 476 bp, Glycine max
  unsure (1)..(476): unsure at all n locations
atcctctgagtcacctcgcggcatgcaagcttctctcagatgtactttaatgtnttggtttatgagagaaataagatttcactcccttaactattatttgggtctctctacatttgtgatgactagagattagagagaacatttttttgtcatgaagggaatcttgtttgacgtttagtgggtattaactgtagaagcaaagcttcatggtgaatcaaaggtgattcaaaggtgttttgatgataacaatgatgataataaaagatgatgacaaaggtgatgacaaaaagctcaaagatcaatcaaagaacaactcaagtgaatcaaagatcaatcaaagaacaactcaagtgaatcaagaacaattcaagagttcaagataagaatcaagaagaattcaagactcaagaagaaagtctagagtcaagaatcaaggttcaagatctcaagaatcaagatcaagattcangactcaa

SEQ ID NO: 128131 - DNA, 441 bp, Glycine max
  unsure (1)..(441): unsure at all n locations
gacctataaaactcagcttaaggcaatccttctcagttgatgtccacttctacatctattccaaatgctgagtttcctacttcaaatgctactgtcaataatacttctaatattgtttcaaattctgatgttacctcttccagtagtgctaatctttggcatgctaggttaggtcatcctaatgagcatgtaatgaaaattattctcgaatagtgtaatatttctcaactgaataaaaacatcacagagttttgttcctcttattgtatgggtaaagctcataggttaccctctcacggctcaacttctgtttattcacctttagaattcattttcactgacctatggggaccctcccatgttacctcttatngtggctatacatattatngttccttcattgatgctttctctaggtataaatggatatttcctataaag

SEQ ID NO: 128132 - DNA, 430 bp, Glycine max
  unsure (1)..(430): unsure at all n locations
agcttgtagaatggctagacatgatttttgtttttgcttggcncggntcaagcgaaaaagggaggccccacattatttccatgacacanatgcctaaatgatgatttggaaactttatgcaaaactggtcatgcatgcgcctatgcagacgctcaagtgtcaaattattatggtcaggtgatgctagggactacgattcacttcctctattttatatcaacccaatgtgtgcaaaagatgttcttttatcaaattgtgcattcctccaagtccatctcgggcgtccggtgaaattttcacagcattcacccttcaggagcagacacgtctttttcgtcaataatcggctatgatcaatgaactntttttcagagacaagatggaaatcatctcttattcaaagcatgtgggtcttagctagacacttatt

SEQ ID NO: 128133 - DNA, 261 bp, Glycine max
gagactatacaagcatcctcaccatgtctactatgtgagccatgaagtctatcatgtgctgacactatctcgaaagcccatgaatcgcttcgggggtggacgaagagatcgtcattgccttggccttggcttacaaaccgggaaggtcttgacttccgttcaaaggatgagcacacctgaccagccacatggatgcctcttggtgtaatagtcgacacacttccactaacctctttattctcatatactgcaacatacttt

SEQ ID NO: 128134 - DNA, 202 bp, Glycine max
  unsure (1)..(202): unsure at all n locations
gcttcaccaccaagagagtgccttggataagaagcttanagaggaagcttgaatgaaggaaaaaaatgagaaagagagagggggcacaaaattgaaggagaaaaagaggcagagaggttgaactttgaagtgtctctcacaagtttcacattcatcnaacttaccacaagtgttacacaagcttctatttatagcctacgta

SEQ ID NO: 128135 - DNA, 63 bp, Glycine max
  unsure (1)..(63): unsure at all n locations
actgaccctctcggtcagacagaacgcgagacacaaanttgttgaatatgacaacattgttaa

SEQ ID NO: 128136 - DNA, 150 bp, Glycine max
cacacccacgaaagttaacaagctatagcagagagctgtgctactatgcaggccgacccaacccatacaagaaaaaaaactaaacacccgaccttggacagccctcaacatgggccggacctatcctttcacgcccgaggcttccactca

SEQ ID NO: 128137 - DNA, 291 bp, Glycine max
  unsure (1)..(291): unsure at all n locations
cacacttgngtacttagtgatcattataaccaacgagggatcaatgcatggttatctaccatataactaacaaagaaatacgattccctcgcatatatacaaggcggaaaaaacataacaatgatttgttgtatatttgtacaacaagagcgatttcatagtatactngcgtgaaaaaaatatatgcaacaaaaacataactctatcatatacttttaaaatgacactgtagttttgttggcttgtttgaaaggaatacttttgactcatgttcgatttcggatataatat

SEQ ID NO: 128138 - DNA, 332 bp, Glycine max
  unsure (1)..(332): unsure at all n locations
tcttggatggccttgaatttctcagggtccacttggaccccatttctaccaacttccaaacctaagaaaactatattatctacacaaaaggtacacttctctatatttgcatagagggtgtttttcctaaagactgaaagaacttgtctgagatgtcctaagtgatcatctangctcctactatacactaaaatatcatcaaaataaacaactacaaatctacctatgaaatcccttaagacatgatgcataagcctcataaaggtgcttggtgcattagtgagcccaaaaggcattactagccattcatacaaaccaaacttggtcttgaa

SEQ ID NO: 128139 - DNA, 319 bp, Glycine max
tatggggaaatttttttggttgcaaattatatcttacaaaaattaaacatattttattatatatagcttggaatcaaaatataattggggggttttctttatttgggcaatttttaaccccaagatattaccccaattgttaccgagtaagtttttgaattatccaaactttaaccataagttcaaatttgatacattttaattttacgaaaataaaaaacaaacaaaattttttggcaggaaaaaaattgtacatttttaatttatgagaataaaaaatatatttaaactttaatcttaagaatataaatttgaaata

SEQ ID NO: 128140 - DNA, 302 bp, Glycine max
agtatattggatttggtaccaacatgcccttctgatttccaactgggaatatggcgagtggaggaacgcccccgcatttacgccacgagcataatgtaaacctttacggtttaaagcttatattggcctagcttaaagttttttcttttgtaaagctttgtgtcttttggctttgaaattataatacaaggatctttcttcatctggtcctacgtctctacccattctcattcatttgcatgttcacttctttttctgaaacggcagatccgatgacgactcccccgaaagtactaatacct

SEQ ID NO: 128141 - DNA, 333 bp, Glycine max
tgaaaatatagtggggctattatactcccgtgctggctactgtttttctatccacccctgaataatacttggacgatgtcgatctggaaatgttcgatcggagtcatccggtcatgcttctttatgagacctcgatctgtcatcttttcctggccgacgtcggctggcatttttttcgatcaatatcggtgaatcatgctttttgccaaggtgggctaacgtcttcgtggctgatgaaatgagagcatgccagtgtcggccgaaacacaatcttgcacgataaacccttaccgacctacattgtaaattttgtaggcaataccgaacaacaaa

SEQ ID NO: 128142 - DNA, 275 bp, Glycine max
tctgaaccaaatcaaacgacaatatctttttacacggatgtctgattgaatcccggaatatattcagacgctcgaaattgaattctgaaccttagagctaattcaaacgacaataactttttactccgatgtctgattgagtcccgccatatatctagacactcgaaatggaatgttgaagctctgaggatattcaaacgaaaataactttttactcggatgtctgatagagtcccggaatatatccagacgctcgaaattgaatgttgaagctc

SEQ ID NO: 128143 - DNA, 200 bp, Glycine max
  unsure (1)..(200): unsure at all n locations
cttcattcggtcttcatcggtcttcgatcttcaacgggtaagtacctcgaacctagcttttcgattcattctatatacccgnggnnggccacattgngtttcgggtatttntattctcgtttcatttactttttatacccccttttgacgtgcttaagccattttatttaagtcatttctcgcttacctaaaaataaaat

SEQ ID NO: 128144 - DNA, 314 bp, Glycine max
cgattacccgagaaaaaaaccctttgaggatcctttaactacatgtacggttttggacccttgtgttgtacccgtattagattcttcggaaagagtctacccccttttctcttattcttgtagatcgtgaggcagcgcattaatccttgatcatggaaatgaggcctacaggagtttgggagaccctctaaagcaatgcgaggtgccgaatccgtggcacgattccattcacggctacttcattggtacatgcagaggaacccgcactcacgcttcagcgaactgtggagtggatattacctacacctacttca

SEQ ID NO: 128145 - DNA, 170 bp, Glycine max
attgaatatagaaaatcgaatgatgccacccaaaaagaacactacccacttcccttcatggatcaaatggttgaaaagctggcaaaacaatcattctatggctttttagaaggatactctggctacaaacaaattgttgtgggtcccaatgaccaagaaaagacaacatt

SEQ ID NO: 128146 - DNA, 152 bp, Glycine max
atctgacattatcacaaatacaccctgtctatttcagaagggaatgcctctaccgcacctttgtcaatgattatcttcatgcctcttaagcgcagatgtccaaatctttgatgccatattctgacttcatcttctttggaggataaacatgt

SEQ ID NO: 128147 - DNA, 281 bp, Glycine max
gatgaagggaagtgtgaatttccaaatctgcacttatgccagaatttgcttgccaaataggtgcagcaggattttggctttgtgcaaaaaaatgcttgtgtgtgattggcttgggaaagagtaatgcaaaatgagttctggatgtttgatagtagatcccaacggtcaaaatgtaggcttatgtactagagacttccatttaaatgttggagtcgatccaacggttaacgaattggaacgaaggaattgttactggggtctttaagtgagaaaagctgtga

SEQ ID NO: 128148 - DNA, 352 bp, Glycine max
ttaataaaaaatacttataacactacaaaccggtggtcactttcgaccaatgcaccggatcgggccagttgtattaaatggggagaaccgagtatcagactctcgaggaacttgtgttatttggtaagctatttcagcaaataggtgtctggtgtgtaaagataagtgtgaatatgaacaggtgtataaactatctatgcaaaaagaaagaaaatcatgcgagagaaatgatgtgtaaaaacaagtagaaaacacgttggcctgtctaataagtgcctgatgctaaaacgatattctctatctaacaatgctcatgtgttcctatggtgtctcttgagatgctaaatctcga

SEQ ID NO: 128149 - DNA, 108 bp, Glycine max
ttgtattctcgtgtgatgattaactggggatatcatgctatgctgggtagtgggatgccacttatgagttgcaagaaaaatcttcttccatgacattatagtgtctcc

SEQ ID NO: 128150 - DNA, 400 bp, Glycine max
  unsure (1)..(400): unsure at all n locations
ctgtaggagctctctttcatttggtcttgatatgcaaaactcanatctgagatgctcgttaatggatctaaactccgtttcacttgaaccaacataatgttggttgagattcatggtttgaatttatttctagaatgaaaaatttaaaaagaattataaatataaaattaaaacatcgattaattaagatattaaattttattgaaaaaattaaacaagtttaggtatacatgaataatatctagaatattaatgattgtttctattactgtacctttataataaatagtcaaagacatctccaaaaaaatgtttttgatgaanaacaatactactcattaaattcaataataaaatattaattacctttaacaaaaatggttgataactatgaaatttt

SEQ ID NO: 128151 - DNA, 344 bp, Glycine max
aacctcacaggccatgatcgctcctcaatatgccagttcacatcatttacattatcaatgcccaaatttctgatcaattctaatggtatgggctgctcaccacataaaataaagtgaatttaattagttatacttttgacaaagatgctctcatgtgtaaaactaaaacactaatctaattaaatacctcatgatacgatggattaggcttgatagagagggtgaactgattccctgacacttctttgttcattcttggagtttcagaatccaagaggaaaaaaaagtgaaattaaattgacaaacatgtacacaataaataaaaaaatactgataaacacaaa

SEQ ID NO: 128152 - DNA, 362 bp, Glycine max
agtttatcgtacgttgcgagcctttgcattaaattattgctggatttggatattgggttaccgtacctttcattaacaaaaaatggtaagattgttacgcaatttaatgaataacgagaaagccaacttccaactgtagtgttcgaaatatatcatctatagtgcaatacaagggatgtccaacgaaacatggcaactctttaacactagatccacacacttctaactagcaacacttgtcagtttcaagcaatacttctttctttataagttcgtcggtcgtacccttttctccaaccatttgcaactgggaccaaaaagcaaaatacataatgctttgtgtgtgcttctctttgcaaatg

SEQ ID NO: 128153 - DNA, 247 bp, Glycine max
cctttctagcttcaatctttcctcttcttgcacacagtatgaaaaaagatcattaagaagatcattttctccttcttacagttatatgagatcttaatctaactaaactgtgaaggtagaaaaattagtactaaatgaataagcaagtcttctgatagctcaagctttaatgcccttaattttgaagcaatatttgacattcccataatgtattcactgacatttcctttgccttgatacttcaagg

SEQ ID NO: 128154 - DNA, 333 bp, Glycine max
attatgcttgtttggtggaattctcccttcataaagaagataataacctatttatatcttctatagggacagaacaaattttagtcgtagcttacaccatgaccttggttattaataaagtctttacctaaatactactaacaatattttgatcattatatctaaataagttttatttaaaaaaaattaagatgggtgtttgattaattttttcaaagtattgttaaaatctgatgaaggcaagactatgattacactctttaaacatgtcttttccaaaacgtctcactttttgtgggattggagatgttttatggagagttaaacttcata

SEQ ID NO: 128155 - DNA, 320 bp, Glycine max
atcattgtttgtccccagtgatcaattcatcctctgatcatcgattaccacagaatcaatctcttgaaaaagattttgtaactgtaatctcttggccaaaccttttgctgcttcaattaggaattcccttccttattaatatacccttcctaagactctagagattgtcttgatcatccatcttgaatatctttaatttctctatcctggataaagctttgagaatcatgtaatcctctggctcatcaaaacatttagctcgattctttgtcttcagaatggacatgaatggagaagtgctatagtgttatgccgacaat

SEQ ID NO: 128156 - DNA, 147 bp, Glycine max
  unsure (1)..(147): unsure at all n locations
gtgtgaggatcaaaaaanaatgagagagaaaattcttcccgaaaagagagaaaaagaaaaagagagtcccacacttgaagaattcaaaaagtgaagacaaaaagagggaaacaccccagaggaaaaagatgagtgaaacacttaaag

SEQ ID NO: 128157 - DNA, 185 bp, Glycine max
  unsure (1)..(185): unsure at all n locations
cttgtatgagtactgggaaagattcaagaaattatgcacaagctgccctcaccaccagatttctgagcaactccttctgcaatatttctatgagggacttagcaacatggagaggagtatgattgatgctaccggtggtggagctcttggtgatatgactcctattgaggctangaatttgattg

SEQ ID NO: 128158 - DNA, 344 bp, Glycine max
aacgttaaaagatttttgaaccttgtaatcgattacacaaatattgttatcgattacctgtgactctgaacgtcggaaattcaaattttaaattaagagtcacaactgtgcaagaaaaataactgtgtaatcgattaccaatgagtagtttcgaaaaatattcccaacagtcacatcttttcatttgaattttgaatagccatcaaaggcctatatatatgtgtgacttgggaatgaaattcattgagagttttgctttgccaaaatgttttatcctttcaaaaaattatgagagttttgcttgtgcaaaatgtcttatcctctcaaaagatgatgagagtttt

SEQ ID NO: 128159 - DNA, 142 bp, Glycine max
tcagagcacaagagcttcaagtaggtgctccttaaaccctcattaatttttgctttaccttctcttccattggtggttcttcattttttttccttgtatctcctcacatgtcttgtgctaaatgttgttaacatgattcttt

SEQ ID NO: 128160 - DNA, 413 bp, Glycine max
  unsure (1)..(413): unsure at all n locations
gtcttctccatntctctctctctctcaattgcatccttcgctcttcaattcaatataaagggccgtgcaacattttttaatataataaataaatcagaaatttaatcgttgagcaacggacacttgctttttgaatttcaaaatccgctcccctccccctcctcaacagcaaatagtnatttttctttttgtttccggcaaaatatatccattcctattttgggtaactataaatgtcatataataatgttatattaaatattatacgtattaaattactattttaaaattttaagaataaaaataaaaagaaaagtattaactagaatatattgaaattgttaagcaatatatataatatataaaaattcagatntcattatagcagcagaagaatggtacatttatatagt

SEQ ID NO: 128161 - DNA, 375 bp, Glycine max
  unsure (1)..(375): unsure at all n locations
tagccttagggtatttgaccaaatatgggttcttgaccaaattggattaagggtattttaaaaataaagggttgaggttacttaacaaattcaatttagggtatttgactaatgagggtgatgggtaagtgagtaattaggttaagtataattgaccaattacggtttatgtgtgtttgactaattanggtatatgggtatttgaaaaataaggtttagtttacttgaccaattacggnttanggttatttgacaatttacagttatttgattaatcacggtttatgggtatttgaaaatatatgattcatgggttacttgacaaaatggggtttatgcgtgtttaacttattanggatatgaatactcgactaa

SEQ ID NO: 128162 - DNA, 404 bp, Glycine max
  unsure (1)..(404): unsure at all n locations
tatctacgccaataatctgggatgcacctacaacttttgcgtcctcttgttctctgtaagtgtaaattttgagtcataactcatattggaagccacaagaccaagcaaaaatatgtcacccttggtagaaaaaaatatttaatcagctgcatttaacaagattctcatgaccacactatgctttcccacgagcaaatggaacaccattggccactagcatttcatgacttacttacaggctatgaacagtgtcaaaatgatgcaaagaagggataagcactttatacttaacatgcaatgtctcaatacaattttcatattacgaaaggacataacttactagttggaacacctcatccaaagagacanactntatccaaaggagctctgggatcgatcttggc

SEQ ID NO: 128163 - DNA, 380 bp, Glycine max
  unsure (1)..(380): unsure at all n locations
agaaaatattcatcccatggtagattaaataacctattccataaattaagtatgtctccagatagtaaggcagaaaatttccaataatttaccttagtgagaagaataaaaaattaaaaattttccagacccacaccccacaaccttttaaagtggatgaagttttattcataccatcatttaaaaaataaaagaggttaattttcctacactaatattgtatagatttttacgctattgaccaattaaaaatcatcataaatataaatttttaagtaattattaccaaagtctaccattgtcaattatatgacaatccataattagatgatcatataaaaaactttacactattagtgtatntgaattaaactgagaat

SEQ ID NO: 128164 - DNA, 395 bp, Glycine max
cctacatataagaaacagtcctactctcccaattttacaaaatcatattcatacatcattggggcatttcaccgagcacttggtgagtgcatgtttggacataaattgcaagaggatggggacaatgtggcatgccccattgcttcagaatacagcataggcctaaggccttctcattcaaatcctcaactccagaaaacaagcataaaaacaaaccaaaactgtcccacaaatataagcacattctcacaatttggagcaccaaaagatgaagaaaatataccaatgggaagctaaaaacatcaaggattgaatacttacttgttggagtgaataataacaccaaaaatgaaagcaaaaggcaaccaaaagtggcttgaaggagcaagaaccgc

SEQ ID NO: 128165 - DNA, 295 bp, Glycine max
  unsure (1)..(295): unsure at all n locations
aaactctggccaaacacccacccnatatcacagcttttctcacttaaagacccccagaacaaattccttccttccaaattcgtaaaccgctggatcgacttcaaatttttactggaagtctctagttcataaacctacattttgaccgttgggatctactagcaaacatccagaactcattctgcactgctctttccacaaccagcaaatgcctaatatttttctgcacttgtgcaaaatcctgctgcacaatttcacagcaaaaatctgcaccaaatgcagatttcgaaaacca

SEQ ID NO: 128166 - DNA, 342 bp, Glycine max
  unsure (1)..(342): unsure at all n locations
ccctgaacttaaataattatctccagataccttgtttggattctatgagagcatatggttcaaggaaaatntaccccaaatttgggggagtggaactaattgggatgcaaagaaagagataaagcatctacacacacaacacacaggttgtcttttaaaaaaaataaagtgtgttgatgtaacaaggtcataagcaaatgaaagtgaaaagctagtgagcaagcccattgtattaaaaagaccattgggataagtctaggattggtgctctcttanaatttaagcctttgagtcctagaaaaaccaatgtattatngcagccaagcctcactacaagcctga

SEQ ID NO: 128167 - DNA, 162 bp, Glycine max
  unsure (1)..(162): unsure at all n locations
tcattaaggggacactgcngtggtgtgttatgtttgacttggggaagtgggagagttgatttcgccatctgccgatcgccacctagtaccacatatgacgggtgccccataatccaataagctntgatgtgaagaaagcattggaagagtcaagtctttcct

SEQ ID NO: 128168 - DNA, 289 bp, Glycine max
ttcacttgtgctcaagtgacaaagacagtggccaatccaaagaaaatgtgtgttgattcttctaagacactcaccatttgaacctgaatatatggaaagcttaaatcaatcacttctcacaagcatgcagctttttcaagataggagcacaagtcttagagtcatagctgaacaagctagtaagcctgaaagaaatcaaggaaggatcatcaacccaaacctcgcaggcattgtgtcacttcaacgcatgtgttaaggcttattccctcataaacaacccacacaagtt

SEQ ID NO: 128169 - DNA, 83 bp, Glycine max
gttcttttacacacacccaacaattgtgtaactccctatgtccacaattgttcttataacatctgctttacactctatccttg

SEQ ID NO: 128170 - DNA, 309 bp, Glycine max
  unsure (1)..(309): unsure at all n locations
tataccttatcacgaaacattaacagataaaatgtgcttataaccatacatctaacatgtcactgtgcaagataaaatggaaatacaataccaagctnttacagcaaggcttcactgatatgtaaacctttaaaacaagctccttggttgtttgtgttgctatggaaacactacgctgcacaatactagacactatctctttgatagctctgtccattgcaatgggtaccgctctgttaaaaaaataaaaataggaaatagtaactcagacatatatattctaaaaacaagcggaacatttaagtgagc

SEQ ID NO: 128171 - DNA, 226 bp, Glycine max
acctactgacactgggtgaaacttcctggagaaaacaggtgacttctgtgttgctgcttgctaccaattatctctggagtcattattgatgctttatctgaaatatgacaatgcaaatttagggagatgaaaacattgtgaaatgtacgcaattatctcaaatactgtggttgatacatattgaataggtcattaatctaacttagtatagttagctcatttttgc

SEQ ID NO: 128172 - DNA, 347 bp, Glycine max
  unsure (1)..(347): unsure at all n locations
tactggtgcactcctaccggaatgacttggctcaatccaatttgattataaaatgagataccttaaatgaacttttgcacctgatgtatttggcataaacagtcgcctatcagcatcatgatatgagctatagcatgttttgcaatgacaacatcagcagcattaactggaagttgctgaaaattntgctgcaaccaacttaaataaatcattntaccctttacatacttaccaggtggagtgtcccttaataatgcttgacaagcaacacgtacatcaccggtgatgatactagttatcaacaatccatcaatcctcangcccaactgtagggtcacatcttgtaa

SEQ ID NO: 128173 - DNA, 420 bp, Glycine max
  unsure (1)..(420): unsure at all n locations
tatggattcaagtattccttaaaacctcttgataatctttgtaatgngntttggggctcatttggtattttataaaggtttttaaaaattccaacaaatatatctctattaacattcaaaccattcatctttctatgccaatccacctaatgatcatgcaatgattatgcatttatcgatatttgttagttttataagtactatcattgagcaagtgttgcatttccatcctatgacctttttgagaagattaataggttggtcgggcattctaaatgtgcttcatagtagtaacactatgctcattatgatctttcaatgtaagcagtatgtttcttggcttcaccatgttctttgtgatatcatngactaaagacttctcttcaacactcggtcgatcaacatatgaatgacccatta

SEQ ID NO: 128174 - DNA, 372 bp, Glycine max
tactgacctttgtttcacgttgacgggcggagataccctagtgggtatccgaataacattctttattgttgctgtaaaacgaaagcctgatacatgcaaaactacgtcgtttctgcgctcatcgtcaatcgcggccgacaagcccgttgacacccagagatttacgtcattttccgcgctcacaagatctgtcatactgacatttgaatcatgctgaccgacggaaatacccaagtggatatcccgataaacattcttttttctggccgtaagacaaaatgcctgatagcacgcacagactaacatcgtcttctgggcccttcgtgaattcgtggccgacaaggcccgttgacacgccagaaatttacgtca

SEQ ID NO: 128175 - DNA, 349 bp, Glycine max
ttttttaacggatcgatatattattagcctgaatcggacatcccggtgaaaagtaatgaccatgtaaatttcacgagagctttcgttgttaaatttcgagtgtcactatatgtgatgcgcctaaattggacattcgagttaaatgttatgacccattgaatttctcagagcttccgttgttcaatctgagcgtctcgatatgtgactttgtcgaattggacactcgtgtgaaaagctatgaccattttaatttctcaagaggcttcgttggtcaatttcgagcctctcgacatattatgcgcccgaatcggacatatgtgtgaaaagttatgaccatttgaatttctcg

SEQ ID NO: 128176 - DNA, 320 bp, Glycine max
tatgtcgcgggggtcatgaaaccttggggacctcagggggggtgctattgcccaaaaccaaacttgaccaatcccgacccaacccgggcatagtcggtcagtgagaacctgtgatgtacctaaacaggcgagctcctggcaatcaacagattataggaacaaagaccacaacagcaggaggcttgtggtggctggccaactgggaattctgtgtgatatgtggagtatggcctcttggaatcgattaccaacggtgggttatctattacaaggcttaaaaaataaagacaaggggctaagatggtctctgaaattctgat

SEQ ID NO: 128177 - DNA, 271 bp, Glycine max
cttgaaaggtttccaattttttggaaaaacactttaaaattacttctttgaaataatcgattgcattgtataaataaccaccttgtatcctcacttaaaacaacttctaaatgagctagaattaggagctaatattagtaagataaagaagaggaaaaaaaagtgttgaaatatagtgtgactcataacttctaaccgctcattatgacaaacttatttgtgaacagtgagttgtgaatttctcttgagttcaagaagacactcattcatt

SEQ ID NO: 128178 - DNA, 352 bp, Glycine max
  unsure (1)..(352): unsure at all n locations
aatcttcacactactagntgacaaatggaaaccaaaacctttcacaaaaatataacttggattgatatcctaataccaataatgtctttaattctaatatcaacatcaagacttcaatgaaaatttctttaccatgagttcttctacttttggaatgcaccaagttccattagatctcatgtgtgcagccttccaaacttccatagcatctggccattcactagatattgaatattttttctattaaaattaaatataggtaaaaaccaaataaatgatataaaaataatataatctaatgcatcgtgcctttantaaattcaccaacctttcatatatcatataaaaaaat

SEQ ID NO: 128179 - DNA, 362 bp, Glycine max
  unsure (1)..(362): unsure at all n locations
cgagaatgtgagagaaagagagacgaagacgatgaggtgtncaaaaaccaaaatatgaggcccgatatcgctagccttacattctcttattacgtgcgtgtgtacaatgcaaggccagcccaggcttgggctaccttatcctatcctaattcctaacactctntttgtttatctatctctcccaaatcgcaatctctattctctccccctcttaccttttctctctgtgtccccccaattcacttgcttcttaattcctcaaccatctctctcttttctattcgattcccttccttttacccttcaaaaaagctcttagcttcaattccttcacttcctcactatccaatctttctttattt

SEQ ID NO: 128180 - DNA, 346 bp, Glycine max
cacgtgctcatgccacaattggttgccatggctataccagatatcttgcccaacaaaatccggttagcgataacttcgctatgctttttcttccatgctatatgtagcaaagtccatgatctaatcaagtttgatgagttgaaaaatgaggccgcaattatactgtgccaattggagatgtaattttcccccactttctttgacatcatgattcacttgattgtgcatctggtcagagaaatcaaatgttctggtcctgtttatctacggtggatgtaccccgttaagcgatacatgaagatcttaaaagggtatacaaagaatctatatcatccacatgcatcta

SEQ ID NO: 128181 - DNA, 346 bp, Glycine max
cttctatttttcagattgggaatgcctcttacaacacctttgtcaatgaatttcttcatgcctcttaagtgcagatgtccaaaatcttggatgccatattctgacttcatcttctttggaggatagacatgtggaggagtaactggtttcttgaggtgtccataagtaacagtttgcctttgatctgctgcccttcattaaaacttcactcttctcatttgtcaccaagcattctgactttgtgaagttacattgaatccttcatcacacagctgactgatgctgatcaagttggagtcagtcccttcaccagcagtactttgttcagactatgaagtccatcatg

SEQ ID NO: 128182 - DNA, 365 bp, Glycine max
tgttcgcacattctataagatggtcgttaaaaattatcgtcgtagatgcgttttttataaattaagaaaaataagtatttccagaaaataatatttattatggaataattatattaaaatatttttattctttttttaattataataaatttattattaagtttttaaatacaacaatttttattagaccgtaaaaatggaataaatatttgaatatctaattgaaaaatcagaacatcaatcaatttgaatttttttcaaagactaaagctgtaatctttttgcaacagaggagtatatttttggactcattcaaataaatattaactatgtcgaccgtattaatgatgtcattttcaaaaata

SEQ ID NO: 128183 - DNA, 371 bp, Glycine max
cactgtttctatcttgctgtcttttcgaagagcttttttttcccttaaaaatggagaggtgggactcatacttaactataagaataaagatttcactataaaggctccactcttacgttacattatgaaagcttctcatgaaagaaagagaatttgtggatgacttcaagtgcttctaaatggtctcgaagctctagagcacaccttcaccaaagctcagataaatttagagattctagacatgggttgaactattaagtattctaagagttcaagaagttcacctttagaatcaggatcatctacttaagagagattttgttgcccttgagactggagaagttagctcttaacaagaagaaaagaacaac

SEQ ID NO: 128184 - DNA, 249 bp, Glycine max
tgacagcgaccacattcaacaaggctattcatggctttttggtcatgaagctgcatgatgccttgctttgaacccttggcaatcatgacatgtattgaaaacaaggagcttaatgcttactagagaggtaaaacatttcattggtttgcattgtcaggtgagacacaaatgttgaccttctttttttttttgcaaaacttgagaacacatgtgacaccacaccatggggatatggcttaaaatctctga

SEQ ID NO: 128185 - DNA, 335 bp, Glycine max
cggttcatacctgtcacgcctcattctctttataccaaactttatttcggcgtgcttcattggcaaatatgtggtgtgatgacacttttggtgctaaaacttattatgcaaatttggtttttcaaagagcactgtttgaagatctaggacttccaaacatctagctcaacagattgccacagcacaacacataattgaaagtcaaatttttcccactcatatttcttgttgtttaggacatcactaactcctttttctaagtggtcatgatatccttggccaagaaacgacaagtccactgaggcagaccaagacaagtagttctcccagttgag

SEQ ID NO: 128186 - DNA, 307 bp, Glycine max
tgctttgaccttttagaggaattttttctacctactgtgcttggagctaattcttactgggtggatattaaaattgatctttgcctgactgaatcgatgattgttgtttttgaccgtttaaggttaaaatgagtcttaagtgtaaaacatatggtagcctcaatttccttagattgagtttctaattaaactatgaacaaaacaattaaggatattttgacgattaatctatcacaaattaaatgggatatggttgatagactgttttcttaaattgacttcaaaattatggtggaatatcctttcg

SEQ ID NO: 128187 - DNA, 273 bp, Glycine max
  unsure (1)..(273): unsure at all n locations
aatctactttgaaggagctattggtatttgtggtggattctttgantttggtttaagattcataggatattgtaccttaattggtgagtttctcaggaccaaggttcagctcgattaatggaactgaaaagtcttcacgaggaaagaataagaatattacagcagttgtgtgatctacaggtatttttttcccttaatactatgtacaccagtattntaactagtatngttttcctacaatgcatgtatgtgtagtttctttttgcttttata

SEQ ID NO: 128188 - DNA, 315 bp, Glycine max
tggtcttgattcaatcttgaacatcttgaactcattctttgattcttgagatcatcatctttggtatcatgaagtgttcttgacctttgagctttttgtcatcacctttgttatcatcaaaacttctttgaatcaatcttgattcatcatgaagcttgcttctacaatctccccctttttgatgatgacaacttcggaaatcatgaaacacacacacacacactttttcctagtcgatcactcacataaatttccattctccccctttgtttttgaatttatgcttctcttaaaactaagttgattactcatgtg

SEQ ID NO: 128189 - DNA, 319 bp, Glycine max
  unsure (1)..(319): unsure at all n locations
ttaatgtgtagataaattgatgcgataaattaatgagataaggcaagagagaaatggcaactcgatttatactggttcggccacttnccgtgcctacgtccagtcctcaagcaactcacttgagattttcactaactntgtaaaaatcctttttacaacttctgaacacccgaggaatctattttccttgtgttcaggaaactcataattcaagagacaaccagtctcttgatacaactgactttctgagatgaacagaaagatttctctcatttagaattgatgatacaaattgaagtttctggatgaactttcaata

SEQ ID NO: 128190 - DNA, 361 bp, Glycine max
  unsure (1)..(361): unsure at all n locations
attaaaaatatttaaatttcatgtgtcagtcacatgcacaattcataaaccaagttagaagagttagggacttacggtgaatcaatgtaataagaacacaaaagttgggaaattttctggtagggtaaaaaaaggaaaaatatatgtaattaatgaaaatcttcggagtgtcaatataatttgctttagataatatctttatatcttttggcagaagataaagtttcactcttatactaaaaattatttatttatgataatttaattgtattaaataaatatttattaatgcagaatctaaaatacaatatatatggaaaaagaaaaaaaaaataatgcaagcgntgtattatatcttttt

SEQ ID NO: 128191 - DNA, 385 bp, Glycine max
acgatatgcacttcttgcattggaaatttgctttatcgtggggcaactggcggcattgtgttccttcaacgttagcaagatgtttttcggtttcaccatcgactttgtcatatcagcaataattttcttttcttccttagtcaatcggccggcgtatggatgtccaactaaggacttcgccaattcatgattgtgaatcccacagatcaacttcaccatccaaccttcccctccatgcactggtttcccacgaagcctgaagggacaacaacatttcctactcccggtgtcttttctaacgaattctttatttctacacttgtatgtaccactcctttcacacccaattaagacaaatgaacttcttcctctgctactggtctct

SEQ ID NO: 128192 - DNA, 402 bp, Glycine max
ctgttgtatacatgagatatctgagttgctgacatgaaaaattgcaaaaatagattttattttcaattgaatatgtgaatggtacatgggaggtatacatagaatgcacactacataaacaagaacaataatctagtctaaaaatcaggggaattgatctccctacccattctaaatatggtaaagacagaaatggcaaccaataattatgtacataaaatcctactgagttgtacgaatagaatatgttgattatgcgttcatattcaacattctccctcaacatggatggtagatatctatcatatccagattggatctgatattctagtatacattccttggtagggcttttcgttaggatgtccggtgtctgttgacatgatggaacatgattgacac

SEQ ID NO: 128193 - DNA, 418 bp, Glycine max
atgctcttgtgggtggaacaagctacaaaaggagatttcttgaaatgaagagccaatggttgatacatggacggagatgaaaaagatcatgaggaagccatatgtgccggctagttactcaagggacttgaaattcaagctccaaaaactaacccaaggcaacaagggggttgaggagtatttcaaggaaatggatgtgctcatgattcaagcaaagattgaagaagatgaggagggaactatggctcgatttcttaatgggttgactaatgatatccgcgatattgttgagctacaggagtttattgaaatggatgatttgcttcacaaagcaattcaagtagagcaacaattaaaaaggaaaagagtggctaagaagagttttaccaactttggttcttctagttggaaagacaaa

SEQ ID NO: 128194 - DNA, 358 bp, Glycine max
gaatcacagagaaaggaagaccaaaaaagcttaggctaaaaatttccttttctctgctatgtcaaaaaatatttttaccagaattatgaaccttcaagtcttggcaacagatttgggattatctcagatcaaaatatcaaggatgtgaaagaactaaaggcatgcaagtactcaacttgggcagagaattcgagatgtagagcatgaaagagactaagacaattaaaggctatgttgaccggctgttaggcatatcaaatagaatgaggcttcttgggaaggactctcctgatgaaagaatagtgccaaaaattctggtcactatacccgagaagtatgaatcaaagatatcagcatt

SEQ ID NO: 128195 - DNA, 406 bp, Glycine max
agctgcggaactagttcaacagagaccaattatgagtgtagagcaattcgttgagaaggtggccaggcacctcaacagcatgagccagaaccagaaaacgatcactcatctgaagccaccatctctggagctggtgattgtaaaaaaagaagattagagacgagatccaatgaggctactcatcatggactagtgccaacatcagctgttgcaccatttccaagagtggatccatcttcacctcagcatgtagtagactcttccattcctatcttagagatacatgagggccagaccataccagttctgcctttggacacttctcctccagctactccagtatggcatctaatagatgagaagaatgatcatatataggacaatcacgaccagtcataggaatttt

SEQ ID NO: 128196 - DNA, 340 bp, Glycine max
  unsure (1)..(340): unsure at all n locations
ctaaaaacaacattaatganggttttcaacaactacccattatatgtcaactcataaaggagaaagaggagggaaatggtgcttaacatccaacaatggttacaagctcaagaaaggagaagggaacaacttgtcatgaagggaaatcaagttccatctctgaaaacctgagaggaaactccttgtgtgtggacaagaaaatcaagatcatgtgaaaaatgagagaaaataagaagttgaccatcaagtgtggcaaaggaaaggaaaaaaaaagaactttccttatcaaatcataaggccaatctctaaaatcatctaaatatctcatccattactaact

SEQ ID NO: 128197 - DNA, 277 bp, Glycine max
  unsure (1)..(277): unsure at all n locations
acttcagtctctggatgttatttaggtacggtttactgaacaaaactgctcatcgaatgtgagtgtagatgtttggattagatgaaaagtaaaaggggaaaagtttatccgtactcctagaaactgagaaaaccaggaccactcctccccacacagataaaatatcccaattctcaacagtaacttggggcatattgaactgatggctcttcctgacttgaaaccaacagaattggcagatgaaaaatcnagacaaaaccctgggtgaactcctgaa

SEQ ID NO: 128198 - DNA, 280 bp, Glycine max
tcaaaatgtgagctttgataacccattctctttttcacagaaatccatacaagtttagtgttcaacggacattcatttaattactttaataacaataaatcatatttatacatgaaaaataatgaacgcatatgaacaatcaacatgttcttcattccacccatatattatcatacatccacatctttctgtcatcttaacacaataattcaaaataaccgtaaccacacagcaattatactatcatataatttttgtggttttattgcatttattaata

SEQ ID NO: 128199 - DNA, 311 bp, Glycine max
actcactgtggtatgggtcccgctggggacaattttatatgcatggagaaataactctcccatgccaaatcaacagacccccatcccagtgccaccttaactgactatgactcctattaacctaacctctatatctcaacacgggcccccataacctctccgagcttgcacaatcttcaccttctgaattgccactatcatgaactagccctcaatcaataatacacggcagatgcacatgacactacccataacacattcgcatattacagctttccttactaaataccccaggaacattgccttaattc

SEQ ID NO: 128200 - DNA, 273 bp, Glycine max
tgaatggtcataacatttcacttcgatgttcgatccggggacatatattatcgagacgctcgaaattgaacaaccgaagctctcgacaaattagaatggtcgtaacttttcacgcgaatgttcgattcggggacataactcatctagacgctcgaaattgaacaacggaagctctcgagaaatttgaatggtcataagttttcacacggatgtccgattcgggaacataatatatcaagacaatcgaaattgacaactgaagctctcgagaaa

SEQ ID NO: 128201 - DNA, 305 bp, Glycine max
gaaaataacaatttaatgcccaacttgctccacaaaagtctccaaaaatgacttaggaacttagagtccctatcactaacaatgcttcttggcaaaccatggagtctcacaatctccttgaaaaacaaatcagccacatgggaagcatcatcaactcttttacatggaataaaatgagccattttataaaacctatcaacaaccaccaaaatggaatctctaccattgcttggttttggcagccccaaaacaaaatccatggataaatcaatccaaggatactccggaattggcaatggagtata

SEQ ID NO: 128202 - DNA, 345 bp, Glycine max
  unsure (1)..(345): unsure at all n locations
aaaaaagaatcaagaaacctctagttttggcacttgttttcacaataattttcaattgaaatttcagaactaagattggtataaaataggcaccaattattgaacaaattttgagccaaaacaacaagcacactttcctttcacttttctttttttttcctggacactgatttttctgcaaacttgtgagaattttcttattttttcctttaatccaaatcgcttggttctttttttataattttgctccagatgtctagaaaattcagtaaaggtttcagctcanaaaacgtagtgaccaattcccagtcatttatacaagttcgtatgttcaaactgccagca

SEQ ID NO: 128203 - DNA, 322 bp, Glycine max
  unsure (1)..(322): unsure at all n locations
gaaaaaaaaatctttataatgctgcttttgtatgtgtgaagacaatgttngtgtgagtgtgaatctgattagcttgtgtgagaattcatcttaaggatacatgacattagatataataagaatgaagatgatgaagcataattaanagggcttatagactcaaatgctgaagtgtgcttatcatttcaaattatcaatttcccctaatgtgtctaaaaggctgaggcaacaaatgaagcatttttgtgcacaaacatgcctgtttgggtagaacaaggaccaaactatgcagtagtgtatgataacaaaaattgaattaatg

SEQ ID NO: 128204 - DNA, 318 bp, Glycine max
  unsure (1)..(318): unsure at all n locations
ttacactacacactgtccgaccctaatataggttgggaactatcattcattgatgttatgattctcgctagccgaattgagctattcaacaccagttaccacgtaagacaaaagatcattcgacgttntggtgaagaatgcgaaatatacccaaatgggagagcaaaagagtcatttttagcttttttttggactctagcttacctaagctagcctctaactcactggggcccacaaatatcttaggggtgaagtaaccagctcgcctaggcgagcaaggttacttcaagttgaagcaacagcttgtctgggcgagct

SEQ ID NO: 128205 - DNA, 175 bp, Glycine max
gttggtgggtggggtgcatctgcacattgtggtggtttcttctggttctgtatcagatgatgccttcttcgattcctcagtatgtgaccgaggccttcactgggcccatgcctgacccaccgggcctcaaactcaagaatgaaggacttcatgtgaagcaccctgtggtttttgt

SEQ ID NO: 128206 - DNA, 361 bp, Glycine max
tgatatatgataaattctcacatggcaaaatggtgtgacatgaatggaggctgcatgtcttcttttctgtttacttatatgggggtgtccttagtgataatatttctatagcatgagtaaatgggcttcacaaaaggatttttattttatcagcaaaagtaatctgtattataataataagattagtacaagtggtactgttatatttacactgttgccatactatgtgtagacctatggagtcctaatacaagctgtattccaagaattaagcatccataggtctggatttatctatacacccctccagaagaagttacctatagagcaatccccccgagtacaaaacccgacccttata

SEQ ID NO: 128207 - DNA, 203 bp, Glycine max
  unsure (1)..(203): unsure at all n locations
tcaaagcaacactttaacttatttgtatggcccatcgttgacatgtcatgaatcgattataagtttataagcaatagctagacccattngcacaaagacattcaaagatggacccataacattaaggagcctctaaaggctttttaagaaactaaggggatttcttccagcatccaacaccatntcttctacactcaacatat

SEQ ID NO: 128208 - DNA, 434 bp, Glycine max
  unsure (1)..(434): unsure at all n locations
aataagtagtagcatattactatttacacattatcatctattagaaaacaactaanaataatcgatgcttcacattgtaactaatccatcatcaacactttcatttgttataatcactattactattcttgttattatcgttatcgcaccatttattataaataataaataatgatattaactgtctattagacaagtaatcgttctatgattatcccttaaaattatatgaatgtgtntgtttctggtttctaccaatgatttgaatgtttatttggaatagtgtaaaaaggatagagaagacttttcaggtaaaccgatctatttctttcactttttggttttattttttatatttgtttgattaagagacctcgctctttaactaacttcagaccacananacacataatgacatcgactttgacagacac

SEQ ID NO: 128209 - DNA, 335 bp, Glycine max
ctcttcaaataggttttgactttttcaaattggtttttaagtttttctaaaagtcataactcttctaatgggtgtcttgaccagacatgaagagtctataaaagccaggctttgttttgcatttaaatcatcttgaacatttcatacaatcctttacaagccttgaatctctttgaacttcttcttcttctttgtaccaaaagctttccaaagttttctggttttctaaaccatgaaaacttgtgctattcatcttttcattctcttctccctctgccaaaaagaaatcgccaaggactaaccgcttgaattctttttgggtctctcttctccct

SEQ ID NO: 128210 - DNA, 289 bp, Glycine max
  unsure (1)..(289): unsure at all n locations
acttttggtggagcgtagagggaacaactctcactgagtggatccacggacgccccaacagacaactgtagggggggttaatgtccattatttggaaggtaacttggcatgtgtgagggcctatctatactgggaggtcgatctctcccctaacctctcggcgggtgccgtcgaaggcacgaaccaccattgaactcggctttaggtgggaggcattgaatggtnatttctccaaagtgctcttaagcatcaccgttaaactggaaccataatccatgagcaccttggc

SEQ ID NO: 128211 - DNA, 351 bp, Glycine max
ttggggggttcaacaaggttggatgaaaaggcttaatggggtgatagacaacgcattataccccggtttaattcttgactatctgaaatcaggaatcccggctttaagtggtgggtttcctagagttgttgcaacatggggtctgactatagttctcacttacttgaactataggggtatgaccattgtgggatgggttgctgtttgtttgggggttttctcactccttccttttgtggttatgggatttttggcgattccagacctaaagccttcaagatggacagtggacaaccccaatgatattaactggaatttgtatctgaatactctattttggaatctcaacta

SEQ ID NO: 128212 - DNA, 326 bp, Glycine max
ccaaattggtgtgttcctctctttggaattacatgcttatgaaagtggaactttacattttcaaatgggagggttcccagaactataagaactattgcttcaaccaatgtattacttgaaatcaatcgttattgataaagtagggctacaatctttgaaaaagcttcggttagagaaaatctacaacctcaagagtaccccgtggcattcaacacttggtgaaacttgaaaatctcactctctggggtgtgccaactgaagttaagcagagcattgatcccaatggaggacaagagcattggatgatcccaacatgtgcctagcgt

SEQ ID NO: 128213 - DNA, 375 bp, Glycine max
  unsure (1)..(375): unsure at all n locations
actgtttattcaatatatatgaaatattaatatattattattatcatgcttaattgatctaacattctctaggcctttttttgtctgtttattattaagtacaaagatatatgcctgttaaagaatttccttaaaaaaagtatatctagtaaaacaataattaataaagtcttacactcttaaataacanataaataagaataaaaaaatctgccaaaaggataaatattaaagcacggaatgagtattgtaaaaggtttaaatgggaggatattattaatttaaaatgtggattaaaaagaattcaatatactatacaagattttttagttatctgaaatataaatattaaataagttgatactctcgatataa

SEQ ID NO: 128214 - DNA, 331 bp, Glycine max
atctgatcttattcaaagtttttgtttcttatttgatcttcctataatttggattaagtgtaaaaattccttatttatttaatattcatttgtttcctgatgtttgttcttggtgttggtaattgttgcttttttgagtatgaagcttcctttaggtgagattcaacacaaagttcctattctatgttgaagattaatggtgcttaaaattaatgtataagagcatctcacatattaaatcttattttcaaatcttaattatctttgtggtggattcgactaattcacatcattcttaaaatgtcttttatttttcactttaataatatat

SEQ ID NO: 128215 - DNA, 298 bp, Glycine max
gccaaatattttgtctcaacgttatgcgagacagaaaccaacatgttagccatcgtcagccagtaccatgaagaattaaatctagccacggcccacgagcacaaagtggcggacgaagttggccgaatgtacgcgaaaaaagaggctataggaagggtgatcgactcgttacatcaagaggcaacaatgtggatggaccgattttctcttactttgaacaggagttaaaaactttcccgattgctagccaaggcccaggccaaagcaatagcgggcacctacttcacccccgaggaga

SEQ ID NO: 128216 - DNA, 266 bp, Glycine max
atcttggatgttccaacccttgatgacagctttcaaggttcggtatccactgattttgaggaaggccaccatccttgctttccagaattcataagtggttccatccagaaatggaggtctgttcactggtcccccttctttctccatgttcatcagaatttatctccctagatctcactcactgatttctagtgcctgctctgataccaattgaaattctgatactggggacagatgttgtacccgatgttacgacatcacgcttc

SEQ ID NO: 128217 - DNA, 186 bp, Glycine max
cccacattagccataaaactgccaaagatattatctatattctcttcaaggagaaaatctatttaccctggtaatggtcatgatattatggcaccagattctgttctttcaaactcactttgggaaaatggtgataatttggaacttgatctgccaaaaccatccatcaattcttgcaaaatcttg

SEQ ID NO: 128218 - DNA, 297 bp, Glycine max
tgagtctttgaagcgaaaagactagacataaagtctttgaaagcttaaaaccgaagactcacagtcctattggagataaggcagaggacattaagtcctatggaaacataaaggtgaggacgctgagtcctatgaaagataaaggcgacgatgttgagtcctatgaaaccataaagacagatgacgttgagttcaaggaaacataaacgcgaaggacgttgtgacaccctctaccctcatctcatactaacaaagaattaaaatcaatttaaattaaggtattttttaaacttttaa

SEQ ID NO: 128219 - DNA, 280 bp, Glycine max
aaggataagcatagacctgataatggaactgctgatgccttggctcgagggaaccagttgcttgtcaagctcttgcttatcaacagaaatgcaaccttacaaaagctcacatctttggtctattggaaagggatgagcaaggatgttagagcttttgtttagaaatacagtgtatgtcagaagtgtaaatatgagaccaaggcttctcctggattgttgcaagcattgcttattcctaatttggtttggcagcgtattaccttcgattcctttggtaaac

SEQ ID NO: 128220 - DNA, 318 bp, Glycine max
caaaaactaatggttctgtcaagttttagttgttaaatgatttgaaacacagaatggaacctgtgtatgaaggacccacacggaaatttgtcatccttcaaggtctactgtgacaaacttgcctctagtatctcataatctggaagccatgcatctaatggctcatctacgtatttctttgtggcatctgcattttagccacatgaatgaaataagtatggatattctaaaacacgcactgcttacttggaaatcacaagggggaacctcttcagtttgggacactgcgttatgggaacaacaatagattaatttcaa

SEQ ID NO: 128221 - DNA, 385 bp, Glycine max
  unsure (1)..(385): unsure at all n locations
tatacatcctggtggctatgcattggccaaaatagaaagtttatttatgagttcattttgaaatgattgaggcataaaatactttaacctttcaatattttaatttttaataatgtgtgctcttttaaatttctgatctttagctgcttccctactttgtttctgttaacaataagtgatttcaactgcaattttaagtgtgatgtctaccgtttgttagtatggtttatgctgcgtactgtactatgattgtatttctatcatggtgaacaaatatattgagttcttttgtaatgtagatagctgccttcatttagaatttttatnttaccacatattttatgctgaaaactattatattgcagaccaaaaaatatttcaagga

SEQ ID NO: 128222 - DNA, 204 bp, Glycine max
ctcttcagtcgcgactggaaatacctctcatctatgggatagatgcagttcatggtattaatagagtctatggcactaccatcattcctcacaatattgaccttcggagctactaggttagtactcactcttctctgcgctctgacactcaattagcacagcttaatattatatcagtggcgaatggctctcttgtactgtaca

SEQ ID NO: 128223 - DNA, 387 bp, Glycine max
agtcctttctataatcgaatatcatgtgctataatcgattacttctcttttaaaaaagtgttcagaaatgatcaagaacactttaattgattacattgaagatctaatcaattacattgttcttgaaagttttccaagttttaagaagaacactttaattgattgaaatgataatataatcgattacttctttaaaataattgattacattgtatatttaatcgattacatgtggttataactattttctctataaatagacacattgtgttctcacttctaacaacttcagtatacataaagttattaagtgcaaaattatacgagctgaaataagtgaaagaaaagaagaaaagtgcttagaaatagtgactcacaacttctaat

SEQ ID NO: 128224 - DNA, 368 bp, Glycine max
tgtaaataataaagaaagtacatgtaattaaagaaaactacatacgcattaaatattattttatttttacttattattataaaatgaatatttattttacttgacgttgctataagaatataattatttttttattatatattaacttttgtaatacaaattaaatgttatcataataaataatttatactttttataaaatatacgaattaattaatttctatgatttaaattatactaaattggcacacaaattaatatttacatttacatgcgcgtgaaaaaggaattacaaatattagtctaattatattcactaattatttatggataataataatatttattctataatgtaatttatttat

SEQ ID NO: 128225 - DNA, 287 bp, Glycine max
ttctaagaaactctattaccctaatacacacaaaaaaatatcaagggaataacttacaacacaaaattcttaacccaaagagattttcactatattagaaccagaacaatggcagagatcacatatatcacaaagagctcaaaagtgatggagcaatgattccccttcccacacttttaaacaaatagtgtgcttaatgcatctaaattaaaaatgagaaatgcatgaaaagggaaaatgtactaaaaatagataatgtacctcaaaaaagccgaaaaataaaagac

SEQ ID NO: 128226 - DNA, 206 bp, Glycine max
cctttcaactaccatatatctccaaccccatcccccaaacatgtgaaaaaatctaccaacctgaattgaatcccacctaagtcctgccactccaaaggttcttccattggacaaatgggcaagtgacttatgactcatggagaaaaagatcactaaaaaaaaaacttaacttttgtatgaaaaaaaccgttgttaaagtttttttt

SEQ ID NO: 128227 - DNA, 393 bp, Glycine max
gcacttccaggcctggtttttggtaaatccattgccaagttgggaatgattaacatctattcaccaacttgaagggtatcacgattaagcagttgcagttagttacaagaagttatttgagtagttagttggttatggcagttagttggttactagaagtcatttgagtagttagttggttatggcagttagttagttactagaagttatttgagtaagttagttggctactcaagttagttattttttgtctttatataaataaaccaactttataatactttgatgaatgaatcttaaaactggttttcatctatctttcatttttttcatatctgatagagcgtgtatttgttggaatgaatatgaatatgtctttattcattaatttgg

SEQ ID NO: 128228 - DNA, 362 bp, Glycine max
ttacctttattttaccgactgggttacttaaatgaatagtctttcttaattacccacattctacatgtggtctgttttaatggcacctgcatttattaaaacatcttgacactggtctgtgtgagatgctacatgtttcatttgttaatatttgcagttgagtcacagttaaatttctctttttttcagttgagcagtaattggttccctccaccagaggcttctctgaaacgatctcatatacagaacctaatttatgatatatttgaaaataattctttgcatgcacctcctactgattgccttgacaaaggtcatccctctgaagatccttccattattgtcaatcccaaagtggaaga

SEQ ID NO: 128229 - DNA, 292 bp, Glycine max
tctcgagaaattcaaatggtcataacttatcacaccgaaggccgactccggcggatagtatatcgagaatcgcggaattgaaaaccgaaagctctcgagaaattcaaatggtcataacttaccaaacgacagtccgattcaggcgcataatatatcgagaagcttgaaattgatcaacggaagcactcgagaaattcaaatggtcataacttatcacacggaagttccgattcagggcgcataatatatccgagacgcctcgaaattgaacaacgaatgctctcgagaaaat

SEQ ID NO: 128230 - DNA, 321 bp, Glycine max
atatgatagtggtgaagtgacttaaagaaaaaaactagttatatagaaacagtaatgaaaacacaaagggtttatactggttcaccccaactcttaggctacgtctagttctctttcaaaccttgaaggttttcactaattaaatctttgattacaatcaagtattctctataccacttttggctacaatgagtactctctaggtcactcatggcactatacttaatctccccctgagaataacactcaagtattctttatcactaagccactcttggctttcacaaacaatgtatgtttgatagaaaaagtattctaatc

SEQ ID NO: 128231 - DNA, 432 bp, Glycine max
  unsure (1)..(432): unsure at all n locations
tcagcttacctctcgttttattatttttagatattggagccaatccagtccttgtgttcggactctcaaccacttattatagccgccgatgatcccattactgcttccccttagctctctgtcctttcttcatgccgcatcccatgccttgcgaactccttggagtaccctcgcgttgtggtcactgaaaccccgtgcgatgaaaggcgtgatgctttcgtctgatggcactcctctcatggggtagccaagctgtcttatggcgaggacgggattataattaatacaaccccttgttcccatcanaggaacatttggacatctttcgcatgaagatagaatcctgattcttccttccttctagcgagggaaccaattaacagacacccctccatgctagccaagaattggtcccaattcgccttttctttt

SEQ ID NO: 128232 - DNA, 316 bp, Glycine max
  unsure (1)..(316): unsure at all n locations
actagaagaccattttgaanaaccacttttaaaaaagggtttgaatttaattttgaatcatgtaattgattaccaggcagtgtaattgattaccagaagataattttgaaaaacaacttttaaaaagggttttgaatttgaattttgaatcatgtaatcgattacaagatgtttgtaatcaattaccagcaacgacacttcagaaaacactttgaaaagtcataatccttcaaaatagaactgtgtaattgattaccaaaaacctgtaattgattactagtgaagaatttcagaataagctttttgaaaagacaca

SEQ ID NO: 128233 - DNA, 328 bp, Glycine max
  unsure (1)..(328): unsure at all n locations
atcaattctttcaagttgactcaaagtcaagcaatgccgtaatttggggatgaagtaagctggggagtgaccattgttgactcatcggtaagtgtaccaaatcgttacaagtagtaaagttctcggaagtncgagtgtcgaatccacatggactttgtttgtacttagattaatgcaaacccaatttaaaagcaagagataagaaatttaaaatttaaaataaaagaataagataatagataagataagatgaaagacttaaaattttaaataaaagaaaaagataaagtccagataagataatgttgggaactgacttgcctaacct

SEQ ID NO: 128234 - DNA, 338 bp, Glycine max
  unsure (1)..(338): unsure at all n locations
tttttttatgaagttcgaatatatttagtaaatatattcaaatattggcacaagctatgatgacgaagtaaatatccttgtgtatgatgtacaaaaaataaaagtctttgttctaagtccatggtagtatgatgcatcctccacactttaccaccaactctcttctttacgtttctttttttcctctcagtcgcaaaccaccatgattctcgtgatgaccttcttctctcccgctactaacaatccccaaccacaatagtgcaaccacaccatccttcttccccttccgtcccgaanaagaggtaacacaacatagtgacatctctcaactcacaaaa

SEQ ID NO: 128235 - DNA, 243 bp, Glycine max
  unsure (1)..(243): unsure at all n locations
gcctggttgctatttgcacccccttgtttactaaatacacccccatgccttttttttgctgattctttttccgtgacgttacggattttacgaatttcgcaacgatacttcgtttctttccgtaatgttacagaaccttacggattatgtaatcattccatttttggcttccggaatgttatggaacttcaagaattgtgcattaatacttncttttgacttccggcatgtcacggaacttta

SEQ ID NO: 128236 - DNA, 134 bp, Glycine max
atggaggaaaagaaagagggagagaaagagagaggggggagcacgaaattgaaggaagaaaaacggagaaaagtttaactttgagttgtgtctcacaagactctcattcatcaaagttacaacaagtgttacac

SEQ ID NO: 128237 - DNA, 349 bp, Glycine max
ctgcagcttgtggggattcacgtagtgtatccacagcacaattcgcaggggatttatgctatgagtgaaacagcttcatttataaaagaaggtcatagggcaggcttcataatgctgataggggaaatggcacctagaaacacaaccaattcatatcattacagtatactcaccgtgtgatattcgcaaaaaagattctatgggaaaatattaaacagctgaaaattcagaatcaaggggggctttggtgtatcctgggtgattttaataatatcagattggggtcagaaagagtgggcaatttgcttagggggttggggagaaagccacataaatgagtttaatgagt

SEQ ID NO: 128238 - DNA, 377 bp, Glycine max
  unsure (1)..(377): unsure at all n locations
tttctccagaaaggtttttaatgatttggagatcttaaacaatgcttttttgacagatctacagaaagagcatgagattctgcagttaacccaatcaaatgatgaacttctgagagaatggaaagcttcaagagatcatccccttgacaacattattggtgatatctcaaaaggggtaacacctagacattctcttaaagaattatgcaataatatggcttttgtgtgtatgatngaacctaaaaatntaagtgaagccataatagatgatcattggatangttctatgcaagaagaactaaatcagtttgagagaaataatgtgtgtgaactagttgagaaaccttgaaactaccccatcatatgaacaaaatggg

SEQ ID NO: 128239 - DNA, 394 bp, Glycine max
  unsure (1)..(394): unsure at all n locations
tgttctgaataatcaaaagatgaactcttcaaaggggtttgaactttcaattggtttaagtttttcaaaagtataactcttctaaatggtcttcttggccagacatgaagagtctataaaagaaaagctttgatttgcttttcaaaatacttttgacattcattcaatcaatcctttacaagccttgaatctctttgaacttcttcttcttctttgtaccaaaagctntctgaagttttctggttttccaaaccttgaaaacttatgctattcatcttttcattctcttctccctctgccaaaaagaattcgccaaggactaaccgcctgaattctttgtgtgtctctctgtctccttttccaaaagaacaaatgactaaccacctgaattctt

SEQ ID NO: 128240 - DNA, 201 bp, Glycine max
ctaggtgatgccttatgggctatacacacccttacctatttcattttgcccttgggtagacattaatatggactttgtccttgggcttcctaaaaccaaaagaagtgtagactctatctttggggtggtggatagggttactaagatggcacactttataccatgccaccaaggggatgatgcttcccacatttcaaaact

SEQ ID NO: 128241 - DNA, 350 bp, Glycine max
  unsure (1)..(350): unsure at all n locations
ccttattttcttaatgccctctgcaaatataagaataaacacaagagatttacacaggtgattttcaacaaaacagaanaataaaactgaaattttgaattggggcttagtacagcaggctaagcttagcgtaccttataaaacctcatccaacactcctttacttgaggaaataactcaagcctaagaggtctggcaatgctaacaagtgtcttttcacaaaagaaaaaatgtggaagttgtctaagaggggaaataactttaatattcgtctttatttcaaaatgtctttccttcttagctaacctcttggaggagacacttgcctccttacactcctccttaaccat

SEQ ID NO: 128242 - DNA, 334 bp, Glycine max
caaaaaactatggccaatgaaaaaggtgagaatgaaggaccagcccatgctgtgactggcattcctttataagccagtttcccacccacccaacaatgtcattactcagccaataaccaaccttctccttacccaccgcgcaattatccacaaaggccatccctaaaacaaccacaaagtctgtctaccgcacttccaatgacgaacatcacctttagcacaatccaaaaacaccaaccaagaaatgaattttgcagcgagaaagctggtagaattcaccccaattccagtgtcctatgctgacttgctcccatatctaactgataattcaatg

SEQ ID NO: 128243 - DNA, 264 bp, Glycine max
  unsure (1)..(264): unsure at all n locations
agtccatatgttggccaccagagccccctgagttaggagacatatcttaaagctttccctcttcttagaggagggcaaagaatggttgtactaccttgctcccacgccattttcagctgggatgaccttaagagggtgttcttggagaaatcttccctgcatctatgaccacgaccatcagaaaggatatnntcatgccattagaaaactcagtggagagagcctatatgaatattgggagaagatataaaaattatgtgctag

SEQ ID NO: 128244 - DNA, 343 bp, Glycine max
  unsure (1)..(343): unsure at all n locations
gggggttgaattaagataatgccaactatttccccaaataaaaatttattttaattttaatgcaaggtacaaagtcccttataaatgaactcttaaataatgattcaaaaaaacaatctgaatataaatgccaaaccataataaataaaagattttaagggaagagaaaaggaaaactcagatttatactggttcggccacaccatngtgcctatgtctagttcctaagcaacccgcttgagagttcactatcttgaaaaccctttacaagtttaacacacaagacaattcttctttgtgttagatttttacacagagactctcgcttcatcctttgaaatta

SEQ ID NO: 128245 - DNA, 246 bp, Glycine max
taaaaatacttccatcttccaaagaaaaaaaataggtgtgttcatgctaacattaattcataatattttttgcctttatgtaaaggtcttactttaacaaaaaatatgagtcttcaatcaaggtcttctaatgaacatgtttctcaattgaaagaatttgtaaattgggtgttggatattggacatgaaactattggtgagattcatgacaaagaaaatgccattgacattccatcttatatgctt

SEQ ID NO: 128246 - DNA, 274 bp, Glycine max
  unsure (1)..(274): unsure at all n locations
atgtattgcgcactctactccattaatcattggtgtgattatgtgttgtatcatggatcctcgaggtgtttgattagcaccctagctctatctattcttcgcatttcttccacttcaccatccacttccaccatttctcccattgctgccacaatcttcgatatgttttctatgttccatgcatgtaggggaacaccccaacattccagccacaccagtttgtgccccggtcgcatacctangntccatttctctagtgaatggaaaagtgaca

SEQ ID NO: 128247 - DNA, 405 bp, Glycine max
agcttgaggagatgctaaatcaattaatgcagatttcaatgtctaattaccgaagcacagaaacctccatcatgaacttggaaatgaaggtgggacaattggccaaacaggtggctgaaagaccctccaatagctttggagccaacatggagaagaaccccaaggaagagtgcaaggtcatgctgaccataagccagaagaaagtacaagaggaggaagaagcataggaagaccagtctggggaacgaaggatagacggagaaggagagagagaagaagagaagagagaagaagaagggagaagaagagacagtcttaactcctaagatcaaaagccagttagcctgagaggctaagagagaagagccaccagcccctctaaaggagcccccatatcctttagta

SEQ ID NO: 128248 - DNA, 315 bp, Glycine max
  unsure (1)..(315): unsure at all n locations
aacactcttaggatccgcctagttggcatttcttgcactttaatttcttgcttactttcgtagcttatttcctttaccctccattgtcaaaccgcctaggtagcttgccttttaccaattagttcttaccttatctttcacacctctnttagtgtttttttggctagtttcaaccatagtttcttttacactttgttttcaaacccccaacaagaaagaaccataacttatgaaccaacacgagtcttcattcttcatctagtgttaatggtgagggttctactcctaaggaaccctcgtataagatattagatg

SEQ ID NO: 128249 - DNA, 429 bp, Glycine max
  unsure (1)..(429): unsure at all n locations
tggagagggagatgcattgggcgttggaacaacaagaagtgttatattngggaaattgtgcgtgtatgatatttttcatttttcagtgatgaaaaattgtgtctgaaacattctcaggtatatactccgagaaatagtattaaaatgatgaaaaatcagattcgaggagtaagtatttaccacagaaagtggttttatgttgcattttttgttccctctttaatactattatgagatttgaacactttaatttcacttgaattattttgtgattcctctctagatacttttaggacttccctcaatttatagaaaatttcgttaaatattcaattgtaacttctctttctttggttgtagctccatcaatgcacctagcaaattcaagcattctcttatgaagaaaagtagcaagagaaagagtgtgag

SEQ ID NO: 128250 - DNA, 333 bp, Glycine max
  unsure (1)..(333): unsure at all n locations
gatcacatgaatgcgcacagtatcttgaatagcaaatcanaaccttgcttntatagtgatgcaatcctatcccacaagggcattgggtagaagactccaaagagattgggctatggatccaagggtaggccctatggttctcatgagccttatggtagatttcgagcccatgggctaagtatgagctcgcttatctttgtaaatattagaataagttttcctctcgttgggccttgattttggcattctagtatatagggatttagcctgtatttcgggcatttgagtatctttggataagaccttttttgatttcatgttttgtctaaaaaa

SEQ ID NO: 128251 - DNA, 434 bp, Glycine max
  unsure (1)..(434): unsure at all n locations
gctacctctctaatggtaggcnagcttttttttatgtctttagggaaagacacacttctttctacccctttataacttttaaagaatgcatatttacttggttgcgatcattatgtaacatgcttctattatattgcttgacatctgacatcccgtattttatgattttgttgctggcacgaacccaaatggctcaatcgcggaccttgaatgcgatatcctgcttctatatggagattcttagcagaactgacgcttcttacgtcctgccgctgagcctggtgcagagggtataaacgcaacttagtatgtattcttattaatgattatctctccactattaaatcataaaaaatataggtgggcatagtttattccgaacaatttaaatttctatcctctcatttgctaattcacgctaatcgctattattg

SEQ ID NO: 128252 - DNA, 431 bp, Glycine max
gcttataaatatgaaattatgagctgaataccaatgaagaactgctgatagtgttaatacaatctaactactggaaaaaatatggaccaatagaaattttagttgtctttactaaatatgttgtgaaattcgaagacgaggtgactgcgacatcgctaaacgactgaatgcaatgtttgtttttttgcttttttgttgatgtaacctttacctgtttacggcgtgtttaaatcccataataaagtttaatatgttatttcaatggtccaaagataatttattttaattgtttgaccttcagaccttacacatacttagaagggtccgattcctatttttttggattttctgcctctttttttaggtgttatttgatcgaaccagagaacgacaataatttttttggtgtttttgacgtcccaacatgagaa

SEQ ID NO: 128253 - DNA, 422 bp, Glycine max
  unsure (1)..(422): unsure at all n locations
tgagctnngggaaatgattcatggatttctcaagaagaagaagatagataatgacatgtttgtagggtctgcattgattgagttgtattcgaagtgtggacaaatgaatgatgctgtgaaagtgtttacagagtatccaaaacaagacgtggttntatggacttcaataattactgggtatgagcagaatggaagtcctgaacttgcacttgcatttttctcccgaatggttgtgttggagcaagtaagtcctgatccagtaacacttgttagtgctgcttctgcttgtgcccagttatctgattttaaccttggaagaagtgtacatggatttgtaaaacgaaggggttttgatactaagttatgtttggcaattctattctaaatttatatggaaaaactggttccatcacgagtgcagc

SEQ ID NO: 128254 - DNA, 427 bp, Glycine max
  unsure (1)..(427): unsure at all n locations
cataaaacatgaaaacattnttgtgtattataagccataaacatcattcttaacaataactttttgaacacgacattccgagtactgcatctgcataacataaaccaggttcttcataataacagtattctaagtaatgattttatttaagtaatgaacttctaaacatgaacaaatgtgcattgacattagattcacattatcatatcaaacatttgataatgaatgtcgtgactaactacttagaaagcttagttgtctaagtgttagatgttggggtttcatggtctatataatttaaaaaatttctaaagaaaccatgagtagataggaccccatcccatgaaccacgcattatgcgagaatcactaagggtttaggggttaccttttagtggtttttcaaatcacgaggttgcttttgatca

SEQ ID NO: 128255 - DNA, 343 bp, Glycine max
  unsure (1)..(343): unsure at all n locations
ttattccctagtggatggcgccttctctcacctcttcttctttgtcttccgctgcatctccatgttggaaaatcaccattaaaggacctcattgaagctcaagatccagcctccatagaaaccccacaagcaagctcccatcaatgtgcatggcatttgatgcgcaatgcatgtaaccatgtaaaggacaaacatggcttaaaatgcttgtagagttttatgcttagttatattgaaatcgntgtgtcataccctaatttcgtccgaggattattacttgatgatatgcaaccattgatcggccgctttgagatacttggcatcctttgnttcacaatatgtg

SEQ ID NO: 128256 - DNA, 199 bp, Glycine max
gaccacagactcttgcggcaggtgcatatgccgatctctgattcatggccacgcttgctactaagctgaccagagcatcgcggggtcccgtctgcccttcattttcaggagatgaaaataaaatgtgtggccacctcatggactcctttggggacaatagcctcatttcttgcgctgaattgttgggagttggaaacca

SEQ ID NO: 128257 - DNA, 216 bp, Glycine max
gtaattcctgtatatctatataatgatgcttcgtgtgcgcatagcgctatcataacttaattctaccctgcgtttgccatgatcacatagatgcatgtgttgttaggatcatccaatagtggaaactaggttgattcttataacttgatatgacgacgctagtttatcgtattattaccagggaatagggttcgataacctacttgctatatattt

SEQ ID NO: 128258 - DNA, 420 bp, Glycine max
  unsure (1)..(420): unsure at all n locations
agcttatgaacatctaacaagaatttaccattttattatttgaagtaggggctagtatgtttcagagttgttgtcacccaaggtatcctctataattaaatcaaatttgcttttataaaaaattactgcagccaacaatatccacgataaaaagaatagaatggcctagaatagtctcatacatttatcaagctacaacactcagactaacgattgcaatttgcccttctttatacaagttaatattacccaaggacaatcgaaaacctcatcccacacatagcagtcgtatagtttgagccaaataggaacttttagatgagacatggaaagggaatatacaagttcaccaagcataaggatagtggtagagctgaaaanttttttttgctattatttattaacaatccctacagaggg

SEQ ID NO: 128259 - DNA, 297 bp, Glycine max
cactctagatgggccccataaatcagaatgcacatactcaaaaggcctagatgaaacatgaataccagtgccagagcttattctatgtgatttaccaagcacacaatgatcacaagaatcaagtttatctagtgtatcaccacctaacagattttgtttctcaagttcatgtaatcctctttcactaacatgacctaatctcaaatgccaaagttttgttttatcaatcaatgtattactagctatcgatgcatgtccaataatagtggaacattcaagaataaacaagccattact

SEQ ID NO: 128260 - DNA, 363 bp, Glycine max
  unsure (1)..(363): unsure at all n locations
gtctgtatggtggtcaacataggagcacaaaccacatactcttgcgacaggtatagatttctgattcaaggccagttgggttaccaagttaaccaatgcatctagttttccttctagcttcttagtttcgaatgatgcagctgagtttgtagctacctcatgcactcctctaatgactatagcatcatttctggtactaaactgataggagttggaagccatcttctcaattaaatttctggcttcagtaagagtcatgtctccaagggctccaccactggcggcatctatcatacttctctccatattacagagtccttcataanaatattggagaagcagctgctctgtaatctgatggtg

SEQ ID NO: 128261 - DNA, 464 bp, Glycine max
  unsure (1)..(464): unsure at all n locations
nggtttgtgagtntaatttagccttagttttactgtgttattatcaactcatttaaaggaaactttcaaagtaaaatgtccgattgatttttttgattattatttttttagagatattttgattattttattattattttcttcaaagatattttgattattttattattatttttttccaaagatatcttgattattttattattattttgtctttttttatttaaccgagattacaacacaaatgatcggtaagattttgttttaacagtgattaaatgagattataacacatatgatcggttaaaattcattttatcaattattaaatgagataacggtttaaataaacggttgacagctcgtaaaagcggaagataataatactgaaagtaaacgagaagaagaatgaaagcgaacataacaagaatgaattgatagcttcgaattctgaaacttaccgg

SEQ ID NO: 128262 - DNA, 417 bp, Glycine max
  unsure (1)..(417): unsure at all n locations
gctgcagcttgctttctttaagacatatttatctttaatttgtcatcagaataaaataacatggtgtttgggatgaatcaaatggataaacacaagttaaaaaaacatcattctttaaaatggtttataatttcgcacataatgtatggtgaatccaagcttacaactattaaaaaacagttccactttatcttatccccatcccttccaccttgaataaaatgagaaaaactgtctatgcttacatttcataaggaaatactcttccgtcagcattgggaatttcaaatctgagatattaaaattgataattatctntatatttaattaggatttaaattttgaacaggagcaaaagatacaagttagaaaaagctacatcataatcaattgaccagatcattaaaaaataacaat

SEQ ID NO: 128263 - DNA, 486 bp, Glycine max
  unsure (1)..(486): unsure at all n locations
cctatgaaactaagctgagataaacaagaatgtgttattaaatttctctccttatcaacaagactgtngngggcgtcagtcagccatagactaagctggacccctttctctttctttgcctctcactttcgcgctccatatataccaataggcaatagctactaatcaaagtaacaatgtaattctatatcgggtcaaattatacgagcttccaaggcacttcgcactgttatttgagttagacccagcacgtgcattcatcaattgaactttcaatttgatattcatctatctatgtatctttcttaataatttcatatgccgatggagttggctagcattgcttcttcaccttggcattacctagagtacttgctaatgaatttagaagagagagcttcctaataaatttcatatatttaactttgggttatcatcttaataaaatatcagttactactaatacctttcaagatatacacatta

SEQ ID NO: 128264 - DNA, 445 bp, Glycine max
  unsure (1)..(445): unsure at all n locations
gatcttaagtcacctgcagcatgcaagcttcacaagtttgtatgtctaccatttctctaggcagggaaatattgcgaacgattgtaaacttgctgggagactgaattatctcactatcattcatccaaatattgtagacgattgtttagccagttcctacaagtaacaagctccatgctaaagtcactagaaaggttcagtttgcattctggattctggaatacatcaaagatgcatgaggtgggatcaatatctttatgacgataaggcacacaagcaatattttaccccctctaattttgaaacgttccgcttttaatctcaatctatctaaatcattttttcaccctctataaagcactttgagaaccaaaagtattggatttcaaattttaaagggactaaaaaccaaacttggaaaatnttagagggaccaaatacatat

SEQ ID NO: 128265 - DNA, 475 bp, Glycine max
  unsure (1)..(475): unsure at all n locations
cttgagaaactattgctgggcctttaaagagataaatgatacttatgaacccaacatttcagatagtggctatactttcatagccttagtaggaatcaaggatcctgtacgccctggggttaaggaagcaattcaaacttgtatagctgctggaataactatccgcatggttactggtgataacataaatacagctaaagctatagctaaagaatgtggtttacttacagagggtggtctagccatagaaggtccagattttcgtgacttgtctcctgagcaaatgaaggatgttataccaagaatccaggttctgatctcatctcanattctgtgactntcagttcttgaggacagggaaaagggtaggttaggtgttttgtatcctctattgagatggtttcttatgtactcgatatggtttcaggtgatggcacgatccttacctctggacaagcacagattattaaccaat

SEQ ID NO: 128266 - DNA, 342 bp, Glycine max
tcacaaataatcctttgataaggcataaaaaaactgggtcatgccagcatgatattaatctcaaatctgaaagaacataaccttgtaataggtcttgcaaacatgttatatcataaacgacttgctttctgcaacatttcataacgaaaaaccactcctcgaacttttaaagtaaaaacatggttatcactcctagaccactagaattggtacacattgatttgatcctccatcgacaacttcttgtatcaatggcaagaaatacacgttgtcatactggatgagtatattagatgaacatggacttgttcttagtccataagtgatacaacccccccaatg

SEQ ID NO: 128267 - DNA, 296 bp, Glycine max
  unsure (1)..(296): unsure at all n locations
ctgttctccctctttccacgnagctcttctccttccttcttcttcaccattggtggccattgtagctccaaaatccctcctcatttctactcccaaatgctatgagaagccattttcggagtcttggagcacacatctacattgtgggacttcgaatttcaagtatgggtggacttattctcacatgaaatttgtgggtgttgggttcttgggagctatgatgggtagttctactacgttaatgccctacgatagatatttgtgaggaatatgttgaaatcatgctcaacctgaca

SEQ ID NO: 128268 - DNA, 455 bp, Glycine max
  unsure (1)..(455): unsure at all n locations
ctttaattcttcttcttgacctccataatcatatgntatttatgcatctctatattgttctccattaccaatctcttcatttccataacaattgttttgtctctgtttgcatcattaatgtttatatttgtcacctatgtttgatctctttccttcacttctattatgtttatttcttcctcgagtggcatagattcactagttctacaaataatttctaattcttactctattaggtgttcgtaataaatgtgaatctcataattattgcgacaagtacatatgcactatccaagtacatcttcatcactcaatgcctctcttatcccattctctaaccatttcttatgcactantaaggatatgtgatcaatcttgtaataacctttgcatccttccaccaagttcaaggatgactatgttttgtaataaactccatttgtttacacaccatt

SEQ ID NO: 128269 - DNA, 436 bp, Glycine max
  unsure (1)..(436): unsure at all n locations
agctntaatagtcactaaacaaaactactcttttgctagaatcaagtatttataaaattaaatatatttaatgttttgaaaatataaaaatgttaaatattctttttacaaaataaataagaggatttaaaaaggaaaaaatttatagaagaatttaaaattattcttcacatacataatatatgacttggtaactggtatatgcactattttcctccaagactaattttcttatgtcaaacaccttgaacttgtaagttcaagttttttgtgtccgcgcgtgggaaaggataaaatgtaaaattaagttatcagcttatattgccaacttaatgacgcaaaatcaagaaaacatatatatttagtatgttaaggagagagaattataaggtagattggatgattaaggacaaagaanaaaaaataaaaaattatg

SEQ ID NO: 128270 - DNA, 289 bp, Glycine max
cactacttgtggtgtgaacaaagcgctaacggaatcttatatgcgaaaaatgatgaccctatggctgcaaactcgtcaatcccgtgggtatggctttttgaaagggggaaaagaaagttttgaatgcaaaaacgtcccccctttcgtcattcttattaattggtgcaggggtggctcgcccaagcgagctaacctgcatttttttttttttgaggggaacattaaccatgtgcccctctttctcatggagtaaccgcttgcctaacttgaactttcttacgttagaatt

SEQ ID NO: 128271 - DNA, 433 bp, Glycine max
  unsure (1)..(433): unsure at all n locations
gcttgtctcagcgtntatgcgagacagagaccaacatgttagctatcttctccaagtaccaagaagagttaggtctagccacggcccacgagcatagaatcgcggatgagtatgcctaagtatacgcggaaaaagaggctagaggaagggtgatcgactctttacaccaagaggcaaccgtgtggatggatcggtttgctcttaccttgaacgggagtcaagaacttccccgattgttagccaaggccaaggcaatggcagacacctactccgcccccgaagagattcatgggcttctcggctattgtcagcatatgatagacttaatggcccacataattagaaatccttaggaaacttgtatggtctctcaaaccttgactagatatgacttcctttttgaaataaaatgagttggtcccatgtttctact

SEQ ID NO: 128272 - DNA, 415 bp, Glycine max
  unsure (1)..(415): unsure at all n locations
tcaaagctcaagttagaaaggcactcatactgaccagtgcgcacagatgggtaagccaagcctgctgcaagagtgcagcaataagttctagcaattgccactttacccgtagcccatttttcacgagactcatctgactcagattcttcaggcctggagtctttccaagtctgacccataactgccagagcagcaattgcgcgttcaaccacctattatacatacatacacatatcataagtagactggtgttgcctcgaaactcaatcaaagcaagatagacacatccccgcagacatgtaaaacaatatactcagcgttatcatggaggcaaacatggatatataaataaaggaaaatgcaatgttatntgcatgcatgtgtgactgtatactttgctaccaaaacactatac

SEQ ID NO: 128273 - DNA, 420 bp, Glycine max
gctttgaatagcacgccgtactggcaaatcagtacggagcagtcaatggttgctgtagtagagtggtttaatgtagtggctgtaacagaacaaattgcaaccatagtggcatcgtgttgattctaaaatccctctgaacaaagacattaggccttttttgggtggttatttttgggatttcaatttccaaaaatgaaatctacagttgtaatgatagtgaagatgataaagacttggatttagaagatgattaccgattcctatctaggaaacttgtatttgactcttgttggtatttacttgtatgcttcgttaagatatctatgattttttattgttaattataaatgtcattaattttgaataactttaacattctttagagattatagtacatagtatacactataaaaaactcta

SEQ ID NO: 128274 - DNA, 369 bp, Glycine max
  unsure (1)..(369): unsure at all n locations
tactggaagtactttcttcaatgaaaaaacaggtgacatgcaacctctcttcatttgntctgcagaaaggacacaaatattcatgtaactcaacttgcttccttctcagttatctctggttggtagcctatctttgagtaacctccatgcaaacacagccactttaggtgggaccttaagcttccataattccttgaactctccatcctgggcctcctctgatatgtcctctctaagcacactataggcactcctaatcgaatactggccactatgatctgccgcccacacccactgatcaccaatatgagactggagtttgtacccctcaacttcttgtataaatgagaccgccatatctatctcact

SEQ ID NO: 128275 - DNA, 344 bp, Glycine max
  unsure (1)..(344): unsure at all n locations
aaaactgtgtacgacattgtcctcgagacacaagcgttggcatggaaagattgaagtgcatatctcatttcagactggagcanagaacttcttaagcctaacataatatctgccacgcagattcttatgatgctggaattgcgatatgaattagaaagagtcgtaacgtgatttcttgaatgttggaaggagaggagtacatagaacaactcgtttttttatacaagcgctacaactatagcagtgaaattggcttagggctcgataacaaataggtggtggctatggaataggtctaaaattggtatcgtgggggcattttactctaggaaagtgtttggtat

SEQ ID NO: 128276 - DNA, 252 bp, Glycine max
  unsure (1)..(252): unsure at all n locations
caataaagcttctnctggaagctacctgatgataaactgaagcatgtgttgcacttgccgtaactttgaagaatgacattcttgtgagacagctcataggtaaagtgctttacctttttcttactccaatctcatgctcccccttctctctatatcgtcctccttcttctacttcatgggagcaacctcttcaagttattattcaatgctcattcttggtggggaaacttcttctttcatggcttatttctt

SEQ ID NO: 128277 - DNA, 435 bp, Glycine max
  unsure (1)..(435): unsure at all n locations
ctaagcttctgattgttatggggcatnnttcttatataaatgtctnggcaagagaacgattgaaggaaaatgcgcataagcttgctctaaatttacattgatgtttgtatttatgggaggaggttatatgccatttttgtcttaagagtaatgtcccactggtaaaactaactttccgaatgtttgccttcgcaggaatggccccgaggaagcttgcctcaaagaggtccaggaaggacaaggctgccgaaggaactagttccgctccggagtacgacagtcaccgctttatgagcgctgtacaccagcagcgcttcgaagccatcaagggatggtcgtttctccgggagcgacgcgtccagctcanggacgacgagtatactgtatttcatgaggaaatatggcgccggcggtgggcaccactggttactccta

SEQ ID NO: 128278 - DNA, 464 bp, Glycine max
  unsure (1)..(464): unsure at all n locations
tgaagctctagttaaaagtatggcattatgtctcttttatcataattactattggngcatgaacacaattaaagtaaaatcaaaagtttaaagtgtattataatggtaataaataatatactagtacctctggtcctatttataagaaaagtttcttataaataggaccaaaagtagtataaatatcatgctgaaatgatttcattttcatcgttaagctattgttatttatgaggttggcatgaacaaagcattcaggtttactatttaaattcaattgacaaattagatatctgttcgtctttgatcatttatacacgagcaaatattaattattctggattcgacctcctcaaattatatgtaatgaatgaaaaaatcaaggaagaactcataccattacccattctctaaacccctcctcaaaacctagattctaaccctaattatgaactcggcatgaa

SEQ ID NO: 128279 - DNA, 420 bp, Glycine max
agcttgcaaaatctattattttaatgatctgtctttataatatgtattgtaagacatctttcgaaggatttactgatccttgttttgtttttaactaatggagcaggttaaagagttccatacaagagatggttttgaggtagcaagtgctgacaagatggctaagtcatgcatggtttattttgaaatgcatctatccctaaggaaaaaaataattacaaaagcttttaatggtagttatagtatctacaaggaaactttttgtaaccaggtctattgcccttttgtttgagtaactggacatgcacgtacaataattgtttgtgaagatgacaagggacctgaaagaggaatgccgagcttcaattctgagttacccaattccaattcatggcaaattttgtctttgcatagttcttg

SEQ ID NO: 128280 - DNA, 452 bp, Glycine max
  unsure (1)..(452): unsure at all n locations
ggtaccctgagggtgatgcatccaggaaattgtgtgaagatgttggtttctaaatctatggtcctgtaaaaccttgcacactgccttataaaaggaaataccgtgtatttgatggcaatgcattatttttgttttcagctagatgctagagttttgataattctttctatttgtgtcacaggttgggggcagctacttcttggtgagtttggtcgacaatgattacatcaatggtgatcttttcaccgtctttgcagatttctgacatgagcttattatttattagttctttagttatgtcacttctgttcgttgtcatgttcctttcctttcttttgttntcttctcagtaggatggttcatattacacgtggctctaagttgaagtaccaaattatttttctgggctttgtcccaaacatctttattttttcattcttctgagtcgcatg

SEQ ID NO: 128281 - DNA, 411 bp, Glycine max
  unsure (1)..(411): unsure at all n locations
agcttcatgatgatgaatctagttaagtttgtagttntgatgatgancaaaagcccaaaagaaccccaaagaatgatttcaagattgagtcaacaagttcaagatcaagattgatttccagattcaagaaaagacatcatgaagaatctagattcaagagaagatgaattcaagattcatgagaagaaatcaagaagcaacaagtcaagacttcacaagggaagtattgaaaaggaattttcaaaaaccaaacatagcacagttttgttttacaaaagagttttctcaaatttttctaagttaccagagtatttactctctggtaatcgattaccagttttctgttatcgattaccagtgatagaatttgatttccaaaagaatttaactaaatttgcaacgttccaaatg

SEQ ID NO: 128282 - DNA, 277 bp, Glycine max
  unsure (1)..(277): unsure at all n locations
ctatgcatgttcgctttcaagaanaattgtgtttttaactaatgggatgtgatatgtttgttattgatgaatgaaatgatgaatgatgttggtgttataatgattggaatttttgggtaaagtcttaattacaaaggagactctacancaaaatttatatttggtcttctatttacttctttattaagtttcaaataggcataagagntttgtttgtataccatagttctcctctttaatttagaatttccctaanatattaatctcatgtattatg

SEQ ID NO: 128283 - DNA, 227 bp, Glycine max
ctcattactttccaatcgatgcttcaaaactatccatgacatgtataggagaatcaatgatgtcaagtcacaaaatgtcaagaacttttattttcaaaacaattacccatttcttgaacatagcctataattcgaagaaaaacatgcaaaggcgtacatgctcacacaattgacccacaatattaaacaaacaatccgacgaaactaacaacattaacaaattaaca

SEQ ID NO: 128284 - DNA, 391 bp, Glycine max
  unsure (1)..(391): unsure at all n locations
ngctctgtatgaaatatgtgtgatccagtgtacctacggttaattcttgttcaagcaaaacattacttattcgttcataccatgccctacggtgcttgttcaaaccataaagagccttttgtaatttataaacatgagttggtttgtcagaaatctcacatccaaagggatgttcaacatatacctcttcttgaatgaaaccatttataaaggcactcgtaacatccatctgattaattctcaagctcattatggatgcatatgccagaagcattctaatcggctttaatcttgcaacaagagcatatgctgcttcatagtctataccctcttcttgattgtgcccttttggtactaacgctggctttattgctaataattataccatgtt

SEQ ID NO: 128285 - DNA, 413 bp, Glycine max
atggacttacctagaatgtatttctttgatagcccttttgagccttgtttccctttccttgttttgaagctcactacaagccttaaatgaaaaaccatgatctcaccatatctttaaggaattttggagctttggaattgctttgggaataagcgtggggggttttttgtttcattggataacttgttttggtggctatgcttcgcgatgtattttgggccatacttgatgtacatcgtatattggttaaatgttggacatgctgaatgaaatgttgttctcaaaggctattgagtaaataaaaataaaaattcgcaataaagaatatgattagaaacgcatcacgttgagtgaataagatcttaattggcacaagaatgatgaaactcttggctctactctttatgttaata

SEQ ID NO: 128286 - DNA, 311 bp, Glycine max
  unsure (1)..(311): unsure at all n locations
atcagcataattctgatatggctnccgattgcactcagctacagaatatgtcctagaatgaatgtgagacctttaagaataccacagtggtggatagacctggcagcacaaatggcccttcccatggtcgaaagggagatgatcaccatgataggagacaccctgccactgttttactatgagaagttggctagttacatgttgtccagcttcgcagacatagtatttgccacggaaagaatcgaagtatgattgaatagagggaagttcgaatacatttcctccacaagtgcctatgcttaaagaattgg

SEQ ID NO: 128287 - DNA, 435 bp, Glycine max
gcaagcttctggtgggacatcttgacttgctttctaatctgacattcaccacagattctggcttcttctattttcagaatgggaatgcctctaacagcacctttgtcaatgattttcttcatgcctcttaagtgcagatgcccaaatctttgatgccatattctgacttcatcttctttggagaatagacatgtggaggagtaactggtttcttgaggtgtccataaggaacagttgtcctttgatctgctgcccttcattagaacttcactcttctcatttgtcaccaagcattctgaatttgtgaagtttacattgaatccttcatcacacaactgactgatgctgatcaaatttgcagtcagtcccttcaccaacagtactttgtccagactagggagtccatcatggactaagctttccattccagtgatc

SEQ ID NO: 128288 - DNA, 356 bp, Glycine max
  unsure (1)..(356): unsure at all n locations
cgcacttgcacatttgagaagaatactcattggaccaaaagctcatgggaaaagcccgaagacaattgcgatagtagggtgcatttgatgatagtcgctcatgcagactccttatgatttctnttgaatccaaggatggcctttgttatataaattctttcatgatcagcccatgtcataaagtttcagcgggatcgatagaccaatggcatcactctatgaccttaaatcaagaaagtttcacttggtcatataccaaagtgtaacaatccattgtcatccttcaacggtgcatgcgatcggtcccaaagccatatatcttcttgctatgcagaataatcaaagttttttaaaaa

SEQ ID NO: 128289 - DNA, 402 bp, Glycine max
aacccacctttccggttttccacattttctcaatttttgttgaggtttctccgcgcattttcctttcttggaagacacacccgtgagccctcgcgtcgcccttccgccgaagggtaggtttcgacactcatgatagtctagcctaatcctgatcaagtatcgtccgcagattcctcttgttggactaaactcggccaggaccgcattaagacaaacatacaacaactaggttaccgtaccccaattcctcatgaaaatatgacaaactagccccatcctatcaagttctaaaaatcaaaccgagttacactgttgaatgatcctataaacacatgcatctacatgatcaaggcaaaagcatggcagaatgaagttatgatagctcagtgaacacacaaaaca

SEQ ID NO: 128290 - DNA, 473 bp, Glycine max
  unsure (1)..(473): unsure at all n locations
gagttcctaatctcttccctattagcgcctgctatgagaatgtctttcatatacaagagaagggtaagaacacacactttcccctttttcaggatatatacacagctgtcatatctatttctaatgaagccctatctaatcaagaactcatcaaatttcagataccacattcgagggaattgcttcagtccatacaaagattntttcagcaagcacaccttgttctccccttcttcaaaacctttaggctggttcatgtaaatggtttccttcacatttccatggagaaaagctgttttaacatctagctgttcaagttccaaatcatactaatntaccagaccaagtatgattcttattgaacaatgcttcacaactggtgaaaaaatctcattgtaatcaatttcttcaacctgtgtaaagccttttgctaccaatcttgccttgaatctatgcctttctactcctggaat

SEQ ID NO: 128291 - DNA, 417 bp, Glycine max
  unsure (1)..(417): unsure at all n locations
agcttggaaggatgcttctatggaggaaaatatagagggagagaaagagagaggggggagcacgaaattgaaggaataaaagagggagagaagtggaactttgaagtatgtctcacaagactctcattcatcaaagttacaacaagtgttacacatgcttctatntatagactaggtagcttccttgagaagctntcttgagaaaacttccttgaaaagcttctttgagaaaacttccttaagaagctagagcttagctacacacacccctctcataactaagctcacctccttgagaagcttccttaagaagattcctaaagaagctagagcttagctacacatacctctctaatagctaagctcacctccttgagatgagaagctagaacttagctacacacccctaataatagc

SEQ ID NO: 128292 - DNA, 302 bp, Glycine max
  unsure (1)..(302): unsure at all n locations
catacaagtctgggaagngaatgatgatgatcaatcttatctaggaataaagcttccttggagtatatttaagttgttgaaatattgccaaaatctaagtaagagcctcgtgtagaatgacattcaatttcttataatccatttcaaacagagattgtactttaatatttgaaatgtaataaaatgatgatagaatttgttgctttcgttttagacattattcactgaggagagaaattttttcccttgggtaattggcaaccacattcttaacttaagatgattgacccttcgatggaaat

SEQ ID NO: 128293 - DNA, 292 bp, Glycine max
atgcagctaattttttggtgctgcttttttgcttctcatgagacaagtctatgtgaaaacaaaggtcttttctataaatcctttttaaaaaatatcgtctcccattttgctacagagtcgtgagatccttttcgcctgtctaattccttttggaatctgtaagaatatctttatattttgctaccaagtgttgctgattttacatctctcctctcatttcgtccttccactctctatatctatccatttatacattttgttggcccatttgttattactgccgtcattgttt

SEQ ID NO: 128294 - DNA, 349 bp, Glycine max
  unsure (1)..(349): unsure at all n locations
atcattcaagatgtatttcaaggatgaagatagcaatatgtcaagcatcaagcgcagagatcaagataagaattcagatagactattataaaagattntgagaagcacaaatgtttggccaagaggaatttctttcaaaaccattttattctaaagatttctctctggtaatcgattaccagaggttgtaagcgattaccattggccacaaagtcttctggagatgttttcaaagtaattttcagagttntcaaagctgtaatcgagtaccaaaactatgtgatcgattacccatgccttaaaacgattaaaaatgattttgtaagtgtgtaatcgatcacacatcata

SEQ ID NO: 128295 - DNA, 363 bp, Glycine max
taagaggagtgtcccactggtataactaactttccaaatgcttgccttcgcaagaaatggccccacagaagcttgcctctaaaaagtccaggtaagacaaggcagccgaaggaactatttccgctccggagtatgacagtcaccgctttaggagcgctgtacaccatcagcgcttcgaggccatcaagggatggtcgtttctctgggagcgacgcgtccagctcaaggatgacgaatatactgatttccaagacgaaatatggcaccggcggtgggcatcactggttacttccatggccaagtttgatccataaatagtccttgagttctatgccaatgcttggccaacagacgaaggtgtgc

SEQ ID NO: 128296 - DNA, 386 bp, Glycine max
  unsure (1)..(386): unsure at all n locations
acagttctgattgtcctcaagcacacatagaacagttcacttgtcctcaagtgacaaagacagtggccaatcaaataaatatggtgtttgattcatcaaggacatccaccatattaactgaatatcatggaatgcttatatcaatcacttttcacaagcatgcaccttttcatagataggagcacatgtattagagtcatagctgaaataagctagtaagcatgaaagatatcaaggaaggatcattcaccaaaacctcgcagtcattgttcactcaaactcaagtgtgtatgctttattcatcatagactaccaacacaagttccaacctttgcatntcatctcatattatacagtaatgatcacactaaatgactccgaacgac

SEQ ID NO: 128297 - DNA, 397 bp, Glycine max
  unsure (1)..(397): unsure at all n locations
agcttgaaccgttatcttatgctagngngatcttaatnggcgagagaacgactagcatagagctatgattcttgcatcaatctctgaattttaaaacgaaatgcataaatgtggatatgatgaaagccattgttgtatatacaaaccacttgactaaaaagcttacctgtttatcaatgatgatatcattttcacccatctgtgaactggattgtaattgtcaaattaaaccttaagctttgaaattgtcatctccattcaccttgcttagattctaggagagcacatgggtttaagacaattttgccccaaatttgggggagttggtttgatggattattttaaaggtaagaaacaactacatatacggaaaattaataaaatgttctatgtgtta

SEQ ID NO: 128298 - DNA, 466 bp, Glycine max
  unsure (1)..(466): unsure at all n locations
ttagctttgtgtcccgtgacccaaggctacattatttttggtcttagaatgatacttctttctggctccattcactaccttagaagcacccctgaggtatttcactcaaatgtatatctgggttctttccatgttggcctcttttttttttatcaaatgggcaccttaaagtttcttccttttgttagatgtggccaaatcttgttcataaggcaaaggaaggaggtttggatgtcattcaaacttatgtttctggaatggacatgaaccttcacctggaaaagtaatgaacaatgtttgcttgcagtgtttgaaaaaaatgcattttttgttgntgctattattttttaaacaagtttagcgattttctagtgttgttattatctttcttaacaaaatatagctattttattgggttgaaaatatgagtttagctgctgaaatgataataaataatattcttatt

SEQ ID NO: 128299 - DNA, 437 bp, Glycine max
  unsure (1)..(437): unsure at all n locations
tctaatggggtgattaattagcaaaaggtgaagcatntaaataattgtataatangangggacagaactacatatatgtatgtgagcaagccatggacaagattaattggagaatgattccctctcttgttataggaaacaactcatttcatatggatgacatggaggcctagtactgttcaaagatggtgaaacaacaacccaattgagcaaatatctaagttcaatccttgttcaagtttcaaatacggtttaagtggaatatttgattaggagcaccagcacaacaaatgtgtatacacaacgggggacttaatttgacttgaagatgacatatcaatcacaatgtgcttgacgcatgcatatagttggtttcaacaagtttctattcttgactagataattacatggtaattaacaataagagtggcttaaca

SEQ ID NO: 128300 - DNA, 262 bp, Glycine max
ctactgcgaaacaaggacttagcgacccacatagtgtgtgtgtgagtgcctggcacgagatgtatttcaaacttgggaatctgcgcgttagttgtttggatgagtcgacgcttacttgaaactcttatgtgctagatagagactttaaccgtgcgaggaaagaagcataggggatgtatctcgatgtatgacatgcttgcataccactattatctctggaagtcataactgtatgcttatatctttgaagattgacagatgc

SEQ ID NO: 128301 - DNA, 324 bp, Glycine max
  unsure (1)..(324): unsure at all n locations
cgcttttactttgcgtcacttnacttgatttctgtttaccataaagcaattatttcgttttaaccattgtaaataacgttgtccaacatgccttacttcttaataaactctatctaagaacaagttccctagttcgaactctgatcatttcggtttattgtaaatacttgacgacccgtgggctttccggtgttcatttccttgatataattgttgaaaattagagaaaatggaacctatgggtaaatgacaatggacttgctttggcatgcaagtaatgtaagtatcagattcacactttgcttttctctgaccggggagagt

SEQ ID NO: 128302 - DNA, 424 bp, Glycine max
  unsure (1)..(424): unsure at all n locations
tctcccnnctttntctataaaaaggccatggtggctgaatgaaaagggttaagctatttcgtaacgatttaagtgagaggaagaagaaagaaggagaaaatcaaggccgaggcgcttccataacgtttctgtgatcaaatatgtggacgtccgtcgccgttcttcattgttcttcgttcgttcttcaatcttcaaccggttaattttcgattttgaagctttgaattcattctatgcacccttaggggtccattcttgctttgtatgttttaaccttcatcttgtctatatttggtattccttttcttccgtttaagcgagtntcgaccattcgtttaagtcataacttcacttaattaatggttaaatgaatctcaatcgatcatttgtgttgtatctcgtttaatcgcctttaagtaaaatt

SEQ ID NO: 128303 - DNA, 473 bp, Glycine max
  unsure (1)..(473): unsure at all n locations
actcagcctatgctgcanacatctacaatagaccctctcaacctcagcagggatatctttcacaacagaataattatgacatcttcagcaacaggtacaatcccgggtggaggaatcatcccaaccttagatgggtgagtccttcacaacagcagcaacaacaacagccttatttccagaatgctgctggcccaagcagaccatacgttcctccaccaatccagcagcaacaacaacaacaaccctagaaacaacaaatagttgaggctcctccgcaaccttcccttgaagaacttgtgaggcaaatgactatgcaaaacatgcagtttcaacaagagaccatagcctccattcagagcttaactaatcagatgggacaattggctacacagttaaatcaacaacagtcccagaattctgacagattaccttctcaatctgtccagaatcccaaaaatgtgagtgccattaca

SEQ ID NO: 128304 - DNA, 413 bp, Glycine max
accttgaacaggcaatattcttctctttcaaaaccaatctatgtgctcgcgactggtccctttcttcccttcacaacttgagatcactattgctaccccatagagctccgcgaaatttattccggccatactcttccttgcgagccctcttggtctctagttcaagggctcttgcggaaattgaattctcttcccgtaacccggcacactccttccgaacgtgtgtagcggccaacttgaacttctccccggcaagtttcgcctttcctaactcgttttcgagagctgggacttcttcgtcctcttccggtgctacaaaattctcttcggtgacgacttttaacttggcgagccattctaaacctggtatatgaactttcaaccattcgtggtacccaccaatgatgccatta

SEQ ID NO: 128305 - DNA, 479 bp, Glycine max
  unsure (1)..(479): unsure at all n locations
tatctagttccccagctaattttgcagtattcactgcagttcttaaaccacatgatngaataatggtaaattattttccccgcactggattttgactattccaattggcagcccattattgtaactgttctaatgtacaatggcatgttaccaaggtttggacttgcctcacggaggacattngtctcatgggttcgtgacacctaaaaaacgtgtatcagccacatcaatttattttgaatgtatgccttattgacttgatgaatcaacaggtgttttttgttttctctttaaaattattacaaatatattggctcatttgtgagataaattattctttaacccacatcggaatcacaataggtcttattgattatgatatgctggagaaaattactactctttttcgaccanaactcattattgttggtgccagtgcttatcctcgagacattgactacccttgcatgagaaaagta

SEQ ID NO: 128306 - DNA, 413 bp, Glycine max
gcttctcttttcttggttaattattatattttgtttttaatccttgtatttgactatgtttttatgacatttgagcacttattatttcttttaatactggcttagtatgactgaacatgatgattattttgacttgctcttggctgtttatgattatgtgttttaaacttaattactttaataatatatgactagtggcatgtacttacatttgatattgtgttttattttttaaattattcatatatgttttatttgaatattatgaatgactttctggattatatgacattctatgaagtattatctttctaagattgatgaatggttaagttatcttggttgattggtttctattcttttgtatgacatttatgtatgggttctatatttcttaccctttctaagttgat

SEQ ID NO: 128307 - DNA, 332 bp, Glycine max
tcttagtctcggctgatgaagatgaattcgtggctactttattcactcctctaatgacaatagcatcacttctggcactaaattgctgggagtttgaagccatcttctcaattaaatttttggcttcagcaggggtcatttttccaagggctccaccactggaagcatctatcatacttctttacatgttactgagtccttcataaaaatattggaggatgctcagaaatctggtggtgaaggcaactggcacatagttttttaaatctctcccagtattcatataagctctctccactgagttgcctaattcctgaaatatcttttatgat

SEQ ID NO: 128308 - DNA, 354 bp, Glycine max
tctggcttctcaaggaagtttctcaaaaaacttctcaacgaaattttctcaaaaaaatttttcaaggaagctacctagtctataaatagaatcatgtgtaacacttgtggtaactttgatgaatgagagtcttgtgagacacaactcaaagttcaacttctctcccttttttcttccttcaatttcgtgctcccccctctctctttctctccctctttcttttcctccattgaagcatcctctccaagcttcttatccaaggctcatcttggtggtgaagctccttctttcatggcttattccctaagggatggcgcctactctcacctccttttctttgtcttccgctgcatc

SEQ ID NO: 128309 - DNA, 447 bp, Glycine max
  unsure (1)..(447): unsure at all n locations
atgcaatacttacttgttggtgattattatagcgtctaacagnaatcgaaaatgcanaaggtagtgatcctagggctgcaaactcgtaaattccgtgggtatggcttttgaatgggggggaaagaagtttttgaatgcaaaaacgtccccctttcgtcattttttatattttggtgcaggggttgctcgcccaggcgagctaacctgcacttttttttttttatgggaaacataaccatggcccccctctctttacaggttaatgtttgcctactcgaacttacttaagttagaattaggcatcggtttacttatgtaaaacacaaaatagtaataatcactgtgaattcaaaggatactgggcttccttgcagcgacgttctctgcttgttcagcgccgggaaggaactactatcactcagtcatgaccctatcctccatttgctg

SEQ ID NO: 128310 - DNA, 412 bp, Glycine max
  unsure (1)..(412): unsure at all n locations
gcttgaaagagcatctaggcatgatggatttattatatgctagtaattgtcgatcaatatgaggttaagacgatgagggagaggcaagatttggctactatacatgggctggctttgagaaacaagctggcggaagtgctaaccttacagggtgaaagaaaagcaagagaggaagttataaagctactacatcaggaaagcagaaagtgctagccttacaggatgaataggtttgcgctcacgctaaatgagagtcaagagctctcgaaactgctagctagagccaaggcgatcgctgatatatactctgatcccaatgaagttcatagtcttttcgattattaccagcacatggtcaaactgatgactcacataattaagaaccgttgatgcacttgttattntattttgg

SEQ ID NO: 128311 - DNA, 467 bp, Glycine max
  unsure (1)..(467): unsure at all n locations
ntactaggcgagtntgatttagccttagtttctctttatttattagtcaattcaattaagaatgagaaatcccaaagagaaaacgtccgatcgatttttcgctctattttactaaaaaggtattttttgattattatattattattttacctcttttgaatttcaacgtggttacggcacgaccaaacggtcggaattcattttaaccgaaattaacggatgatacaattcaaatgatcgccggaaatttattttatttttagattaggcgagaaatgacttaaataaatgactgaagcacgtcaaaagggggtatagaaagcgaatgaaaatgaaaataaaaatacatgaaacaaaatgtggaccaccacgggtacatagaaagaatngaanagctcggtttgaggtacttaccccgtgaagactgaagaaaacgaagaacgaacgatgaatgttgaagaacgatc

SEQ ID NO: 128312 - DNA, 423 bp, Glycine max
agcttccatcatggatatttgcttgtgggtgttctattgaggatggatctttgagcttcaatgaggtcctttaatggtgattttccaccatggagatgcagcggaagacaaaggacaagaggtgagaggaggcgccacgcactacggaataagccatggaagaaagagcttcaccaccaagatgagccttggataataagcttggagaggatgcttcaatggaggaaaagaaagagggagagaaagagagaggggggagcacgaaattgaaggaagaaaaacggagagaaattgaactttgagttgtgtctcacaagactctcattcatcaaagctacaacaagtgttacacatgcttctattgatagactaagtaaccttcttgagaagctttcttgagaaaacttccttgagaagcttctt

SEQ ID NO: 128313 - DNA, 443 bp, Glycine max
gaaatggaatttaaacacatattccattgaaagtaacttattataaaagggagagggtgaaatgatgggtaaaatgtgatcttgattatcctaaacaactaataatgcaaataatcctaactaaaatgcttactaattaaagactaaatgcagcacatcaaacaacccaaaacttagaaatttgcttgtcctcagcaattaccataaacaaaagattttaatcaaaagcttcatcagatcaaaactcaagtataggcacgagtagtagataaccattaacatgcaattaatcaaatcaagtccaattagaggcttatcctccaaaactaattataactaagacaggttcaatcatcccacttcactcaagtgtttaggaggttcgcgcggctcacttcacttaagtggttttggataaaatcttgttcactaaacttctcaat

SEQ ID NO: 128314 - DNA, 428 bp, Glycine max
cggaccttaagcacctgcagatgcagctattaatgattatagctccattttctttttttacatgatattcaaacctgtccaaataaataataaagtcatctcgactcacagaaagtcatataagtctcatacaattaatatagaacctatatcctaatgtcacatcctatcagagcgtggtgttcccgtatcctctagcatgaggttcttcatagtcatccgcctattcatctactcccccgaacacaaggttcaagatcatcacaggatccaaacacaaacatcaaaccggaagtgagttatcacattgctaactactatggagaaacaacacaacatatagtagcccaatacaatttacttagcatatctcacattatttcatcactttgtcattcatcaatcacactgttcatccatcaatcaca

SEQ ID NO: 128315 - DNA, 364 bp, Glycine max
  unsure (1)..(364): unsure at all n locations
ctgctaacccatggaagctcctaacatctcccacactttttgtggtggaccattcttggatggccttcgatttctcaaggtccacttggaccccatttctaccaactacaaaccctaagaaaactatattatctacacaaaaggtaacttctctatatttgcatagaaggtgtttttcctaaggactgaaagaacttgcctgagatgtcctaagtgatcatctangctcctattgtacactaaattatcatcaatataagcaactacaaatctacctatgaaatcccttaagatatgatgcataagcctcataaaggtgcttggtgcattagtgagcccaaaaggcatcactagccattcatac

SEQ ID NO: 128316 - DNA, 445 bp, Glycine max
  unsure (1)..(445): unsure at all n locations
tctatggaagaattcgttcctaattttctacaattgctttatctctcaatgagatggtgaagaagaatgtggcatntacctggggtgagaaacaagagcaagcctttgctttgctcaaagaaaagcttactaaggcacctgttctagctcttcttgacttttctaaaacttttgagctaaaatgtgatgcctctggagtgggagtttgagctgttttgttacaaagtgggcaccctattgcttattttagtgaaaaacttcatggtgccaccctcaactactccatctatgataaagagcattatgccttaataagagccctccgaacttgggaacattaccttgtttccaaggaatttgtcattcatagtgatcatcactcacttatgtacattagagggcaaagcaagttaaacaaaaggcatgcaaaatgggtagagtacat

SEQ ID NO: 128317 - DNA, 430 bp, Glycine max
  unsure (1)..(430): unsure at all n locations
acttattataaactaaaatgtcgaagatgagtgattactttcaatattatggatattattatatcatggatattattatgaatatgatcagtaaaaaaattaaataaattctatcaaagtttaaatttatcatacataaacctccaactaaaaactaactatttaatttttaatttttttcaataaacaattatttttaaagaataaacttagccaaactttacagtgaattctaaataaagcttaaaaagtgacacaaaattccaacgcaacaaaggcatatgtttttgcattcttcaagtacaatttccgaaattattttacgatttctacaacaaaaaaataatacgatcatagtattgtacataacanaacaactaataaaccctcagttnttttgttttttaatattaaattttcccaaaacctc

SEQ ID NO: 128318 - DNA, 473 bp, Glycine max
  unsure (1)..(473): unsure at all n locations
tgtaatctttttgcacttggttgggctctggattttgtatattgatcaagtgttttctttttcttacattaatacattagtcttttgctatcaggagacctcctgacattgttctttcttggaacaattattattgcttctctaaatcaatcacattcattagattatagtcggtatccttattttctttgaagaaaagacagcgtgcgcctttaggctttcaatgtgaacatattcaaaatgaattgaatgaatctttgtgtgattgatcaaagacatttccatatctaattaatcctttttgttttggtatgtataattgaaaatttaaccacgaaattaagaaaatggacanataacatcacctaactgatgacaatcgtgcatgccatttcctactttatttaaatcactaagccccactccatagagacaaattgatcgatctacttttatcaagtacgcatgatcct

SEQ ID NO: 128319 - DNA, 297 bp, Glycine max
ccttatccctatgttccgcctgatagcaaagaaacatgatatcagaaaaaacacattgaatcttaattgacgagaaataaacgaagaaaattaaattttgtctcatgaagcactatcctttagcattcttcagttttcttcagacaaataaaaaacgacctcaacatcggaccatgttttttcatcaatattttctcttcaacggccataaatcatacatgccatgatcaagaccctgcacctggactgagagctgtacctcgctagatctatgtgatcaacgacactgctgcatat

SEQ ID NO: 128320 - DNA, 456 bp, Glycine max
  unsure (1)..(456): unsure at all n locations
actcagctctgaagtgcaaccaatgaggaagtgtntcagaaacgtgcaattcctgcatctcaattcctaaaaatcaaggtgttagtccttgtcattattaaacatccattctgattgatgtattaatattctttttatcttatcaagaaatagagcttaattcttctgatttgcgttgcacaaataccctatacctaaaaaatctttcaccgggtttgccatccaaaacaattgattggaaaaatgcagaatatatcttaaatatttcatgtctccatcatgattcactaatttccaggtccattacatcatcaccttgatctgttatgaatttaaactacanaaaaaattatgttaaaatcctagcctgtttacccgctaagggaaacaagctcatccacaattcatacagtanaccacaattaacccttcacttaattcattatatcatagtca

SEQ ID NO: 128321 - DNA, 348 bp, Glycine max
cgttggcaaatggtatctaatgggtcatataaaggcaaatttgatcatcctgctttgacaaataaaaagcctagggccaatagagaggatgataaggaggaaggaacccatgttgtgactgtcgtttctacatgtccaaatttcctagcaactcaacagtgtcattactcaaccaatatcagcctttctcattacccaccactcagtcatccacaaaggtcatccctaaatcagccacaaagcttgcctttcgtgcacccaatgccaaacaccacccttaacacaaaccaaaaaaccaaccagggagggagttttccagtgaaaaagtgatgcaatcctaccccgcaa

SEQ ID NO: 128322 - DNA, 356 bp, Glycine max
  unsure (1)..(356): unsure at all n locations
ttatactacctaagtggataaaatactgaggaagaaccaatttttgcattcagcccttgggggaaggcataagctttganttatttatttagtctgtaaccaatttattacaagccaaagcatttatttantcttacgtacacttgtcaaagtaattatactactaaagtggataaaatactgaggaagagccaattttttgcattcagcctttgggggaaggcataagctctgattattttatttagtctgtaaccaatttattattagccaaagcatttatttagtcttacgtacacttgtctctcttaacaagaaagcacgtgattnttcacgcttcatgcagttgatgatct

SEQ ID NO: 128323 - DNA, 367 bp, Glycine max
  unsure (1)..(367): unsure at all n locations
agctngagatgaggaagtatagaagggngattcttcctgcttttattcttttaccacagagtggtacctggagatatgtcgcgggggtcaggagacctcggggacgtcaggtggggtgctattgcccaaaaccaagcttgaccaatcccgacccaacccgggcatattcggtcaatgagaacctgtgatgtacctaaacaggcgagctcctggcagtcaacagataaaaggaacgaagaccacaaagcaaggaggcttgtggtggctggccagttgtgaattttgtgtgatatatgggttgtggcctctggtaatcgattaccaagggtgggtaatcgattacaacgcttaaaaaatgaagacagga

SEQ ID NO: 128324 - DNA, 411 bp, Glycine max
  unsure (1)..(411): unsure at all n locations
aggcccattgtttgtcagtcatgccttacgatatgtgatggtgtatctgaactcttgtcttacgaatgcgatgaatgtatgaatgggtagttgcttgttttctttcacccatcgcaggatattttctcctacaagtttggaattcatcttattgtgatcttgtgaaatggttcgcatgacacatgtgtaaggcccttctatcattctaatatcccaaacttttagatatttnttccggatgctctaagtttccattggcactttttagctatgaaacataagacccatgtatccttcgcacacctcttggctgtgaaattcacatgggttctaatgtgccacattattaccgcgtgtttcaggtccttccattgatgaaatcactgatcaacatacaactcatcatcgtgc

SEQ ID NO: 128325 - DNA, 389 bp, Glycine max
  unsure (1)..(389): unsure at all n locations
atattgccagatgatgatctntttctttcttggaaggtaccacatgatatggtacttccacaccttcatccacagctttttcactcctactcttctttgcattcttattattntgttcttctttttcattnttttcattttctatttctttttctttttcttggtccttcaattctttattcttgaccattatttgttcctctntttcttgattactttcacctctcacctcatttttcttgtcattagtacctttnttgtcagcaagtttctacttatgcacaacactatcctcatcctcagccttcacagaacttttactccttgtcatcacagctttgcattcctccttgggattctgttctgtatttgccacaaaactattggat

SEQ ID NO: 128326 - DNA, 415 bp, Glycine max
ttaagcactgagctgcacttgccatttgtaaaggtctttttttgcttcaggcatggggtttaagatgaagggctccataccgacctaattttactaaacacctctgttggtatgattttatgggtgtagttactccacgcgggaccatattgtaacgcttttatcccctttacagctaatatacatataatggattccgttgtgttaattatgcgtgcccacatcatattctttagcttacaaaagaatttttgtgaggtagagattatcgaaattcttttatttattgggtttttgtcaacatgcttaagataactgagtcagtgcaacaacttctaaaaaaatctgtgactttgtatgtttacaaactagttgaagaggctaatgctgcgaagtttttttattagattggatt

SEQ ID NO: 128327 - DNA, 470 bp, Glycine max
  unsure (1)..(470): unsure at all n locations
ntgaagcttagtgactgaaacgngngtcatcttatgaacattatatagagcctgcaatgttcactcccaagttatgatataccataacgtaaacatattaccactgttgcatataactaaacgaactcctatcataagtcaatacttttagagatccttgatcatatttcatgtagtgtacagactccatcctcccactcttgcacaaatctttgacttcattgcacaattcatttcaaatcggtattatgagtgtactttacttgggcacaagaaacatcacttttatacttgagctgtagagcattcgttgtgaacaaactttacatacattacaagtcagcaaagagccaaagatcctcatagataacaccaataaaataaaggataaataagactcactttcatgtatatgcgatcttcaacctgcaaagctctgtcaaagacttgaggaattgaccgtcaatttc

SEQ ID NO: 128328 - DNA, 407 bp, Glycine max
  unsure (1)..(407): unsure at all n locations
agcttgtttatcataccacgaagaagagggtcttctgacccaagtgccctgtcactgaaagaggattcaaggggcatgtatgcaattntgaaaaaaaaaatctttataatgctgcttttgtatgtgtgaagtaaatgtttgtgtgagtgtgaatctgattagcttgtgtgagaattcatcttaaggatacatgacaatagatataataagaatgaagatgatgaagcataattaaaagggcttatagactcaaatgctgaagtgtgcttatcatttcaaattatcaatttcccctaatgtgtctaaaaggctgaggcaacaaatgaagcaattttgtgcacaaacatgtcctgttgggtagaacaaggacaaactagtgcagtagtgtatgataacaaanattgaat

SEQ ID NO: 128329 - DNA, 473 bp, Glycine max
  unsure (1)..(473): unsure at all n locations
ngaaggtgtgntaccccaccatttntcatagtaaaacgctggtnatgtgtctactattattgtgatcatctctttctacgtcattggaggtgccacttgagctgccatgactctccaccttaggccgtattctttgaaagattcgtgcccctttttacccaatgtcgcaacctacccttctgcgggagggcgacgcgtgacttgcgggatgcgtgttccacgaaaggaatacgcgcggagtcgccaccaacgtttatttgaggaaaacgtcggaaaaaccgaaaaagacgtgatctacgaacttttatgtgaaaggttcgggagttgtatttacgcacggagaaggtattagcaccccacacgtccgtcccaagggacggcaggctntaatcgaatgtgcaaacatgactttgatatttacgttccctttctatgtctgtatatcccttatacccttgttatattttttctct

SEQ ID NO: 128330 - DNA, 417 bp, Glycine max
  unsure (1)..(417): unsure at all n locations
agctttggaaaatgatttctatacaaaaggtagtcgtataaagtttatttcagatataaagggtgttatacccttatttcgtctggggactatcatttgttaatcttttgattcttggtagtcgacttacagtgttgaacgccagttacggtgtgaaacaaaaaatcattcagtgttttgatcaaaaatgcaaaaaataccaacaaagggaaaaatggtcttttccttggtttccttgaccctagctcgctcaggctagcctctagcttgcctgtgccaccgaataacttcatggtgaagaaaccaactcgccagggcgagctcattgcttcagcactaagttttagcttgcctgggcaagctgcaactgctccaaagtgacccttngcttataaataggcgttctaggggttgttt

SEQ ID NO: 128331 - DNA, 469 bp, Glycine max
  unsure (1)..(469): unsure at all n locations
gtgtggagagaggagagatagacagaanaagaacttagaaattttttgcaattgtctatccgctaagcgcttagtcttcacacgctaagccaagcttgctcgcgctaagcgcatagacccctgattggttggttgaataatttaactaagcgcacaacactgtgctaagccccacatctttgcggtaattgaactttaaccagtgggcttagcgtggatgatgcgctaagcaccacttcttctcgggaaaaattntattgtagcagcgctaagcgtgctatgctgccctaagcccttgatccattttgtaacttgagtttttaagctgggcttagcgggccaggaagcgctaagcgccaatcttttacgggttttgaattcttggaagtgcgcttagtgcacctgttgcgctaagcctgaactactctttgtaagtngagcttaatgtacactagcttacatctctgat

SEQ ID NO: 128332 - DNA, 373 bp, Glycine max
ttgttatttcccttaacttaaacttctttggagccatagaggaatactgaatctgatcctctatccttggatatgcatcttctggcctctccatatggcgcttcctttgccaacacaataaaaagatcaccatccctcctatgataacaataactatcactattggaacagtgatgtaaacccacaagagacttttattatcatcatctgcaatgtcaacaccactgaattcccatgatctcacacagttcagctccgtgtagttacttgttgaggctgagaaaccaaggtaaaccacttcatggagataggaagatagattaagaggtggagataccaaaagggtcttcatagattcttcgaaaccagtcat

SEQ ID NO: 128333 - DNA, 444 bp, Glycine max
  unsure (1)..(444): unsure at all n locations
acctatgatactaaccttagctctcagccnactcccttacaaaatatgaatttatgcttaaataggtggccttgttcatgctcgtgcgcttagcgcaattctgaactgcttagcgcatattaatgaatttcggcttaacgcgtgcttttctcgcttcacggatggactaaagcagtgtgcttagtgagatgaagagatgcgctcatcgaacctgtacagctcatcttcttccaaattctttctcgcgcttagccaatgagtgttgtgcttagtgaatgctcgctaagccaacagattagcttagcaagaaggtgaaaaacaacacttttcagagtcgcctaattaacctaaaattgagagaaaatgattattaaacacacaaaatggaagcactaagtatttattacctatacttaacagaaagtacttataacactacaaaat

SEQ ID NO: 128334 - DNA, 357 bp, Glycine max
  unsure (1)..(357): unsure at all n locations
aaatgctattggtttttttatatatcgcaatcttatgataatctttttgtgacagatcanaattgatagaaaataacgtttttaatgaataaaataaagaaaaatttccttaaagaaaaactcttcacgaaaaggaaaagaaaactgtgaaattgatcgaatataatgtttgatcgagcacaggatgtggagaagaaaaaaattagcacaacaattaattaaacaatgcgcactttcacacaaaattttgtcaatattagatagaagaccaatcccttggagtttgaacatctcgtaatttatgattactcggcgtgtacctacataatagttgttgactaaaggagaacgactttt

SEQ ID NO: 128335 - DNA, 470 bp, Glycine max
  unsure (1)..(470): unsure at all n locations
ggctgcaatngcaaaanaccattattggaaaggaagtgtcccaacagtgaaattaaaagttaggaatgggattgctgaaaaactaaaaagtaacaattttgattcccaacacccccacttccaaaaaaaaatcctgtaagatctgtagcttagcaaaaggaaaaggtaaaattatgaataatacccagaatatgagtaaagtgattacaaggatggcaattgctgcgcaaatgttaagtaataatattctaaaaataaaataaagttcactttaataccaaaccataaacataacataacagtagaaaattgaaaaaaagaaaagcagtgaaaggaaagggccatactgtagtagatgttggagaagtgaattgaaaccgaaggaagagcgtcaacacacaatcattgtctccaaactcaaacaaaaagtgtccaagagtatatatatatatataaccgtagaaaagagc

SEQ ID NO: 128336 - DNA, 341 bp, Glycine max
  unsure (1)..(341): unsure at all n locations
aactcggatgtccgattcaggcgcttattatanttgagacacttgattttgaatatctataagcttcgagaaagtccaatggtcattacttttcacacagatgtccgattccggcgcataatagggcgagacgctcgaatgggagccccggaagctctcgagatattccatggtcatagcttctcactcgctatgacctgatcacgcgcataatatattgagacccttgaaactcgtacaacggaagctctcggaaaattgatatggacataactctttaactcagaggtccgattccggcgcataatataacgagacgctcgaaattgatcattcgaagc

SEQ ID NO: 128337 - DNA, 414 bp, Glycine max
  unsure (1)..(414): unsure at all n locations
gcttacagcagattgtactcatgacccactaacctagaagtattatagcttattgcctttaacctacggaataanacaaacttaatggctgagtgtaactgaaattcgttggaacacaaaagtcaccctcgacagccaacaagtcagccccatttggtctcccaataagctgatgcctaggttgccaattgggcccttattacaacttgaactaaagcccttttagttgattaacccagaacatatttttggtgcaccaactctacaaggattgtgccattatatagacaaactaaacactctaaaattgaaatagagcggtgtcatttagtcctccatttgggccatgatacaactcacaaccttggacttttctgcttgaaacttgggcttgtattcaaatagaatggacag

SEQ ID NO: 128338 - DNA, 312 bp, Glycine max
gaagcggaaccggtgctacagccagcaataaacctgggccgagatagaaacacgacggtgttcggtcggaggtatagtcatcacgcttacccttatggcttgcctctggacttcacttcccgtaccgctttggacgatttgagccaagcccctaccttcgaggggcaactccctccttatgccgactattcgctgcaagaaaacgatgaagaaaatgcccatctaggccctctactgccccttaaggatccggccccccatgaattgccccaaccaaacatagtccgccatgttccgtcttcacccgcaccc

SEQ ID NO: 128339 - DNA, 439 bp, Glycine max
  unsure (1)..(439): unsure at all n locations
ttagttcacatagctatcanacattagccatgataagcaaacaaattcaaacttcttaaggcactcatcgaactcttgcttagaaggacaatccaccaaattcccccgaccttccataacataaccccatgcattnttttttaccaatcagaattttacactttgccttagtcagtcgaccagcatatgaatgtccaacgaatgacttcaccaattcatgattgtgactcccacaaattaacttcatcatccatccttcacctcccacaactggtttcccatgtagcttaaagggacacccatattntctactactagtaactgttcttaccaaatatttcttcttggccctatattgaccactcctttcacagccaattaaaacaaatgaggtccttcatctaataccattatttgtatttgatctcataatcacgac

SEQ ID NO: 128340 - DNA, 313 bp, Glycine max
tctactattattatcatgcctaattgacctaacattctctaagcctttttctgtccgattaatattacgtaccaagatctatgcctcgttaaaaatttccttataaaaatgtatcctagtaaacaataatgaataacagtcttaacttttccaatcacccataaataagaataaaaaaatcctgccccaaggataaatattaacgctcggaatgagtattgtaaaagtttaaattgtccgatattattaatttaaaatgtgagtaaaaagacttcctatactataaagattttttggtctctgaaacataaaa

SEQ ID NO: 128341 - DNA, 462 bp, Glycine max
atatcgcgtgaagaagctcatcatcgcactctgtctacatcatgatatgactaacgtgcgctatcttatcttcaattctcgaacataccaatggcttccctattcgattatttattgctaatctgatccatatatcaagttttttgtgtatcttaatctgaaccttcctataattcggattaagagtaaaaattccttatatatttaggatacattcgttgactgatgtatgttctcggaggtggcaattgttgcttttttgagtatgaagctttctttatgtgagattcaacacacagttcctattctatgttgaagattaatggtgcttaaaattaatgtataacagcatctcacatattaaatcttattatcacatcataattatctttgtggcggattccactaattcacatcattcttagaatgtctttattattcactttaaaatatatttattta

SEQ ID NO: 128342 - DNA, 343 bp, Glycine max
  unsure (1)..(343): unsure at all n locations
tatattcagaagcatgtttggatgtgtgccggaagattaatatcgaggccatggatttggggtctgctattcaaaaaagagataactggcgagatgtttgcttcatgtaagtttatgctctcatgtgtaggggccctcaattgaaaaggatcaaatttgcgtagtcctttctgtcatttgatttggcgctcttgttattttatagtgatggaattcacctgtcatctganggaagcaagatattgttgaaagagatactgaatgtcctcaaaggtgcagaatgggaacctattctatattggaatcaatgccaagtgaggttgatgaagattcaccatatgat

SEQ ID NO: 128343 - DNA, 460 bp, Glycine max
  unsure (1)..(460): unsure at all n locations
ctaacctcaaggtgctgattcgattgcctcagtactgccaccatgctattgcttgtttgtgttcacttctctgcagcaattatgggtatgcttaaatgtctttatctgaaaagagtttctaacttcattctttgcacagtagatttcccaatcacaaaatgccttcttgcattttgctctagccctctatttatcattcttcttccacttgaactccctgcccatcaatatgctatactccctcaaggcagatttaaattcatctagagtaccaaactccatccctaattccaacttctgttcaccaactccactactttgactatattgaggataaacttcaacatcctcatcttcatcatcactactaatggngatattaagctcctctgaatgataaccatctgtctcaacttcagcttcaacttcattcaacatacaagagaaaattataaaccac

SEQ ID NO: 128344 - DNA, 369 bp, Glycine max
gcaagcttctcgcacactccagatattttctcaaagatcccaacggttaatttatgttaaagtgtcttgtgaagctgcaaacaaaatttcgagatgatccaacggttaacgaaggctgggaagtatttttaccgaggcagcttcatgtagttttatctagaagcttcattaagaggcttcctccaaaagctttattaagagacttctagcacactccagacatcttctcaaagatcccaacggtcagatcatggaaaagtgtcttgtgaagtttaaggccaaatttcgagaagatccaacggttaatgaaggctaggcagcgtttctaccgaggcagcttcatgtagctttctctagaagcttcattaa

SEQ ID NO: 128345 - DNA, 412 bp, Glycine max
  unsure (1)..(412): unsure at all n locations
agcctctgcatgcacaagagtctggccttagcttgaagcttttgcatgtttaggaagttttagagagagaaaggtcccagttccaaagagttctaagagattatgctgtgtgaagatctgtagagatgagagttcaaagcagaagcccgtctgagagcttgggatgagtttatgagtgattgtgagatcctacacgtgaaggagacatcctcaccacttgtgtttttgaaatctttcatcttgttcttctctatngttgaaaggaggttntcggaacatggaaagctaaatcctctgttggatcttccctgtaggtacctgatgtgaatatatntctatctatgtaatgatgtnttgtgtgttctctgtgctatcttcttttcattccagtatgcttttaccttgatcacgt

SEQ ID NO: 128346 - DNA, 365 bp, Glycine max
gcaatatgagatgggccctttattggtttgttggaaatactaacttccagcccctttcagcaatggtatcttcgcatgctgaagagcctgctggtaggtctctgaacaccaagcgtggtgttgatgccaaatctgaatctcgaaattgaacctactaatcatatgctaggttaggctacatagttaggccacatacaaatgtgtacatagaactacatagtcaaaattgttactcgatcaaattgaaaaggatgttataacggtctctctcaatatgaagataaatagggtgctgacttgtaccactaattggattgaaatttagagcattctcttaataagaaatcacaatttgatgtcataat

SEQ ID NO: 128347 - DNA, 438 bp, Glycine max
  unsure (1)..(438): unsure at all n locations
gagaggatgcttcaatggaggaatagatagagggagagtattatggagggggagcacgaaattgaaggaagaaaaagggagagaagttgaactttgagttgtgtctcacaagactctcattcatcaaagttacaacaagtgttacacatgcttctatttatagactacgtagcttccttgagaagctctcttgagaaaacttccttgagaagcttctctgagaaaacttccttgagaagctagagcttagctacacacacccctctcataactaagctcacctccttgagaagcttccttaagaagattcctaaagaagctaaagcttagctacacatacctctctaatagctaagctcacctccttgagatgagaagctagagcntatctacacaccccctataatagctaagctcacccccatgagaaaaaacatg

SEQ ID NO: 128348 - DNA, 418 bp, Glycine max
agcttctgaattaatggtggtaaacaagtttatattgtcatcctatcacaaatcaacatttgaattactttaagataattattctaaaaataaaaaacttacaatatatgataggttgtgattagatgaccatctaaaaaatattacattgtcagtacataaccctttttctctatcttattagtgaaacaaacaaaaaattacaatatgatgtaatggttatcatatcttatcctatcatatcatatcttgattaccaaacgtgaccttaaactcttgcaaagtaaacttgtttacaaagtatattaataaagatgtatttataagttcaattttgattctttttgaataagtagtccctgaaagatgaaaaatataaatttagtccctgaatgtgcaaaaaataaaacaaattaat

SEQ ID NO: 128349 - DNA, 439 bp, Glycine max
  unsure (1)..(439): unsure at all n locations
ctggttagacatgaatggtacatgaattgagacttgtatgattcaattngngcaaaattggatgagggaaagagtggttttcgaaatctgcactctatgcaaaattttgctgttgaaatgtgcagcagaattttgtataagtgcagaaaaatgcttgtatatggctgattgtaaaaagggtagtacatatggtgttccggacattttctagcagatcccaacggtcaaaatgtagacttatgtactagagacttccagtaaaattttcgagtcgatccaacggttaacgaattggaacaaaggaaatgttactggggtatttgtatgtgaaaagctgtgattatgagttgtgttttgggcagaagtatctgcctttgccctggtttgctttggtttgttagtccatgacgattggatgtgatattcctggatgccttgg

SEQ ID NO: 128350 - DNA, 364 bp, Glycine max
  unsure (1)..(364): unsure at all n locations
agacttctttttatataattaatactaacttataataacaaaatatgtttaagagtgattagccgcctcttatattccatatacatatgtgaagcattgaaagttctctgaacttctatactanttttttgaagttaagacagaggaatgctgttttggagtcaactctagcctgcgattaagtaccgatgaagtcagtcagagtgttcctaattagtagtaatactatagtaattaacccattaaactaataattgagatgcttgatcattaatgcattcagatgacggacaaaaggtatgtgcgacatatataaagctctctaagagtaacaaaaggtttgtgctctggctctatagatgac

SEQ ID NO: 128351 - DNA, 391 bp, Glycine max
ttctaacaaaggctctgataggaggagatcaaaataccagctggttgacaccggtcgcactaataagggttctgatgacaagtgctttggctgcgttgtccaagaggaagattccagtggcaagattggtgttactttgtcaagagatatgatggcagttgctggtcatgctttgaaaaccaacatcaccacattggggcctcttgtccttccaatgtctgaacagctcctgttcttcgccacattggttgggaagaagcttttcaagatgaagatcaagccttatattccagacttcaagctagcttttgagcacttttgcatccatgccggaggcagagccgtgttggatgaactggagaagaacttgcagctgtccacttggcatatg

SEQ ID NO: 128352 - DNA, 440 bp, Glycine max
  unsure (1)..(440): unsure at all n locations
ttaagtcacctgcngcatgcaagcttaattatggtgtttcttcaattaatttgttcttgagtcttttcattatgggatctggtgtattggctggcagaatagtgcggcacaaacacagaatggaaagcacatgacccttcttggaggtgcactttacaattaaatggcgcctatgaataaatccatcgacctgcacttgtaactcggattggtaacatatttggggcgttcgattataagtcttattgttacggagctttgacttgtacttgtaataacatattgtaaatatgggtatgaaggtagtgcattttatcacatcttgtcgataatatgtttattattgatggcatctctttctctcttatttctttcataacccaaaatcaataattcttacactaggtgttcatgatataggtctttaactattcatctat

SEQ ID NO: 128353 - DNA, 468 bp, Glycine max
  unsure (1)..(468): unsure at all n locations
tccttttagtgcgtcacgtntaaaaccgagctcgatggtggtgcgagcctntgatggtactcggcgggaagtgatgggggaaatcgacattcccattcagataggcccccacacttgcaatgtggtgtttcaagtaatggatataaatcccgcctatagctgcctcttgggaagaccttggattcatgccctgngagtggtcccttcaacgcttcaccaganattgaagttcgcagtgggtggacttttagtgatagtgtcgggtgaagagtatatgttagtgagctgcccctcctccgcaccatacgtagaagcggcggaagaatcattggaaacggctttccaatccttcgaggtggtgagctgcgcctctgtggaaccaagtccgttgctaccttctctctccaacgcggccataatggtggcacgtgttatgctcaagcacggatttgagcccggaatatgtct

SEQ ID NO: 128354 - DNA, 404 bp, Glycine max
tgcacatgagtttgtagctacctcattctctcctctaatgactattgcatcatttctggcgctaaactgatgggagttggaagccatcttctcaatcaagtttttggcttcaacaggagtcatgtctccaagggctccaccactggcagcatctatcatacttttgtcgatattactgagtcctttataaaaatattggagaagaagctgctccagaatctgatggtgagggcaactggcacatagttttttaaatctctcccagtattcatataggctctctccactgagttgtctaatacctgagatatccttcttgatggtcatggtcctggaagcacggaaaattctttctaagaatactctcttaaggtcatcccatctcgtgatggaccttggagcta

SEQ ID NO: 128355 - DNA, 451 bp, Glycine max
  unsure (1)..(451): unsure at all n locations
ngagctcactgttgctgccccacaaagcccctcaaaacttgttttggccccattcttcctttcgggccctctttgtttctcgttctaacacttcagttgtggccacattgacgtccctcaacttgtcacactcttttctaaccctaatggttgtcgtcttgaacttttccttgaccacttgtgctctttcaagttccggcttcaaggcttgcacctctttgctctcctcgggggtttcaacctcttccaaacttgaaatctttagcttcgggaggcaagttatctcttgcattctagccttcagccacttgtgatagccgccgacgatcccattgccgcttcccctaagctccccatcctttctttccaccacattccattgcttttggactctttgaagcagtcttgcattgnggtcactggtaccttatgcaatgaaaggtgtgatact

SEQ ID NO: 128356 - DNA, 411 bp, Glycine max
  unsure (1)..(411): unsure at all n locations
tgcttaagngatatntggtatacaaaatattttaatactttttagaagatgacatcgaaataatattttctttcgtttggtagaaatgacattaaaaatatgtctcgacatatttttaattttttttaaaaaaaacaaattctatgacgattcttcggagaatcgtcttataatatctaccttctaactaaaaaccgtcttagaaggctctatatattttttatttttataaaaaatggattctaagacggttatctaaataaccgtcttaaaaagtgtactcttctaagaactattttaactaagaacgattcttaactaagaatcatcttagaaatatattattctaagacagttttaactaacaaccatcttagaatgatatatctttccaaaatgggtggctattgg

SEQ ID NO: 128357 - DNA, 395 bp, Glycine max
actaaccttggatgaggcttgaagaacatggtccttggtgtagaccattgatgaaaattatccagaacctgagaaatctggttcaaatctccaaaatggttatgaaattaaattaatccatccgggcaagacttttgcccccccccccccaccacaatccaactgtgatttgatctcattcaaaaatctagacacaggctttttttctttaagtcaaagaaaaaatggaccctccaaggtggctactacaacattctcgaaatctgccttgaataaggatactgcttttaacactgaagttatgcccccacccatctatgagataccttgaatacattttttcttttggtgacaattatggaataatgagatgtcctttttaacattattacctt

SEQ ID NO: 128358 - DNA, 412 bp, Glycine max
  unsure (1)..(412): unsure at all n locations
agcttgcttgtgtggcttctatggaggctttatctttgagcttcaatgagttcctttaatggtgattttccaccatggagatgcagcggaagacaaaggagaagaggagagagcacgccccatccactaagaataagccatggaagaaggagcttcaccatcaagatgagccttggataagaagcttggagaggatgcttgaatggaggaaaagaaagagggagagaaagagagaggggggagcacgaaattgaaggaagaaaaagggagagaagttgaactctgagttgtgtctcacaagactctcattcatcaaagttacaacaagtgttacacgcttctatttatagactaggtagctttcttgagaagatttcttgaganaacttccttgagaagcttctttgagaaa

SEQ ID NO: 128359 - DNA, 433 bp, Glycine max
agcttggagaggatgcttcaatggaggaaatgaatgagggagagaaagagagaggggggagcacgaaattgaaggaagaaaaagggagagaagtttaactttgagttgtgtctcacaagactctcattcatcaaagttataacaagtgttacacatgcttctatttatagactaggtagcttccttaagaagctttctttagaaaacttccttgagaagcttctttgagaaaacttccttgagaagctagatcttagctatacacaccctctcataactaagctcacctccttgagaagcttgcttaagaagattcctaaagaagctagagcttagctacacacacctctctaatagctaagctcaactccttgagatgagaagctagagcttagctacacagcccctataataactaagctcacccctatgc

SEQ ID NO: 128360 - DNA, 435 bp, Glycine max
  unsure (1)..(435): unsure at all n locations
actcagcttccatatctataggaagttgtgatcatgaattgttatctgaatttaacaatntcatatatgcctgtcatgtttttgctatatggagagtatngctaatttttgactttgtcaatggtaatgttgtctcacgaactagttatcaattactaaggagaatttttgttgtttatacccatgctgactagagcaacattactgagggtaattgaatgtcatgagactcttgggtttacaattttctctgataaagtatcttggtaatgggaaagtttgacatgtttgtttcttcccctctcctattgaaatttaatgttcttgtttgagaatggaatcatatggactgccttgtgatcacatttttgtgtgttgtttcatctggactctggtgagtagccaaaatgtgttgtgttggatcgttggacaaaa

SEQ ID NO: 128361 - DNA, 419 bp, Glycine max
  unsure (1)..(419): unsure at all n locations
cttgagacaatccattttttttgtcctagaggctcttaacaaatcanaagaattgagggttgtttgctcactgactaactcttaattgtcttatagatagatatgaaatctaaacacttagtcttttctctcaagatgtacaaggtgtttcgagattgtttcaaactttacaagaatatacaaaaaaactttttacataaagaatntgaacgatagcacgcaaaaatgtgtcttaggtctctaaagcttttggtattcataggccttcttcaaaaagtgtttggtgtctttaaacaaatagatttcttcacttgagctcgcgcctaaagtttatggtctgtggagcatttaatgcttgcattaaatacacgtccttcttcatgttggaaaaccattctagttggctttcatgttaacca

SEQ ID NO: 128362 - DNA, 435 bp, Glycine max
gctggatggccccctgaatcgtgttggcaaaggtctgagttatcaggacccaatctccgatatgaaactcttgatctccgcgatgaccatccgcgatagccttcatatgttcttgagccttaaacaacttttgacgtaataacgtgaatacgaattctctttggctcagcaattcatctactgcttccacttttgcagtgccttccacatagtgaggataatttggcggtgtacgaccaaaggttacctcgaacggagtcaatcccgttgccgagtgaacagaagtgttgtacgaccactccgcccacaacagaaatcgtcctcaagtcgtgggtttgcggtggaacaaagtgcacaaatactgctccaccactcggtttgcaacctccgtttgccatccatctatggatgatatgcagagctcatcctaagctt

SEQ ID NO: 128363 - DNA, 427 bp, Glycine max
  unsure (1)..(427): unsure at all n locations
atactagtaaatgaagtgacatgcataaaacatttttcatgacacatcaagggcattatgaatggcttgtcatgccatatgggctcactaatgcccctgctacatttcagtctctcatgaatgaggtatttcaatgctatttaatgaaatttgtactactctttctntatgacatacttatatatagtccaaactggtcagctcatttacaacatttggaaacagtgctgaaagtgttacaacaacataatttgtatgccaaattatccaaatgttcatttgggttacaagagatcaattacttgggccacacagtatcatgcaagggagtaacaatggatcaagaaaaggttcaagcagtcctgaattggccatatcctataaatctgaagcaattgagaggcttcctccgtctgactggatacta

SEQ ID NO: 128364 - DNA, 435 bp, Glycine max
tgccgcttcaactaaattgcaacgttccatatttttataaatggcgtaatctattaccaaagtatttgaatgttgaaactcaaatctaattgtgaagagtcacatattttcataaaatgctttgtgtaatcgattacatggttatgataatcgataactagtgacaagctctgaataaaaagtcaagagatgtaactcttccaatggttttctcaaagattttctcaaggttataatctcttcaaatgattttcttgatcagacatgaagagtctataaaagcaagaccttgacttgcatttcaagatgacttacaactcttacaactcttagaatttcttgaactacttttgagaaatcttgaaaccttttgcttctcatctttcttcttcttcctctgccaaagagctttctaaattttatggtttccaaacc

SEQ ID NO: 128365 - DNA, 378 bp, Glycine max
  unsure (1)..(378): unsure at all n locations
gctttccatcagctcttgataatcttccatatactcagccggtattaggcctcatgagcctttctcatatacaacagcttacttgggtgttccccttntatcatctaaattaaatgtatgtcattatgctcccttgctttccaagattactggcctgattcanggatggagcaagaagtctttatcttatgcaggtaagttagagttgatcagagcagttattcaaggaattgtgaatttctggatggggatttttcctttgccgcaatctgttatggatcgaatcaatgcttcgtgccgtaaatttctgtggggcaaagtggatattggcaaaaacaagcccttggttacttattcagtagtttggtctctgaaaaa

SEQ ID NO: 128366 - DNA, 365 bp, Glycine max
tttttggtgaagatgcctctccttgcaccctcttttcatgcactaatgactatcattattgagcagaatttcaacttcttgtccttgtcagtaggaagtaggctgctatatagtcattctcactgtaggcttaaaacaattacttttctaaaaaattttgtatcatgcattttagcgagtaaaaggaatggctctaaatggttttgctgaatttttggttgttgattgatccatctaaccaactcacccaatattttatgttggttttgcttccaatttataattaaaaacttttgtactagatattcataaggactcataccaccagtgctaccttttaacagaatttttatttagaagtttct

SEQ ID NO: 128367 - DNA, 322 bp, Glycine max
  unsure (1)..(322): unsure at all n locations
cccgtcttatgtggcactaggtggcgatcgggcgatggtgcaaaccaactcttccacttccacaaatcaaacataaacacgccatccccaggtggccaccttttaattgagctcacgcactcctacgtagcccttatcctcggtcctcttaacaccgggtccccatcaaccccttcaagcttnctcaatatccaaacaattcgatctcatttatcatgaaactaccctaaaccaagaaaacagagtagaggcagaaaactcttgccaaaactaatccaaataccacagttttccctactcaaataccccagtaaaattctct

SEQ ID NO: 128368 - DNA, 355 bp, Glycine max
aacatttcttattaggcaacccagattatctcgcgaaccgtgtgatcaatagggataaatatcccttggtgattaacttaatcacagtggagagtatcctagaggtgatcccatcactcaccattctgtttataaagagagagagagagagctcttcaatgaaaaagtaagcatccatccattttagatcgagaagaacatttggcgtttatcgtgggactaggcaaaatattttcctttgaccttacgagtctatggtatagatgatgagtttgatgatttaatccgtagcactggaagaaagatctatgatgcaccggtctaaagttgcactagaagcattacataacaaaaa

SEQ ID NO: 128369 - DNA, 424 bp, Glycine max
atcactgttattgtggctgttagtcatacagaaagtagcaccgaaagttgctaaacgaaagaaaatgtaagtctatgaatatgaaagtaaatacctaaggtcaattctcatgtcataaatatattataggcttgtaaaagactggctttactattagagtatacattactccctgatgtatatttgctttattcttagttagtgattgttatcactagtttgttaggactaactctaatgtagacttcattaacctcagtgcattaactacagttaagtgctaatgtgtaaaaatataattatagctcctcacctgagaacaattactctaatatatactgaagagtgttttaaacttgcttgttaaacttacatcaataagtttctgatacactacttgatcatttataagtctgagaatctt

SEQ ID NO: 128370 - DNA, 419 bp, Glycine max
agcctctaaactttattcaagaatgaagttcttataccacttgttaaacaagtgggctcagatatcttaagaaggcgggttgaattaagatattgcaaactatttccccaattaaaaattctatttcaatttcaatgcaagttgcaagttcccttataaatgaacttttaaataataattcaaatagaaaaatctgaatataaatataaatcaataataaatgaaattctgataccgatgacagatgtcgtaccggatgtcacgacatcacacttcagaacatgcagattatatttgacagtatgaacagattaaacaagttaataacacaagagaattgttaacccagttcggtgcaacgtcacctacatctgggggctaccaagccagggaggaaatccctaaaatagtgttagttc

SEQ ID NO: 128371 - DNA, 345 bp, Glycine max
  unsure (1)..(345): unsure at all n locations
nttcgattcattctatgtacccgtagtggtccacattgtgtttcggcattttatcctcgttttgtttactttttataccccctgttgacgtgcttaagccattttacttaagtcgtttctcgcttaacttaaaaataaaataaatttccaccgaacgtttgaattgtattatctattaacttcggttaaaataaattccgaccgttcggtcatgccgtaaccacgttggaaatcaaaaaagaggtaaagaataatataataatcaaaaaaacatcttttagtaaaataaagcggaaaatcaatcggacgttttctctttgggatttctcattcttaatcgaattg

SEQ ID NO: 128372 - DNA, 305 bp, Glycine max
tcgattggtcctgtaaatatccacacgcccgtaagtagaaaacaaatctttgagccaattctaacgaccaaaactatttactcgggtgtccgactgtgtctcctaaatttatgaagacacttggaattgaaaattgtatctctgagaaactcaaacgacactaactttggctcggatgtccgatagtgtccgtagtaaatcagacgctcgaatagaaaacacactctgagcaattcaacggcgttacttctgactgatggccgaatgtttccgtgtatatcagacgcctccattggaacaaaagc

SEQ ID NO: 128373 - DNA, 384 bp, Glycine max
  unsure (1)..(384): unsure at all n locations
tgccattaacctagggaattaaaacaaaattaatggctgagtgtaactgaaattgtggcaaccaaaagtcaccctccacagccaacaagtcagccaccatttggtctcccaaaaggctgatgcctaagttgccaattgggcccttattacaacttgaactacatcccttttagttgattaacccaaaacatatttttggtcagccaactttacaaggattgggccattatttagacaaactaaacactctaaaattgaaacaaagtggtgtcatttagtcctcctccattngggccatgatacaactcacaaccttggacttttctccttgaaacatgggcttgtattcaaatagtatggacaacacttgttgaagagctttct

SEQ ID NO: 128374 - DNA, 467 bp, Glycine max
agaaagactatcactggtggatgtgctagtctaatgatataagtctacaagtgtaggtactttatctggtccaagtttgagtgaaccaatatgacgtttgttccttccttattgcttcttgtttaactatgttattgcatgcttaaaagttatttttgaagagtataactctgatatttgatcaaaagattttatataaaacagttttattattcataaacactaagcaagaatagttaaaaccataatttcttataaaacataatctgagatcttgagagtaggttctgaatcagtaaaacgcaagacatttttactctaaaaatattaatttattccagtacttgtgaggaaaagttttactcctataagtcttatgatttctaaacaagaagtttgagaagtataaatcaaaaacaaagtacgtatgtgccgaaaaaataagctaattaagtgttgtatactat

SEQ ID NO: 128375 - DNA, 375 bp, Glycine max
  unsure (1)..(375): unsure at all n locations
tgcttttattgatgaccacagaagggtacctggagatatgtcgcgggggtcaagagaccttggggacgtcaggtggggtgctattgcccanaaccaagcttgaccaatcccgacccaacccgggcatagtcggtcagtgagaacctgtgatgtacctaagcaggcgagctcctggcagtcaacagataaaaggaaaacaagaccacaaagcaaggaggcttgtggtggctggccagctgtgaaacttgattgatatgtgagatatggtctctggtaatcgattaccaagggtgggtaatcgattacaaggcttaaaaatgaagacagggggctaagatggtctctggtaatcgattaccaggggatgtaatcgat

SEQ ID NO: 128376 - DNA, 474 bp, Glycine max
  unsure (1)..(474): unsure at all n locations
ngtcttgctaagcaagatgaccaaagatgtaatttggaatatcccaatggntaaaacatgaagacataagttatgcacctgcaattcaaagttgaaggcgatccaacgattaatgaattcgagatgatggtttcaccaaaacaggttttttaggtcaaacttgaaatctcacatttccaacataggtcaatcaaactccacataacctaacattcacaccaagcaatcacacacagataattccccaggtctttagactctcccaaaatctagaggtgaatctaggatctctatcatacattataccagatggcacaccatgtaatttgacaatctcactaatacatagggaggtcaactnttttaaagaaaacctaatattgatggngataaagtgagcttgattagtcaatctggtaactataacctagatagaatcgaaacctttgggggtcctaggtagtcctacaatga

SEQ ID NO: 128377 - DNA, 354 bp, Glycine max
tctctatcgatataatacgatctatatgcgatctttctatcctgcgcacttgatgtatatgctaaggggacaaaaatggtaatattttattgaaaaaggaaagtatttattatactagtaacccacaaattatttagtgcttgcttttataagtaattgaaagcatttacgagggtgcttaatgccccttgacctatttggttcttggtgcataggaaacaaaatatcattaaccaacatgtttgatgcttgaagatgatgatgtcgaccacatattacatacatatgttttttaaaagctggaaattttgcacaataaatacatattgtgacgtgacacactaaaaggacatt

SEQ ID NO: 128378 - DNA, 435 bp, Glycine max
  unsure (1)..(435): unsure at all n locations
tgcaacatgatcaagtacaagttgcactacattataataaagagttataaacggntagtaacacactatggaatactgaagtaaaaaaaaacactatgtattttcacacaacatttataatgaattaaaatttattaaaaatataaaattacaggtgaaacccattaaataaaaaattataaaattgtattttctaataatttttaatcaataataaaaaaatacattaaaaataatgtaaaaagtgtgttacaaaacgaatatcaaaatttgaataattctcggttaaataagtaattggaaatctgttggaaaccagttgggcccagaagcagctaaatatccatataattttgtagtctgataactggcttggatgttttttagatgcaaaagacatctaacaggcaataatttggtaagcccaataacact

SEQ ID NO: 128379 - DNA, 338 bp, Glycine max
  unsure (1)..(338): unsure at all n locations
cccaagcgagcttattttgttgcttcctctaaaaggcaccgccttctagaggaacttcctggataagcccaatgtgggccctggttgctatttacacccccttgtttacttaatacacccccatgcctcttttttgctgattctttctccgtgacgctaccgattatacgaatctcgcaacgatactcgttttctttccgtaatgttacagaaccttacggattatgtaatcatcccatctttggctttccgaatgttatggaacttcnagaattgcgcataatacttccttttgactctcggcatgtcacggaactttacaggattggcaacaatgc

SEQ ID NO: 128380 - DNA, 465 bp, Glycine max
  unsure (1)..(465): unsure at all n locations
ggagcttctatagaggctggatcttgagcttcttgagggcctttaatggtgggtttccaccatggagatgcagcggaagacaaaggagaagaggtgagaggaggcgccatccactatggaataagccatggaagaaggagcttcaccaccaagatgagcgttggataagaagcttggagaggaggcttcaatggaggaaaagaaagagggagagaaagagagaggggggagcacgaaattgaaggaagaaaaacggagaaaagtttaactttgagttgtgtctcacaagactctcattcatcanagttacaacaagtgttacacttgtttctatttatagactaggtagcttccttgagaagctttcttgagaaaacttccttgagaagcttctttgagaaaacttccttgagaagctagagcttagctacacacacncctctaataactaagctcacctccttg

SEQ ID NO: 128381 - DNA, 462 bp, Glycine max
  unsure (1)..(462): unsure at all n locations
atccttagagtcacccgcggcatgcaagcttatattattgaattataagtttgaggtgtttttntatattaaataaaaatgaaaaagttaaatcgtaagttttagattaaattgtgatgttaaatgtttatttatgtggttgtttatgatctgttagtgtaaaattttcttgatatttacctttcttgattgcataataattgatattaatggctcaacttgttctcagactagtaaaattacaataatgaattcatggacatgaaatcccttgtattaagcacgaatgtcacacaaacaattcttacaagtattgtaagacatactagaagatgttggaagtatggttatagacaaggtggagacaactaccattaaactctaaggactaacattaaactcatgaaatgaaaatattttttttttcttcatgaaaaagntatcatgtgaaaactattacac

SEQ ID NO: 128382 - DNA, 419 bp, Glycine max
  unsure (1)..(419): unsure at all n locations
catcaataagctcgtctcagggnagttgcgaagagcaataggagatattgtatgctaacagtgcatgatgactttctaatgaaacacccccgactgagtaaactaaaaaatatagcacaccattcaatatcacactctcattacctcctctccaccccatcaaaacctctgttgaagttgtcatccaagtctcattctttgaatcgtatatatgaattgagataccccattggacaaaatcctcagggatttgctttgatttcacaattgccacattgtaactgtgggatttcctgttcactggcattgccaatgcattgtaatcagaagattccaaagctggaggctcatcgaggttcctgtagcttttggtaatanggttgcacatgcgtaatatgctttttgtgtcattggtcatg

SEQ ID NO: 128383 - DNA, 461 bp, Glycine max
gcaagcttgagtgatatattgtgcctgcgaagttttttgttatcttcacagtcctctctgataactgtgcgaacctgcttgacaatccctccttgacgcacaaacattcagagacagctaagacgtttatgtgatacagcactgtttgcgaactaactgaagcgtcactcaccttagatataatgagcgctagcagctctactgtaccgcacttccctatgagtaacatctgctcacgcccatcgaccattatacgagaaagtacacgcgagccccttgatgtggcattattctctcctatttcttaacctctttgtcaccaatttaattaccgagtaactctaattgtcaaatttattatttagcgttatcaattgggtccacttgactaatctggtgttgttaatttaatttcaggataactataagcaattggcccgagccacattggacttgaagag

SEQ ID NO: 128384 - DNA, 187 bp, Glycine max
ttagaaagacatttggccttcttgtactttgttttgaatacaaaaacttaaacctggcgacactagcctggatgtactgggtaaaccctatttgattactgatcatacatctattgaagataaaacatttccgaataatagggctgaaccctgacaccctatggtatatgctctaggacaataattt

SEQ ID NO: 128385 - DNA, 356 bp, Glycine max
  unsure (1)..(356): unsure at all n locations
ctggaactgccagaggcaatggcgggacatggaatgctcgttattagcattgcgggacagggggtgactcaacctaaaccgccattcgtactggcgggatagggctgagtangagcgagaaaagtggcctcagtgcataccgccattcctcctggcaggacatgcctacgtgggcagtcccgccattggagctggcgggataggttcaggttgcggcattggagctggcgggataggcttggctcacgtgaaggctgcagtgtttagaagatagctaggctcaagcttgcagtgtttagggtttccagtttctgaaaagcctagtatagcatgtgaacgttaaaaaatcttgaaca

SEQ ID NO: 128386 - DNA, 307 bp, Glycine max
  unsure (1)..(307): unsure at all n locations
ccgcatgcaagcttgagaaattaaacgacataattttttactcatgtctaactgtgtcccggaatatatcgagacgctcgaaattcagaatagaagctctttcaaaatcaaacgacgataactttttactcagatgtctgaatgaatcccgaatatactgagatcctcgttattgataacggaagctntgagcaatatcaaacgataataactttttactcggatgtccgaatgaatcccgtagtatatcgagtaactcgtaattgatgacggaagctgttagaaatttttacgacaatacttttta

SEQ ID NO: 128387 - DNA, 471 bp, Glycine max
  unsure (1)..(471): unsure at all n locations
ggcattnggaattgcgagagccccactccatcattaggattagtacctgacatctcanacaaacaaatcaaacgtaacaagacaattatagttgttgtttgaatacctcacccactcaagtgtatcacacaattatggcttttctctaatgaaacactcttgccttttaccactctaattccccttgagttcttatgtaattcaagagattatggccacaacaaagaacaattcaccaatatgtgtaaggtaaggctagagagacaaggaaaaggttaaccaagataaaggctaacaatgtttttaggcacaaatgaaggaaataaaattcagaatntaggagattaagtaacaatccttcatgcaaccaatatattaccttaaagagaatattttttaagttcttcaagcatgaaccattcagcccaattatntgttttctttaatattgcttatatgaaagtctgcttc

SEQ ID NO: 128388 - DNA, 418 bp, Glycine max
  unsure (1)..(418): unsure at all n locations
agcttgtcaagtgagcttattaatagcattatgtctagctntgaatcacatctcattgcttatctgttaatagtttgagaatgaaaacataggtaaacgtgaagagagaatgaagaaaagatatgggtgaagtgtgtgttttttttttttattaactgttgcaacccttcaaatagacttttccataacagaaacattagaaaatatctttgtattagttacattagaatctcatatttgaacatgataactttctcctaaagtttaggcaacatagccttattttgatgaaccataaaactaactactaaagccttatgactttattgaccaagtaaaaaaaatagataaacaaaaatatctaacattcccttccttgaactgaaacctagtctntcagtttactagttgtgctttt

SEQ ID NO: 128389 - DNA, 467 bp, Glycine max
  unsure (1)..(467): unsure at all n locations
tctacttatgtggcanggcgggcttccttcaccttcttgtctccaacgcgaactntgaccattgttcttccttcccgcaatgcttcttttcatgtctgcctgagtgggcttatagcctaaaccatacttcccacgatttccttgagtatttatcaggctagttatgccgccgtttgtttttcctaaacccatcccgggttcaaaaccgttccccaacataactcgggccatcattaccgctgcatcggacagacaaggttgcccaaagagggagtccacggaggaaatgctgaccacctcaaaagactggaaagcagtttctaacgattcttctgcggcttccacataaggcatggaggatgggcaccttaccaagatatcttnctcgcctgacacgatgaccaagtgcccctccactacgaatatcagcttttggtggagcgtagaccgcacgactcccactgagt

SEQ ID NO: 128390 - DNA, 367 bp, Glycine max
  unsure (1)..(367): unsure at all n locations
tatctatattttctaatttaaaaaaacttcaaaaattgaaatgctttggtaaaatattcttttagctctcaactatgttttttaaatgaatttttcttaagaatagttctaactgaaaagcttacgtgcatttttntttacaagacttacgtacattttatagttagttcaagtaacatatataattaatatatggtcgttttatttaggggtatcgatatttattataatcacttatctaatcgagctcactatttattcatttatttattatattgagtaaaaaataattaattattcattctaactagcctaataattttataacttccaaattcttaattagtcatttataataaccaataat

SEQ ID NO: 128391 - DNA, 424 bp, Glycine max
  unsure (1)..(424): unsure at all n locations
atcaccaacagcanattccttatgaagtcttttctcatcaacatatttcttcatcacctgctgagctctttgtaaattacacttcaacttagctaaagtagcatctctaatcatgagctgatcttgcactgaagttgaatcttgcaaattaggagtgtatctcagtagttgaggaggttctctaccatataccacctgaanaggagtcataccaatactagtatgataagttgtgttgtaccaatattttgcccatggtagtaacttataccactcctcagggctatcaaatatgaagcatctaagatacatttcgaggcatttattgacagcttctgattgaccatctgactgtggatggtaggctgtggacatgtntaatgatngtaccactcatttanacaattgtggccaaaattgacta

SEQ ID NO: 128392 - DNA, 302 bp, Glycine max
ttaattggacacaagaggcccctgagagtatggtccacagcttcctcagctcggacaagatttgattaaaagcaaacccattcaattgatgtgctccaagattattcctatataggagtattaacataagttaaacgacaattttcattaaaattcacaagaaatcataattacggaccttctgttggcaaaatatatcaattatagcaccctttggagtgacaggcaatgattcacacctcttcaaccaacatttataatatttttgaacttagatcactccctagttaattaatctttta

SEQ ID NO: 128393 - DNA, 453 bp, Glycine max
  unsure (1)..(453): unsure at all n locations
ngatcggatgtaagaaacatcttcttcaaccttagtcattcttgactccatntcatngaagcgcatatccacttgcagttccaaagtatcaaacctctcaccaacaaagggttgaagaccatcaaacctttccaaattcttcataagaagagatgaatcttctccctcatgtccctcttcatcaatatttctagaacccttctttacccatgatccatcatgctccttaatataaccaaaggatgctatgactgaagcgcctataaggaatgatctcttgattggaacataaggttcagaatcaagagggatgttgaaatgttgaatgaagagggtaacaacgtgaggataaggcaatggggcattcaatcgcaatgccttatgcatgcgatatctaacaagatgtgaccaatcacattgttaaccttatgaaaggccacatgaaatggatct

SEQ ID NO: 128394 - DNA, 415 bp, Glycine max
agctttagccttaggtaaacatgttgctcattttgctccccttatctctcacatgtatttcggttttctgataaggaaaaatctaacccttcctttggaaggaaagttgtggtattaagaggagattttagaaaaatacttccaatcattccaaaagaaagaagataaggtgttgttcatgctagcattaattcataatattttttgcctttatgtaaggttcttactttaacaaaaaatatgagtcttcaatcaaggtcttctaatgaacatgtttctcaattgaaagaatttgtaaattgggtgttggatattggaaatgaaactattggtgagattcatgacaaagaaaatgccattgacattccatcttatatgcttattgaaaattcaggtgatcctatgtctactattg

SEQ ID NO: 128395 - DNA, 471 bp, Glycine max
  unsure (1)..(471): unsure at all n locations
nnttcctttgtcactgtgatttcttcttcaggggagtcggtgtctgacgatgtgattgattcagcctcattgttaatggaggtgatctcatttgaagacctaaacatgctcatctgacctcgtttgtgtctgcatgagctttgactaacctcctcggccatatgtattgcgcactctactccattaatcattggtgtgattatgtgttgtatcatggatcctcgaggtgttttgattagcaccctagctctatctattcttcgcatttcttccacttcaccatccacttccaccatttctcccattgctgccacaatcttcgatatgttttctatgttccatgcatgtaggggaacaccccaacattccagccacaccagtttgtgccccggtcgcatacctagggttcatttctctagtgaatnggaaaagtgacattcattgtcatcttcatttatgcatnattcctct

SEQ ID NO: 128396 - DNA, 322 bp, Glycine max
cacagaagcatgattgatttagaaaaacactctgtatatacatcagctggtttgattgaaagacccaacatttttacctattgctggcaattttactctctttcatttttactcgttctagcctaaacttagtttaattctgttctaaatcatcaatcatcaatgtttttttcacaaaagccttatttctgaatatctaagactaggatcctgagtgtgatacttggactcatccattttaagtttaaatacttgatgatccggtgcgctttacgacgaactggatctcccttgaacattatttgcttaaagaaaaagtgga

SEQ ID NO: 128397 - DNA, 403 bp, Glycine max
actcacttgtgggtgaaaaaacactgttgcatatctataggagaaatggaatgatgtatcatgatttgatatgtcaaagagaatcaacatgctcataaaatcaacaaggctcaattttgcttcatgattaatacaagattgtttcacaaacaaagccttgattcaagatttcttcaagatcaaaccttgcctcaaaatgaaaggtttcaagtcattcaaggcacatgtaatcgattaccaatacatgtaatcgattaccaatggtttgaaagtgtgtaatcgattacacatcatatgttaatcgttaccaaagactctgaacgttgtgaattctaattataaatgaatggtcacaactgttcaagaaaacaactttgtatcaattaccttatttgaattcata

SEQ ID NO: 128398 - DNA, 335 bp, Glycine max
catgggaccaactcatattattaatataataggaagtcgtatctagtcaaagacggaaagaccatactagtttcctaccgattgctaattatgggggtcactaagtctatcctatgctgacaacaccccagaagcccaagaatctctttcgcggtggagtatgagactgccattgacttggtcctgcctaacaaccgagacgtacttgactctcgttcttagtatgagctataccgcccatccacatggctgtctcttggcgtataagtaaacacccttccttaggccatttattcgctacacttgaacatacgcatcctccattctatgcttgt

SEQ ID NO: 128399 - DNA, 237 bp, Glycine max
  unsure (1)..(237): unsure at all n locations
atctttgaagaatgactggtgcgatggactaattgattcatggttgagagacactagctacaattgtgatgagatgatccgcatgatctcttgtgctgcagcttgtgtgtttatctcacacaagctaccgtctcgaatgagcctggtgagnttactgaattcangatatatggagcnccggcntcatgagaaatgtcaaaaacactcttataacaccacttttatcgcgaactcata

SEQ ID NO: 128400 - DNA, 391 bp, Glycine max
  unsure (1)..(391): unsure at all n locations
ctcttaacgttgggttttttagggaaaaccttttacctaaccccgccgcaagggatccctatcgcaccagatccaaatctagaacgatgggtgatcaagaggagacacaggaacagatgaaagccgacatgtcggctctgaaagaacaaatggcctccatgatggaggccatgttaggtatgaaacagctcatggagaagaacgcggccactgccgccgctgtcagttcggctgccgaagcagacccgactctcttggcaactacgcaccatcctccctcaaacatagtaggacggggaagggacacactgnggcacgatggcagccctcacctgngatacaaccgagcggcttacccttatggactgccgcccaactattcaccacccat

SEQ ID NO: 128401 - DNA, 457 bp, Glycine max
cttggagtttccaagtgccaattcatcttcttctttagtctagtcttcttctggcttcaattcatcagtgggctttccttctgtgtccagcatcttgggatgttcccagcctttgatgacagctttccaggttctgctatccagtgatttgaggaaggccaccattcttgctttccagtattcatagttgcttccatcaagaattggtggtctgttcactggtccgccttctttctccatgttcatcagaatttatctccctagatctcactctgtgatttcgagtgttggctctgataccaattgaaattctgataccaggggacagatgtcgtaccggatgtcacgacatcacgcttcagaacatgcagtttatgtgtgtccgtatgaacagattatacaagtaaataacacaagagaattgtaacccagttcggtgcaacctcacctacatctg

SEQ ID NO: 128402 - DNA, 360 bp, Glycine max
  unsure (1)..(360): unsure at all n locations
gagtacactgctgaagaatattcacgcttatgacagttaatttagactcctcattccatctgtgccaacttgcatatcctcttctgaaagcatctgaaaatggaagcattgtgtttatttcatctgttgctggtgtggtgagcttgggtactggagctgtttatgcagcaagtaaaggtgagtgctatactcatcaagtctttccttcgtatacatgtgattaatcaacttttatcacanactaagataattntaactttntgtccactgaattttcagctgcaattaatcagcttacaaaaaacctggcttgtgaatgggccaaagacaacataaggagcaactgtgtngtaccatggg

SEQ ID NO: 128403 - DNA, 436 bp, Glycine max
  unsure (1)..(436): unsure at all n locations
agctgacaacctgaaacgtcaatggaaagtcttgttttggtgaccgaaaattatatttattatttaaaaatatatntatcattttattaaaaaaaatgatgagttcaatatggggatttattagggtacgacaagtctcaatcaagattcatacagtgtttacaagtgtaattatcaaggttttcacattaatagcgatctttatgatttttatcagctaaactaatttttgttgggaattgaaaattatattattcttcaatttggaaggctaagaaatatgtgtatgcgtgatggtattattgtccaaggtgttgtaattgcatacttgcaacgtttcgacttccaaatacattgcttcaaaggaaatgtcacatgttggaaacaaaacagagaaataataatgtctaatactcagatgcagctttattaatat

SEQ ID NO: 128404 - DNA, 459 bp, Glycine max
  unsure (1)..(459): unsure at all n locations
agctntgaaggtgcgtagcccaccatttttttattataatactggtaacgtgtctactatcattgtcatcgtgttttcgtcattgaggtgccacttgagtgccaggttctccacctttgggcgtattctttgaaagatccgtgccccctttttagcacatgttttgtagttgcatcctatccgaagccattataccgaccctgcctaacgaaggcaaccattaggtcctcccaggaatggactcgggaaggttccaagttagtgtaccaggtaacaactaccccagtaagactttcttggaaggaatgtatcaacaattcttcatcttttgcgtatgcccccatcttccgacaatacatctttagatggttcttggggcaagtaatcctcttatacttgtcaaagtccagcaccttgaacttgagaggggtgatgatattgtgtactangaacaactct

SEQ ID NO: 128405 - DNA, 479 bp, Glycine max
  unsure (1)..(479): unsure at all n locations
taataaataccgtgctgagacatcaagacatacttattctataacaacaagggtttttgcaatcatcattcacttggacgatatttctagttcaatcaaatagggtcactagtcacaacagcaataatctctcaaccaaaacatcaagataaaaaacaggataatgcataacaattttaagataaaagcttgtcataaactggatgatccactaatccaattgacagaaaattataaatggatcatttttttttcttttactggaggagcttcggaatagattgactctctctaggacccattttattgacgggatttatcactacgttagcggctcagccggttactcgagaatccaaattattctatctcctgatgttagcaatgtatagtgggcaaataggagacatttcttctcaagacatattactctttntcatcatgtgggaattagaattaattcccggttatctactttt

SEQ ID NO: 128406 - DNA, 440 bp, Glycine max
  unsure (1)..(440): unsure at all n locations
tgcggattggtcttcgttggcaaaatgatcgattgtttctaaaaagaggcaaatctgatcatcatgctttgataaatgcaaaaaaattggggcaaatgaagagggtgagaatgagggagaaacccatgctatgactgccattcctgtacagccaagttttccaccaacccaacaatgtcattactcagccaataacaaaccttctccttacccaccacccagttatccacaaaggccatccctaaatcaaccacaaagcctgtctaccgcacttccaatgacgaacaccacttttagcacaaaccanaacaccaaccaagaaatgaattttgcagcgaanaagcctgtagaattcaccccaattccggtgtcctatgctgacttgctcccatatctacttgataattcaatggtagccataaccccagccaaggttcatc

SEQ ID NO: 128407 - DNA, 143 bp, Glycine max
  unsure (1)..(143): unsure at all n locations
ctcaccctggtcaacgactcataccaatgggtggagaaggaagtcgtcttcagacccaatctcaagacgtggcaatccgcggttcgcgatgggttgcttgaagcaggggttactccctacaacggnttcactctggaccacgc

SEQ ID NO: 128408 - DNA, 443 bp, Glycine max
  unsure (1)..(443): unsure at all n locations
tatcaccgntgtacctcttgattcaatgttttatgttatttacaatcctgaggagttcctctgccaagctttgaaaaatggcaggtttgatggacttattgattcaaggttgcaggaaactaattacaatcctgaggagatgatccgaatgatcacttgtgctgcagcttgtgtgcttaactcagccaagctccggcctcgaatgagcctggtgagtttactgaattcaggatatatggtgttttggtttcatgaaaaatgtcaaaaacactcttattaacttaaatttattggtaattattaattttgatggatcgtacgtttaaatcagaagagtgaaattcagtcaatcacaaagaatgttgagaagatgatattgctagtaatttctcaatttatattttgaatcttggctacttaatttgtctacaagggtatgtagt

SEQ ID NO: 128409 - DNA, 400 bp, Glycine max
ggacactatagatactcagcttaaccaaggagagatggaccatttgatgtgctcgttatattcactgactatgcttacaaagttgaactgcccggtgagtataatgctagttccaccttcaaagtctctgatttatctctttttgctgcagatggagaattcgatttgaggacaaatccttctcaagagggagagaatgatgatgacatgaccaagatcccgggcatggatccactggaaggacttgtaggacctatgaccatggctagagcaaggacagccaccgaagttcttcaaccagtgctgtccatactatttgaatacaagcccaagtttcacggagatacgtccgaggatgagagttgtattcatggcccaaatggaggaggactaaatgaca

SEQ ID NO: 128410 - DNA, 398 bp, Glycine max
  unsure (1)..(398): unsure at all n locations
agcttgtacgcactgcaagtctgcaacatttatttggcccacatgcatgtatttgttcccttgtgcaaaatctgattcttttaggctgacccagtagatattagtccaaaatgaaattttttatttttaactaaaaaaaaatcacacgtgaatattcctccccaactatttattntatatttaataatcaattaagattcaaatcttaaactactttattgagagacacaaattttccacttatgtcaatcgttattaaattcccaagtgctgcatatcaatccacataaacctacatggactacgggttaggtgaactgcaggagtataccaacttaatggagtaaggacctaaccaaaatctattaattntaggaaagttatcaacgtacacccta

SEQ ID NO: 128411 - DNA, 439 bp, Glycine max
  unsure (1)..(439): unsure at all n locations
actaagctccactataccaatttcatctaatataataaatgttatctctattttataaatttacatttcaatgagattttttttgaaattttaggaggattacaacactcactcatacacccgctcaattagttgatgttagaacaaaggatgaaagtttgaaaaaaaaaaggcttcaagtcccacatcgctcaggataaacacttgaatagtgtttcactccctatatatagagagctcatttcttctttcttccttgccccagttgagaagcatttcctcaacttttctttctccctcccatatttcagccgatgcatttccgacaaacttctccctctttctttctgtcgctctaaaattatggttggctntaagagagatgttttaagtcacatttttcgggtggcttaagagtgactttgtaagtcatattttt

SEQ ID NO: 128412 - DNA, 375 bp, Glycine max
  unsure (1)..(375): unsure at all n locations
gtctattaaattataaaatgagtttcgggggaccaatcaagtgcttaatctgcactgatgcagaaacaataggcacacacgagaccaaactaacatgaaggaattacttgatgatcggaaaaaccctttggaagtggttaagactaaactaaggtagaaatagtgattgatctcgaattccaagaactattcttgtttgcgtgtgtgaaataagacaaagttggttagggtagtgaaatctatgtgataattatgtgtaattgactnaaatgggggccatctaaactcactcatctagtgtgaacttaacatctcanagtcacccgccaaacacacaaataattaataattaatataggttagaagcaacaattg

SEQ ID NO: 128413 - DNA, 438 bp, Glycine max
tgctggctgattattctacccctccaacctatcatatgtcttcaactagtcaagaatccagcaatacaatttatagggtaaaattaaaataaataaataaataaaaagttacgaacaagctatatggtggatgaaagtgtatataatgtaaatcaacttgtaactatgtttcatgtgatcaaaactacaaattatggtgttgtttagtgataattaacctcatcacggtaagcctcaacagggtgcttcccaagatctttatggagggccttaaatatagcatcttcattctcatgaacaaggtctatgagagatgtgagctggtttttcctccatgttacactcttggtttttccagctttgaagtattgcctcaactctctcactggctcttccactacaccaccaatatccatggcaattgaactaccttggtct

SEQ ID NO: 128414 - DNA, 165 bp, Glycine max
aaatgaatctttgattttaccaaaatgaagtcaaacgaatgtcctccctactatttatttatattcatagcaacaagagtacgtttataaacggtgtgggagacaaaaactacacttaagggaaccgtataaaacccagtgctgcgatcaatccacttaacctca

SEQ ID NO: 128415 - DNA, 373 bp, Glycine max
tatatattatatattaatacattattacattacaaaaccgaaattaattgctcaactagcttaaattagctacattaatttatggaaattaattattattttaatgaactttaattagaatttgaatatttgatgaacaataatttaatctgagagaatttataaaaacaaagcggatatatatatatatatatatataccccggcttcttatcccaataaaatcatgagattattattttcttaaatgactggcttttctagaccttatatattaaacttaaattaaggtgttaagtaggatatttgctctctccctttcataaattctctaaatgtgtactctcatttctcatcttacatttcaatcatca

SEQ ID NO: 128416 - DNA, 412 bp, Glycine max
  unsure (1)..(412): unsure at all n locations
agctgggaacggttgttcaagatagatgggattgatagaaagtttgtttgtattgcaaaacanagccttgcttttatagactcttcatgtctggccaagggaaccatttataagagttatgacttttagaaaaaacttaaaaccaatgtgaaaaagtcaaaaaccatttgaagagttacatcttttgatttttttcacaaacaatcattggtgatcgattaccaaatcagtgtaatcgattacacataagctgtatgtgaaaggatgtgactcttcacatttgaatntgaatttcaatgttcaaaggcattggtaatcgattaccaaaacattgtaatcgattacagctctctgaaatcaattggaacgttgtgaattcatttgaaaacttattcacatcattttgctactg

SEQ ID NO: 128417 - DNA, 378 bp, Glycine max
  unsure (1)..(378): unsure at all n locations
atgataanatctatgttggatggaccgacaacagacggcattcttgccaaagcatcatcaatgaatgcatgcagatgataggctaatgcgacatacacgatcctatgttgagtaaacatgctatcatgttcatggttctttacaagatacaaccaagtacctcctgcataaaaacttcaataaatttatgggaagaaatcangaatgtgaaggtggcttcctaggtgaaaatcttagcctaaaggagtgccacaactacaagaatcaatacaatatggtggtgtctgttctatacatggtggtggtgacaatattgtaaaacttgagcatctctgcttactctgtatggacaatggtctagcttggaggttgcctcat

SEQ ID NO: 128418 - DNA, 409 bp, Glycine max
  unsure (1)..(409): unsure at all n locations
aatatcttatatcaaatgtcttttatttaaacaagtggcgtaactttccatgagaaccttcacccataaaagaagctgagtcaaagttgtttgtagctgctacaatctcttctagtgagaaagctcgataaggaggcagaccaattgttctgaacttgattgggtgagatatataccctttagctgctacaatctcttctattcatatntagagtttaactctatcctatgttcaacaaatcaatacattttagcgaaaaaaaatattaagagttaaattcactgagaaaccaaagtgatgacaaataagctatcttacccggcaatggatcccatatgcctagagaaaccatagtgaggaatttcaaacttggaagcctaaccaatgttgtgacacaagaatctattg

SEQ ID NO: 128419 - DNA, 388 bp, Glycine max
  unsure (1)..(388): unsure at all n locations
tcggcttcataacagtgaacaacctaagggcttgcttcaaatgtgaaatgagcgacaggttagggttcaaaatagtgaactcaaatgcgaatgcagcttagggtgttcagaactaaaattttattttttattttttttcttttttattttgatttacaatggttttttaatataaaccggcgtaaattttattacacaaaacattctaaggcggttttcaataaccgccttagaatgtgcgtcgtggattccaaattttagcacaataattacaaaattaccaccgtaccactttctaaagcggttcccttataaccgtggtagaaacgatgtcgtanaaaggctcttttgtagtagtgatagtgtggataatgattgaaaaatctta

SEQ ID NO: 128420 - DNA, 470 bp, Glycine max
  unsure (1)..(470): unsure at all n locations
tgcatgttgcattcttaatagagtaccttatattttattntaaaaaaaaatctttattagctatggagaaaaagagaaccaaatatgaaatatcttaaagtgtgggatgtgtaagccggtttgggccaatttatctgattttgatattattgaccggtttttgcggatatgccgaaatttttctcattattacaatggatccgcaaaaaaaaaaaaagagtttgtatcaaataagatatatactttggctttcttgtataaaaactttggctcgtaagtacaaaagtactgcatgcacttttttttgaaaagattatggtcagaaaaattattggaagaattctcaacagaagaagaagaaactttntttttatttttccaagaacttcttttactttgcagaggttatatagaggtcgngattggtattaatatccctattaataagaaaaggaaaattganaaaaatg

SEQ ID NO: 128421 - DNA, 367 bp, Glycine max
cagatatcttaagaaggggggggttgaataaaatatacaaactatttccccaataaaaatctatttaactttctattcaagttataaattcccttaataatgaatttcttaaatattgattcaaatagaacaatttaaatatgaatataaaacaataataaataaaggagtttaagggaagagaaaatgcaaactcagatttatactggttcggccacacccttgtgcctacgtccagtccccaagcaacccgcttgagagttccactatcttgtaaattccttttacaagttctaaacacacaaggacaatccttcctttgtgtatagaattcttttacaacaagagaccctctgtctcttaaacc

SEQ ID NO: 128422 - DNA, 466 bp, Glycine max
  unsure (1)..(466): unsure at all n locations
catctcagagctctgatgctaactttttattcaaaagttggagaatttgcttgaacaccttgttgttgttcttaaagtgcagcttgcagaagatccacaaattaatcaagtcttagaagctatagatcaggaggtatcaatatataagccaacttgttcaaagatttaactatgatatgatactctacaaagaaaaaacattgttctaattnaggtacttacaaatggttctactagtaaagatcatcaaactacaaacgatctgaactagaggtgagttgaaatttaataattaatatattgacgatatcatttctgttagcatatggtatagctcggaatgtatccgtactatctatgtatatcataagttgacatctaataattaacatgttgaacatattgttatttcatgaacatggtttagatggtgaagatgtgagaatgctttgatatgaaagacata

SEQ ID NO: 128423 - DNA, 469 bp, Glycine max
  unsure (1)..(469): unsure at all n locations
ctgcagctgaaacatgttcgatatatattttttctttctttttgcttcaatacgcagcccttanaactagtaaggactctacacattttggcttctggactttcattgacatcactttcaatcaatatcattaccagctggatgcatctaaatccttggttgaatttgacaatatactactcatttggtgttctattggctaacagtgtaaacttaaagggggattttactattggtagtttcatgattataagaatcatggataactcttctaagaaaaaagaggaatcatggataactaaattattcaaagttgtttattnttgtaacaattacttcaaaaagttatatttacatgattcttctaattgatagatttctgtgtaaatcttaacattaataatatgtcaaaattgaacacaatcgataaatntaaaattcaactttttattntattaattatatatat

SEQ ID NO: 128424 - DNA, 452 bp, Glycine max
  unsure (1)..(452): unsure at all n locations
gggcgttntaagtttacactcttatagagctaggctagtattcttgtattaacagcaaaacaaatataggaagttattgagtaatctcctccaagtccaaccacaaattaggtatgcctgctttgatgtacctctcagagagcaatccttctattttctcaagtcttgtactctggcctccttctcttcttaaggcctatgcaaggctcaatgtgacactctctatccggacatatatataattaagaaaaacatataaaaatttggaattntaattaaatcaatttattcaaatcacttaaacaaattcatgtaggtaaaaggatcacattcactttactgttaccaaataaaacttattaaaaacatctccgactcagaacaaggttgtccaaaactccaaagaatgaactaaagattcatcatatgaaacanaatgataaaaactaaat

SEQ ID NO: 128425 - DNA, 208 bp, Glycine max
ctcctgagaacgctccttcttcttcgacagtggtgtacttcttttttgctgagagggcctcgatcactttgagcatcgaaccacaaacacccattttctcggagaccctcttcgggggaacatattattattaaattacagtgtaaattcggattgtgttatgaataataaaattatatgttcggggaaatcatataacgatatatat

SEQ ID NO: 128426 - DNA, 480 bp, Glycine max
tactcagctacgctacgcgcacttatagacattggctggttattattaatcgcgaggcatattagctgccctggatagcagtacattgaacattcgagtagccctatccatcaaaagatcaaatctttcaccatagttgtttctccacaatagtccaggtaccagcgtaacattgactttcagcagaaactacaaacagaaaacaatgatcacaacattgggccaagcaaagcacataccttcatctgatcaagaattgagtttgtcccaagcaacacataacgcttctctggatgatctttcacccatttttctgcccatgtagacttgcctgaagctggtaattccaccatcattatcacttcgcaatccctatgttcagaaaaagaacggccgatcactatgtctctgccctccacagtggaggcccagaggttgaacccttcttaggaacaagtccatctcgacactgaactgatc

SEQ ID NO: 128427 - DNA, 350 bp, Glycine max
  unsure (1)..(350): unsure at all n locations
ggatttttctcctattccgcatccctgatgatttatgcgacaaggttctaaataccctaattnttcaatattgtggttgaaaacaacgagaggagggtgctggagttggttaactgggatccacttctagcagtgaatgccttaaagaaagagtttgttgttgacgacgattccgcgaagagaaagttangtttttggtgaagtatgggaaggattttggatttggaattggatgatagtaggaagcttaatttgctcagcgcgcttccttcggtgtctcgtattcagagatctagaaaataanttttatctcctaattaatgaacttatataagaaaatagtgcctcta

SEQ ID NO: 128428 - DNA, 417 bp, Glycine max
ggagaggataatgaaacaactattttattctctctatgagaggttggatcacatggagaatagagatcataatgtagaacaaaggatgagaatatggaatgatggtgttcctagacaaaaccgaattgatggtattaaactcaacattcctcccattaaatgaaagaatgatccggaggcctacttggagtgggagatgaaaatatagcatgttttctcattccacaactatgaagaggaccaacatgtgaagcttgccgccacggaattttccgactatgctcttgtgtggtggaacatgctacacaatgagagagccagaaatgaatagcccatgggtgatacatgggcggagatgaaatgatcactacgaagcggtgtgtgtccgctacttactcaacggatttgaattcaagc

SEQ ID NO: 128429 - DNA, 355 bp, Glycine max
agcttatcaataacatcaatctttgctttttttctctcaattcctcttctagaaatcttgtgtcccagcatgatgccttcttgaaccatgaagggcatttttcccagttgagcaccaaattcgattcttcacaccgttgtaacactttttctagatttgctaggcaattttcaaaagatgcaccaaagatagagaaatcatccataaagacttcaatacatttctctaccatgtcagcaaaaattgccatcatacatctctggaaagtagttggggcattacataaactgaacggcatgcggtgataagcaaatacaccaaaggggtatgtgaaagctgtattttcttggtcctg

SEQ ID NO: 128430 - DNA, 432 bp, Glycine max
  unsure (1)..(432): unsure at all n locations
gtgaaatcaggtgcaaccatctccctaatattcctctcacgaggtggaggttgagccacgttctcagtatgaaaattagtagtcgaatgctcaaaatcataatattcagaatcaccagcaacaaaatactctgaatgctcaaaatgctcacaatgctcaaaatgcacagaattatcaggatgcacactatgcctaactaatctatgaaaggttctatctatttcaagatcaaagggttgtaaattacctggattgcccctagtcatgcactatatgcagcaaataatgtgttctcaaacaagcactaggggagggttaaaactacaactatagtcaaatgatatccaaatgagttggaattnntgtagtaacaccctataatcatgaaaatatagcacanaaaaatttaaacaaaaattcaaagtctaacta

SEQ ID NO: 128431 - DNA, 443 bp, Glycine max
  unsure (1)..(443): unsure at all n locations
agcttgcaacaatttcatgagatagagttttgtattaataaaataaaagcctcaatattaccattgtgtgttggaccttcagcttaattaatcccagaagctagattctctccacattgaaatagcatgaccactataacacccaacaattttgatgcatttcatgtgttattcgattatttgattaatttggactagttgaactattgtgtgaattatccgtgcgcaattgcttggtgtggatgttaggttatgtggagtttgattaatttgtatcggaactgtatgattttgagatttaccccaaacttgtttcggtaaaaccacgatctctgataaaatgtacatgatttagaccttttatttatccataaagaacttgntnttcctctttctttttcatttctatttcccctcatacccctattaaaaatagagattta

SEQ ID NO: 128432 - DNA, 419 bp, Glycine max
agatggaccatctcaagtgcttgtatgtttctatgacaatgcttacaaagttgagctgcccggtgagtataatgttagttccaccttcaatgtctctgatttacctctttttgatgcagatggagaatccgatttgaggacaaatccttctcaagagggagagaatgatgaggacatgaccaagagcaagggcaaggatccacttgaaggacttggaggacctatgacaagggctagagcaaggaaagccaatgaagctctacaacaagtgctgtccatactatgtgaatacaagcctctagttcaaggagaaaagcccaaggttgtgagttgtatcatggcccatatggacgaggactcactgacaccactctgactcaatttttagagtgtgtattagtctatactatggcccaatc

SEQ ID NO: 128433 - DNA, 431 bp, Glycine max
agcttctactttctctagagaagaattcattattataattaaaaataaagaaacttcattacccgttaagaagcgacgatgaagagctaataagggttggttgtgtgattggacgaaccctcacctatgcactactctactatgtggaggtcctcattatgtccatggacgatctccttcagtcttcactttcttcgcacctcaaaattggattgcacaattactccaatccaatgacttatgtgtaagtaaaattatagaaaaaaattggattagagtaactattggaaggtggtgtaaagggtgaaagagagaagaattcgtcatgaatttaaatctttcgctcacaaaaattaataaactaacaactaatatttatgtacgatcatgtgataagagtctaacggaagataaattaaacatataagtga

SEQ ID NO: 128434 - DNA, 435 bp, Glycine max
  unsure (1)..(435): unsure at all n locations
actcagcttcttgatggtcgatttctgaggggaataagttttattanataaataaacagcaaaacaagataaaattcacatttttatgcttttattttaattcaaatcttttaactcaattcactttatttttttcgtttcttttcactgtatctcataagctacttccactcttttcacatacattcagaagaaattaagttgcaactttcgctgtacgtaacaactccatgacctttggtaaatatatttagtatgctaaatatgaatgtaatatattagttattataaattaatttaaattattatttatcattcaaatttagtttaaaaaataaaacaacttttagcattatttatgtatactatttttaaaacggtattatgtcatgtctaattaataaggacctacacatattaaatgtcattatttta

SEQ ID NO: 128435 - DNA, 390 bp, Glycine max
  unsure (1)..(390): unsure at all n locations
ccggatcttaagcaccgcggctgcagctgcataaagaaatgtatattattaatgaactnnccatncagcaacagaaatttgttttatttgtaggcttaaatctgttagatggctgttcaacttgaaatctcaaatttctatcttacatcttttatttgacattatgtaacaaaagatgcaactgaattttttaccaaacgttatatcagagatgggcattagttggttatatattgcttgtctggcgcaccacagattcttttntgatttctctttgccatagattagacttgttttatatagttttggtctgctctagttaaaatcagtattatacttgcataagccatcaatgaactaaaacattacaattgaaatgtacaacacatg

SEQ ID NO: 128436 - DNA, 445 bp, Glycine max
  unsure (1)..(445): unsure at all n locations
ngaaatgaattaccatgtcaaatgagctctaattacgctcacgcccaaaagagttacaagtcatgctcaaaacacagatagcaaacctccttaactctggagtttcgtcaccaaacatctcccaccattctccaagttgcataaattttctagtgtctttttcctctttcatagagaaaatccctctagcaatatgaaactcaacaagttgcaaattaatntttttcctttctgcacaatccttgaccaatcttctcatacacatgtgcacccattctttcacctgagggtcatcatgtctgagactacgttcataatgcagaggaggattaagataatatgtagctgcatgcacaggcttgtgaagctaatgatcccacctctcatcaataattctccaaacaggctcatagctacatagtccatagatatcaaatatgctata

SEQ ID NO: 128437 - DNA, 410 bp, Glycine max
  unsure (1)..(410): unsure at all n locations
agcttatataaaancaatncacttcattttttttcgtgcttagagaagtacacaagacggtggacagagcattgacggtaagaatatcaagaatacgatcctttacttaaagaggactaataggatgctagcgcacactctcaattgatactactgactacgcgtttaagatatagtgngtgacagggatgagggaatagaataacgcatatgaagaattataaggagaaccggtctgatcgtgaggcggaccagaattatgtttatgtaagagacatgccttccatgttgacactgcagaaaattaaagctgacgacagttttatagataaattattaaagaattacttcaagcatgtaggcctcaaaatttacgttaccatgcctttgattgaacacatttactataa

SEQ ID NO: 128438 - DNA, 327 bp, Glycine max
gtttggatggtaaaagggcctgatattaagaccaggttgagaaggttaataaaaattaaaattggctggcccgtgaggaataccttgcacttaggtagcataaaaaatacctttcaacggtatgtatatatgtgaatgtatatggcataaaaataccttgcaaagtgtgaatgaatagtaaaaaatgcctttcaaaatatgtatatttgtggataggtagtataaggagccttttaaaaaatgtacccatgtcaaaaatggcacaaggatgcttcccaaatgaatatatgatgtggaatcgcccctcaagtgtatatagatgacatg

SEQ ID NO: 128439 - DNA, 386 bp, Glycine max
gggctgccacgcagcgacgttctttgttttctggcgcccggaagggaccacgatcggtcatggtggtcaccctatcccccacttgcatccgtccctttgtacctacaagtaggaaacaaacaatgtacgaccaatcacgaccgggtcattgttctaccttggatgatttctgccgtcaactggtctcgacttctgaccgtggactaagataattcttgccctgttaccacaagatatgcatgtgtatgtgcatgtatgaaagttcctaatgcgatgatttacttagtgaaggctggttagattcaagtttaaataagcatttggggaaccccatgaaccgacgcgagagggctcacgttataacatacctaatacacaaagtttga

SEQ ID NO: 128440 - DNA, 304 bp, Glycine max
  unsure (1)..(304): unsure at all n locations
attataaattttggctactaaagaanatcaaagaagaaaacaaaatacctgaatatcctcccatatcaaatccttatgagcagcagggacttcctttcaggtctcgtatgtcacgttgaccttatcacgagcgataatccccaaatatgttcttaatttcttcttgtggggaccgtcggccttgccagtcataagatcgatgtggaccactggtctcttgcccaggtggtctagtggccgaggatcatagccgtgtcgctttgtgtgtctgcttcaaggtggacgtangcactgatgctactgt

SEQ ID NO: 128441 - DNA, 485 bp, Glycine max
  unsure (1)..(485): unsure at all n locations
tcttgcgtagccgctcttggagctcagaaaatcccaaaaacaaatccctcttattactagctattttgaattctttagttcctgaatgtacaaccttcaaattgttgctcattcccctctttgttttctgcaaaaaagaaaatcaatatcaaagaaaacatggatgaagccctaaggatgccatgtacatgtgtatttctgaagatatagtatttatattccatcaagcatacattgactgctgattacatgtaatagactttttataacatggttgccccaaatcacaattaaaaagcacaactaccaatctttcagagtcctttggttaatttgtcttgtctccttctgtggtggggttttaattaataatattatacttttgccttcaaaaaaacacttatgactaatccttttttcattaatcctatnnttgatgttattggatacaagatcatgggttctccacctgcctccactcctcc

SEQ ID NO: 128442 - DNA, 387 bp, Glycine max
  unsure (1)..(387): unsure at all n locations
tgcagcttgagcctggactcttatatttttttctttcttctgaatttgaggcgcggaatggaaagagaaaatgatggaaccccttcaggagaagatgagtctagaagaagctcgccgccataggaagccatggataagagcttgaaggtaggagaagatgagtggagggagagggagaaaatgagcatgaaattttgtgccttaaaagaagtttgaactttgaagtttaattcttaaatgatcaaagttgaaaaaatgcacacacatgtcctctatttatagcctaagtgtcacacanaattggaggtaaatttgaatttttattcaaatttcacttgaatctgaaattgaatttgtggagccaaaatcttactaattatgattagt

SEQ ID NO: 128443 - DNA, 461 bp, Glycine max
  unsure (1)..(461): unsure at all n locations
cctctntgtctattattttattttagctctgccacatgtccctatttgattggagcaaaaagggcccactttctctttttgactgtgacccatactcagtcacagaagtgagaaaaatctgacctttgaaacgctaaaatcctgcctcggtttgcgtgccgattctctgattccagtttctcgcgtttctctgcgtccgccggggccagttttcgaaagcaagcaatatatatatcaaaacgcacagaataaaaccccgagcgtggtttagaggttggtttcgttaacttttaagtcgcacgcaaaacgatgaattttttaaactaattaattaggaattaacccataacctcccagttatggatgtctcttccttaattagtctaacccgcgtatcttgcccctactattcctacccttaccaagaacatataggcatagacactgaataatacttatat

SEQ ID NO: 128444 - DNA, 333 bp, Glycine max
acgtttaacagcaacactcattggtcacaagtaaccacacttcattagtgccgctactacactccattatatagcgtttaacaagattctttaaattcactttagtctaagctttatgttacttcatgtgctttggtgaagtacctatgctttgttcaatcatgtgctatggtgaagtacctcccgctcgcttgctcaatcatgtgctttggggttccaactatatgcaattgaggtttgacccatatttagtacattgtatattgcccattgatataacatgaagtcatgaacgctttaatcacaatctcattactgctaacatcggttgat

SEQ ID NO: 128445 - DNA, 418 bp, Glycine max
  unsure (1)..(418): unsure at all n locations
tcacctttgttagagcaaaagaagctgaagacaacacacttgtatctccctgatcaccaactccagagcaattcttgattgagatagaccttagattgggacacttcccaatagcttgtataccttcattgccaatgttaggacacgactctattgataactcaaccagctntggacagttctttgcaactgcaattaaagtcttgtcagaaatattaggacacttgcataggtcaagcttctctaaccggtgacacccgctagcaatctcaatcaagccttcattatcaacagtagcaacatcccatagagagcaaacctctagagaagggcacccatgagcaattgccttgagacctacactagtcaccccacgatctgaattgcatccacgaattgtaagcttccccaaccctcc

SEQ ID NO: 128446 - DNA, 221 bp, Glycine max
agcttctcgatatattatgcgcctgaatttgtcttctgtgtgacaagtcatgaccatattgatttctcgagagcattcgatgttcaattccgagcatcttggatattatgcgcgctgaatttgactatcgagtgatcagaattaactcattggatttctcgagagcttccgatgtgcaatttcaagctccttaatatattatgcacccgaatctgacttcc

SEQ ID NO: 128447 - DNA, 449 bp, Glycine max
  unsure (1)..(449): unsure at all n locations
cttgatgcaacattnggagaggttaatgaaacaacgagattatgcgctccatgagaggttggatcaaatggagaatagagatcataatgaagaacaaaggaggagaagagggaatgatggtgttcctagacaaaaccgaattgatggtattaaactcaacattcctccatttaaaggaaagaatgatccggaggcctacttggagtgggagatgaaaatagagcatgttttctcatgcaacaactatgaggaggaccagaaggtgaagcttgccgccacggagttttccgactatgctcttgtgtggtggaacaagctacacaaggagagagcaagacatgaagagccaatggttgatacatggacggagatgaaaaagatcatgaggaagcgcgatgtgccggctagttactcaagggacttgaaattcaagctcccaaaactaaccc

SEQ ID NO: 128448 - DNA, 447 bp, Glycine max
  unsure (1)..(447): unsure at all n locations
tgaacgaatataagagacatcttctttgaccttggtgtttcttgactccatctcattgaagcgcatgtccacttgtaactccaaagtatcaaacctttcaccaacaaaggcttgaagaccatcgaacctatccaaaatcttttgaagaagagatgaatcttctccaccatgtccttcttcatcaacatgtcgagtaccccttttcacccaagagccatcatgctctttttgataaccaaaggatgcaatgcctgaagcgcctattagaaaggatctctttattggaacataaggttcagaatcaagaggcatgttaaagcgttgaaggaagagggtgactacatgtggatatgccaatggagcatattatcacaattccttatgcatgcgatattgtattgagtgtgcccaatcaatttgtcagcctttatganaagcccacataac

SEQ ID NO: 128449 - DNA, 359 bp, Glycine max
  unsure (1)..(359): unsure at all n locations
cttttaaggccgataggtcggccttcatctgntcttacactccctcttcattatccattctctggatcaagtgttatacgggtgcctttgcgctttcttagttatggcgagttccctaaagaaacaaacgatggtgagtatgccaccaaaacatgaatatgctaatgaatgatcagagcacttggatccacctcaaggccctttttagataacgtgatgagtttcacaacttctcgctttataaaaaagaacaaagctcttatctatccaagatcatactaaagtgttacaatagaacctaacgtgttctaattatatgggccatcaaatctatcatgtggtgcagttaatgatagccc

SEQ ID NO: 128450 - DNA, 411 bp, Glycine max
  unsure (1)..(411): unsure at all n locations
tatgtatcacataagtcatatgtcatcaaaacatatttcttatcttttgtctaagtcactagcatctagaagtcctaattctcttctaatggtgtagaaagaatctctgggtaatggttgtgtgaagatgtctgcgagttggtttttggtatctacaaattctagaacacagtcacctttcaggacatgatctctaagaaaatgatgtctaatttctatgtgcttggttctagagtggaggactgagttcttagatagatttatggcgcttgtattgtcacattntatgggaatatggtctaatacaatcccataatcagatagttgatgtgtcatgcacaagatttgtgcgcaacaactatcagcagagatgtactctgcttttgctgtggataatgctacactattttg

SEQ ID NO: 128451 - DNA, 406 bp, Glycine max
  unsure (1)..(406): unsure at all n locations
ggatccttaagcaccgcagctgcagcttatatgcaaaagtggcttagttgctcatttgaactccgaaaccttgctgaagaagtgactaaacttacttatgaaaatgcanactgagtggtgatctggaagctgcaaaggaagcctcttgcaattcaaacttttctccaacatcttcatatgattgcaagcaaaatattaataatagttttcaacgagatgggaaatcgaaaaagttggggaacgaagttcttattgaggacttgcagaaggaccttaatgctagactccaaagagaagctgcattagaagcagctctatctgtgaaagttgaaatagaagatgacctaagaagtacacttgatgaaataaaacaccaacaacaagatttggaatatgagcttacaaa

SEQ ID NO: 128452 - DNA, 206 bp, Glycine max
tctagcacaatggacttaccttgaattaattcctttgttattccctctgagcctatgttcccctttctttgttttgaaactcattacaagccttaagtgaaaaaccatgatatcaccttacccttaaggaattttggagctttggaattgttttgggaataagtgtggggggggggggggggtcctttcttccaatttctcacgtg

SEQ ID NO: 128453 - DNA, 251 bp, Glycine max
ttagcaccgcgctgaagctatattggggtaaaatttgtttttcttccatatttttatagagactaattgatatttactcagattggttccgacccccacaaaactagagaatagcacgttgacaatatatgtttaaaaatgtcccaaaaagttgctgcgtatttaacaaaaatccgccctgcacattcacaaaaataacggcgtgcatgactatgttgcaataagaaatgtattctagtattttactgtgg

SEQ ID NO: 128454 - DNA, 298 bp, Glycine max
  unsure (1)..(298): unsure at all n locations
acactatgaaactacgctcggtatgactggcanatggatgttattccttgctgttttgtttctacatttactcaaacactcatctgtcctttttagctggttgcaggcttggtggttttctcaaactacattctgccaggtgtggcttaaaagcagacagtatgttgtacaaacatgtttttctttttctttagggtagtaaaccttatgagttgtgtaattcttaccgcattcttacctgaagattgactaacctaaacgttagttacagtattaagctactttgtctatccatgtt

SEQ ID NO: 128455 - DNA, 401 bp, Glycine max
  unsure (1)..(401): unsure at all n locations
agctataganactcgagcagaggcatttataatttgattatatccttcaattaattcttctcttgattcaaatattacctcttcacaattagagttgacatgtcatcagactgagagtcctcatcatctgaacttgcatccaatgctggttttgctttactggtggaagcatcatcaatcaaacatagattggcttcttcttcactgtcttcgttagaaaagtaatcatttatgtcctcccaagtgctcatgaggctcttctttttggacttgaagaatttcttcttcttttcctatggctgttcaagatcaggacattcttacttgaagtgtcctggattnttgcactcatagcagatgattggactcttctctttcttgtggtatgatctcttagacaa

SEQ ID NO: 128456 - DNA, 430 bp, Glycine max
gacacttagaaactccgcttcaccacaggagaagtcctttgcaagattgttctttatcaatgataatgcttacaagatagatctacttggtgaacatggtgttagcaatacttttaatgtgtctgacttatgtccttttgatgtaggagatgaggatttcaattctaggtcgaattcactcaaagaaggaggggatgatgagaatcaagcaaagaacaagggtattgaatcaatacaaagacttggtggaccaatgacaagggcgtgtgcaaagaaatcaaaggaagtcttgaaccaaatggtggcaactctcattgaagcatattcacatctagaaggattaaagcccaagttggtcaactacataaagcaacttgaggaaataagataatggactgatctggatgatggcccatgaagatataatatc

SEQ ID NO: 128457 - DNA, 263 bp, Glycine max
ccatgattagcgtatacactagccttctgaccaaacatcttacctggcaagataactgcatcctgtgcttccatataaagtggaatgagtcgtggcataaattcaacccggaacttaaataaatatcgcttgataccctgcttacattctaggagagcatatagttcaatgctaaatctaccccaaatagggggagaaagtcaatacaatgcacgaaaaaagtgaagctcacccaccaacaaatacgtgctgtaaaaaaaaag

SEQ ID NO: 128458 - DNA, 470 bp, Glycine max
  unsure (1)..(470): unsure at all n locations
ggtatgggcacactcctccttccattgttgacttcaaaatgacccagttccaaccattgtgtcacaatacctgcaacaacgtgcccaaatccttaatacaacaaaggataacctttgcttcatctgtcagagtatggagacacaagctaacaaacatagtaggactcttacctttgttgaaggagaatgagtttggcagaaactccaaatgtactaccaaaccttggtcagaagccaacttgccactaagtagaggcctcatttccatgggacttttcaagttaagtgtcatatagggacaatggcgtatgaactcactcttctaggctctgcttggattcatcctatggtgcatgtttccatacttcaccattacaatgaaccaccgctgccgaacctaccattcttctcacatttctcagaggatttaatcacttaacccaactcaattgtntatacccttactcatc

SEQ ID NO: 128459 - DNA, 328 bp, Glycine max
aagcctcttattttattttctcttcggagctacacgtagctgcttgcgttataacgctgcccatactcatgttacccccgatcttcactaaggctgagttgcacgttaccaagacacttattacatgatcttgtccggtgggattttcgagaagatgtcaggagtgtgctagactgtctccgcacctgagagctatgctcacaagacgtcttgtgccctgtatctaaatatctagagaaaacgccacgcgcttcgccatgttgctaccaacccacatccactgctattgctacgctttttgagtattacaagatcgcatcaatgtttg

SEQ ID NO: 128460 - DNA, 478 bp, Glycine max
  unsure (1)..(478): unsure at all n locations
tcttctgtacaaaggggtaagctggagatatattctttctttgaaaaaccaaatactaaaccaaggtagtttgagcttttgtacctactaacatttgntaatatttttatctatatcatcaattcgggatccttattttttaatttactgcttaagtttttctatattttaagatatattatgttaattcttggagttaattttaaccattgagtaaccattaatgattaaatcttaaacattgattagactaaaaaattgattaatattttcttaaaaaataagaatctacaaaaatacttgaaaaaaaaattaatataatgatcgttaaagtaaaaaatatattcttttatcactatacttaatgtttatttaaatatttaatgtaaaatataatattaatataagctgtattaaataggagttataaattaaactttattcttctttaggttattatatattcataatattatat

SEQ ID NO: 128461 - DNA, 399 bp, Glycine max
tctaagctatacggatgctgactatgcatgatcaataactgatatttttccttcttcggatattgtacctttctaggaggaaacttggtaacttggagaagtaaaacacaagatgttgtagcacgatctactgctgaagctgaatttcgggctatggcacaaggtatttgtgaattgctttggttaaaaatcatcttacaagacttgaagattaaatgggagggacctatgaagctctactgtgataataagtcagcaatcagcatagcccataatcctgtacagcatgattgtacaaaacacactgaagtggatagacattttatcaaggaatagttggatagtggatagatttgtactccatatgtgccttcactatgtcaacttgcagatattctc

SEQ ID NO: 128462 - DNA, 341 bp, Glycine max
tctataatcccaatagtacaaagatcgccttagcgcgacgtggaggtcgaccaagaagattgttgggattagagtgttcaagaagataagatgattttcttccttattttgaagaagatgatgaaattgaacaaccgatcatagaggaacatattacaccacctgcctcaccgacaccgtggctggatgaaacaagttctagtgagaggacaccgccactaaggagcattgaagagatttatgaggtcaccaaaaacctaaacgacattgacctcttttgtctttctggtgattgtgagcctctcagctatcacgatgcggcggaaaacatattgtggaaa

SEQ ID NO: 128463 - DNA, 406 bp, Glycine max
aagttgtagagagagagaggtcctattttcatatagttctgagagattttgctgtgtgaagatctgcagagaagcgagttctaagcggaagccgttctaagagcttgagatgagtttgtgagtgattgtgagatcctacaggtgaaggagacatccttaccacttgggttttagcagtctttcatcttgctcttctctttgctgcaaaggaggtttccggactatggaaagttaaatcctctattggatctttgctgtacgcacctgatgtatatatatgtctatctatgcaacgacgttatgcgggttctctgtactatcatgttgtgattccagcgtgcctttaccttgatcacctatatgcctgctttgctagggcatataacagcacgaactgggctacttc

SEQ ID NO: 128464 - DNA, 312 bp, Glycine max
  unsure (1)..(312): unsure at all n locations
acttaagnaccgcngctgcagctgctntcagtattatcaaatgttattctttgagcgtgagtcagccaaatgcgtttttgctttgctttgaagatcagaattttactccttcctcaatgcatcgaactgagttctaactcagttataatgcttggaaaaccaaccgaggttccagctattccagcttcactcttggaaaaccaaacctgacaacttcactcttaaaaaaccaaaccctacataatggagagaatgaaaacgagtatgaaattggtatgtaaagacgccatcgatttctcgcgcgagaactga

SEQ ID NO: 128465 - DNA, 432 bp, Glycine max
ctaagctcctcggaagctgacaagcagggcggaaccgccttttttcttacagatgcacaggagggtcatagagagagatgtccagaatctgaccattgtcacctgtgacagagtggctaacatctaacaaacgcttcctgtcccgaaagtacacacacttgacgtgttcagatttggtagttcgcgtatgcgtggaaaccagccagctctttctctcctttgttctagcggccttccccacccacccatgtgacgtccgtggttggtcggtacggtatccacactctaatattgcgtgatgtcaactcttgatatagaaagaacttgcgtgattcttattactaaaatagaattgattgtggccagcatatagcatccaccacctgcctccctaagtgaatatgcaacctacatgaaacatatttggacacg

SEQ ID NO: 128466 - DNA, 300 bp, Glycine max
  unsure (1)..(300): unsure at all n locations
agcttgccacccagctcgcccaggcgagcaatgnngtttcctccagaagcaacagccttctggaggaatcttctggagggcccaagtgggcctagtgctatttgcaccctcatttttactaaatacaccccctgcctttttttttggtgattctttttttcgtaaagttacggaaacttacgaatttcgtaacgatacttgntttctttccgtaaggtcacggaaccttgcggattacatcatcattctcttattagacttacggaatgtacagaacctcactaattgccaacgatgctt

SEQ ID NO: 128467 - DNA, 477 bp, Glycine max
  unsure (1)..(477): unsure at all n locations
tatanaaagacccactntcgaatcatgtgaaggccaaattattatcatacaaggggggaaaacaattatcaataacaattatcaaatgtcacagcatatttgtttttgacatgaaagtacaataagcatggtgagatccaactagaatagtgataaggcatgagagtttcatcacttgtacatgacatgtaaggggatgagatgttcatgtgcagtgtattgttgcaatgaaaatcaatatttgaattattatggtgaaaatcactgtcaaactctttataataggacaacattgaatgagtcaaattatttaaaaatgaaaaaaaaagctatgaagatgtttttaacttatttttacaagttctcttagataccttatctaaatagcttatgcaaatcttataaaaagaatccactttgaatcatgtcaagggccaaattaccatacacacaatcctacttaatattacaatcata

SEQ ID NO: 128468 - DNA, 237 bp, Glycine max
  unsure (1)..(237): unsure at all n locations
agcttataaaatgtttctcccatctttcttttatatcttgatctctgaccaatacttttccttcttcatccttaatgcatcttactagattcaaatctattccttcttntattttggcaagcttatatatcttatgctctccactttttgtctcaagatctttgtagaactcttcaaaagctttagattgtgcttcattcacaatttttcttgtctcatttctagtattcttaattg

SEQ ID NO: 128469 - DNA, 491 bp, Glycine max
  unsure (1)..(491): unsure at all n locations
ctaagcnttgcaactcttttcttttgtttagtcaaaacttctaatgctcttaatctctcctcatctaaatcaactaactcatctgacatcattttccaataatggtcgattggaatgtccatttgtttttgtaccctggctgattgcaaatgtatttcgaccggaagtacagcatcatgcccataagtcagtcgaaatggggtagtattagttgattccttaggagaatttctacatgcccatagaacttgatctaacgttttattccaatttcttggctttagggcaatggtgtttttaatcaagttaattacaatcttattggctgcttcgacctgaccatttgcttgcgcgtaatatggtgttgaggttaataatcgaaagccagttttttgggcaaattcttgcatttttcgtccagtaaaaacttgacctttgatcaggggaattgtttcaggaataccatacctataaataatatgaatttgaat

SEQ ID NO: 128470 - DNA, 249 bp, Glycine max
accatagatggtgggaggacagggaccaaaaagaaagggggaatctcttccttattatgacaagatgatgaaattgactaccgctctagagggacatattacaccacctgcctcaccaacacctaggctggaagaaacaagctccagcgagaggactcctcgactaatgagcatagaaaagaattatgaggcacccgagaaccccaacgacgatcacctcatgagtctctatgggaacgagagcctcta

SEQ ID NO: 128471 - DNA, 207 bp, Glycine max
cagaagagcctgggatcatagctctactagcacaggtgttgggtatctactggaacacaacactgagttcgacggacatatattcagccatagacattatcccaaaaatctcaatggtagttgtatgagaaaataagatgctaactacacactctaatttcacgacgatgcacctgttaatgcgtcccggatcattgtttcactgac

SEQ ID NO: 128472 - DNA, 191 bp, Glycine max
tatcctaaatcctttgagaaattttgatgtaataagaggggcgggatctatattgaacaagttttatgatgtcacagataataattcgatcatttcactactttcacactttgggttgaatctaattgtttctatcaggagagtgtttatctggtttatttacatacaaagacttcatattatatatatgt

SEQ ID NO: 128473 - DNA, 458 bp, Glycine max
  unsure (1)..(458): unsure at all n locations
agcttagagggtattagcttgaacatatatttttataaaggcaattcattatccagccaaaatttaatgcaagactttntattttctttttaattaagaggtgaaactacgccccaaaatggaccagcagttgaatgatttggcccttgcttaagtcaatatctctagctgcaagagttgtttctaattttaagttgttctttctagcaaatacataacccaaggtcaccttgttggctcacccataatgaaaagaaagctatttattgcacaatacgcaatttaagcctcaaaatgaaatcataacattgaaatattaatagctagtacaatattcctcaaattggatatatgcaagaaaccatttaatctaccctttaatctttatggtcattgaaattctaaacatttatataaaaaaaaagaggccaatatagccaaccaagctgaatataaca

SEQ ID NO: 128474 - DNA, 379 bp, Glycine max
  unsure (1)..(379): unsure at all n locations
cgagatgaggaagtgttgaagggtgaaacttcctgtttttattgntgaccacagagtggtacctggagatatgtcgcgggggtcacgagaccttggggacgtcaagtggggtgctattgcccaaaaccaagcttgaccaatcccgacccaacccgggcatagtcggtcagtgagaacctgtgatgtacctaagcaagcgagctcctggcagtcaacagataaaaggaaaacaagaccacaaagcaaggaggcttgtggtggctggccagctgtgaatattgtgtaatatgtggatggtggcctctggtaatcgattaccaaaggggggtaatcgattacaaggcttataattgaggacaggaggctaagatggtctctg

SEQ ID NO: 128475 - DNA, 371 bp, Glycine max
  unsure (1)..(371): unsure at all n locations
agcttctagaganaactacatggagtctgttcggtataaatgcttcccagccttctttaaccgttggatcttctcgaaatttggtttacaactcaaaagacacttgtccatgatctgaccgttgcgatctgtgagaagatgtctggagtgtgctagaagcttccgttcctgagagcatctcttatttaagcatttcagcctttgctttcgtgtagcttaagaaaaatgtcatttcttcttctttctttcttccaaagccatttctaaagttccaagaactttctccatcacccacatccaccattagccaccacaaactatcattgttctccattgtanacccacaccgagaggaacccttcaaccgaagc

SEQ ID NO: 128476 - DNA, 359 bp, Glycine max
ctgagagcactattcaaaggagttgtcaagaacatcttctttctgatcaacacttgcacagtggccaaagatgcatggtagatcctgaacatcactcatgatcgaacctacacagtgaagatgtcctgattgcacctcttggctacgcaattgcgatatctcgaatatgaatgatgaagagtagattcatgacttccacatgaacatccttgacatagccaacgcttgcactgccttgggagagaggatcacttatgaaaagctggcgagaaacatcctcatatacttgccttatagatgtgacgtgaaacgtcactgcaatatatgacgtccaacacattcgcaacataatagtcgat

SEQ ID NO: 128477 - DNA, 318 bp, Glycine max
  unsure (1)..(318): unsure at all n locations
agctntgagcaaattcaaacgacaattactttttattctgatgtctgattgaggcctggcatatatcgagacgctcgaaattgaatgttgaagctctagccaattcaaacgacaataactttttactcggatgtctgattgagtcccgtaatatgacgagacgctctgaattgaatgatgaagctctgagcgaattcaaacgacaataactttttactcggatgtctgaatgaggctcgtcacatatcgagactctcgaaattgaatgttgaacctctgagccaattcacacgacgataactttttactcggatgtct

SEQ ID NO: 128478 - DNA, 342 bp, Glycine max
gctaacattcaacttcgagcgtctcgataaatacgtgtctctatcacacattcgagaaaaaagttattgtcttttgaatatgctcagacgttcaacattccatttcgagcgtctcgttatattacacgactcaatcagacattcgagtaaaaagttattgtcagttgaattggcttagagcttcaacattcaatttcgagcgtctcgatatatgatgggactcaatcagacatccgagtaaaaagttattgtcgtttgaattggctcagagcttccacattcaatctcgagcgtctcgatatatgacgggacttatgcacacatccgagtaaaacattattg

SEQ ID NO: 128479 - DNA, 343 bp, Glycine max
  unsure (1)..(343): unsure at all n locations
tacgaaagcaaaagttggtacggtctattaaattataaaatgaatttcggagaaccaatcaagtgcttaatctgcactgatgcagaaacaaaaggcacacacgagaccaaactaacatgaaggaattacttgataatcggaaaaaccctttggaagtggttaagactaaactaagttagaaatagtgattgatctcgaattccaagaactatccttgtttgcgtgtgtgaaatacgacaaggttggttagggtagtgaaatctatgtgataattatgtgtaatcgactaaatngggggccatctaaactcactcatcaagtgtgaacttaacatctcaaattc

SEQ ID NO: 128480 - DNA, 345 bp, Glycine max
  unsure (1)..(345): unsure at all n locations
ttgctggctgagttttctacccctccaacctaacttattcttcaactagtcaagaatccagcggtacaatttaaagggtaaaattaaaataaataaataaataaaaagttacaaacaagctatatggtggatgaaagtgtatataatgtaaatcaacttgtaactatgtttcaggtaatcaaaactacaaattttggtgttgtttagtgataattaacctcatcacggtaagcctcaacagggtgcttcccaagatctttatggagggccttaaatatagcatcttcattctcatgaacaaggtctatgagagatgtgagctggntnttcctccatgttacactc

SEQ ID NO: 128481 - DNA, 421 bp, Glycine max
  unsure (1)..(421): unsure at all n locations
agcttgccaatgcacccaacagtgacttatatcatcagataagacattatttgaaaaatcaagcacacttaaattattagtagcattttctttccacataaaaagggagaaattgttccggaaattgagttattggcaacattcagcacttcaacatttgcagacacacttggcaatgtaccctagaacaaattagaactcaaatttatgaggctggaattgagaaagatgttagataggtctccacttaacagattgttggacagatccaggaattcagtttgcacagtccaattccaaaaccaacttggaaccaagtctgcaatacctgccttagacattgtcaaaaccttcacagaacttttgccttttagccattctggagacttaggaacctatccanagggagctcataaacata

SEQ ID NO: 128482 - DNA, 357 bp, Glycine max
  unsure (1)..(357): unsure at all n locations
tgcagaggtcggaggcagactcaagaataatggtatgtgtattggctctgnctcatacctccattacacttcatttgtacctgtgcttgcttccctatttgtattaattgtgttcatgtttatgtgtgaattgaatcttcccctcgaggaccaaaagataaaaaaatgtgtaatattagaacctttttatagggatagacaccataatctaagaatacatgataattatctatcatccaaacttaactcatgataaaaaaataagtagcacattaaaattttatagggatagaaatgactatatttaccctattttttttcatgctcgacttaactctcaacatttattgtcaatga

SEQ ID NO: 128483 - DNA, 177 bp, Glycine max
  unsure (1)..(177): unsure at all n locations
atgaattgaccattttctgcatttggttcaatgtgaacatcaactatacctggtgtgggttccctgggctccaaatcaatctcaaccgtagctctatatttttcctcttccctggaatcatttccaacaccaacaggaacaatacttanggaggcattttgagatgctggatcttta

SEQ ID NO: 128484 - DNA, 228 bp, Glycine max
aaagaaaaataagatggggacggagaatcgcagaaggaagatgaatgtgaatcaaatctaaagaatgatgaagaacagtcggataacaaccctgctggacgatatgaagaataagcttcttcataatcttctagtcaaacaggcgtttcctacattaactaggatagcataccgtgaaactcagtgacaatattgttccaaacactatgtgctaacatggaaaatgac

SEQ ID NO: 128485 - DNA, 463 bp, Glycine max
  unsure (1)..(463): unsure at all n locations
agctagctcgagttggtgggttgctcactaatccctattgtcctttcggcngaaacaacacanagatatagcgatgtattccaataggtggtcttggtccacatatgaaacaatctcttttcctgcaaagaagacaatttacttgattaattactagatttctttgtttccctgcaaagaagaccatttacttgattaattattagatttctttgttccgcatgaatcaaattattattgtttacaagaaatcaatgttaactgttgaaagtaggaaaaattaatctaatatcctgtatgctagatgcgaagattatattttagaaatgacaggaccaaagaaaggtgataattcacaatatttttactttggagttggagaaatattgcttcatgtttgacacatttgcttgtgatggaattctgaaatttgataacatgcaagctatggngcacgtgtgat

SEQ ID NO: 128486 - DNA, 459 bp, Glycine max
agaaacatacgctcgcgggttcgtaagaacgatgctgacagattcgaggtgtgtttctttgactcacctactgcgacagtccataggttctttctgattctatttggaggatatatatacactgcatacttacaaacagtaagtgcaagctgacagtgactagatacattgataatatattatcactaatgacacgaaaatcttaagaaatgggcgaccgagcagcttatatttcttcagcaaagctaggattttcgcctgttatatgcatgtgaccggaatatctgcaatgtagtagactacaactggcatatttgggtaatactgtgtctaatattgagtagagagactgataaataccaactttgactcatctgtgaatatcatcggatatatggcactaagaatcacccacacaacagttattatattaaagaatttttcactgagtgaagatga

SEQ ID NO: 128487 - DNA, 343 bp, Glycine max
  unsure (1)..(343): unsure at all n locations
gcgctagcgcttgagactcgcggcttagtgcatgaccaaagatgcacttagcgcgaggctcgcgcttagcaaaaggattgttttttagaaaaatgttttctaagttatatttcagtcccttcttcaacaaattgaaacccttatatctaacattcaaagataggatgatatacttctatgtacatattaaaaagcaagttccacatgatagatgcatgaaaaaaaataacaaagattaaaactgggttgcctcctaggaagtgcttctttaacgtcattagcttgacgctnttacctcactgggtgatcttatgttntggttcttactttcagaacctcttga

SEQ ID NO: 128488 - DNA, 485 bp, Glycine max
gggattgattcggtcggacgagggatcaaggtttagtaatttatgctacaacatagaacacaagagcatgattgattagagaaatatatttatatgcatcagcttgtttgttagaaagaccaacatttctacctactgctgtcacttttacttaccttgcattttatagtttttagcataaaggtttagtttaaattctatttgaaattatcaatcatacatgttctctaaaaaatgctttatgtttgaacttaactcaggcaaacattagttccctgtgttcgatactcagattcatccattttaatttttaaatacttgacgatccgatgcgcttttcggcaaactggatttcccttgaatatatttgtacgaagaaaaagtggaataaaatgtaaccgcagggaaatccaacagaagcccaaggacatagtccatacttatatatacctagggtggagatggaatgggtaagggtgtgtata

SEQ ID NO: 128489 - DNA, 454 bp, Glycine max
  unsure (1)..(454): unsure at all n locations
agggctgccagcctatagtaatatcctatatgagataattatatcctcgagactnntttgtgtacatattcttcaatttcaactattaaaaaaataaaaaaattctcagtttcaatttgatctggcactataatcaatttctttatcttgagttccaaactttccattttaaattttactagttttatgtaaggtatgtaatgcggcaaaggaaaaagaaattaaaattgtactgcattattgttgtggcaaatgcaaattccactctcaaccagtgtaattgagatgactaatacaattccaatatgaacaataacaaaaagacaaatatggatgaaacagagggaatattcagaggaagagagagaaaattacagtttactcataatccttctcataatgattacccttcccttntaataaccaacttctcacacaaaatcccttagcctat

SEQ ID NO: 128490 - DNA, 489 bp, Glycine max
  unsure (1)..(489): unsure at all n locations
gacctatgaaactaagctanacattatgtggatccttcacggctgaaactagaagtgatatatagcagtctcaaacagaaacagaataagatccttcatagatttgtcatccttgatcactttgcaggggttgtcaaacttctccttcaactcttcttgcttcttcttctcatcttcattcttgtcaagcttgagcccttccttggtggcagagacaaacttcttgctctcaaattccttgagctgatcaacaacatattcatcaatggcatcaaccatataaagaacctcctattcctttgttcttaccaaaatctgaaattgtggcatgtcaggatcgatgtgaataggtcccaaacttcacacatcagcttggagatgtgcctttgaaaggagggggacctgcaaaacaaaggactccgacggtcaagtaagaatatgtgtaaggagaataaaacaagtatatgatgtaatggaactcgtataagt

SEQ ID NO: 128491 - DNA, 472 bp, Glycine max
  unsure (1)..(472): unsure at all n locations
agctttgacttgagtcatcaagagattattattatgtgaccatagcatgagtttcaataatcatcaatcatctttgaatcatctatctttcaatcttnttcaacatcatctctcaaacatctttcaatcaatctttcaatgtctttctacagaattttctgattcatttctcttcatcattctaaaagttttttatcaacactttctcttccaagaaaagttctttgctcaaaaacttgtgctattcatctttttcattctcttctccctttgccaaaagaacaaaggactaaccgcctgaattcttttgtgtctctcttctcccttacaaaagattcaaaggactaaccgtctgagaattcttttgattcttccattccccttaagcaaaagatttcaaaggactaactgcctgagatatctnttgtttccccttacanagaatcaatggactaaccacctgagaattctt

SEQ ID NO: 128492 - DNA, 413 bp, Glycine max
  unsure (1)..(413): unsure at all n locations
ttttgtacaagcaaacaaacaactatgctactgaaattattagactaaaatntaaagaacggaaacataaaagctgaaatttaaattacataatcataaaataactaaagtgttcataatgcaaaaaatttaaacgtcctactcctcctgtggctggtattcattaagatccaatgctgatggctgagtctcctcaagagcaggtgcagatggtggagatggctgcggngtctgagctggagtggtctcctcctctgctgctgctggtgatggtgctggtgctggtggctcctcaatcacaggctcctgggctatggaggccccacccnctccagcggaagaaggctggtcccctggctaggccacctgatgcaatcctaccccgcaggggcattggatagaaaactccaagt

SEQ ID NO: 128493 - DNA, 395 bp, Glycine max
  unsure (1)..(395): unsure at all n locations
ctgcagctgcagataaacccgggagttcttgatttaatgagtcgactaaaaaatttggtataattatacgaatnttaaaaaaaatcacttattgcagatccataggtttaagcagtccacatatctaactccgtatatccactccaaccagtacttctctatattcatccaactgagagagaggtcagataatctccgttacatctcgctaacccacacaaaatcccaagtacaatttttaaaccaatttttttttttttttacatatctaatcaaatacattgtcaaaatatttatagaagcttaagttagagaatatctagaaaaaaaaagttgtaaaagtatcctaaaatttagttagagcatcatgttcataaccatgtgtggcatatacc

SEQ ID NO: 128494 - DNA, 469 bp, Glycine max
  unsure (1)..(469): unsure at all n locations
tgcttcaacataaaccacagtctcacggctactatttctctcaagcataagtgtttaagctattcatctacaacaactagcaagaggtccaatctttgaacttcatcttaagccataaagtcggaaatgcataaacataatcaaaaggacttccataggcttgtagtgaggcttggctacaaaaataattggtttttttaagattgaaaggcttagattctaagagagcacaaatcctagacttacccaagtagtcttttcaatacaattagcttattcactagcctttcacattaacttgtatttgaccttattacaacaacacacactttctttggttgctctttttttttaaaacaacttatttgttgtggtgttgatgtgctntacctttcactttacantcccaattaactccccaaatntggggtaaattgccttgaaccatcttgctctctagaatctaagc

SEQ ID NO: 128495 - DNA, 233 bp, Glycine max
  unsure (1)..(233): unsure at all n locations
agcttccatcaagtggtatcagagcaatagatcttcttgtaggtgctccttaaacctccattaaatttcagctttaccttgttctccattgttgaactcgatgcgtgcggttggaaganctcnnaantttacccctctcctctacctccccctaatttcatccgcttctctctccaactctcattcatcgtctcctatcgtggacatcttcctccccacatatcaccttctta

SEQ ID NO: 128496 - DNA, 436 bp, Glycine max
  unsure (1)..(436): unsure at all n locations
taactccaagaaggctgaagccatgattccagcatctgtctcttgactcatttgtggggaaggcctctgggctctccctgcttccattctcgccctttccaaaattaaacctcctatctgcatgaattttcttgcttcctagaacttgatcatcaactacatcaaaccaataaatgccatgattagttagtgtttgcagttccacctcatacccccagaaatagaatactacaaatattcctagtgtctcgtcattgggctttggaacattgtattattgcttactacaacttaattcgtagcaaaagacagttcctgttattgatctcttggaagggaagagaattaattcgacttatttgtgtaaaacgtcaacaaatgatttattaagagagctgacanagtgtctatgatatataaaagttaatctaattgg

SEQ ID NO: 128497 - DNA, 452 bp, Glycine max
agcttgagaacaagaaagaagaaagcgatgcctattcgagagagagttaagcgcacgcgatagagcagggaggatgaaggattttattctgatgtggtttcggcgagatggtgattgaaggagaaggaggccacatgtgcaattgtatttattagcgtcttcaaagactcttcctgaaaatggtcaagtgagcaagttcaagaagatgaacgacatcaacgagggtggaattagaggtagagcttgaatctggagagtagtcaacaaggtaagacagagctagatgttgtgtaatactaatataactggaaatcccactttgatcaggatagagttagggaaaaaagtagttgaaacaaagaatgaaaagtggtatttggttttctactagtatgagaatgctcttcatcctgtccttatatgttgtcgtcacttcttggccaagaaagtat

SEQ ID NO: 128498 - DNA, 391 bp, Glycine max
tcctctagaatcgtagtgtgattggttgttaggagtgtcttacactcgtacctaggccctctggggagagggtggcgcttgtctggcttgtgcctcttgtccaacttatgtaagtcggtcttggcacttccttcttgcttgtcgcacttttgtctagcttgtcaggcttcattcttgaatctggacatttcttccatctagatgtaacccttggcttgttcgtgcaactagtctatgttatcagaggctttttaagcataaactatccacaaacatgccgaggtgtaaggcgaggagcatcgaatgcaatgctacctcgaggttaagattttggatttggacgcgtgtgcaccacaatctatccatgaattgtctgagagactctttgtct

SEQ ID NO: 128499 - DNA, 310 bp, Glycine max
ccctgcttgcattctcgccctttccaaaattaaacctcctatctgcatgaatattcttgcttcctagaacttgaacatcaactacatcaaaccaataaatgccatgaatagttagcggttgcagttccacctcatacccccagaaatagaagactacaaatattcctagtgtctcgtcattgggctttggaacattgatgattgcttactacaacttaattccgagcaaaagtcagttcctgttattgatctctctgaagggaagagaattaattcgacctattcgtgtataacgtcaacaaatgattta

SEQ ID NO: 128500 - DNA, 450 bp, Glycine max
agcttcataactctatacaagtatgatagttcttataccacttgttagacaagtggccttcaatatcttaagaacgggggggggggcgttcgaatgacaagatgaattgacataaagtatttatagagctcacttgtatgtgaaaaattttcaaaaaaaaaaactcatcttaacaagataatgtaaccagattaatacttccaaagaaaataatgttttgtaaagacattttcagacaatttacatatttctatttggctatattagtataaatcatctctaattcatttatcttttaatattatgacttttctttcatttcctttcgatatactcttgcgttttaatacacttgatatccaatatgagtcttgcttatcaattatctttgcgattgcacaatacttatatcaaaccttataagtctcttttctctattattatttcact

SEQ ID NO: 128501 - DNA, 289 bp, Glycine max
agcccgtacgccctggatcttatgtatcaatggattcctcttacttcctgtagatgaatgactacaaaatggggatagagaaagataattggagacaccactctaaggagaatatatctccagatgaagctcaccaccatctaatgccatggattagagcttgcaagtgtgagaagacaaatcgatggagatcgagagaagaagccattattttatgcctgacaagagatctgaactctgaagctgaagtgtcaggtgatcacatgtgtacaaatgtatacacatgacc

SEQ ID NO: 128502 - DNA, 414 bp, Glycine max
  unsure (1)..(414): unsure at all n locations
gaagcaagtggagttggatatttccattggaaagtacaatgataaggtgttttgtgagttgttcctatggaggccagccacttactcttggggagaccatggcaatttgataagagggctaatcatgatggtttcaccaacaagatctctttcacgtatcaaggcaaaaagatagtgctcaaaccattgagtccacaagaagtgtgtgaggatcaaagaaaaatgagagagaaaattcttcaagaaaagagagaaaaagaaaaagagagccaaacacttgagagttcaaaaagtgaggacaaaaaaaagaaaacacaagagaggaaaaagatgagtgaaacactntaagtgagggagaatnttctagctacaaaaggagaggtcaaagggtntgttcattcaaaacaaccccta

SEQ ID NO: 128503 - DNA, 447 bp, Glycine max
  unsure (1)..(447): unsure at all n locations
agcttgctngaggagctctatggggcttatctttgagcttcaaaggggattgcttggtggttctatgaacccccctgttgtagaaaaattctactgaggaagatacttaggaaaatatttgttgagaaatttctatttgtgccttctgcagtcttagactcaggaaaatatttcttgagaaatttctccacaacttcaacccatgtcttaagactattgcctttaaatgaatgaagccacctcttagcttctcccgataaagaaaatgaaaacaagctcaatcggattgcatcttcaggcactccacccaacctaatagtattgcatatttctatgtagatggctaagtgtgcatatgggtcttcatttggtaatccatgaaacanattattctgaattagctgaatcaatgatggtggatatgtaatggtttgtgcttgaacttct

SEQ ID NO: 128504 - DNA, 487 bp, Glycine max
  unsure (1)..(487): unsure at all n locations
tactaagctccaggatgtgaggatctgaaagaactacctcctgagattattaacttctatcacgagatagaaaccttgagagataacctangcaaattgtttggtggtcatgaagcccttaacaaaattattatggtgcaaagaaaccccaaagacaaatttggccatggtttaaaaggcataaaagttgtacatagtgaagaagtcattgtttgctatttttgttgaaaagtgggtcatgaaactcataagtgcaaggacctacctaaaaaaggcaacccatcacagggtctgtccagtgcttaccaacacccataagctaataaggaaaaatgacccaaacatatttgagtacctaagaataaaataattcttgttgcagacctccttaatagctggaaagaaacactagtcatggcacctatacagaggctactcatgacacatgacaagtgaaaagtctatgttccaatctcttagcactatg

SEQ ID NO: 128505 - DNA, 278 bp, Glycine max
aatacagcaaagtgtgatacaaagtgggaacacgatcctatacttcacgtgaataatcattcctatcgctcaatatctcattcgatgactaaggagtccttgaacgatgaagatataaaatttagtccttagaagtataaatagtgcgaataggaagtatcgacaacgtgaccatgctcattacagttgatgagaatgcctacaagatacaacgtttatgttaatcatcttttgttggacaactatgtcaatacttttattgggaaaaataaagcgat

SEQ ID NO: 128506 - DNA, 370 bp, Glycine max
ccaataccaaggtgaggattggtacaactgaagtgagatcgggctctatcagtacacccccgaagcaccaaatactcataccatatgttctatcattacacacccaaagtgtctaatcctccctgtaaatctatggcattttcgtatgggtcacccccttcccgaaagattacaagccatgcgaacatactatactttcttaaataataacaagagtttcatttgtaatacgtgccattatgccaaacataagagattacctcttcattctagcacatctcatgcattaaaacaattcgagctcttacatgtagatatgtggcggccgtgctccaaacattcatgcatgagcaccgatatttcttaacta

SEQ ID NO: 128507 - DNA, 392 bp, Glycine max
  unsure (1)..(392): unsure at all n locations
gcttaatgtatcttattgcaccagacctgtctttttgnttgcagtaagtatactttcaaggttcatgcactgtgctagtgaagcacattttcaagctgccaaacgagttgttagatatattaaatgcactttagactatggcgtgatgcactctcattcttataattttaagctttatggatactctaatagtgagtgggcaggttgtattgatgacatgagaagcacctctggttactatttttcttttgattatggagtttattcttggtgttctaaaaagcaagaagatgtagtttaatcaactacagaagcagagtatgttgttgttggtgttgcaatgaaatcaggctctttggattaagagcatcatgacacatttgcatatggaa

SEQ ID NO: 128508 - DNA, 391 bp, Glycine max
  unsure (1)..(391): unsure at all n locations
agctttatgagcgcgggttcaggatttatgngtttgcgttcacgatatgcgaagatgatattccgagtactttggatttggtacgaccatgcctcctgatttccagctgggaaattggcgagaggaggaacgccccggcatttacgcaacaagcataatgtaaacctttacggttgtaaaagctctatagctgggcctacgctttagagattctccttttgttaaggctttgagtctttcgtttttgaatttataatacaaggatctttcttcatctgttcctggtctctacccattctcattcactcgcattgttacttctttttctgaaacggcagatccgatgacgagttccgcgaatgtactaatacctgcgacccgtctatcgact

SEQ ID NO: 128509 - DNA, 303 bp, Glycine max
cgcccagagaaggagtccacagaggagatgcttaccatctcttaagactggaaagcggcttctaatgactgctctgctgcttccacataaggcatagaggatgggcagctcaccaagatgtcttcttcgtctgatacgatgaccagatgcccttccactacgaatttcaacttttggtggagtgtagagggaacaacccccactgagtggatccacgggcgcgccaacagacagctgtaaggggggttaatatccattatttggaacgtgacttgacaggtgtgagggcctatctgtactggg

SEQ ID NO: 128510 - DNA, 406 bp, Glycine max
agcttcttagtctcacctgaagaatatgtttttgttgctactatatgcactcctctaatgacaatagcatcatttctggcactgaattgctggagttggaagccatcttctcaattaaatttttggcttcagcaggggtcatgtctccaagggctccaccactggcagcatctatcatacttctctccatgttactgagtccttcataaaaatattggaggagaagctgctcagaaatctggtggtaaggacaactggcacatagtttcttgaatctctcccagtattcatataagctctctccactgagttgtctaatgcgtgaaatatcctctctaataggcgtggtcctggaagcagggaaaaagttttctaacaatactctcttgaagtcatccagctcgtg

SEQ ID NO: 128511 - DNA, 475 bp, Glycine max
ctatgtgaaaggatgtgactcttcacttttgaatttgttatttaacgttcaaaggcacaggtaatcgattacagcctttggaaattaattagaatgttgcaaattcagtttgaaaactttttcaaaacaattttgctactggtaatcgattacaccaatctggtaatcgattaccagagagtaaaaactctttggtaaacatgttttgagaaaaatcatgtgctactcaattcttgagaaaaactgttcatacttatcttgattaagccttctcttgattcttgaatcttgatcttgattcttgagatcttgaaccttgaatcttgattcttgactctaaaatttcttcttgagtcttgaatcttgattcttgaaatcttgatctcctgaatcttgattcatgattcttgaaatcaactctcccctagaatcttgaagtggtcttgattctatcttgaatatctcgaactcattc

SEQ ID NO: 128512 - DNA, 454 bp, Glycine max
  unsure (1)..(454): unsure at all n locations
gcagctttnaaacatctaaggtgctttttatttaccaatctatgattnttatgtctgcttccaccattacattacattattatttatttgatcagttattaaaagccatctaatttggtaaaaaatctttgcttcatgccaaaaaattagtcttctcagattatttatttattttattatatatataatatataatatataacataattactttgttaacacctatcatattaaatacatgttgattattttttgctcatatatttgtttcactgcatttttataaatatcaatattggttgtggacattcagtaaacaaaaaaaataaaattagtcacaatgattcagatgactctccacctccaatcttgccatactccattgaatgctccacaattctcacaccttttcgtattctgcccccttacacatttcaccaaccactgtgtcact

SEQ ID NO: 128513 - DNA, 361 bp, Glycine max
acccataattgtgactgttgagcgagaaagattctcttgttacaacgtgagttagagtgagcatctctgaaaaaagaatttcaaattctatattctttgagagaatttacaaataccaaaaattaaatctcctttcaaatactctatccaaacaagctattttatcacgaataatattaaattccttgaaaaaatgaatttccctgttaaattgctccatccaaacacactattaagggtaaacaaatgctttctggtgtgagttagatatctggcacattattccgcccaggagttctgtcagaacagaagtggcaccaattctttatgaaaacatttgcttgtttaattgagtgtgacc

SEQ ID NO: 128514 - DNA, 456 bp, Glycine max
agcttcaagtagctggtaaccgctgtgtttctctcctactcgacatcagataaacagactttgtaggcagtgtcattttcttgcaagagaattaaacatccttgaattctaaggcaacttcaagcattgagtatgtggaattccattgtgatggattatctagaaataagcccttttgactcaggatcccaacctctttagccatcacattgaactttgccagtataatttgtgaacttttaatgtaaccaatagtttcacggatcttattgactatttcacttactgctcctagagcatgctgaaccatggcattaataacatttgcagcacagcgtatatcaaataattgaccattgcaataaagaaacctggtttgcagaagtctttcaccaattctaacagcaatggtatcagaggtagaacaactatccagtatcatggaagaacaattac

SEQ ID NO: 128515 - DNA, 428 bp, Glycine max
  unsure (1)..(428): unsure at all n locations
gagttaaactcatttttctattgatttgaaaatattaatgcaacccattttctacaaaaatattaatgcactatatatagtagacaatgatgttatctaatatactagtagactaatacggtacacacccatttttatcttttaaatattgcattccagaaattgggaaaaaaaaaaaaatccttgccacaggaaagtgtttttccactatatatattgcatatatgatgtagagcaaagctatgaagcatatacaacctccagcacattcaagccttcaagcacaaaaatggtaaccgctgtggcatcttataatatcactccaaatcaagcaacttcccaagattctttatggctatcagttattgaacaaagtgggtacctatgtcatgtacccactctctacatttacaaagcanaacataact

SEQ ID NO: 128516 - DNA, 394 bp, Glycine max
  unsure (1)..(394): unsure at all n locations
agcttgcctaattaacctgaaattgttattttatgattattaaacacacaaaatgaaaatactaagtatttattacctatacttaacagaaaatacttatacattacaaaataactatgaattgggagagtttgatacaatttataccagttttatacataaaagttagtcgttttcatcgactaacaacatggaatgctcaagtttacagcaatgcaacttgttgatgacaaagatgtcaaatgtatgattcttattgtttgccaacatgcaattctctcatccattgaatngtatgaaaacatccacctatatagacttcccaccccaaaccctcaacctcaatattatcctcagtcccgttattcacacatattcgatgcaacccaagaca

SEQ ID NO: 128517 - DNA, 470 bp, Glycine max
  unsure (1)..(470): unsure at all n locations
tattctantatagccttcatctgtaagtatatgttgtctctctacgngcggattcttcattgtggtcttcatctgaagacttcatgcacgtcctttttgatgaagttcgatgtcttttaaactatgggctccatttattcttcataggactttgaaaaatcctacgagaatgttttctaaataaaataatctcaaacgcatagtattaaatgaagttcttaaatgcgctacttaaatgttatgtaaatcattttatgaatgtatcatctaaatgcacagacatagagatacatatcataatctgatagcacatcagaaacaacatttaacattcgtatttattttatctaatgaaaatagtcacgagttgtgattcgtctttaagacataaatgtcttttgcctaataatcttttttttttataatgtcacaaaacatagatgtaaaagttgagacatatctatgaaata

SEQ ID NO: 128518 - DNA, 449 bp, Glycine max
  unsure (1)..(449): unsure at all n locations
agctngcatgatttacattcttcttctttccatacaaattcttaattcttcttgacatcatcaaaatcttcatgatttacattctcccctttgtcaagcaaattctttttgatatcatcaaaacctgcatgatttaaaaaaacaagctagcaattctaatgaatcatcacttcatatcccttcccttttcaaccaagttagcactacttcctataccaaaatcccaacatataaaatttacaacaactttgtacagtttataacataatatgcttaagtcaaacatttatttattcacaaagaacttgggtccctttttctttttcttttctttcttttcttttctattcaataatgtaatatttaatttaccttaataccctcatttaaaaatagagtatttacatcatattagccaccaaatgatagaaatccccaacanaacacct

SEQ ID NO: 128519 - DNA, 436 bp, Glycine max
  unsure (1)..(436): unsure at all n locations
tgcgaagaaagaagacggcggngtggtggtgtttatcattatcaagttttccatcaagaagtgcctgaggaagtgcttcagcaagttggtttcgcgcgaagaccaccacgaagcgatgatcatgttgaaggacatgccgcctgagccaaactggtaccaagggaagtggaggagggcaaggcacaatgggaacaatgaggagctcaaaggagagaataataacaacaacaagggagttcaaagaaacagaaccattgccttatcagggcctttggatgggaatggaagaataattcatgagaagatggtgaacaacaacaaggtgatgaaactctctggtcctcttgatgggaaaatgaatggtggtaacaatgagagagtgaatgtgtatgcaaatgcaaatagaagcccatcgatgggtgctactcactctact

SEQ ID NO: 128520 - DNA, 294 bp, Glycine max
  unsure (1)..(294): unsure at all n locations
tccacattccaagtaccaaaaagtgatttgtttttcacgattatccaattctatgtactaaaagtgatccaatctttcaaaaattcactttacttcatatcacaagaaggtttaagcacatgcttgaaaatttatcttgccattttgaggatatcttgttccttacatgaggtcacaaaatttattgacaacaaaatctnttggggaaggaggatgaagttgtgatgatgtgaggaacaaaggaaggaggccacctaaccgcacaggtgggtggctcacggaggcacaccgtga

SEQ ID NO: 128521 - DNA, 382 bp, Glycine max
  unsure (1)..(382): unsure at all n locations
tttttcttcaatgaggtcccttaatggtgattttccaccatggagatgcagcgatagacaacgagaagacgtgagaagaggtgtcattcactanggaataagccatggaagaatgagtttcaccaccaagatgagccttggataagaagcttggagaggatgcttcaatggaggaaaagaaagagggagagaaagagagaggggggtgcacgaaattgaagataaagggagagaagttgaactttgagttgtgtctcacaagactctcattcatcaaagttacaacaagtgttacacatgcttctatttatagactacgtagcttccttgagaagctctctcgagataacttccttgataatctattttgagaaaactttct

SEQ ID NO: 128522 - DNA, 471 bp, Glycine max
  unsure (1)..(471): unsure at all n locations
ggctcgtctgggtttgtctaagtgttattgctactagatttttgttatatctttgtgttgagttcagtcattcaacaacaaaaagccttttccgacgaggtgaggtcttccacatggatcatatgatgtcgtttggctcgattaaagacccatctaaatatgatttttgttgacttgagaaatacttgaatgccgtttgcattcaagtatattgatctgtacatggttagttaatatattattataaggaaaggcagtccacggagacctggatcgagcatgagcaggagcacgacaagtttctagaaggtttccaattgtgagtccctttttctcttatctcatctttatattatgcttcgcttntcatggaattgttaggctctagctgtatcgattttaattcttttgaactttgggtatttgctgttttgagatattaaaggattggagatggtgacttttaatttt

SEQ ID NO: 128523 - DNA, 388 bp, Glycine max
tgagctgcagctctattttttaatgtgaataagtatatttatttatctgttaccaaaagaacacaaacccaagcagaagaacctcatactctataattcttaattacaaattatatacgaagttgcctttgaattcaattgtgtttatcaaaattaaattaacggctatagaactcgacaattttgatgtaacatatataatattatttgacatcacgtgtttgcttgtgaattaaatattgaaacgtatcaagaaatagcattaaaagaattatcagaatggatgctgtgggataaataagtgtctgtgaaaataatgtagttttttgtttgggttttccacaagtatcttttctttatatagacaatgctataatatacacaactt

SEQ ID NO: 128524 - DNA, 473 bp, Glycine max
  unsure (1)..(473): unsure at all n locations
ctacaagctacgacgaagtatataaagccagaaacattggtaattatacatgaattcgtaagtcactcaaaaaattagatcaggccaaaactcataaatccaaaaattagatcaggcctaaactcacaaaactcatgaatttatctttctctcttctttgtccagttctctgccacttcagtttttcatttaaattaggtcaatatacctaactttttttctgcccaaaatgggattaatatataacagacaaatatagcttacagtataaatgtgaaatagctacaattatcaatgaagaaatgagcaaaagccaaggtgcaaaacatttcaacactaaactttataattagcagtgacttcatgcatacggntctataacaataacatataatggaaacacaaatgctattgtagctgacctttattccagaaggactctccatgaaactaagtttgtacgtattagtgca

SEQ ID NO: 128525 - DNA, 345 bp, Glycine max
  unsure (1)..(345): unsure at all n locations
ggatgccccacattatttccatgacacanatgcaaaatgatgatttggaaattttatgcaaaactggtcatgcatgcacctatgtggacgctcaagtgtcaaatttttatggtcatgtgatgctagggctcaggattcatttcctctattttaaatcaacccaatgtttccaaaatatgttcttttatcaatttgtgcattcatcctagtccatttcgggcgtccggggaaatttcacagcattcacccttcaggtgtagacacatttttcaaaaattggttatgatncaatgaattttttcaaagaaaaggtggaaatcatctcttttaaaagcatgtcggttt

SEQ ID NO: 128526 - DNA, 487 bp, Glycine max
tataatagctaagctcggtttgcggacttacccgggaagactgaagaaacttattattgatcgataatgctgaagaacggacgagaatctttgcgtgattactcacggaaacgttactgaagcgcctcggcttggattatcttgaccgaaacaattttgctcaacaaatttaagagaatacgaaatgccaagaaggctgaacccttttcttcttcactcctccccctatgtatagcaaaataggggatgagcttgtcacccagctcgcccatgcgagcaaggatgcttcctccagaagcaacagccatctggaggaagaatctagaatgcccaagtgggccagattgctattcgtacccccctttttactaaatgcacccgcttctactttattggtaattctttatgcgtaacctttgctcctacgtattcctcaattgcgatgacgaaatcagagctacgtagttatttcttatgcgtgaataag

SEQ ID NO: 128527 - DNA, 339 bp, Glycine max
  unsure (1)..(339): unsure at all n locations
gcttctcattcatcttatctagatntgtacttttgtaccaacaaccttaatttagggaaacactctcaccatcactatataacaataacgtaacctactaccgcgttctggacccacaaattatcaacaaaaactcgtggtggatcttgtttatgacagcagaaagggggagccatggccctcaagactttttacgataaaattaaaatatatacacccaacactcgtggaggatcttggcacttgccagacacagcatccatgtccccaagactttttattttacaataatatatgttgaatcaaaaccatcttttaaattcatctacacacaaaata

SEQ ID NO: 128528 - DNA, 496 bp, Glycine max
  unsure (1)..(496): unsure at all n locations
tactcacgctctagttgggtgagtggtttagttgcctgatcatgatggtcttctatggttntgtaactagtggtaggtgatcatttgtaaatattttatgcttaagtaagatataagtaaaattacactggtgtatgtggttcaattagtaaaattatgctttctagcgtgtgtgagtgcatcatatcccgcaccgtgcgtaaggaattttttcaccatcaacggttgatttgatgcactcaacgttatgttagcacacaagattataggaccgcaactccttgggtcgtgtaatcctttgaggccgcgaagccaagcacatgtaacatattctcaatctcaaataaaacataatttcatccctcgacactgttgagaggatcatgtaggaccctaattgttccttcgacgactccacgacatccaccaccacgaatgtcgtgccggtattggagtcgtcttgcccaagctcttgagccatcacgtgaatatccac

SEQ ID NO: 128529 - DNA, 424 bp, Glycine max
  unsure (1)..(424): unsure at all n locations
agcttgagatgaggaagtgttgaatgttgttatcttctgcntttattcgnngaccacagagtggtacctggagatatgtcgcgggggtcatgaaccttggggacgtcaggtggggtgctattgcccaaaaccaagcttgaccaatcccgacccaacccgggcatagttagtcagtgagaacctgtgatgtacctaagcaggcgagctcctggcagtcaacagattaaaggaacagagaccacacagcaatgaggcttgtgtggtggctggccagctgtgaatcttgtgtgatatatgggttatggcttctggtaatcgattaccaagggtgggtaatcgattacaaggctttaaaatgaagacaggagggtacatctaatgttagtctctcatgcaanacctttgggatctctcatgcacaccc

SEQ ID NO: 128530 - DNA, 427 bp, Glycine max
  unsure (1)..(427): unsure at all n locations
tccatcagtgcataacgtgacttcaaaagtatntgcttttcctcttttatatcnncatattcttttgggttcgacaagggttgatgcaatcctaccccgcaagggcattggatagaagactccaagaaaattgagccagagatgcaagagaaggccctagagttctcatgagccttagggtagatttcgggctcatgggctaagtatgagcccacttatcttagtacatattagattaaggtttcattatttttgggccttgtatttagggctcaataatgtaggtaaggtaccctagaaatgtaggatttttcagcccttgtattttacggcacctagactatgttttggtattacgggtagtttgtaatttcacatgccttaagtgaatatttgatgtgtgtgttagaaacataatttaattgaa

SEQ ID NO: 128531 - DNA, 315 bp, Glycine max
tgccgctgcagctgttgaatgctctgcttttttttagctaatggctgacatatgtgcttatgagtggaagatttgaacttatgacactccgtttatggatgacaagaggagatactggtgtgatcatgtcgatattgacgctagccatgtgttactaggaatgccgtgtcaatgtgacaagcaagttgttcacaatggtgtgtcactcataatttcctctgttcttttacggctgacgtgctttgctcatatcttcgtcttgacttgaagtcatgtgcgctcgtgtgagaccttcagtgtgtacatatacccttt

SEQ ID NO: 128532 - DNA, 293 bp, Glycine max
ctactatatcatggctcattttgagactttacaattctcgagaacaaatcatcttgtatcctgtcgtcatggattatacaaggcactctaccaatgtatgaatcgctggatcgataatgctcattactgccattgtaggattgtctcgctgaggagacatcttacattagatacacatgttttccattgtacagctgacatgatccagtatacctgatgtcacattgagaatatcgcttgaagctgatggttctattgcttgacatgatggtatctatatcttggatggatat

SEQ ID NO: 128533 - DNA, 428 bp, Glycine max
  unsure (1)..(428): unsure at all n locations
ttaagtcacctgcngctgcagctgcacacatgttgagggcttgtgattctgtcctggaggtatttgcatcaatggcgatttttccaaaatcaccatctacaagccttgcacttttacaagtggagtcacacactgtaggcaatatgtgattgatttccaaaatctagcatcgctcaacactaggcttgtcacttgcttagcctcacttttactagcatgtggactagtagcccattcctccgatgcaaacatagatctaattgcattctgttgttgctgaatgcaattcaatgtaaggtaataagttgcaaaccttgtcaaagccagccttgccaattccctcccctttgaatactttctattcaaattaagcgcacatgtatgcctatanttgtaagtagtgcttttctttgcattgtcaatggtat

SEQ ID NO: 128534 - DNA, 291 bp, Glycine max
  unsure (1)..(291): unsure at all n locations
tcctcggggccatttagggctgccttgcagagacgttctcttatcgnttagcgccgggaaaagggaaacaattgcgtggtcatgaccccatgcgcacttgcattcgttactatgtacctgctaataggaaacaaaaacacgccgacaaacgtgatgggacatcgacttaccttggttgatttctggcatcgaaatgtctcgactctggaccgtggactgagacgattctactctttgctatcacaagatatgcatgtgcatgtatgaatgtttctgatgccatcaatttat

SEQ ID NO: 128535 - DNA, 403 bp, Glycine max
agcttgaagttgcaatagtgctaatgtttttgtttttatttactccatattgatgacaattaacttgggtttctacctttgtgatcatctagttaatgcgctcagttgtttcaagtttggtctttggcaagtgtgtacaaagttagcacctatcactttctatatttgttggtgttcacacctcactatgaagactaaaagtttcaagtccttaatatgttagtttttaaatatatttggaggtagatgttgaaggtacttacgtctggccttgtgggagagctcattttcttgaaggctatgtcagtttttagtaaaaggctatgtcagttctcaacagtgttactatattgctaataacaatgttgtctttgagagtggtgatgctcacacatacttataa

SEQ ID NO: 128536 - DNA, 300 bp, Glycine max
  unsure (1)..(300): unsure at all n locations
tcctatagatatgatagagagggttcacatcaataatgttgtcttatcatatgctacaagatctaggaagccatgcaaccatatacatctcggatacatgccggcatgggcattggactattgctctaaaaaaccactatttttatccacaagatccatatgtgcaatataactttcaccaagaaacacatacttctgctctcttagccactctacaacagcttantagtcgcattgcgaaccactactacaggcaagctcgggggcttcctttttactcttgccagtgcttactgtgat

SEQ ID NO: 128537 - DNA, 413 bp, Glycine max
  unsure (1)..(413): unsure at all n locations
agctttgaatgctgntaagatctttattctcttttctttctgggcgctggcttcgggtatgatgcctagttgagtactctccaattaatcatcacatagttttatcacgaagaagttgtgaacttatgacctcagatccatcacatgaattttatgggatcccaagtgattcactgagctttcttggctttacagttcaatttgcactgcacttcgagcttggctttattatactgctagtgaaagggttgttgcacgactgagaaagaatatgttcagtcatcttgtanaccaggtaaaacaatagtcataatgattcttgcattgtaactctttaagtgtgttgctttttctgagtaggcttgtacattatcgatgattgagttttacgagatagccttctttgatgtact

SEQ ID NO: 128538 - DNA, 432 bp, Glycine max
cctaccaagcaaagcttcttgattctgtgatagcactgttattcggcgtgctattgacaactatgatcattaataagaagagtgagcacgcgagcgcacaatgaaatgattccagaagacaatagtattagccaatgatgacagtcctcacaaatatcaaccaaaatgtatgataaaataacgccgatatttacatgtattatacttgaaacaactgcatattctaaaacatcgaatttgaatatgggtccgcattacctgatgggccatcacaacctcatcatcctcaactgagaactgcataattatgtccaatcatgtccaccatgagaacactctataagcttgccatgtacataacactcctaagtaaacacaattagcatagcacgcacaacatgcatactgcatacttcattcatgtgaaacaac

SEQ ID NO: 128539 - DNA, 348 bp, Glycine max
  unsure (1)..(348): unsure at all n locations
catgcaagcttgttcttaattaagacttcttttcttttgaaacataanctctcaagcagaacagatatttttcttagaagaaattatctataactcaaacgtgaaggatgccaaaatccaatcagaaccaaactatcaaacaagaattctcttgggcaggaaacaacttgaagagcttatttaatcaatgtcaatcatggcaaagggtgaggaatggcttggaataaatgggatttggttgcttcacccaatgacatggggggttggggattaaaaatctataaacatttaacaaaactttgttggggaaatggatgtggagattattgaatgaggatgacggtcttt

SEQ ID NO: 128540 - DNA, 401 bp, Glycine max
  unsure (1)..(401): unsure at all n locations
accgctccgcttgngaatctagcatacctcttattgttgagtgttatatggttttttccatgtttaatttatatgcaatggttgtttcttgtattgtttgcatttgatattntgatgtatcattattntgttattatgtatgacgagtttttgccagccatgatctggttttgaggttttcttttagcatcatttctaaatggttgagtaccctctaggtagttacttggtggttggttgaacttgaaacagtagcaaattttagttcctttgtggttaattttatgaagatggtactttgattaattaatctttctattaccccctcctaagtttaactatcacaattctcaagggatcttgtgggtttggatttttcgcttggcacacatgctagttgg

SEQ ID NO: 128541 - DNA, 420 bp, Glycine max
  unsure (1)..(420): unsure at all n locations
ggctgcagcttataataacanctttgtttctttatatgacgacaaaccatagtgaccaaaggttgactatgcaagattctttttcaaatcatcatttctttctcaaacttgttgcaagatgagcatgatttaataacattctcatacattaagcatttagtacacaatgagtttgcatcaattaatccagaggttgcattttcaagtttaagttcctctaattctatgttcaatgatgaaatttatttttctaaaagattaagatgacttccttattggatgaaacaagttttgcaagtttaatggattctttatgcaaatcattaaatgcatcttgaagcacatcgacattaattttcgacgtcacttgatgagtccatgtcattctcctaccatggtatgtatgctatctcttctttg

SEQ ID NO: 128542 - DNA, 327 bp, Glycine max
  unsure (1)..(327): unsure at all n locations
tggcttattatctaatggatggcgctgcctattacctcttatcctttgtcttccactgcatctcaatggtggaaaatcaccattaaaggacctcattgaagctcacagatctagcctccatagaagctgcacaagcaagcttccattaaacctacatgtattgaccatactcaaantagttaatattctgctatgttaactatgtctaacatgctaaaaccaagagcgtccattcataatattaaccagcgttaaacattgcgtatcattatcactcgtgcctggtaagaacgacatgcatactcattcaaaatgtcaacacttgtc

SEQ ID NO: 128543 - DNA, 322 bp, Glycine max
  unsure (1)..(322): unsure at all n locations
ttccgactatgctcttgtgtggtggaacaagctacaaaaggagagagcaaganatgaagagccaatggttgatacatggtggagatgaaaaggatcatgacaaagcggtatgtgccggctagttactcaagggatttgaaattcaagcgccaaaaactaacccaaggcaacaagggggttgaggagtatttcaaggaaatggtgtgctcatgattcaagcaaagattgaagaagatgatgaggtaactattgttcgaattcttaatggtttgactacagttaccctctgaattgtcttactgcacgaatatcgtaagatata

SEQ ID NO: 128544 - DNA, 436 bp, Glycine max
  unsure (1)..(436): unsure at all n locations
cggtgcatatgatttatatgctccagcttaagagggagtgtttaatattntagtatttatctatgtttgttagcttagttggtaagctntattcagaaggcagcagtgaattgtcactgtcaatagtccttctctctctcttgtgtcttgtatatatgtatcattttgaaatcaataaaagctaagtgagaaagagtgagggacttccaacctgaagcgtggcaaatgcaactgacgcaaaaatagatcaaagataagctcttataccatctaagaatttgggcttatggcctaacacaacaccacaaaaccagcttgaaaggtgagggttgtccacctcttatatacactacattggcctcatcactaatcaatctgggactaaaccactaattttgaggctgcaattaatgtaacccccatagaggctgcaact

SEQ ID NO: 128545 - DNA, 447 bp, Glycine max
gcttgaggttaatatcaaagctgcaaattctttctctttaataaaagtaccaagtatgtgatacagagatgatttacttcatgaggcatgtcaaaaagggaaacaaattaaaaactctttttcaagtaaaaacattatttccacctcaagacctttagaattgctacagcttaatctgtttggtctaaccagaacatcatctatttgtgaaaaaagtacgaactctccatagaggatgactactctaaatggataagggttatgtctctagctcataaagaagagtcttctactttcttctttaaatttctgaaaagatatcacaatgaagaggagtatgcattacttcaatcataagtgatcatggtgagaattagagaatgattactttcatctattttgtgaacaacatggtattctcacaactcttcactaccagacacctta

SEQ ID NO: 128546 - DNA, 449 bp, Glycine max
  unsure (1)..(449): unsure at all n locations
gcagcttccatcacagcgggttggtcccaatttgtttatccaaagatcttgcttgatggtgagcatgggattgacaagacatttgaagtagcccaaaaggagtgggcagagtattcttctacctggcagagaacaatgtcctgttcgaaggtattctcctcaagcctagcatggttactccaggagccgagtccaaggacaatcccactccttaaaaagttgctgattacaccctcaagctcctttctttgcttcttntttggtaatttatccaacatatatgctcaccatatcctatcatcctttctgtgcattctttctttctatctattggtatgttatttaagtagacaattgtcagtcaaacacacacacacacacacacacacatatgtatatttaacaactttaagaaatttctatcgttgaaaatattgacatataagctc

SEQ ID NO: 128547 - DNA, 462 bp, Glycine max
  unsure (1)..(462): unsure at all n locations
gaccttaagtcaccgcggctgcagctgctttacgtattatanaatgtttattttattgtgtgagtaagccaaatgcgtttttgctttgctttgaagatcaaaattctaccttttcctcaatgcatcgaagtgagttctaactcagttataatgcttggaaaaccatcagaggttccagctattccagcttcactcttggaaaaccaaacctgacaacttcactcttagaaaaccaaacccaagaaaatgtaaagaatgaaaatgagtatgaaattggaatgtaaagaggccagggttttctcgtgcgagaactgaaagggttattgtgttttgttgagagaatagttnttagatccagtttctttttatttgatctanaacatctttatttctagatcatttaaaattagaagtgactttaaaacataagcgtttagatcggttcaacatatagcacaagta

SEQ ID NO: 128548 - DNA, 485 bp, Glycine max
  unsure (1)..(485): unsure at all n locations
aagcttctcaggaagctgtctaagctgttcgttaaccgttggatcttcttgaaatttggtctgtaggtttataggatagatgtccagaatctgaccattgcaacctgtgacataatggctagcatctaagaaacgcttcctttcccgagagtagaagcacttgagtgtttcagatttggtttttcgtgtagccttggaaaacaaccattcctttctccttctttcttctagtacccttccccaacgtcccatgtaacgacccgcctcgtcgctacggtatccacactctaatattcgatgatttcaatttttttttataaaaagaacttccttaattttttattatgaaaatagaagtgattttgtcacaacatatattcatccaacaacacgccattacttaagtgaatatgcataattacatagaaacaataattgggtacacgtcatacacataatgaanattaaatttgttcatagatata

SEQ ID NO: 128549 - DNA, 423 bp, Glycine max
  unsure (1)..(423): unsure at all n locations
gcttctcccccaattntctataaataggtgtgatttgtgaagtggaaaagggttcagccccttaggcacttctctctctttcgaatttgcttagaaaaatgttttcgtgaagaanatccaagccgaggcgcttccgtaatgtttccgtaacgtttccgtgagtgatttcgcgaaggttttcgaccgttcttcgacgttcttaattcgttcttcatcgttcttcggtcttcaacgggtaagtacctcgaaccaagcttttcgattcattctatgtacccgtggtggtccacattgtgtttcgtgcattttccttctcgttntcatttactttccgtaccccttttgacgtgcttaagccattttatttaagtcatttctcgcttaacctataaataaaataaacttccaccgatcatttgaatt

SEQ ID NO: 128550 - DNA, 442 bp, Glycine max
  unsure (1)..(442): unsure at all n locations
cgctctgtttgcaatatttatgtagtgtttggatngatctctatatagaataaagtntggatcaattggaaatatgcatgactgagatcacattgcatgtaattttcatgttgcttatccatattgacctatgtcattgagtgcactgatgtggtagtcattgcggtttagttacatttgttgtagtgacaaaggtgcaatgattccattattgatgcatgagatggaccaagttgttaaggtggaagtgcgcttaaggacttttgataaaattgttacaatatgtagcccaagtgggagattgttggaatattctattccaataattaatgtgggctaatattataagacaattatattcgctatttatcattagtgagctntattttatgtgatcaaattaagagagcccgttagacaaccaaatcatatgatatgaact

SEQ ID NO: 128551 - DNA, 364 bp, Glycine max
agcttgataacacgcagagtctatctttgtgttttgcgaccttcactaatcgcggtcgacaagcctgtgggcacgcggagattaactcattttcgccctcacaagagcgtgcctactgtacttttgagcacgctgacgaccggaaatacccgagtggttatccgtataaatccttagatgtctgcaagacgaacagcctgatatcacgcagagactaacgtcgtattctgcgccctacgcaatcgcgtgcgaaagcccgctgcacgtggagattacagtattttcgcgctacaagatctgtatactgactttgagtacgctgcggcggaatacccgagggctatcgataacttttgcgtctgga

SEQ ID NO: 128552 - DNA, 455 bp, Glycine max
agcttcaagataaagatggcctcatatatttctttattttcagaagggaattctatcaatagacctccaatctataatggagagggttaccacactggaaaacccgaatgcaaatttttatcgaggcaatagatctaaatatctgggaagccatagaaatagggccttatatacccaccacagtataaagagtttcaatagatggtagttcatcaagtgaaagcataaccatagaaaaacctacaaatagatggtctgaagaggatataaaacgagtacaatacaacctataagccataaacataataacatctgccctacgaatggatgaatatttcatagtactaaattgcaagagtgctaaggagatgtgggacactcttctattaacacatgaatgaactacagaatgttaaagatctacgataaatgcactaactcatgactttgaatat

SEQ ID NO: 128553 - DNA, 467 bp, Glycine max
  unsure (1)..(467): unsure at all n locations
atgatacttgttaatgttatcttactaattgcggttatttgtattttgtattaacttcttttataataaactcacccctcgcaatttttgtaccgtgtgggtggtacctataatgatcgcgaactcttgttcgtggaagcagaatgacaacagttgagtacgagaagtaagattcttttgtggagccgccgatccgacatgatgacgttgggattattttgggagagagttgtgttttgttaatcaactcctccatagctggttccataattctttgtgttgaattgaggatgtaaatcataaatttaattatatgtatgaacaaatntactcttcattatgtgaatgatgtgtattgagttactattcccatatatatatgtattcacttaagggatgcggcgttgtttggtgaatgtatatctagaaaaaaaattactttcattgttcataagcacatgaacgga

SEQ ID NO: 128554 - DNA, 351 bp, Glycine max
  unsure (1)..(351): unsure at all n locations
atgaaggaagccatgaattgcatagaatgaatcaacttacaaagttagtacatcagttggttatatagttagttacaagagtaactaactcacaactaactgaattaactcttagttacatagagatcaaccaactaaactaactctaagctaactttagttacatagtaatctatcatctatgctaagatataatacctgcgagtgcttgcataatagaattattggctttcactactcatattttgaatggctcaataacgctagtctttgtctacgcaatttggatgggaagtaagccattgatgtagggtcagggttggcactangagtgatcccatgctctttgat

SEQ ID NO: 128555 - DNA, 321 bp, Glycine max
atgcaagcttggttcgaggtacttacccgttgattatctatgaacgatgaagaacgaatgaagaacgtcgaagaacggttgaaacctttgcgagattcctacggaaaacgttacggaaacgtttcggaagcgcctcggcttagatcttcttcacggaaacaatttttccaagcaaatttgaaagagagagaagtgcctaaatggctggtatccctttcttcttcattttctcccctatttatagcaaaataggggagatgcttgccgcccagctcgcccaggcgagctcagctcgcccaggcgagcagggttgcttccttc

SEQ ID NO: 128556 - DNA, 244 bp, Glycine max
gcctgtcttcctacttttattacttgacacccgagtgctacacaggagatatgtctctggagtcaagacaccctgtggacctcatgtggggtgctatggctcaaaaacgctcttgacctaactgtaccggcctccatccacgtcagaatgtgacaacctgtgaccaacctgaccaggctagcacctatccgttatccgttgaaacatcaaataccactatgctacgacgcttagcgagtggctc

SEQ ID NO: 128557 - DNA, 336 bp, Glycine max
ggatccttagcgacctgcagctgcacttaagcagccaattttttttgcaagctctcagaaaaagccaactcctaaaatttgatcagcttaatggggttggccggctcgcgcactaccaaatgaaattgttacgcgatagggatttggttacgcgcttttccttaaggagactgaacgggcgcttgattacctgagcgagcctcaacaaccacactattttttgattttctgcctaccctaggtgccttacgagttgtaccacaatggtacagatggaaaacatttgcattgctatacctaatgaaaatgatttaccccaaaaattaatattttact

SEQ ID NO: 128558 - DNA, 355 bp, Glycine max
gtgtcattattagtgaagcccgctagctatttatgtctctctaagcggctagtgtcttgtcctgttctatttatcagtattcaaaacttgaataactgtgtcctgattaatatgtctgattccttcgtctgcagatgtctttcatgaaaagaaagagtgtttgttctaggccaacctctcaacatgatacaagaatatgtcactttttgaggcttggaccagatacactcgatatgtcctgggaagacatgtattatccgagaggcacagtggaatctatcatacacagcttgatgaatctaaggattaattggagaggacttactgtcataatcgccttatcaattcagctaca

SEQ ID NO: 128559 - DNA, 399 bp, Glycine max
  unsure (1)..(399): unsure at all n locations
agcttcatctagaagtttcctcttttatttattcattgtcactgatagtccctatcgccacaatgtattacctaagaggatgatatctaagaacccagtaaagttacatgaaactacccttgagagttgtcactagaaaggaactggatcttttccattangttcctaaattaggggggcacatagcaaactcactttggcttgttccttgatcgcatcatgcatctcttcatggcattgtaatggacatatcattcttgcatttatcatttatcatattcatgcattgcatttgcataagtcattacattatcatacatcttcatttagcactgctttgttctaccaatggcatacattctattttcatattggcatgttatgttcacttatgcatgt

SEQ ID NO: 128560 - DNA, 432 bp, Glycine max
tgaactccactcatccatgaacctatttgtattattttttatgaaaatcgctcatgatgtatgtcatgaggaatgttaattattactcaatgatatgaaatttacttacatcatccacaattgtagtataactatgttcagacgtttgttacctgatattatttcatttacatctgaatatgttaaaaagaagattaaaccaaaaccaattgtttaaaattaaatactagaaataaggcaaaaaagtgttaacctcgaagtctgtagcagtgtggtttgtaaaatagtatggtgtcttacaacagagcatttaatcgcttataaaatatgcagataaaaataaactatcaaatctagtctaaactattgatgtaatcggcaatacaaaagtcatcatgatagagaacttgagaatttatgatttaaggattt

SEQ ID NO: 128561 - DNA, 292 bp, Glycine max
  unsure (1)..(292): unsure at all n locations
gagcaatagatacattacggtgcaaatacattnccaatacatgtaatggaaactaatgactgaatatacaaacacaatgtttggaacctaagcttacttatacatatgctttcaaagggaaaacacctaatctatgagtcatcaccactaaactcaaccatgtttgtcatactaaaacaagtgagagatgatgattctggacatctctatccaactccctgagaataaatctgatgggctcatagagatcaagtcagactaagcttgtctcagaatcgactaaatctccctt

SEQ ID NO: 128562 - DNA, 262 bp, Glycine max
atatatacgaaggatatccaatactctacattaggtctatctagcttcaaaacaacttgaccctggaaaaacatacatttacctatttgaacatgcaaatcaatgttaatgacatatttagatctaacagcgtgaattgaatattttacgagcgctcgctccaccattggaaattgtactgatagtggctcgcacacgcatttgaaagacaggtttgttcttacgaccccttactcactctggatagatgatggttttttct

SEQ ID NO: 128563 - DNA, 453 bp, Glycine max
  unsure (1)..(453): unsure at all n locations
gcttctccttctcgttctaacttcggtctcttgtggcttctccgcttcgaatttgggcttccatttgggtgtttcaaacaacacttccttcaccgtttctttcttcggtggcggagctctgttttctgaacctttcgcggcagatcttggtgtctccaaaggcttgcttgagggtgaagaatgagatctgttggtactgacgcagcaacccattntggaattgtgaagcaaagtggtcgtaggttgctaatgtgtggggcgaaagagaaagaggaagggttgttccattatagtatgttgtagtgtagcgataaagtagtagttgttgaagagggagaggactccagagaggatgctcaataagaggaaatggttgttagaaaaaggaactgtgaagctttgcagaggtcaatggaaggcatttattactgatagatctcttcaatgctcatg

SEQ ID NO: 128564 - DNA, 446 bp, Glycine max
ttcggcactattgcataatctgtaactcagactttgctcgagacgtgtatatgtattgcgaataccaatatcatttcgaaaaccacgattctacgcatatgctctatacaatgctttttttttttttggtgatatgctctatacattgctctcacttcataattaaccatttcacattgtttcacattgtaaattattattatctaatgcgtgaattaactagggagattatactaatttaatcgataatacttgaaaagagaattgtcatctatagtaatattatccggtttgaatagatcgattggctgatctaatggaggatacatataggttaaagaaaaatattatcaatcattgaatgtaaaagattgcgtttatcctgtctagtatttaaacattgaacatgaaagtctaaatttgaatactacactttaatttgtact

SEQ ID NO: 128565 - DNA, 362 bp, Glycine max
agtttgattcattgcctaagccaaaaagagtattagaaattactcccaagctctacccatttttcaaaaaaaaaaaaaaactaactcataaatgagtatcaatattattgatttgatttactaccatgtgtttattggattaatgttgtgaacataagttttagatgcaaaagaagaatgaaatagagaagagtacaagcaaaaagatgcaacatgaagagtataattcttatttaaagatcaacaacatgaagagagtatctgtttaccagcactaatgaacttcaaactgacctcttcaaatgataaaatataattctcttcaaatgataaagattaagaatcaactaatgcgtaattta

SEQ ID NO: 128566 - DNA, 442 bp, Glycine max
  unsure (1)..(442): unsure at all n locations
tcacctttcactttaatctcataatatactgctcaatgcttatgtattgagttattgtgcctgttagatacagggtgattgtgtttcaacgtcccccatatgagtcaaaaatttaagaagacccaaaagcaacatttaaatgcttcagattggaggtggatcacaaatgtcaaaccaagtaccacctgataagtatattatagacaattaagtgtggagattatttttttttatcggtaaatattaatntattaaaatattaatttttgttaacaaagaactttcaatcccttttatggttttttttttaactatctagctcactttatattaagctggattttaggttattntaatttaattaattgtttcaagctcgagttctcaaatgacttggagagaanattttgctttntataacttgagtataatttcaacatat

SEQ ID NO: 128567 - DNA, 451 bp, Glycine max
  unsure (1)..(451): unsure at all n locations
ctctgagcaacctcacttcagagtaaagcctatccaacatggtatgtgtcatcacagaaatttctcagcttcacctggttccatgccacctctattccttcttcctgatcaaatgcacgatacactttcttcacagcaccacatccaagcaactcactgtatctaccatagcgaccggttggatcggtctcaacaaatggctcggaatctttgtcaggggtaacactcggcatctatcacatgtaagaccaatcagatactcggcaaaatctaatcatatcaaaccaaattcagcatgccactaaattttgtgggagaaaaaggaaacatagcacaacaataacaaaacaaccccattgaagtcttcagatgaaaattatctaagaagaatcagacaaaaataaacttcaaattaaaccaataacataanaagagaaactgacatgtcata

SEQ ID NO: 128568 - DNA, 362 bp, Glycine max
agcttcctacccgccagccacactgcaatcgccgaaatttctacttccgcgaaacggcgtgtcggtttggaatcaaagagtttggtttctgctttcggaggctttgattggggttacagaatgaacaagtgtttgacagctacaataaaaaaaagttcatatacgacaattctcacaccttggtagataccctgtttgatccatcattcatgactctgctttacttttaatttagttaaaaattaagattctgacctacaatcctgaaattagggttatgcattcttctaaattttccctattctattaatcaatttggtgatgagcgaatattcctactttattgattaacttgtggatgg

SEQ ID NO: 128569 - DNA, 472 bp, Glycine max
  unsure (1)..(472): unsure at all n locations
agctgctnnttcatctgtaatctgcctggatctgtcataattatatagagtctctctcagtaactctcccagtcagagtaggatagccaagatacttgtcaatacaacatgtgtaaccaaactcaaggtagacttatccttagaaatgtttttttgaagctatgaacttggacttttgttaaatgactttaaatccagcagctttacaaaatgagtcaagcactagacacaggttcaagctggttagattggaatttgacaagtttaatttaacacaaaaagaaaagagtcatttgacacnatcacatttcttaatattgcattatctttcaagacatgtttaagatggtggaaaatantttttctgatatttttctaccgattaccttttcacattaatatagaattgaggatatgcattgcagcgaaaataatttgtatatcatcatcacaatactataatgtactctaa

SEQ ID NO: 128570 - DNA, 459 bp, Glycine max
agctttgataatgagaatctgtccttcaaacatgcttcaaattttggcatctgaagtttgagagctctgggcagataagtctgctaaagttggaggtggggctgaagtagaagatgcagggatgccagctattggtgtaaagaaagaaggaatatcagctgctctgagcttggtcttccttgtctctggaaaattaactgtttggtcattcgcattccaacagttctttatgatataagctaagtcaatagccggtcttaggttttcataggaggtaagggcatcagatcccactcccctcgatctacacaaggctatgattaaagccgggaagcctaatcgagaagagttagactgagcgatcatggtcatttgtccagagatcaaaccgccaatgttcatgtccatccttgtgattaagccatagaccaacctagctctgtttgtgttcaaatctga

SEQ ID NO: 128571 - DNA, 354 bp, Glycine max
ctggcacttcttgaccgcatggtctcgtcactacaaattccatggcgtcgttgaggatgcatggaataaggagcaacatgagatatccggaaaattagatgaggtgggttcgaagtctcaaaattttaataagaatatttttggaaacagcttttgcaggaagagaagaattgaggttagctttggggcttgcagaaggatttagataataaccattcagctgatatccttctcatggaagtggatcttctatctatactcaggtaggtccttaaacaagaggaaagtctctggtatcagaagtccacagagggtagagagcaagaggcacatggagtatggtgggggagggac

SEQ ID NO: 128572 - DNA, 427 bp, Glycine max
  unsure (1)..(427): unsure at all n locations
ttgagtatgaggcacacattggatgtctgttatgcctcttataggcttgaaaagtgcaagacaatgagcagtattttctggaaaacgcgatgaactcgctaagcgagcatgctacgctaagcgagttcatcaatgctcattgtatgtaacgctatctgaagaactcgctaagcgcgcttaccgcgctaagcgagttcatcttttgaggatgaacactcatcctcttgctgaactacctgtggctaagcgaggttgaatcgctaagcccaggtaacttaaatcattgttttgttgatggtcgtgcgctaagccgagctttcctgagccaagcgcgattggttgcggcatcctctgagcttagcaagcttcgctcgctaagctcccaacacttagtagaatttntgaagagttggcgctactaagcact

SEQ ID NO: 128573 - DNA, 340 bp, Glycine max
gcgttcttggtggcagcagcgccatcaacgccggcttctacagccgagccgacgctgatttcttcgccaggtccggcttgccctggaacctcaccctggtcaacgactcataccaatgggtggagaaggaagtcgtcttcagacccaatctcaagacgtggcaatccgcggttcgcgatgggttgcttgaagcaggggttactccctacaacggtttcactctggaccacgccaagggaaccaagatcggcggttccaccttcgacggcgccggcaggagacacacctctgcggatcttttgagatatgcacgcgctttcaacatcaaggtgggcgtcta

SEQ ID NO: 128574 - DNA, 452 bp, Glycine max
  unsure (1)..(452): unsure at all n locations
ntgagaaatatcaccgctgtacctcttgattcaaggttgcatgaatcttacnatcctgaggagttcctctgccaagctttgaaaaatggcaggtttgatggacttattgattcaaggttgcaggaaactaattacaatcctgaggagatgatccgaatgatcacttgtgctgcagcttgtgtgcttaactcagccaagctccggcctcgaatgagcctggtgagtttactgaattcangatatatggtgttttggtttcatgaaaaatgtcaaaaacactcttattaacttaaatttattggtaattattaattntgatggatcgtacgtttaaatcagaagagtgaaattcagtcaatcacaaagaatgttgagaagatgatattgctagtaatttctcaatttaatatttgaattttggtatttcaattgctacanggtatgtagaaaat

SEQ ID NO: 128575 - DNA, 459 bp, Glycine max
agccttggaccttcttcattggaatttcctccttctattgcactatcatatctccattctgcaatcagccacacaaatatcatttgctaatccatatagaagaagaaaaccaatcaagtgaaagtactgatttcacagaaaaataacaatctttattcaataatcatgaaaaagagcagaaaaggaatcgctttgggcaacatgcaaagggttggaagaaacacacagaacactctccacccatccaataacaaaatccactcaacatgatagagaatcataaaaacctttaggaaagaatagttacttgtttttttttttcaaagagtattatcctataaaagataagcaattttttttttcatattataagggcaagggtgcaaatacaagggtgtagtttgacatgcaaaataccttgagatgcactagagtgactaaaagagtcagccacccata

SEQ ID NO: 128576 - DNA, 472 bp, Glycine max
  unsure (1)..(472): unsure at all n locations
tatcgcatttattaaccatttcttccgaatatgccttgattattatcctttcnctacagttattaacagcataacaaaagaaagattagacaaaaaaatgctcattaatatgacctacactataacttcatgagccgatgtgcattgtaaaaaatggtgcatcaacaccgtgcttctacttcttgtaataaggatggaaatcagtcttcgggataaacatcatctcccactcttacctcttaccggcaacagtaaactcngaactcaattttatctcttatttattagtattctatatttttatattaaattataaaaagcccgtgggacctgcaaggtccgtgggtaaaacccatggattaaatatatcatgctaataagccggaaagactctaaaaaataaggtctatatgaacccacatcagtntgtgcaaccctaagtttaagtgactattaaatgaatccttaatga

SEQ ID NO: 128577 - DNA, 345 bp, Glycine max
aaagcctcgaaagtaatgaaagttaggtccaagaagctgttcaaaattgtctgaatcaatagaagcatgtttctggtgcttccgtggtatcaatttgaagattggcacttctaagtttgtcataactagtgggaagatcatgcttggttgtttaatattgctcatctattatgttttcagaaagaagcaagctactctagaaaggtactcacttaaattcatagctccatagtagaatgtatctcaagtatttgtttctgtatcctcttaacttcgaggatacaatcaccattgcatatcaaagtcatctttaatttaaattaaccatctttggtttttcctttc

SEQ ID NO: 128578 - DNA, 477 bp, Glycine max
  unsure (1)..(477): unsure at all n locations
tttaagttggaagattgcagatctaccctcactccgttattcgacggatatggaggctgatgagctcctgctatttgagctgacgtcatggccactcctgctgacacttctagaagtgatccctacatcaatacaaagaaaaacacgttcacaaagacttgctcaccgtcactggccttaaaacaaacataagcatcacttctattaacaaattcacatggaatcccaaaaccccccaaattatccttccgctgtcataaggcaatttcccacaaactgagattacagtttttctctagaaaaattacctatgagaaaaccttactcctgataggacttaaaaaggtgaanaactcatacattagttttgttagtgaattgtagggcanaatcttncaaccncatttttactcgcattccanaccaaccctaagtgaaatttctaggggtagaaagctactattacatacgactcaa

SEQ ID NO: 128579 - DNA, 450 bp, Glycine max
  unsure (1)..(450): unsure at all n locations
agcttaggttgagttctgcttaccacctcacagactgacggtcaaaccgagcgcaccatccaatccttagaggacctctcgagagcctgtgtgttagagcagaggggtagttgggatagtttcttacccttgatagagtttacatacaacaatagttttcactctagtataggtatggcgccttacgaggcattgtatggtagaagatgtaggacacctttatgttgggtagattccagtgagagcattgccttatgacctgaagtagttcagcagaccactgaaaaggtcaagttgatccaagaaaggatgagagcagcccaaagtaggcaaaagagctactatgataagagaagaaaggatcttgaatttgctataggtgatcatgtanttttgagagtcactccgtggactggngttggtagggcgttgaagtcccgtaagctcaca

SEQ ID NO: 128580 - DNA, 452 bp, Glycine max
ctatcggagcacagcaaatgtgtcttgacatagatgttacaaacaaactctcggttattaactcgccaagtcagcaccatttgaaccatttatgtcgggcttacctctttattttcataatctctcactattcaccagcatgcatttgaagcctccctagactataaatgagtcatattacctttgaattgaaaaccaacacaatccactccaagttcttttgtcttcacagcgactgattcagtcattggtagccaaaaaaagcaccacaaccatggcagctggtaataggcaaaggaaatcttcttcggggttcttctctattttcaatatcttctcatcaaggaagcccagaggagggtactctgatgcccctgattcgtggcgcagagtctatcctagtgattactacaaaggtaactctgtgtgttgctgagcccaatattgacatg

SEQ ID NO: 128581 - DNA, 456 bp, Glycine max
  unsure (1)..(456): unsure at all n locations
ctgcagctttatgggcaatatctccgtctttggtccatctttngactgctccctgaccaatctagagctcgtactaagatgctgtgttgaaaaaaatctggtgctgaactgagagaaatgtcactttatggtccagaaaggaatagtgttaggccatgatatctcaactcgagggatagaggtggacaaagcaaaaattgatgtcatcgaaaagctacctccaccagtcaatgtaaaaggcattangagtttccttggacatgcaggattttatacatggttcataaaggacttctccaaaattatcaggcccttgangcaattgttcaacaaagatgtagtgtntaaacttgatgaagaatgcttgacagcttttcataccctgaagaacaaactcatatctgctccaataatggtggcctttgactggagtaaagaatttgagctcatgtgtga

SEQ ID NO: 128582 - DNA, 410 bp, Glycine max
  unsure (1)..(410): unsure at all n locations
tgaggactacacctccgattgaaacccatcgcgcttctgttccggcccaagttcattgcaggctgtagcaccggtttcgcttccctagctgtattggaagcggtcaccgtagcattgtcttctattgatttttgaatttttagcatggcttccgtgctagaagccatctgatcttttaaatctgacatgtcggccttcatctattcttgcactccctcttcgttatccatcttacttttggatcgggtgttataggggtgcctttgcgcttttttagttatggtgagttccctaaaaaaacaaacagtggtgagcatgccaccaaatcatgaatatgctaatgaatgattagagcacttagatccacctcaaggtctttntagacaacgtgatgagtttcagaacttttc

SEQ ID NO: 128583 - DNA, 410 bp, Glycine max
gatctctgagtcacctgcggcatgcaagcttgcacgtgcccagtgcgccatcttctcgtccagcgagtcaattgtctcttatggcgctaagtgcacctggctcgctaagccaaaatccactaactctcacttagcatgaaaatggtgctaagcgagccttcgaggacagaaagcccttaaaagctaaagttggcgaaaaatacaggagtgatgagagagttcggatagcttttgtgaaaagagacgcagtagagtgaaaaatctcatctttcaagaggattattaggtttaaaagtgattcttaagtttctaaaggtggaggagacactctcaccactgtggaatcttaatcttactttcaacaacccatcctgtcgctgaaagagaaaacctgcacggaaggctaggcc

SEQ ID NO: 128584 - DNA, 417 bp, Glycine max
  unsure (1)..(417): unsure at all n locations
tgagatgaggaagtgtagaacggtgaacttcctgcttttattcgttgaccacagagtggtacctggagatatgtcgcggnggtcacgagaccttgcggacgtcaggtggggtgctattgcccaaaaccaagcttgaccaatcccgacccaacccgggcatagtcggtcagtgagaacctgtgatgtacctaaacaggcgagctcctggcagtcaacagataaaaggaacaaagaccacaaagcaaggaggcttgtggtggctggccagctgtgaatttttgtgtgatatatgggttgtggcctctggtaatcgattaccaagggtgggtaatcgattacaaggcttataaatgaagataggaggctaagatggtctctgggtatcganctacacngnngtgtatcgataccacgctt

SEQ ID NO: 128585 - DNA, 263 bp, Glycine max
taaaaacctaacagaatttcttttttaaaaactcacgacccctaaatcaaaagattcccctcttaagggacgcttacaaacgaaaggtcaagaaaaccaaacaacatgagagcactcacttaaaacataaaaacttaaccaaactacctaagtagacttgcttcttgccgcttttcctcgtctttgcacataattcgcagacaattcagacctctttcacgtcgccacgcaccctctttttttccgtgcaaatcacgcttaaa

SEQ ID NO: 128586 - DNA, 419 bp, Glycine max
  unsure (1)..(419): unsure at all n locations
agccttagtttcactttagttattattttattcgattaagaatgagaaatcccaaagagaaaacgtccgattgattttccgctttattttactaaaaaaagatgttttttgattattatattattttttatctctntntgttttccaacgtggttacggcacgaccgaacagtcggaattcattntaaccgaagtttacggataatacaattcanacgatcggtggaaatttattttatttttaagttaagcgagaaatgacttaagtaaaatggcttaagcacgtcaaaagggggtataaaaagtaaatggaatgagtaatataatacacacaacacaatgtggaccaccatgggtacatagaatgaatcaaaaagcttgtgtcgaggtacttacccgctgaagatcgaagaacgatg

SEQ ID NO: 128587 - DNA, 468 bp, Glycine max
  unsure (1)..(468): unsure at all n locations
gcaagctttctttctcaatcaatctgtctactgactaacatttttaattgcaagctcacacacttgttctttccttgtctatcatacatatttgctcaaactcatgataaatcacaatcttcatttcaaccatgcatttaattcataatcaccctttcaaactcatatcaacactgcgttttcaaagagtcaagttaaactgttctatatgcatcaggactttcaaaatgtttccaaaacaaaaggtatgttgtaaaccatattcatatgccacaaaccataatagttcatacgtactaaaactatacaatcactatactatgccaacataataattaaaatgtactcataacgatataatgataataataataataattagggcaagtaatcaaatcttgtcatttatcacgatcctgctcctcgttatcacaatgtaacactggcgtncncggaggagtagtaatc

SEQ ID NO: 128588 - DNA, 471 bp, Glycine max
  unsure (1)..(471): unsure at all n locations
ntgcgcgccgaaatctctcacaaggaaaggagagaggctctctttcgtcggtgctcccctcatagggtaccctaactatcttatagcaagtgcgggattgtagttaatgcaacccctcgtccctatcaatgggatgtttgggtagtccccacatgagaagagaactccctcctttccttccttccatcgaggaaaccagttgattgttctgcctcctatcccagccaagtgttggtcccaatctactcttctcttttcgacacacaagcgatggcttcggagcggacatgggtgtcttatgtcttgatggaataggtgcgaaaccaaccatacacaaagagcgggtaagcagcagatgatctgtgcgctactcttctcgcaccttcggtcaaatgtatcanataagtccgccaagatagctaccactgggctctctttgctatggtgatatgcaaggaaagcatcaatcgc

SEQ ID NO: 128589 - DNA, 408 bp, Glycine max
  unsure (1)..(408): unsure at all n locations
tattggaagggagctagcagatgtttgttgacaaaggatcggactaccaagtgttgtggagacaatagtttaataccaatctgtagacattgctctattctgtaatggaaaatgaaaatagcttcaataaaacacatacatcataggaaaaaaaagaaaatattttgtttgtaacatgtaaccaacaaatatttcttatctgcttcatgtcagcttgagtcatatgcctccataaaaaaacaataaatntcatccgcatttgagttacatttgtttaaatgtagttgcatgtattaaaattatgttgctttgtgagagcccataatgaatgcactntcaacnttgtttctactaaaaagaggttngactaaccctccttgaaatccaacctaatagggcatctttagt

SEQ ID NO: 128590 - DNA, 458 bp, Glycine max
ttgatcaattccctgtttttattgtatatgtcaactatttcaccctcaaggagtttaacagaactttagagaaacaacattgatgccaataatattcaacttacagatgctagaggccaacccttcaatggaagacttgtaactccttgatttattcctgaaggatgattaataaacatcaacaaaaaatacctcatgtgatacaagtttcacaagatgtgtcagccatgcaatgaatgtgtcaagggcctgcctcacatactgaatttctgacgttggcaacgggacttgagcgtcaccatcgtatactttttcaacactcacgcgtaccacatcatctgcataaggcacgttgtgtatggtagacctacccctcatatattttcccaatgccaccaggtgtgtacaatgatcaccttgcacatacaaccccatagtcggcatcacataaaccacat

SEQ ID NO: 128591 - DNA, 464 bp, Glycine max
  unsure (1)..(464): unsure at all n locations
ctgcagcttaactgggaatgaggggcatcgtcttgagcttttgtgaacataggggcagatcaagagttttcacccgtcgatgtttttaaacaagaaaaaagggggggggggagacaaaccctggaatttcaatagattgattaaatgtcaaacggctccattcccgtcactcgaaaacggtcaagtgactaaatcaaacagaacatgcactctgagggagttcctggagagatttgcaaaagataggataaggttgcatgaattatcacctttttcaaaaggacagtcaatctgtgttttcccaaaaggttaaatcaaaatcaaaatcacaaaatagggaaagaatgtcatgaacattgtacaactntccattgcattgcattgtttcatatgaggtcagcgttaccaagantcacaacaaaggttgcatgcgtctgcatccctanaaatcatgttaactgcat

SEQ ID NO: 128592 - DNA, 475 bp, Glycine max
  unsure (1)..(475): unsure at all n locations
aagagaaagaggaaatactatgttctagatttgttttggagaagaagataaaaactaagaaacatattntgtgactgtgtttagttnttttttaaaaaattattaatagtattagtcatctaccatgatacaaacaaggctgctagccttcctaattcccgcccaaaaacgtcttttcacagtgcatttattgttttcgtcattttgtgtgcacagtgcacttatcaatgcattttttcgtttccaccaacactgaacttattgttttgtcttttcgagttgggcttggctctgcagtgttcatgccttngcatatttccgatttccatttccattgtggcctctgaattctctcccgcttggatttcctctccatgggttccattatctataggctatcttcctcatttttgttattacgtatcggcttggctctgcagtgttcatgcctttgcattttccgaattccatttca

SEQ ID NO: 128593 - DNA, 471 bp, Glycine max
  unsure (1)..(471): unsure at all n locations
ctgcagctatgctgcaacatctacatagaccttctaacctatcagcaaaatcagccacaatagaataactatgacctctccagcaacaggtacaatctcggatggaggaatcatcccaaccttagatggtcgaatccttcacaacagcagcaacaacaacaaccttattttcaaaatgctactggcccaagtagaccatacgttcctccaccaatccagcaacaacaacaactacagcccagaaacagcaaacatccgcaaccttcccttgaagaacttgtgaggcaaatgactatgccaaacatgtagtttcaacaagagaccagagcctccattcagagcttaactaatcagatgggatagttggctacacagttaaatcaacaacagtcctagaattctgatagattaccttctcaatctgtccagaatccaaaaaatgtgagtgccatngcattgagatcgggaaag

SEQ ID NO: 128594 - DNA, 456 bp, Glycine max
  unsure (1)..(456): unsure at all n locations
tctgagcgcaagtatcatccatcgtgcacacacacataagcatatcaagataggaaggaaattaatccccttccctttcggaggtcaccattaatatggtccttcaagtagaatagtccacttcacaaaactatacacgactgcatatatattttctaaatcatcacatgacatccaaagtaaattttgctgagggttggacaatgctcgacccaatcccaaagtgcgatagttcaaaccaaacattattaataagatcacatacataacatgcaatatgctttgccaaatggtcacactcacttggtattacaacatataacataacaattctcacactttcacatcataatgtctcaatcaaattaaacaacatattcttcaattagtcattccatccatgccatacatattcatactntattcttatttgagatcgacatcattgttattttg

SEQ ID NO: 128595 - DNA, 244 bp, Glycine max
actggagttgttaattgtattatttcttttgtgcattggatcttctcctatccgcctccgtgatgatttatgccacaagggtcctaaataccctaattttcaatattgtggctgaaaacaacgagaggagggtgcctcgactggttaactgggatccacttctatcaatgaatgccttaaagaaagagattgttgttgaccaggattccgcgaagagaaagcttaggtttttggtgaagtattg

SEQ ID NO: 128596 - DNA, 443 bp, Glycine max
ctgatgcaacatttggagaggttaatgaaacaacgagatgatgcgctctatgagaggttggatcaaatggagaatagagatcataatgaagaagaaaggaggagaagagggaatgatggtgttcctagacaaaaccgaattgatggtattaaactcaacattcctcccattaaaggaaagaatgatccggaggcctacttggagtgggagatgaaaatagagcatgttttctcatgcaacaactatgaggaggaccaaaaggtgaagcttgccgccacggagttttccgactatgctcttgtgtggtggaacaagctacaaaatgagagagcaagaaatgaagagccaatggttgatacatgggcggagatgaaaaggatcacgaagaagcggtatgtgccggctagttactcagaggatgtgaaattcaagctccgaaaact

SEQ ID NO: 128597 - DNA, 289 bp, Glycine max
ggtatttggatgttttgatacacatcaaaactccacggagaagagtttaagaaatacctatatccatggagttcgatcaaacaaacacagttgttttccttcacaactttgcatgaaaggtttttatgcgagaccaacaccgctttaaagattctttggatttcaatccgacagatatggagttaatatactaagtcccattctcttcttcatgaatttgacttaccaaaatcttgggtaaattatgatcattaacactttaaatatgttgctgctactctttcttata

SEQ ID NO: 128598 - DNA, 372 bp, Glycine max
attattgcaactcagaacaatgcaacagcaaaaaggttttccactgaggaaactgttgttgatggggaagacataattagcaagttgcatgaaagcattcttggtcacattctgtctttccttccaacaatggaatcagtccacactattgtgttatcaaaaaggtgggttgatgcttggaaatccataactggcctacaatttaatgatactttgctttgttttgggaaaaagatgcaaaaagaacagtttgtgtgttttgtgaacatggtgtttcttcaccttgccaattcaagtattcacaatttctctcttttgttaacacgttatcagtatgattcaaccctgataagtgcatggatctcctttatc

SEQ ID NO: 128599 - DNA, 385 bp, Glycine max
  unsure (1)..(385): unsure at all n locations
agcttttaaagaatgaagactnaaaatgtcaacctcattatatngnaaaactagtgaggaaattgatacgttaaatacaaccttagccaagtttgttgaaggaactaaaaatcttgacaaattgttaagacatagcagatgtccgacaaacaaatctatccatgggtatgagggagaaatatatgttcatgataaggatactattgtttgttatttttgtggaaaagtaggacatatgacgtctagatgcgagatttcctaaaaggtgcatcatcattcaactacaaaaggactaaaattggacctaatcaatattatgtgaatgcttacaacagaaacaactatatgtcctaacaggtgtatgccatacaaaaaaggttatcat

SEQ ID NO: 128600 - DNA, 462 bp, Glycine max
taagctcttataattcaagtgaccaaatctcaagtgccatatctatgattcattaaccactttgtagataacactgattctcaaaaacattaatctgaataagaaaggtcttattttttgccaaagaaacccttaagatcttccttcgattggagtccagtgcctccaagagatcatcctgcatatgcatagtaaagcctttatctagtagctgtcccatgttaagctgattactcttcatatttggcacatatagaacattagaaatcactacaaatttctgatcttcactccttcagcaggtaatgttctgttgtctatgaatctaaccttgctcttcttattaccatcaaagccagataaccattctctatgactaatcatatggatagagcaccttgagtcatggaccaagttcacaattctccaatcagaattgttgcacataacacactggattaa

SEQ ID NO: 128601 - DNA, 411 bp, Glycine max
agattcttacggtgatctgcagaagaacatagaccacagactcttgcaacatgtgtagatttcttattcatggcaagatgagttactaggttgaccaaggcatcaagttttccttcaagctttttattttcagcatatgaagatgaatctgtggccacctcatggactcctctaagaacaatagcataatttcttgcactgaattgttgggagttggaagccatcttctcaatcaaattcctagcttcagcaggggtcatatcaccaagggcttcaccactggcagcatcaatcatactcctctccatgttgctaagtccctcatagaaatattgaagaaggagttgctcagaaatctaatggtgaggatagctcgcacacaatatcttgaatctttcccagtactcatac

SEQ ID NO: 128602 - DNA, 375 bp, Glycine max
gtactcttgttggaggaacccttactcaagctattctatatatgatactacaaaccattaaaattttatcacactcatagcaaatcacaaataaatggcgtgaatggtttatcattacagttacaacaaatcatacacaagtggtgcacaaatcaaacatgaatggtgcgaatggtgtttctttgcaactactatccacaaagtgagatagaggttatggattatacaaatcaaagcacaaaagtaataatgttatctgtacgtgtgagaaaataacacttgaagattgctaacgcgcgacaaaaaatcaatacacttctccacaattgagaaatgcttcacgataagaaatacaagtaaaaataatagtataat

SEQ ID NO: 128603 - DNA, 451 bp, Glycine max
  unsure (1)..(451): unsure at all n locations
ctgcagcttaatccaaaccatatgactgaaccatcttctcaatctattactgccacaaggtgacctttggtatcttantttgactttatgatccccatgcctatcctatagcttgattttttttattattttgtatcacttagtaattctagtctcttagtagtttgtgacacattatctcagttttttcaactaaatatacagttttttcaagtcaatataagttgcaattaggacatctttgaataatgaaataaggtatcaactgtcaacatggttgagtggctgactaagtcagcttatgttactgaactataaagatatataatcgtgccactgctacaagtgtacaaatgttattcctaatgtcccctgtgtgttgtatgtttgtctaggttctattgggaatgttgagtcctgcacaaagataaataggcccgcggacattata

SEQ ID NO: 128604 - DNA, 444 bp, Glycine max
  unsure (1)..(444): unsure at all n locations
tatgcgcatatttccttacgaacgttcacttgctcattattttctattaaccaaaaaaatgcacccatatacaatcaatgcagcttcgttacctagattatttacatgcacccccaaggtgtatttgttacttacatcacacacatctccttggctgaatctacatacatgcatactcaaagcatttcggggtaccaaaaattgcacatgcgctcatcttggtatttctaatacctatacatatacaaacttcatgatgaatcttgactacctacacaataaggtgctacatttcatgctctgtgttttntcaagattttactacctaaagccgcatgcaaattcaaacatattttcctttgctgactaaaattgtattcaaaataaaaggtatatatttttttgaatatgtgttcttcacaaacatcaacatattatatatat

SEQ ID NO: 128605 - DNA, 399 bp, Glycine max
  unsure (1)..(399): unsure at all n locations
agcttcaatatagntcttttcttcgtctcgtttntggccttttgatgttgccaaagggggagagaacttaagggtaaaatttacgaataaattccaatcttaagggggagtaaggattgagagcacacattatcaattgtatatcngttatttagatttcagattattgtcatcatcaaaaagggggagattgtagaagcatatatgatactgaagtttgatgataccaaagatgagcgtgattcaagtcaagaattcataaattcaagaagaacgatgtacttagttgataggatcttagaaagaattccttatttgatgccgcacaggtttggctaaggaaaatatcttacaaaatctttttaaaaaatattatgttttcaaaaatatgatattttc

SEQ ID NO: 128606 - DNA, 470 bp, Glycine max
  unsure (1)..(470): unsure at all n locations
tgtaactctnggcaatttctttaaaactagtctcttataaagttatgacttttgaaagaatcttcagaaacaagtcacttgaagaattgtgacttttggaaatgtatttttcaaaatcagtcactggtaatcgattaccattaaggtgtaatcgattacacatcaacagatgtgacttcattttgaattttgaaaatcttaacattttaaaacactggtaatcgattacatgattatggtaactgattacagctttgtaaatcagtttgaaaaaaatgctggctactggtaatcgattactaccttctggtaatcgattaccagagagtaaaacactttggtaaaaaatatggtgaaaacttcatgtcctactcaatgttttgaaaaagtnttagtacttatcttgattgagtcttctcttgattcttgaatcttgagtcttgatcttgatctgattcttgaatctgaac

SEQ ID NO: 128607 - DNA, 478 bp, Glycine max
  unsure (1)..(478): unsure at all n locations
ggggcccaatngaaggatgttgtggaaaattagtgtctctttgatttcagaagctntactttttttctccaatacttacaaaaatatcatcttattttttttacctcatgccatgatttgaagaatgtgttttgctacaaagtactgatactttaatttgcttcatgcatctatatctgataccaatatattgatatatttcactggtatatatatgtgaagtgaccaattcttttaaaaaaaattatgataataaaatatagtgacatgtaacatagaagtatgtataatatagaaatataaaaagtattgtttcttgatgaaccaaatatgaaaattgttttgtttatagataatttcaagaaagaaatgagaatgatcattgatagtaccattcttatntgtgaacaataggaaaaaatgatctacaatctttngattctgttttagtaatgtctaagaagtatgtatgttcttc

SEQ ID NO: 128608 - DNA, 423 bp, Glycine max
  unsure (1)..(423): unsure at all n locations
ttttttaacgagataattaattgtaacacttattcacattgtttctgaacgtccttgccagaatgatgaatgccatatgcatactagccggcaagttcatcatttcattgtaacatgaataatgcactgatatatgcattaaatgagntaacattatcatgttcacccattttccatatataataagcaacaaattaatatctatatgaatctcancaaattagtaacacgagggatctcacaagaccaattgtattcctttctgtaatatttctggaatatagttgtcacacacacaatgtcatatggttcagcctagatttaaatataaaagaaaggtatacgcaataggtagagccatccctatttattagatgcataacctttgcacaactgtacaatgattaccacaaaaagtgaaaa

SEQ ID NO: 128609 - DNA, 492 bp, Glycine max
  unsure (1)..(492): unsure at all n locations
taagctcccacggtatctcttgtgttgtacattattatgatactatttcttttgtggtaaatctgctgctaagctcgacaatgagcatgagggcaagagcgaatgacaggttgcagagttattgagtcagtatcctcgtcgngttgatgcatttaaggagagaattgctaagtctgagcatatggctgttgagcagaggattgctatcattgagcaactaatggaggccgcgatgctgtggcttgcagatcttgagcggaggttgaggccccactctgagtangaggataatatggatgatgcttaactagagatactttctttgttttcttttgctagtcttatttatattttgaatgacgcttaactagagctagagatcttttttctttgctagccctaacttctacatatattctgaatgacgcttgctatagatacttctttcttgtaatcttaacttctaatatgtgctgcctatgtcacgatact

SEQ ID NO: 128610 - DNA, 380 bp, Glycine max
  unsure (1)..(380): unsure at all n locations
gtcaaggttttgatggcaaagattgaaaactgattntgtaccgatctacttaaatgaataatgaaggaactgaaactntgtaggttgtcaatgctacaattgtacagtgtatgttgtaatatggtagtctagaaaaatttcttcgttttcttcaagaattggctttcaaagtccaggttgattttctattcagattgtttattttcttgtttgggtaagtatggtacaatgaaagactaatttttggaatcagaaccagaatagaagtgagaatggggtgaatcgaaatctantttgttttatttcaatctatttttatgttcggtgaattactgtggaagcttataaccaatgaaaatgtgtacatttttgcctgaaaa

SEQ ID NO: 128611 - DNA, 441 bp, Glycine max
  unsure (1)..(441): unsure at all n locations
tatcaagcacagcaaccaaattacttgcatggtctttcctcttctcacgatccaactggaaatatatattctgcgcttcaagttgagcacttagcatcttgccatttctttctaagacatcaattaattgatattgcaaagtttcctcttctccatcagttgttaaccgcttccttttccgctctccttgagaagtataacccatttctggatttgaagtagacagtttctcgttagtcacacctgtagaataaaagaatgtttaaacatgttaaatgtataatcaagcatcagttgtgacctcaatattatcgttgttaaaccagcactttgcttttaagtctngtatgagaagctaaaaagtttaaaatcgaatcatcagcgctggtggttgagaggcaagtatcacagaatccaaagctattacatggagctctaaga

SEQ ID NO: 128612 - DNA, 408 bp, Glycine max
catgcatacatagacatcaggagaatatatgctacagcaatacatttagagactgaaccatttcaagataatatagatgtatgcaactctcaagagacattaaacttttttatttgagtacttttgacaagccttcagccactgaagctttcaaggagggagaaacaggactatctccaaggaatacattaaaaagagccgaagccacgtttgcagattcgattgtagcatccacagtagatggaaacccatttgaggagacagaaacctgaaatctcaacgaatttagttggaaaattctagatagcataggtaaaaaggaggggaaatagatatcaatgatctcatctgtctgaagaaaaattcacaacaaaaatatggaagtagacttacaagcaatctggaggg

SEQ ID NO: 128613 - DNA, 399 bp, Glycine max
gtatgcaattctgcacattattttagcttgcaactgggtacccactaatcatactttcactggtgccacatgtttgggtaaatttctgtatgctgttggaaccaagtccaaatttaattttggaaactatatatttgatcaaactgttaagcattcaaaatcttttgctgtcaaattacccattgccttccctactgtattgtgtggcattatgttgagtcaacatccaaatattctaaacaacattgactctgttatgaagagagaatctcctctatccctgcattacaaactgtttgaggggacacatgtcccagacattgtctcgacatcatggaaagctgctgcttcaggtgctgtgtccaaggatgccttgattgctgaactcaaagacacatg

SEQ ID NO: 128614 - DNA, 441 bp, Glycine max
  unsure (1)..(441): unsure at all n locations
atccttaagtcacctgccgcatgcaagctcgttncacatcgttcgcgagtatgatatcttctcttctaggtttgaagtagaggagagcttcaaccctataacgcaacgtggcggacaaaagtgggcagcaaacttgaatggtcgtcattggcaatgcggagggtattctgcgcttcactatccatgttcacacattatngcagcttgtggttacgtgagcatgaactactaccaatatatagatgttgtttacacaaacgaacacatcttaaaagcttactccgcacaatggtggcctcttgggaatgaagcggctattcctccttctaatgacgcatggacacttatccctgacccaactacaattcgtgcgaaaggtcggccaaaatcaacaaggataaggaatgagatggattgggtcgaaccatccgagcaccgaca

SEQ ID NO: 128615 - DNA, 431 bp, Glycine max
tcgtcctaatttctctaaaatgcatcttctcttaatgagctggtgaagaagaatgtggcatttacctggggtgaaaaacaagagcaagcctttgctttgctcaaagaaaagcttactaaggcacctgttctagctcttcctgacttttctaaaacttttgagctataatgtgatgcctctggagtgggagttggagctgtattgttacaaggtgggcaccctattgcttattttagtgaaaaacttcatagtgccaccctcaactaccccacctatgataaagaactttatgccttaataagagccctccaaacttgggaacattaccttgtttccaaggaagttgtcattcatagtgatcatcaatcacttaagtacattataggacaaagcaagttaaacaagaggcatgcaaaatgggtagagtacct

SEQ ID NO: 128616 - DNA, 414 bp, Glycine max
  unsure (1)..(414): unsure at all n locations
ctattcgtgctgaaaaaagtaatgattttttaatttttaagagatttctgattcaagaaaaaaacgtttatatttcgaaaaacaatatatcccaagcatgagctaaacgttaattaacatcatgtcatgtactttcgtgtcatattctcttaaattgtgaatcttatagtaccaactatatgtatactaattcaactagttaaactaagtatantttgatgtgcattcggcagagtggtattccagaagtactgcgaaaccatgaagcagttggggataaagctattggagcttttggcaattagcttgggagtggataagttgcattataactacttgttngaagaaggttgttccgtcatgagatgtaactattacccatcatgtcagcagccaagtcttgcactagggact

SEQ ID NO: 128617 - DNA, 479 bp, Glycine max
  unsure (1)..(479): unsure at all n locations
taagaaaacccttaggataaagaatatggttcaatgtgtttattccgtntaagcatgtaaagcttgtgaaactcttaaagaaaaagagttcaacttgtgcattgagataaagacaaatgccagaacttctaggagctggaaaacatcaaaaagaagaaagatatgatctttggagagaatgtgcacaagcacacaaatattatgatgaatttaaagtgagtaaacacaatctttgggtggaatgtgaaaaacacaagaaatttgtaagtttttctaacagatgagcttctgaagcatcaagaacttaaacgtcaatcttaagatgttgtaaaacttcatgaggaaataaaaaccttatatactacattatccaagtttgtcaatggaacagacaatcgtataaagttgcacgatgatgtagaagtatactaacaatctggaatgggttgagggaagatcatgtcatgaaaagaacatta

SEQ ID NO: 128618 - DNA, 457 bp, Glycine max
  unsure (1)..(457): unsure at all n locations
ttaagcaccgcngctgcagcttgagacccagtaaagaaattatccttttttatgatgaactcaanaaagcttttggcccaaccattaatgccaataaggtggtgtaaaggtttttgctcctttcttgttggaatgtcttcctctcctttttgcgtggaatggtgaaatttgaaaacttgcttgagtgcgaaagtaaaaattctaagtcattttctttgagaaaataaggaatcattaacggaatgtgtttgtttttgcaatctttgaaagaaagaacaaagaaaggagttaaaccttgaagtcatggactgaagagagagagagagagagagagagaggaggtntagctttgacacatgtcaacgttaattgngttaatggtcagattatgtgcatagccactagacacataggttcaaagtcatttgaacctaactctataccanaaaataacaca

SEQ ID NO: 128619 - DNA, 469 bp, Glycine max
  unsure (1)..(469): unsure at all n locations
cagaaacgtggcatttgtgcgcaatacacaatgttctgtttccacaacaaaatggtgtattagaaaggcgtaatagaactttaatggatatggttaggagtatgttaatcaattcaactttacccatatctatgtggatgtatgctttgaaaactgccatgtatttgttgaatatggttcctagtaaggcagttccaaagacaccttttgaactgtggacaaatatgacacctagtataaggcacctgcatgtttggggttgccagacagaaataaggatttataatccacatgaaagaaaattggatgcaagaacaatcagtggatatttcattggttattcagaacagtcaaaggggtatatgntttattgtcctaatcatactatgagaattgtcgaaactagaaatgcagcgttcattgaaatggtgaaatcagtgggagtacaccttcatgagaagtggaaatt

SEQ ID NO: 128620 - DNA, 449 bp, Glycine max
  unsure (1)..(449): unsure at all n locations
gcttggccgatccccatgggttgttctttcttacaaaataacgtgaccctaactggtctccctatgatnttacctggtgagagtgacttgatttactagtgtgtggtttgtcttgtcaagtactcctgggcgctcgtcgaggtttctctctattagttaggaatgtgataactcactccccgggtgctatttgtgttaagatcttgtgatgatcttgaactttgtgttcgtgggagcatatggttaagtggatggctatagagaacctcatgctagagtacgctggaacacaatgttntgataaaatgtgacattgaggcatatgtttttatattaattgcatgaagtcttaaaccaccttcgtttgagcctatatgaaattttattnggatcagttctattattatgttagaaaagtaaatgtgaaccttttacccttttgaaatgct

SEQ ID NO: 128621 - DNA, 429 bp, Glycine max
gtctatggaagctggatcttcgagcttcaataatgtctcttaatggtgattcaccaccatggagaacaacggaagaaaaggagaacatgcgagaagaggcgccatccactaaggaataaaccatggaaagagaaacttcaccaccaagagagagtctcggataacaagcttaaagaggaagcctcgatggaggaagagaatgagagatagagagataaattggcatggaaaattgaacgaagaaagggagagaagttgaactttgaagtgcgtctcacaagaccctcattcatcaaagacgcgataagtgtgagacatgcgcctattcatttcacgtgaacctaagaggaatattccaaagatttgccacatgcacattaccacatttcaagaataggccgcacgcatcctaacataatctctctatat

SEQ ID NO: 128622 - DNA, 429 bp, Glycine max
tgcaagaatatttggatgttccacgaagaattctaattatttctctactaagttctggacaaaagttagaacgataacagacccaatttctcaaagctcataggacactatgaggtcctaccagaaaatcaaaatcttaattacgactgctaaaaaaaaaaaatatccttccctctctctcaaaaataaaatcaaccaattgcaaacacaggacacgaaaacgggaacaataattaaagtgacagtaaataaaaataaaatggcaacgatgtgagagaatgggacttacagagcacgaatccagcgaggaggaacatcaagggaagcaacgacaacaagatcggcttgagcgtctagcgtatccacgcgatttagaagcacgcgtatggctatgtagaattcgtagtccctcggcgtacctacgtacat

SEQ ID NO: 128623 - DNA, 269 bp, Glycine max
accatggagatgcagcggaagacaaatgagaagaggtgagaggaggcgccatccactatggaataagccatggaagaaggagcttcaccaccaagaggagccttggataagaagcttggagagggtgcttcaatggaggaaaagaaagagggagagaaagagagaggggggagcatgaaattgaactttgagttgtgtctcacaagactcccattcatcaaagttacaacaagtgttacacatgcttctatttatagactaggtagctt

SEQ ID NO: 128624 - DNA, 437 bp, Glycine max
  unsure (1)..(437): unsure at all n locations
ctctnttctctcaattggtcttcattcttcttcatcttttcagnttggatccaccattttcttgcacaaaatttcgtggtgtttccattggtgatgatcacaaagggctaaacaattaatcaatccaagaatccactccaagaaaggctgaatttgagttctagtttagtatctccaatctttgtgaatgtttatctatctcttcaatcttatttttgattttcatgataattattacgatttaaaatggattaagttatggattcatttcctactttcgaaatttaatcacaaattgttaggctgatctttcaacataatttgcgatttcaacaatttagagattgatccatttgaactttctctaatgcatctgactgaactctcacactgaacatcattcatattaactgtgataattcaatctgcattggttt

SEQ ID NO: 128625 - DNA, 377 bp, Glycine max
  unsure (1)..(377): unsure at all n locations
agcttgtatctatggattcacttttgatctcttctgtaccataaggaaaanaattagtcaccacaaaaggaccaatccactttgacctcaacttaccactcatgaatccgagcctagagttatacaataaaactttttgtccaaccacaaagtccttcttatctatcaagctgtcatggaacttcttggncttctccttgtagaaattggaattcccataggcttctaaatgaatctcatctagctcacttagttgcaacttcctttcctcaccagcctggtccatagaaaagttgcaagtctttacagcccagtaggcttcgtgctctatctctaccggaagatgagatgccttgccaaacaccacccgataagga

SEQ ID NO: 128626 - DNA, 373 bp, Glycine max
taagctccttcaactgtacaaggctcttaatatttgtattgtattcttgtggaaccttcacccgacaaagacactgacaaaaacttatcttctccttgttggacaaagtatgacaagctgggggcaaataaattttcttcccatctgaccttggatgcaactgtgatcatatccccatctcagctagatcatgacgggtattcaagccatccttcgtcttgccttgaatgttaaggagcgtcccaatgacactgtcacatacattattctccacatgcataacatcaatacaatgtctaacgtctagattagaccagtacggaagatcaaagaagatggacttcttcttccatatgcaagtcttacttttatc

SEQ ID NO: 128627 - DNA, 473 bp, Glycine max
  unsure (1)..(473): unsure at all n locations
gctttctctactaatttcttattaacttcactttcttgttgtggaagttcagatgtatttctatatatattaatttctcaactaacttactatatactttgattgttacttgaaaaactcaagaaaataaaagtgttccttttgatacatatgaaacatttttcttgttaagttgctttcatccttttttctttaatatggctgatttattatgtagcaaaaaacattgaagaccaaccaactccacaatctacacaacaacccactccacaagatctgcaaatgaatgaatctactaggacaggtcaaggacccatgaatgaatttatgcaaacacctattacagacacaacagataatgtagagtcaacaacacaaataacaaagctgaaaagtgttgtgtgacaacattntgacaaaactaaatcagaaaggaaaaggcccaatgtagatactggtagaaaatacttgga

SEQ ID NO: 128628 - DNA, 491 bp, Glycine max
  unsure (1)..(491): unsure at all n locations
taattgtatcttaatcaagaacttaccacaagaaatacaattgattataacagtgaatggattatagggagagaattttacctttccaatatcaccgacaacagatatttcttgctcatttttactcccttcagcaaacatacaaaggtcaagcattcctcgagaaccattgtcaaattcaactataacatatgcattgtcaatgatatctggcacctgcccaaagcaaactactgaataggaataataatatgaaacaacaatgtttagagaaaaccccatgctaattactattgtcgcacagaagctcatatatgatgatatatattccacttagaactgtgacaatttaagaactgaagtccttaattgtgaacattgtaaaacagaatataccttaatcttcatataggaaaaagtcataatctctatatcctcaccaacaaaggacaaataacacggaacctcaattctctctaaccanatctttc

SEQ ID NO: 128629 - DNA, 469 bp, Glycine max
  unsure (1)..(469): unsure at all n locations
agctntcttagcagcacctgctattggctactttcttcttctgttatggtcccttcacaccaagggagtggtgaacaaaacactttcgagttaggcctaaaggctttcacctagagtgtttcgggctaagttccttcatacaggggtttgtcaactaaccttgacccacgactttggcagtcttccatgcacttggctccttcacacttgatcaaggagctagccatttgtggccattggaggttgaatttcaaatgttgtgtgagttgtccatgtccttacaggttgttgtttaacttgattcaaaggtgtcttacactttctcctacacaaggcttcaaaagatgtcttgcctttgctagtttgacaactattgtcataggtaaactatactaaagacaaacacttatgccaactacctctttgttctatcacatgagcccttagtaaatcatctaaatattgtatg

SEQ ID NO: 128630 - DNA, 429 bp, Glycine max
  unsure (1)..(429): unsure at all n locations
tgcttctacaactaagttcatcatntttcttgaatntntgagttcttgacttggattaaacttgagaagcgcttatctttggcatcatcaaaacttcgtagcatatatacttctactacaatcatggtcatccactttcattgttttgaagacaattacattgccttctagagacaatcaagtccattggcatgcggagagaattatggtcatccacttttgttgttttcaagactgttacggtcttctttgtcttccagagacaatcaagtctattgtcatgcggagacaatcatggtcatccgctcctttacttttcanagactatcatagtcttttgtcttgcggagacaatcaaggtcatccgctcctttacttttcaaagactatcatagtctnttgtcttgcaaagacaataaaggtcatctt

SEQ ID NO: 128631 - DNA, 331 bp, Glycine max
aaacgcttcttcaaaatggcaattcaaatacaagccacaaatgtctatatatatacatatttgctatgtgatggtgaatacattagtcggttctttcagggttgtatttatgaacacacgcaatttaccattcactatttgtaacagtctaaatgtatcaatcagttatcttttgaacattaaataatacgtggggctttccattgtgataaagtgcgtcgtgtgccttaattgttcaagttcaaatcatgcggtagaacttacatcaacaacctatcattaattataatcacttttggtgtatgcttgaaagtcaagtttagaggaaaag

SEQ ID NO: 128632 - DNA, 302 bp, Glycine max
ctcataacagacagcataacagaattgggagtggggaatccaatcggctgttactacctcatatgtgagctgtaacgagcatatccttatcaatcttatgaattgtcaatatgactcatacgaattacacaaatctatgtatattatcatagatagaccaaagttgcagaaaaaaattatgctttacacggtacaccgcaacatcactcactatgaccaccaccaactaaccatcgtaacaatacacctccatcaaaccatctactatacgaaaggaggaactcctgcaaaagaaaccaaaa

SEQ ID NO: 128633 - DNA, 451 bp, Glycine max
  unsure (1)..(451): unsure at all n locations
agctntcatgaacgaaatatcatcatcttaaattaaatcttacatgtatntnnnntnnctctgtattagaacactaacttttaattttaactagcattttagtttgtgcaatgcacaagatatatattnttatataattacaattataataaataaatattttaaatatataaattatatatttatatttatgataaataatttaaactgtcatataggttnttgtttaatttaaaatgaagaggtggctaataaaattacaatatatgcgtgcatgtgtgtggacgtgcatgcatgtctaaagatagatagttagtactttgagatgattaggagcctaatggtagaggagatgcaatttcaaagaaaaagagagatagtgttgaaaatacttaattgagagagtgatcgnttttaatttataatataaataacaattaaatctttttat

SEQ ID NO: 128634 - DNA, 418 bp, Glycine max
ctttacggacctataaatctcagcttcagcagagatagcccttaattaggaataatgataaactattattgtgtagctaaaaacttatgtattatgtctgtgatggttttcgtgcactctggtgttttgtgttaaacaaacatccttagaataaagtggtcatgtcttgcctttcagcaagttcaagtgttttggactagtgatgggtgtgttaagctcatggttgcttctttttttttttttataatgtttgcgaattggtcgcttctgtataaagttcggctaatctgaaatatgaatctctgcttataatattaaatactattactggaagaaagtggctcagtttttttgtttgttttctttgccataatatgcgaatctcctctatgtctgttacaagtttctcaattgaagt

SEQ ID NO: 128635 - DNA, 111 bp, Glycine max
  unsure (1)..(111): unsure at all n locations
actgaatgctctgattcgagtttgatatttttcctaaccgntggcctgctcccgtgtgtccatccaaaacaaacctattttctctagaagaaacattggttttcaacgggc

SEQ ID NO: 128636 - DNA, 230 bp, Glycine max
gaacatgcctttgattctgcagtgagggctgacgcgtcacgtgaagaaagactttgtactttgacaactctactcttttctaacccttggagaacacattgaagacatacgttaccttagtttgtcgatgtacgcatgttgggtgcacgcccaatactcgtgcatacgcgtctctcatggagtgggcacgtactatagatatgatgtgtgggtgagtgacgttgtgtcat

SEQ ID NO: 128637 - DNA, 393 bp, Glycine max
ttctggaggaaattcctggaaggtccaagtgggcctggttgctatttgcacccctatgtttactaaatacacctccccatgcctttttttggtgattctttgttttccttccgtaatgttatggaaccttacagattacgtaatcatcccttttttggctttcggaatgttacggaacctcacgaattgtgtaacaatgcttccttttgatttccggcatgttacggaacttcacggatcatgcaacaacgctctcttttgacttctggcacgttatggaacatcacgtattgtgcaacaatgggtgccaagtacctcgaagcggtcaagcaaaggttgcacgccatcaaagaatggtccccgaacgaaattatggtatgacagatggaaata

SEQ ID NO: 128638 - DNA, 480 bp, Glycine max
  unsure (1)..(480): unsure at all n locations
actagaagaaaggaaagttaaagtcaaagctcagtttctgttttactattcctctgntaggttcctaatgaattgaacactagcagttgctgttactgtgtcaacaaattcgttctcggcaattgttgcttcttctcttaatctatgctctatcaccttttcccatagcttcatagtgtgactcataagnttgatatctttgtagttagcacaatattgggtatgtccttgttattaaaaattgggacctaacttattgctttcaattcataagtatttaactttgacttaacataaataggcatctgactgaaacaagtatgcgagcgtagaattctgatatctatggattcctcgagccacagtccattcagaggtctgggcaatcgcagtttaagactgaaagttacataaagagttggatgcagacgtcacaacgcgatgtctatcttagagcctaactggatgggtaagtcacac

SEQ ID NO: 128639 - DNA, 452 bp, Glycine max
  unsure (1)..(452): unsure at all n locations
tccactccagtttccattcgagtacctaactggtgtgattttcatacgttaaaaaccagaatacacaataaccttaagctataccaacaagcaattttggatgaaatttactaccgacagcctttcacatatgcaggtaatcaatttcggtttcaatgtatgcaactgaaagatgatgctgatgttaacacaatgttaatgtgtaatcatgaattttcgtttgttggtccgattgagttattatgtagcattgctagaaccctagatggtattttaaacttacttgaaactactatgacccctactcatgatgccctgctatattacaatgggaggtggaacatgtcacgccaaaatgagtttgtaggttactcgttcacaggaaaaaatctcacaaactttgacatttccaccggantaccatggatgagactgatgatttgatcaacaag

SEQ ID NO: 128640 - DNA, 385 bp, Glycine max
tgagtaccgcaatatatcgagcggctcgaaattgaattctgaaactctgagccaattcaaacgacaataactttttactccgatgtctaactgactcccgtaatatattgtgacgctctaaattgatttccgaagctctgagcaaattcaaacgaccataactttttactccgatgtctgattgagtccacaaatatgttgagacgcttgaaattgtatactgaagctctgagcgaattcaaagacaataaattcttactccgatgtgtgactgaagcccgcaatatatcgagacgctcggaattgattatctgagctctgagcaaattcatacgacaattagtttttactccgatggctgattgagtcccgcagtatatctaga

SEQ ID NO: 128641 - DNA, 421 bp, Glycine max
gatggaaaacattgaaaaggcaagacttatatacaaaatggcattgcttagagttctttaactgagttgatgtcaccattcatcaaatatgtagtactaatttggattaaatatttcattaacttttctcataggttcttgatcgtggagaaaagattgagatgcttgtggataagactgacaaccttcgctcacaggtctcattttcttctttatattttatttcttaaatatatttttaatctttaaaatatacatgattctttatttactctcttttatttctgctaaaatagtatctacaatatgttcttttgtgttaattagttcctgccaacgtcgttacctagctacttacttttaattactctattatccaataaaatattggtttaatttgtcatgcgatgacatattattt

SEQ ID NO: 128642 - DNA, 446 bp, Glycine max
  unsure (1)..(446): unsure at all n locations
ntaacagatntntctttgtgggacatattcatgtcttgttgatatggtcaacaaacattggntatgctgaacaaacaatttcaaacttcttaaggcaatcatctgaatgatccttagaaggacaatcaaccaaactcccccagacattcatcacataatcccatgcatttttttgaccaactagagatataacatttaccttgacattcttgtcaatgtgaaacctacacaacaagatggttcacccagggaatacagttttcactacattcatcaacgttaggtctctatcggcaacaataactccaaggaggacatcacatcttagaaaaagacattgaaaccgctctagagatcaaaccatattatttagacgttctccctccaaataggcacaacccacagagaatgtcatttcagttggtatcaccccactaaatcaagta

SEQ ID NO: 128643 - DNA, 439 bp, Glycine max
  unsure (1)..(439): unsure at all n locations
agcttgaaggttccttgaatacattatagaaatttaccattatagtagnttttttttaaggtcgaccataatgataattaaaagttaaaaccaatagaattagtaaacatttataaggaaaggtcaagatgaaggaggtagaactaaggttcaccaataggagccaaattgagaaagaaactgaatctcattactttagcaacataaaaaaattactaattcattttttcatcactaataatttcacccctttaatagaaagcaccacgaccaagtcatgacctccatcatgattaggtggtgatagattgtatgttgagctatgattttgcatatatattttttttatatttaaacctcttctctctatttgtgacttgagaggtgtttagtcactttaggtagaattataagtataaaaagatccttttataaacac

SEQ ID NO: 128644 - DNA, 448 bp, Glycine max
tgattcgttcgtatacacaacaacccatcacataattctctagatgtaattgtattcacaacacagctgtcagatattgggcgaactaaaatgtacactcatgggatggaaaattgatataaagcagttccttgcttgactttgcttctattttatcatagatctataaaaactgcttttgttgaccgatattcaatatttcaattgtttatgatcccaccacaatatatttaaataaagatgggagtttcactggtgagttcatgctccatgcctctcatgcagcataaccttggtagtcctatcttggtatataaatactgaactagcatataaaataattagtaatgcgttgaaccttgtagcatatgattattgattaacagaacgtgaagactgatgttaagcatcacgctcaagcctggcctcaccatatttcattatattc

SEQ ID NO: 128645 - DNA, 434 bp, Glycine max
gagtcacctgcggcagcaagcttgacggccttggagaaatactcactatttggctacgaaagcaaaagttgttagggtctattaaattataaaatgagtttcgggggaaccaatcaagtgcttaatctgcactgatgcagaaacaaaaggcacacacgagaccaaactaacatgaaggaattacttgataatcggaaaaaccctttggaagtggttaagactaaactaagttagaaatagtgattgatctcgaattccaagaactatccttgtttgcgtgtgtgaaataagacaaggttggttagggtagtgaaatctatgtgataattatgtgtaattgactaaattgggggccatctaaactcactcatcaagtgtgaacttaacatctcaaattcaaccgcacaaacacacaaataattaataatttaata

SEQ ID NO: 128646 - DNA, 416 bp, Glycine max
  unsure (1)..(416): unsure at all n locations
tgctggctganttttctacccctccaacctaacatattctttcaactagtcaagaatccagcaatacaatttaaagggtaaaattaaaataaataaataaataaaaagttacaaacaagctatatggtggatgaaagtgtatataatgtaaatcaacttgtaactatgtttcaggtaatcaaaactacaaattttggtgttgtttagtgataattaacctcatcacggtaagcctcaacagggtgcttcccaagatctttatggagggccttaaatatagcatcttcattctcatgaacaacgtctatgagagatgtgagctggtttttcctccatgttacactcttggtttttccagttntgaagtattgtctcaactctatcactggctcttccactccaccaccaatatccat

SEQ ID NO: 128647 - DNA, 207 bp, Glycine max
  unsure (1)..(207): unsure at all n locations
agcttagnnctgnatatctagcatagcatatttttgacttcccaaaagaagaccaaatcctctgcgagagagaaagagagaggcggngatgtcttcaattaaattcctatggatcctgatggtgtctttgacggcatcatgcccgttaaccaaccgcaaactatcgggtacatgtctgaggatacggtccgggtttttccagaccta

SEQ ID NO: 128648 - DNA, 477 bp, Glycine max
  unsure (1)..(477): unsure at all n locations
cttgtttcataaaattatctaataaaataatatattattttattttctgctaaacaaaccaaatgttggcctgaaaatcactgaatgttaaaaaataatagaataaatttgatgtgatttgacgaggcaacagatgaggctctaccaacaaaagagtggactgattcttcttacacccattttgattgtggctgggcatagccaatttgacaactcttccagctaatgagaggcagacagtgagacttatcggacataacagaaccatgtagaacatgacttacatagtcatcaaatattgcataccatggatcacattaaagtccacgcacatnagattgctttcacatccatcacctacaccaccaaaaccaaatcaagccgtgaaggcgtgaaagaaanaacaaatttatcttactctacaattattttaaacanaattaattctctaatcttatcttatggaacatattcatt

SEQ ID NO: 128649 - DNA, 488 bp, Glycine max
gatcttaagcactgagctgcacttagggacattattatttgagagtcttattactctattctaaatgtattcatatcatccaaaatttgcttgtaaactttatgtaaaaaagtattttatgaacttttgttgaaaatggttaaaccaaacacattttcaatattttctttttttgaaaactgaaaacaggaagtgaaaccaatcaagttttctaaatcttaaaagtttgaaaatgaaaactatttttagaaaataaaaactggaaatgaaaatagaatacattttctcaaaccaaacaggctcaaaatgtgctggaaacaaataaatgtgaattctaatacagctttctacttttaccacgatctatggtttcttacattagcatgtcagattctaatgctgatatgttatgcataactccaacatttcctgtggaagcaaccttctacattcttttttgtaacaacaagcttttacatttaaaatat

SEQ ID NO: 128650 - DNA, 349 bp, Glycine max
ttaaaaccagcttgaaacaacttgtactgaatcatacacttactgtatcatacaatagttaaaccttcggtaaactatggaaacctcttgctctcaatgttttgaaaacttttaatcttatcttgatatgaatcttttcttgatacttgaaccctgattcttgaatcttgagtcttgatattcgatcttgattattctagaatcttgattctcgaaatcaaaatctcttatacttgaatggtttgactcgacctgaaatatcctcttggaattttacatctcttgtcataatcaaacatctctatcaaccttgattttatcatgaactgctctaccctatgacagaaat

SEQ ID NO: 128651 - DNA, 447 bp, Glycine max
  unsure (1)..(447): unsure at all n locations
ccggatcttaagcaccgcggctgcagctttaaaaacctctgngctgctctgtttacgctgtttgccttcgtaaccggtggatcttcccgaaatttggtctgcaacttcacaagacattttccatgatctgaccgttgggatctttgagaagatgtctggagtgtgctagaagcctcttaatgaagcttctggaggaagcctcttaatgaagcatctagagaaagctacatgaagctgcctcggtaaaaacgctgccaagccttcgttaaccgttggagcttctcaaaattgggtctgcaacttcacaagacacttgtcaatgatctgaccattgngatctttgcgaagatctctggagtgtgctagaagcttccgttcccgagagcatctnctatntaagcatttcagcctttgctttggtgtagcttaaagaaaatgccatttctt

SEQ ID NO: 128652 - DNA, 483 bp, Glycine max
ctaagcttcattgtgaaagatgttgttgaaaatctatcagtttgctcttttacattgaaggtggtaaatctgtcgggcttcctaatacttgtcatggtaggacaccaagggctaagggtacacgaggatacaatgttgtcacaatgactcgccacgaggtctcacaagcacatctatatatattaaacaatattgcagaggtcattccatacttagacgctcacaaaaaagaagtcacaacaataaacccaaaaatgaacatgatgagggttttgcaagagcacaatataactttcatgaactggtttagagaaacaatatttggtgatgacggtgcttccataacattacgattgctagttgttgggccacatctgaatgtaccgacttggagagggtatgatataaataattatttcttcaacaccaagttccaagatgacataagctatatgctaaacagtggtgtgactgttgatgctg

SEQ ID NO: 128653 - DNA, 284 bp, Glycine max
ggtgagaaagaccgatgttggaaaacagcgcagctaattagctatcacccagggggaaaatcgacaatcgaaatatcttgcgacaagttcccaatataaagacatttacagcaccagttgaaagcgggacaatggccgtcaaaacagttgtatcggagagaccttacaacatatcgtaacgacaaattttagaactgcgaccagcataccgattgctctcatcacggacgaaccctatatgtgattggagaaaacaactagtcaacttagacacgtctgacaac

SEQ ID NO: 128654 - DNA, 444 bp, Glycine max
  unsure (1)..(444): unsure at all n locations
agctttcttctttacaaggttttgattattttattattcaagatgttgttgaggttaatcatgatattttttccttaaccttggttattcaataaggatgtcttttaatctaaaaaattgtgaaggttcatcaaattgcaacatttctaagtataagactcatcttaaatttcggaaatacataacacgcattaaatatgaaaacatttagttctaaaagataaattaggggattgaacatgatgtccctcttttactaagacattgtacacaaacataaatgagatacatactttcaaaaggctcaaggagtcaacgtgaacaaaattttcttgtggctgcagactgatcataaaatagaattattgcctaacatccttatcttaactagctngtacatggaagaacttggcaatggtctctaccgcaagtaacaccataaac

SEQ ID NO: 128655 - DNA, 441 bp, Glycine max
acagatgctttgagaaatgattgttttattaagaggctttggtttaatcgaataccatgtgatataattgagtatttctttttctataagtggttcataagtgaacgataacactttaatcgattaaaaagatcatacaatcaattacttccttgaattaatcaattatcttgttgatttaatcgaatacacgcggctataattgatctctctataaaaagacaccttatgtactctcttataacacttataagaacaagtgtgtatgagctagaatcacatgctgatattattttaagaaaagtgcttatatatagttactcaccaactctaatctatattataaagatccttttgtgacaagtgagatgtgatactctcttgagttcaagaagacacctcatttactctcaccatggtgtgtgacaaggatcgatctat

SEQ ID NO: 128656 - DNA, 406 bp, Glycine max
  unsure (1)..(406): unsure at all n locations
ctgctgtggagctttatggaggccgaatctttgagcttctatgagatcctttaattgtgggtttccaccatggagatgcagcggaagacaaatgagaataggtgagaggaggcaccattcactatggaataagccatggaagaaggagcttcaccaccaatatgagccttggataagaagcttggagaggatgcttcaatggaggaaaagaatgagagatagaaagagagaggggggagcaccaaatngaaggaagaaaaagagagagaagttaaactttgagttgtgtctcacaagactctcattcatcaaagttacaactacgtgttcacatgcttctatntatagacttggtagcttcctttagaagcattcttgagagaactttcttgataagcttctttga

SEQ ID NO: 128657 - DNA, 160 bp, Glycine max
gcttctcatataattacgagcgtccgataattatcgggacataatcggacatccgagtaaaaagttattgttatttgaatttgctcatagcttttgttttcaattacgatcgcctcgatatattatgggattcattcggacatcccagttaacatttatt

SEQ ID NO: 128658 - DNA, 356 bp, Glycine max
tcaatgctcataactgttcactcggatgttttattaggcgcataatatatcaagacgctcgaaatcgaacaatggaaacctctttagcaattcaaacggtcataactaatcactcggaggtccgattcatgtgcataatatatcgagacgctctaaattgaacaatggatgctcttgagcaatttaatggcataacttttaattcgaggtccgattcatgcgataaatatcagatgctcaaaataacaatggagctcttaacatttacgggtatacttttactcgaagtcgatcacggcatatattcagacctcgaatgacaacgagcttcaaattcaatgcatactttactcgag

SEQ ID NO: 128659 - DNA, 425 bp, Glycine max
  unsure (1)..(425): unsure at all n locations
agcttttggtaggtgtgcgaaccgttgtagtttatgtatagacgtgttttaccaagctgcatctaccacaacttgacaacaccaaagggtcaaatagtggcagaactaagaccctaagttaatggaagtaatttacttttcaaataatataaattaataataattatcattatgcatatgaagataaagatataagtaccaaaatcataaaattttaatgtatctattcaaataaattacataccttataattgttctctacgtgaattgatgttttgaaatcgttgaatgatcagttcattgtcaatcttattgaacacatctttctcaatataagtcactagacaatcattcattcatgcatctctcatccgattacgcaacctattttntcacaatttcatggcagaaaagactctttccac

SEQ ID NO: 128660 - DNA, 442 bp, Glycine max
gttgtctaacacacaaagggataaacaaaggtggtcgacgatgccctctctatgagacacacagtggtgcgctccctacgagctctcaatttaggattagagcacactatggacttgtatgctttggatgaacacttctctgctgcttatgagagttatgggaaaaacgttctagatcgattatatttggctgaggggtattcgttcacagagggaagactttgcctgccccctagatcctttatgaaattacttatgaaagagagccatgagggtgcgctccatggcctcttcgggatagacaagaccgtggcctgactccatgataagacttattggccccatacgaggaaagatgaccataagcaatacactaagttgtgggcatggttacaagcctattctatggtgatgcctcctgggctgtacacacccttactca

SEQ ID NO: 128661 - DNA, 429 bp, Glycine max
tgcagcttgaaaacgcagaataatgatatttttgttagcaaaagagtgttaggagaaacgtacatcgactcgttgaactgttcaaaagttttgatcgagagagaaaaaacacacagagagagagagagagagagagagagagagagagacttcgagacagaatcaaaatagagagtgaggatagggttcagaagcaacgatgagagaattttcagaattccttctatttacttaaatttattaccattttaaatttatttatttacttaaaattgaaggtgtgaattattattattatactttagaaaataaaccctccttagtaccaaaaaataagataaaatatagatatttattaattaaaaatctaatttattcaaatctaaaacattggtattcaaatttaaatatgaagatatattatattaa

SEQ ID NO: 128662 - DNA, 521 bp, Glycine max
ctcccccctctctatatcttacaaccctcctccaccttctctggtacggagttttctgtacctgcttcggaattaaactagcttcgccttactgcttgtgggattctatctgcctttgaaaagcaaccgttcctatactgatttcccttatacatctgtccagtgcaatataggaaagtgtctatatataccgagtgtgctatgaagatattctagtaactattatatatatatacctagaaaaaatgtccaactcacacatattttaattatttctatgcgtatgagaaatatctttggctatttctaatagtcaatcaaacacatttgtataatgatactttcatatcttattcccaaaaataatattcttgcgaactatatacatattctgtgaaacaaattctcccttacaattcttaattctttaacaataattttaagaattaatctaatatttatattatcatgtattagaccagtattttgaacttatcacaataatttcttcaaaacttgct

SEQ ID NO: 128663 - DNA, 473 bp, Glycine max
  unsure (1)..(473): unsure at all n locations
gcttccaggaaagaccacccatgagagacatcgtttctatgcttgtataggcaaagccaagaaggaaaagtatttgccataatgggggacaagacagcaggagcgtggaaaagccaacgatcttcaccacctccccaataatcagtcttttgtagcaacaagttgtttaggaattagcaatatatttttaattttgaattcccttaacctctgaatttggatgtatgctttgcctacgtcgaccaaatntatatcaaatagtaaatacatgtattctagataaaagaaaaatggaaattaattctagaataataagttttgtttcttgctttccttttcaattgaggaagaaacggtgattttagaatcataatcaattcatcctcaataaaaataaccaaaaatgagcataaagactgtataatgagtcattgtctcttaacaccattttaattaccggtttccatctcagc

SEQ ID NO: 128664 - DNA, 462 bp, Glycine max
  unsure (1)..(462): unsure at all n locations
ntaaccaagcctagcgagtaacttttcatggtattaaaattttgtaaccatcgcgcatataatgtgtgatttagtattgaccttctaagaatataatgttatatttgtcagatgtgttctgacgccaggagatccatacatgcccttaccaaatgacgaaattattgcaagggtagcaaaacaggttggttaacgaattccatttatcttattctgtttttgatatttttaccattgatttagtagtgacatgaaacgtttgcttccaaagtaggatgcttatgcacacccttagtagctagagtggtgtttaccgtgtgttgagttatttaatatttcagcattcaacgtcatatgatgttaatggtgaatgcaagaataaatattttaatgaaataccaatatgggatcagtttatggatcactagagacagttactggttggattggtacttgttcatt

SEQ ID NO: 128665 - DNA, 448 bp, Glycine max
  unsure (1)..(448): unsure at all n locations
gcttctaaggaagctacctagactataaatagaagcatttgtacacttgnnngaactntgatgaatgagagtcttgtgagacatacttcaaagttccacttctctccctcttttattccttcaatttcgtgctccccctctctctttctttccctttttcttttcctccattgaagcatccttccaagcttcttatccaaggctcatcttggtggtgaagctccttcttccatggcttattccctagtggatggcgcatcctctcacctcttctcctttgtattccgctgcatctccatggtggaaaatcaccattaaatgacctcattgaagctcaaagatcctgcctccatagaagcaccacaagcaagcttccatcacatgggtacgagcccggcatgggtttgggctggaacgatgatggtgtggcgagcttaatagagttcat

SEQ ID NO: 128666 - DNA, 420 bp, Glycine max
ctagttttggctctcttctctctctcctctgctctctctctttttcggtttaggtttagagtgcttctctcaattcgttttaggttctttttcattttggagaataattctagttttcttcgtttctactacaatttcgttttctattgattaatggaaggcttagtctccagctttgttttctcttgaggatcaaacacagctctctttgaggttctattattactattaaattctgatcagtttttcctcttcaccaattactctggatttgttgctattaattcatgcatgcttagtgcttgattaattgtctctacgcttaatttatgttcatgcttcatgatcgttcatgactaattggtgtatgtattgcttaatcacataacgaatgccttatgtcaacattcgcttaataat

SEQ ID NO: 128667 - DNA, 466 bp, Glycine max
agcttgaggggacctatttgaatatccctaaggttttgtatatctgttattgaacgataatagacttaccggtagactcccaagcaacatttttaacgcatccatcatttcattggatgtaagcaataatcatttgatgggaaagattccaagcctcgtaaaaaacttttctggattgaggcaactatttttgttcaataaccattttgaaggctcaattccgttagaattggcgaaacttgaagatctaaattatttagatctctcgaaaaataacttgactggttctgttccatcttttgtaaatccttccttgagatttatccatttgagcaacaatcatttgagaggattacccaaaagaatgttcaatggaacatcttccctagtgacactagatcttagctacaatgaaataaccaatagtggtcaggatatcatacaggaacttaaatatacacggttg

SEQ ID NO: 128668 - DNA, 428 bp, Glycine max
gacgctcaaatatacgcaattgtactcttctttatctactactcaacacgttacctcgctggacctaacccagactctcatccaaagacctccgaggttcttcttccgagctcaaaccagaaaagcaaaggcagcacgagaaccctaactgccgtcgtcgcaggcacagtgtccggtgtcgatatgttatccctttctgttgctttcttcctctccaaacgcaagaagaacatggccgccgacgaaggatccaatataaaaggtggaacttctcgaggcggtggctcatcgtcgctgccaaccaacctctgccgtaagttctcaatcgcggaaatcagagccgtcaccaacaacttctacgaactcttcttggctggattgagaggcttcggcaacgtgtacaaatgatacatctatgactgttcaac

SEQ ID NO: 128669 - DNA, 491 bp, Glycine max
taagtcacctgaggcatgcagctacacaacattcgttattcaacatccacattcacaattatctcatatccatccatggatctaatcaatattgcactgaatgatgaatgcacctgacctcaactctcagatgcaatgtggtacgtaccatcaaccaataccaaggaaatagcctaagcgtgtccgcatgacactctcacttatgaaaactgggtagtaagtgtcaaagccaccccgtcgcacaaggcaattccaccacccccccccccccacggtgatcagcctgagtctcaagagagttccaaaccgagtggcacgccccctagtacaagtattccaccgcataaggactacaagtacttactggcaaagtttatactatttccagtgtcatatgaggcatgaaccgtgggcatctcaagtacatgaccatggatgaatataaacgcctaagcattcccttcgaaatgcttaaattatttaaccactct

SEQ ID NO: 128670 - DNA, 472 bp, Glycine max
  unsure (1)..(472): unsure at all n locations
agatgttgtaaatatgtccctttcctctcctacatcctcccaagccaaccctaatctatcacatgatcttctaacactgttaaaatcacttatcacacaccatacttttgcattacttgtcttatatctcctcctaagctccccccacactcttcttttttgtccattgccgaaaggaatatagacattgccaatggtaatagccaccccattctctttccaacatcccttaaaagcaatgcattcttgtcccataagtgatatgaaatttccaagaaggccggaccccataaacacaagagagctattgcttaatttaaagccggagaagccaaactatgtttaagcatataactgaaccccttccttcgtcactcatgttcagatagatgtccacttcaccctactatccagcccnctctcattatatgatacttcaccctacattgattaactgcttgcatcccctcct

SEQ ID NO: 128671 - DNA, 461 bp, Glycine max
  unsure (1)..(461): unsure at all n locations
agcttatcattaattgtgcatctagtgtggaatttattttctctttgggtttcatccagtggctacatctgacttcccaagagccttctcaccattagcatatcactctgcatagcttcctcctcaagctcttcctccacttcttcttcactaattttagattcactggtgatttttccatctacctttatgatcatggttctctttgttagacagtcagaagcaatatgtcctctgcctaagcatttgaagcattttatgtttctggtactagtgttggatgatgaggcagaattatgcttggtttcaacactggacactactgactntccatgtggactagatgagtttcctccctcattcttggatctgttggtctagttctagttgaaattgttggatgaggtcgttctcgctacaattttcctcttcaactactgttcaacccgaactaccttatg

SEQ ID NO: 128672 - DNA, 475 bp, Glycine max
tgctccttgggtgtctttcttatcatctcaaataaagctatgacttgtttattaactattcgacactcagaaatagtacaccgtatatatttttcttgtataatattgtcatcatacttatatttctttattgctcaatctgattctaatatttcttcaaactcctgctgcagggacaaagtggctgagtaaggcagcaaaaataattataggtaataatataccttgtacacgatgtttatatttagcgtgtgccttgaaagttatcgtcttgtacaatatattttattagcttgaaaaaccaagcatttaatgatgtttttcttctaaacccctgatttagggattctttctcttaaaagtatgacaattgaaaacgcctttaaatattcatctgattctatcaatgcaatatggatattttcccgagtcatgcactctaataggacagagcatatgctttataagatagcat

SEQ ID NO: 128673 - DNA, 448 bp, Glycine max
  unsure (1)..(448): unsure at all n locations
gcttattgggtggtcctatgacactgttgnagtcattcttggatacatttctcttagtggacaatgttcgtcctatagaagaaataataaaacaattctgggatattcttgcattgtatatccccctgctgctgtgtacagagatccatattccattcagttgttttaatttttgcccctctataaataagatttgcatcatcagttttctaatatactaaatatggagaataaatttctctatctttgccatttattttatagaaaacattatcatctcagaggggagtgattggaaggaatggtttaccaaatttctttaaagcctgatactntnnttttctttattggtgcctttcttactggacaaaacttctaaaaattcttgggtactttgttaatttcctacacttttttcaataggtcaaaattttgcaatggatgctac

SEQ ID NO: 128674 - DNA, 449 bp, Glycine max
  unsure (1)..(449): unsure at all n locations
ntataaaactgggttttaatactacctcatattttatttttataagtaaaaaacaaaaacagctntaagatgttttgctttacaaattctgcttctctttataatctacaatatacacgaataaacagagaattcacagttctcattaatggaaattatttaaatatcttctctttatcatttctgaaactcttgtaagcatcttattgggatatgaatatttcaattggccatgatgttatgttggtgccttgcttattatgataacgggtggcttaatggcctattaatatgagaaatatatcttgagtgggtgacactcactcagctgaagcttcttatattatcacacacaagccaacgcagacatacgtatatagagaggtgcagactaagcacgttatctaacggctacagcagagaaaaagacatgacaagactgactatta

SEQ ID NO: 128675 - DNA, 466 bp, Glycine max
  unsure (1)..(466): unsure at all n locations
gcttctatataattcctttagtaatcaattgtgaccttctgactttccaatgagatcctagaatttcgataaattttgacctttggagataaacaaatcttctatccagagtttaatcacactaaattcttaatccttcccaaaaaaatatattatttaataatcaaactgaagtttttttttcacaaaatatgtgttatcaactaaactatatggcataatctagactatatgattatataaatactcaggttcaccctttntgtctctaactacttgtttggtcatcttacctaatctactagatgagcatgacattaaaattgaagnattatattatctatctctctctctctctatatatatgactttcatcaatacaagttacaactattaaattataattatatactagtgttgtagactatttatcgtatagaataaaattttattttaataaaaatat

SEQ ID NO: 128676 - DNA, 337 bp, Glycine max
ctatcctccaccctcaaatcttatccgaagccccatgaatttgcttgtattcatgaatccttcaccatcaagtctggagccccacgaatagattggctagcgttgtttgtctatcctccaccctcaaatcttatccgaagccccatgatatgcctgtcattcatgcattctacaccatcgagtctggagctccacgaattgaatgcctagcgctgggtcgctatccttcacccttcaatcttattcgaagccccatgagattgctgtcattcatgcattctccaccatcgagtcttatagctccacgaattgatggcctaacgctgatcggctattc

SEQ ID NO: 128677 - DNA, 436 bp, Glycine max
  unsure (1)..(436): unsure at all n locations
agcttcatctccacaccatccaggatattgagttatatngtgtcaaatacaatcgccaagaagtccccttcctataacattaactaatagagacttcaaaggcatcaatcccatcaactaggacaaccccatggttgtatccattgtgatcgccaatttcatggtgtctaaggtcctcattgaccaaggaaactccatggacatactttactggaagacattctataggctcgaagtctgacctgatacagtccgacaatactttggaccactctttgactttctaggagaaagagtagaaactagaggctatatagacctcatgaaccaccttggtcaaagtcaattctcaagaatcttcacaatcaagtatttaattgttgacgcagatacctcctactttgctttgattggagagaaaactccatgggcaaat

SEQ ID NO: 128678 - DNA, 432 bp, Glycine max
ccttcttattccaagaacattcttgaaggtgaaactccttcttctctggcttattccctggtgcatggcgcctcctctcacctcttctcctttgtcttctgctgcatctccatggcggaaaatcaccactgaaagacctcattgaagctcaaagatccagccttcatagaagctccacaagcaagcttccattaagaaccctgaaggatatatatatttctttgcttgggtccttgaattacaacatactttcatttccatttgatttgcaccactccacctatcacacagtatgtaaaacctttggagtccatggctcccatcgagattacattcttcttaagctatagaacatgataacattggttaaagatataacaaattccatcatgcattttgatttgtatgaacctatgccaactaccttgcaag

SEQ ID NO: 128679 - DNA, 468 bp, Glycine max
  unsure (1)..(468): unsure at all n locations
ctctaagtcacctgcggcatgcaagcttccacttgtgtattgcatcagtatataaataggtctttctgttcccctcccgnggatgtagccttgatcaaaggtgaaccatgtaattctgtgcgttctttctcatctctctctctcattcattttgctacaacatttgtgtgtatgacatttctgttctgctgcatctcctgctgctattcttgcttgttcttcatcacttccataacagttagccaatgtttaaaatttgaaactacaccactatgtgttggtgtaggcttaaaatccctttataaggttgtaagttgtgagattgatttaaaaaataaaagagccatcgaataagttatgtattattgtgggtatgtttgcattatttccattttgcgtgtgaaggaataccgaagcccttctatttagaaggtgatgaacatatcgatcacacaattttaatgttgc

SEQ ID NO: 128680 - DNA, 357 bp, Glycine max
cataatcttagacttatactgtaataatagtactctgactttcagccttgcattctggctatattagtatgagatatgaacattttactatttacctatttgcacaagatgcttagaccacaattaagcatgtgatttggctatgtgaagttgataatctatctaagcatggctggttgcttcatgatatcatggcacctggttcttgcgtcatgattcggttgatattacttatgacaatcgtctggatgttcaaataaaatatgcttgatacccacttcggcttcttgttgatgcccaaggcggagagaaatgggattaaatcaacaattcacatgagtaaacaacttatttaaa

SEQ ID NO: 128681 - DNA, 213 bp, Glycine max
acgcacacaaaacgaaaaggctaagagtttattacctatacttaacagaaggcacttataacattacaaagaaactatgaattgggagaaggtgatacaatttataccaagtttatacatataagttaagcggtttgatcgactaacaacctggtatggtaagttacagcgatgcacttggtgatgacaagatgtcaatgtatgatttattgt

SEQ ID NO: 128682 - DNA, 333 bp, Glycine max
tgctcgatatatagaccacatatctaagtatctgaggtgtcacatcggttggatccatcattctgcgcatcatcaggagagtggatgcgcgtcctttatgacgaagtcctatgtattttagactatgggctccatatagttttcatatgactttgaaagaatctacgagaaagatatctaaataaaaaatgtcaaacgcatagtattaaatgaagtgcttaaatgcgcatcttgaatgataggtaaatcatcctatgaatgttatatctaaatgcacacacatagagactcatatcataatctgatcgaccagcagacacagagattaacatc

SEQ ID NO: 128683 - DNA, 382 bp, Glycine max
tcctgctccggacttagcaccgagctgcactgatgattacttttcttttttttcaatctaattctcttgcatatcaaaatttatgattacattctccccctttgtcaagcaaattcttctagtatcatcaaaacctgcctgatttaaaaaaacaagctagcaattctaatgaagtatcacttcatatcccttgccttttcaaccaagttagcactacttcctataccagaatcccaacatatataatctaccacaactttgtacagtttataacataatatgcttaagtcaaacatttattcattcacagagaacttgggtacccttttcttattcttgctttcttgtccttctatccagaatttaatttaaattacctaat

SEQ ID NO: 128684 - DNA, 218 bp, Glycine max
tcatcaagtaggtgtcctgcgaagaccaccaccaatcaatgattatgttcaaagacattgccggctgaaccatactgtgaccaacggaactcgaggagggcaatgcacaatgcgaacattgaggagctcatcggagagacttatcactccatccacggagctcacagaacaaaacctttgcctattctgcctttggatggaatggaacaatcattatg

SEQ ID NO: 128685 - DNA, 495 bp, Glycine max
atattatacagacgacaacggcttgtgttgattcctgcatcacggacactattaaacacagcttgtacgaatattatctgtgatacaaatcgtattctttctgagtgaaccagttataaatatatactggcaatcatctattgctagcatggtgatctcctaacttacagcaagctgacatttatggaagaacaagaacatacacacaataagatagaagatggcttaattaaaattgccaagctctgtaacaagaatattcacatcattacttaaagaggcgttggctagcaccttatacccatgacccatatttgcaccactttgtcgagatctgaagtccacatctcagacatcacgtaaccatttaaggtgttcattcgatttctctactacgcaatattgacaaacatcatacaagtggtaagtgataataatgtatctaacatgaggaacacaacattccaataacaaataataaatatataaaactat

SEQ ID NO: 128686 - DNA, 479 bp, Glycine max
  unsure (1)..(479): unsure at all n locations
agaaacccacgcatcgcagcttgggaactgtntattctggacattataatctatattatatttgtcgaaanattaaaacttagtagtgttacaatgcatcaataatggggaaaagtttcatgaagaaataaaccatgatattcttgaatccatcgacaactaatcctgaaaccagggtgaagatctttccgagtagttatatgatagcgagttcttcattgacgattacattactaaggaggcatttcattcacagataattttataggttctgcgaatatttttttcatggaatataacatgaaaatgttatttctgcgtattattaaaaaatgtgtgtggttaactattataattggatgagaatatttcttatattcccaggaataattaacatgtgttcggttgaatattctttcttggaaatatatttataatatttaaattccttactgagaacccattactgacttctgacc

SEQ ID NO: 128687 - DNA, 474 bp, Glycine max
  unsure (1)..(474): unsure at all n locations
agcttgccacccagctcgcccaggcgagcaggtttgttttctccataagcaacagccttctggaggaatcttctggagggcccaagtgggcctggttgctatttacacccccatttttactaaatacaccccactgccttttttttggtgattcttttttcgtaaagttacggaaacttacgaatttcgtaacgatacttgttttctttccgtaatgttacggaaccttgcggattacataatcatcccctttttgacttacggaatgttacggaacctcactaattgtgcaacgatgctttcatttgatttccggtgtgtcacgtaaccttacggattgtgcatcaatattttcttttgttttccggcatgtccaggaatttcacanaatgcctaatgatgggtgccaagcacctcacaaggaccaaacaaaagtcgcatgtcatcaagcaaagggcctcggacgaaattagg

SEQ ID NO: 128688 - DNA, 446 bp, Glycine max
  unsure (1)..(446): unsure at all n locations
gatgaagaaagtgctgcaagctgatataaatgttataatcactaagtcaactcataacgagctttcttattatttgataacatactacttgagcattgtttcttacttaagtatgaagtatcatttgtaacttcttaaacatgggtacttaaaatgttcatgtatttgttgcgcaagtggcatgatgccatatatgtacaaattcaatccttgaatagctggacaggaattcaatgttattcttaagattacttctgtttgtaagattctatccctacatacttgtcaaggaaancatattgccttaataactaatgcatataataagcatttagtctctgtcaatcaaatatcatctntattacttacttttgataatatgataaaagtcaacacacttatacatgatagtttgtgattgagtgacacataacaaatattaacac

SEQ ID NO: 128689 - DNA, 478 bp, Glycine max
  unsure (1)..(478): unsure at all n locations
atctctaagcacctgcaagccgcagcttgccggacctattatggagcatattttactgttcatctgaannnncattgatgaggtatttctcatgtatagatagagaaattgctctcccccctactatatatgactagaaagacatcatagaagaatatgtttaggaataggaaattctttttagcttgctttagaagcaatgaaccacttcagaatcaattctcctggagctttgtttgataactatttgaagttttgaaaaatgtccaaatgttatctgcatttcaactatttttgtttgaagcttggttcagagcacaacattaattgttgagagaaagaaaacaagaaacatgtgatgaattctgtgtcaattacacagtgaaggctattatatacaataagtgtcatgtcatanatacaaagattacagccatccagacctaattatcttgattacataataataataatatat

SEQ ID NO: 128690 - DNA, 447 bp, Glycine max
caagcttaatatataatagctatttacaggttacaataacaatttctatgatattagaacaataataactctacaaattctcaatatctagtctattacatgctgtttgcatcattaagataatatcttaatttgatgattaaactagttaaacatatgttgttaaaaaaggtattcatcaatcatccgtctaaccttcgagattacaatatttatgcattccatacgatgaatgctcaatatttattcatcagtctaagctcatgaggtataaatgtaagatttaattaacacacattcacagcgcaatatgattatgtatattatcatttaattctaaattatcatattattcataataagacagctaatatctgcatactattctaaaaaacacatcaaatatatttttttatccagtaacagggtatagttgttatattaatg

SEQ ID NO: 128691 - DNA, 373 bp, Glycine max
  unsure (1)..(373): unsure at all n locations
gatgccccacattatttccatgacacaaatgcaaaaatgatgatttagaaattttatgctatactggacacgcatgcacctatgtggacgctcaagagtgaaatatttatggtcatgtgatgctagggctcaagactcattacctctattttaaatcaaccccaagtttccaaaatatgttctattatcaatttgtgcattcatcctagtccatttcgggcgttcggtgaatattcacagcattcacccttcaggtgtatacacatttgttaaaaatcggttatgatcaatgaattcttttcaaagaatagttggacatcatatctttgcataagcatggcngtatttagctacacaacaaatttgctctttt

SEQ ID NO: 128692 - DNA, 363 bp, Glycine max
cttacccgttgaagactgatgaatacgtttattgtacgattaatgtctaagaacagacgacaatatttcggtaattactcacggaaacgttacggaagcgcctcgggttggatttttttcgcggagacaactttcctcatcatatttaagagaatacgaaatgccaagatggctgaaccctgttcttcttcactcctccgcctatttatagcaaaatatgggaggagcttgcccccagctcgtccatgcgagcaaggttgctttctccacaagcaacagtcatctggaggaagaatctataatgcccaagtgggccatattgctattcgtaccaccctttatactatatgcacccgctcctac

SEQ ID NO: 128693 - DNA, 391 bp, Glycine max
  unsure (1)..(391): unsure at all n locations
caagcttgataaatgcanannannaaanannttttttnatatttataaaactggggcaaatgaagagggtgagaacgagggagaagcccatgctgtgactgccattcctatacagccaagtttcccaccaacccaacaatgtcattactcagccaataacaaaccttctccttacccactgcccagttatccacaaaggcaatccctaaatcaaccacaaagtttgtctaccgcacttccaatgaggaacaccacctttagcacaaaccaaaaacaccaaccaaaaaatgaattttgcagcgagaaagcctgtagaattcaccccaattccagtgtcctatgctgacttgctcccatatctacttgataattcaatgggagccataaccct

SEQ ID NO: 128694 - DNA, 474 bp, Glycine max
  unsure (1)..(474): unsure at all n locations
tccacaacattcaagtaaaacaacattcaaacagcacatgctatttagccaagcaaaagcagagcaaagtcagaaaactctgctcaaacaccaaccaaaatcacagctgttctcacttaaagaccacagtaacaattccttcgatccaattcgttaaccgctggatcgactccaaaattttactggaagtctatagtgcataagcctacattgtgaccgttgggatctactagcaaacatcaagaactcattctgtactactctttccacagccaaccacacacaagcattttctgcaccaagctaaaatcctgctgcacctaatttgacagcaaaattctgcataagtgcagatttcgaaaatcacacttccnctcatccaatcttgctcanatcaaatactacaagtcccacatcatgtatcaaacatgtgtaaaccaaagccaagcttcataccacagcaacacaaaatct

SEQ ID NO: 128695 - DNA, 423 bp, Glycine max
taccccccaatgaaaaccctcaaagtggacttaaccctgggtgctttccttaaaaaggccccccaaaacagcatcatacagaaactatatatgcacaaaggcattagtgtatccttaccccaaaagcttaaggactaaaaatcatgagaaatacattaccttaagcaagttgctcagaaaattaaagcaatagaccagtcaaatacaatgaaaaaaatataacttaactttgaatagcttgcagcaagttcattgttgttacttcataatatacctacttaccaatgaaatatttaaattgcaagcactatttatctagttctttgcatcgtgatcacaacattcattcctggacactatactgatcatcatcacaggtacgaaaggttgtatcaaatttgatgcttaatttggtatgaatgg

SEQ ID NO: 128696 - DNA, 383 bp, Glycine max
ttgctgctacaaggggatgtcgtttggataaaatatgttggggcaacatataagcacttaatgaacaaggtattcgagtctcaaataggaagaaccgtggaggtatatatgggtgacatggtagtaaagtttaataacttgttgaccatatcaaggatttggagaggtattcagacaactacaaaagtacaatatgaggctaaaccctagagaaatatgtctttggcatataaaggggaaattttttgggcttgatgctaacccatacgtaaatacatgtaaaccctaacaaatgtcagacaatatttgagatgagaagtccatagaacttaaaagaagcatagagagcggtcgaccaaatcagtctcctgtctaggttcttg

SEQ ID NO: 128697 - DNA, 390 bp, Glycine max
ttcgtggacgcgctggggtatatataatgagagtgtttctgcagcaccctaaatctaagtaataatatttgagtgatactattaaggtatttaaatttaagttcttataattcattttatggccgggagagggaaaaaaataattatatgagtaaaaggatactaatttcatttgaaatatcatcttctctcctgaacttttttataaaataatgataaaaaatagttcataaatgacaaaaataaaaatttaaaagtaataaataagataaatatccattttagttcttcaaaatattaggtgataacaaattggtatgaaaaattaaatttaattatcaaatatgccataagtgtgataaattgtgaaattgacgttggtaacaatta

SEQ ID NO: 128698 - DNA, 342 bp, Glycine max
  unsure (1)..(342): unsure at all n locations
atggagaatggacgagaagaggtagcttcttcagagacggagagaaaaggcttctgaacttctctcttttggctgagtgaggagagataaacctcttcggtttaaataaaagggttttctcttcttctattattttatttaagcaatgccacatgtctccatttgagtggagcatgaatggccctctttccctttttgactgtgacccatactcagcacaaaagtgagaaaacactgacctcggttagcgtgacgttctctggtacagtttctcgcgtactctgcgtcgttgggccagtttcgagagcagcttatattatanaacgctctaataaacccgac

SEQ ID NO: 128699 - DNA, 471 bp, Glycine max
  unsure (1)..(471): unsure at all n locations
gcaagcttctagaagttggagcattcactttaacaatatatttgaaaagtttgattttgttagatgtgaggaagaaccttgtgtgtacaaaaaggttagcaggagtgtaattatcttcttagcgttatatgtggatgacatattactcattggaaatgacataccaacaatgcaaagtacaaagatttgactatcagaatagttctccatgaaagatttaggagagacaacctatattctatgaataaggatntatagagatatatctaaaaggtatcttggactctcccaatctatgtacattgataccatcctaaaaaggtatagtatggaaaactccanaagagactatttgccaattggaactagagttactctcagtagggaggattgtcccaaaactcatgaagagaaagaatgcatgactagagtaccgtatgccagcacagtggaagctatcatgtataccat

SEQ ID NO: 128700 - DNA, 265 bp, Glycine max
cttcatgtcggctcattttaacaacaaaaatagcgatcgaaatcctttattttgctattatcactcagttaaactacagaataaatgatcattgactatctcctgagtttaaacctcgctattagtataatcaaccctgacactaattaaggaaaatttagataattctttgaaattattttaggatttcattaaagatctctaaataaattttttttctcatttcgatccttgcgccaacgactcaagtaattattatcacatg

SEQ ID NO: 128701 - DNA, 456 bp, Glycine max
  unsure (1)..(456): unsure at all n locations
agctntgactaaatcagaataaacaggtaatttattatacatgaatggaataagattggagttttcaaatgcttgaaggcattcaaaactctcatttgagaagaaatccatatctatgaattttgggtctataatggaatgagaggaaaagaggtttgtgtaccgtatacgctgttcctctgatgagaacaatgatccacagggaatggagggaggaattggggtttcctgtgacctggaatgccgctgactccgacttgaagtgcctttccgcttcttcaatggttccaccatttgaggagtttttttcaagatttcaatcggttcaaatganaatgagtgaaaaaagattgaagttgggctttgtggggagtgatttggacaagaattgagtgagatatggctggaagaaaaattgggggcgaggggtttcgagagagagaggagttacaggtt

SEQ ID NO: 128702 - DNA, 234 bp, Glycine max
aaaatggacacttaatgagcctatttcctatcctttgcacgaggaagaaagaccagacgctttacaacacctaaagtcttaaaatgggcagcacccttatcgggaaagggccaaaagagagagatttgaggctaccactggtccaaataaaaagaaacgtatcattgacaacgatgaagtattcctttgtaagaaatctggacactcaaaaaaagatttctccaagtatcatac

SEQ ID NO: 128703 - DNA, 446 bp, Glycine max
  unsure (1)..(446): unsure at all n locations
tacttgtccttcatttaattgtctntgggcttggcgaccatgatcaacaaagtactttcgacacctactatatgttgatttgaccaacgctgttatgggtatgctgcgacaatccttcaaaaccatatttatacattctaagaggttggttgtcatgtggtcatatcgacatccttcgttatcataagccatggtccatctttcctttgaaatgcgatcaatccatgttgctatggctggactcaactaacgaaatctttctaaattttgataaaaaaaatatgcttgcaaggagtgtagcctgcatgaaattagttagcaagaacaattttaagtatatatgaaacttaaattaacgtgaccatgataaattaaattntacccaatttcttcaacatttctttttggttggtattattgaatctgcgatagaaattgcttgctat

SEQ ID NO: 128704 - DNA, 402 bp, Glycine max
  unsure (1)..(402): unsure at all n locations
tatccttgnggaaccttcacctaacgaatacactgactaatacttatcttctccttcttggacacagtaaggcaggctgggggcaagtaaattttcttcccatcagaccttggatgcaactgtgctcttatacccatatcagctagatcttgacgggtattcaagccatccttctgcttgtcttgaatgtaaaagaacgtgccaatcacactgacacaaacatttctctccacatgcataacatctatacaatgtctaacgtctagatcacaccagtacggaagatcaaagaaaatggacctcttcttccatatgcaactctgacgtttattcttcttttgggatctcccacatacagagttcaagtgttgaacccgctgatatacctacttatcaatcaac

SEQ ID NO: 128705 - DNA, 334 bp, Glycine max
  unsure (1)..(334): unsure at all n locations
gctcgactttcttagatataaatatataaaaatgtaaatcgcaagacacatttaaggttattaacatttatttttatgttcaatcaattcaactagatcctcttagtaataaattagttggattttttttcaaaattatcaaatgaagacattttttttttaccatttaagagtaagtcatttgtaagtaggagttagaaatctttaaaccacttcttaattgtgtgttttgagaattaattcaaagtgaaattaatatttaactctcatgtgagagtaggactntaatttctcctatctccaatcgggtaagattcagcagcaattttttatt

SEQ ID NO: 128706 - DNA, 423 bp, Glycine max
  unsure (1)..(423): unsure at all n locations
agcttctctttaagagtcaaatgtattctgattcttntaacggattctcagaattataattatggatttgcaagaatttcaaattaatactgatagataatttcttgattaaaatagtgttgattgatcaatttatttaatataccattaatgacaaaattgtgtagaaaataagtctgatttgtatctgaactaaatcttatgaagcaccatcgacacgtgtactccgaagcttgaaagtttctcttaaaatgtcacgtgtattctaaacttttgaagggattttaaatttataattatagatagatttctcggtaaaatttcagtatttacatcacccttttataaaagagataaaaagaaaacctaacatttaacgttcaataataaaatatggacataaataataaaaattaccacgga

SEQ ID NO: 128707 - DNA, 282 bp, Glycine max
tcaaattgggattaattttggggtatttatgcgttttaattttgcatgtacaatgataacaacaaattactcatgtttgatgggtcaactaatgccttgatgcgaattggatggtttaattaagtgtttgaccttgattgttagaaacctacaaatttgtgaattcttgattcttgtatgttttcttaaaattgattgaggggttttgttccccatgatatgataatgtgttattgagaacgtgtgatgagacatgtgttgtgaacaagtatgggattaaca

SEQ ID NO: 128708 - DNA, 420 bp, Glycine max
tccatgaataccctcactcagaagattgacgaccttctgactcgggtcaccaccatgttttcgtctccttctagctcatacacaccacccccactacctgtacctacacaaagccagaaaatgaagctcgaggttccacgctttgatggcacataatctcttggatggatgttcacaattaaccaatttttcgaataccacagaacaccagagaatgaacgacttaccatcgtgtcgttttacatggaaaggcgcacgctttcatggtttcaatggatgacggccaacggccagttcacgccttggaccgtgttcctccaagctcttcagacacgattgcgcccatcccaatatgatgatcctacgggggcgctattcaagctcactcaaagaggagtagtgacttaatacctcttcaag

SEQ ID NO: 128709 - DNA, 480 bp, Glycine max
  unsure (1)..(480): unsure at all n locations
tgtccaggacaattcancaaaaacatttcaaatccttccatattcacatattgcagccagtcacatcaagactacaaccatctactactaagttactaaccatttaaaaccttgtgttttctacatacaaatttaccaaaaatgtattataaacaaaagtgagggtcaatgctggtatataggaagttggacaaagaagaaaacagtaagagctagactatcaccaagtataccttgatccatttcttctggaagtcctcacactactaaaaaaattagtatatagggcggtggtaatattgtaaatacaagcttttcaacaaagatgggtttatgaaaattgtcttagaaactaccactctatgactgttntgtaaaaaccgctctacaatggttcggattcccagatggtttttgtcaatatctgatgatccaacgagccgcgtaggctcaaatctgagattcgtctctactgtaaag

SEQ ID NO: 128710 - DNA, 455 bp, Glycine max
ttttgggaaaagataacaatttatgtgttgagtactgttgatagcaaagatgtttgggatcttcgacaaggggcaaaagataaaggggacagtggtgttgatgccaaagaatgtgttggacttcaacgccataacctccatcggtaaaggtggtgttattgacacagccaccggcatcttaagccaaggcgtcagcttaaatggtggagtaattgatactgccacttacttcttatgccggaatatctccatgcaattgatcagtgctactcagactgatggtttgttcactctcattcttcaaactcttttctgttataacattacattatattaataattgttatcaataattcaaatttaatagttatgcacttactgaccccactgtgtaaataatttcatttacaaattatatttggtctgacctttgacataataataattacaaaatt

SEQ ID NO: 128711 - DNA, 467 bp, Glycine max
tagctacctgattgcattctgctctgaatacaaatgatgatatgctattgtctctaagtttatagccaagagtccaacaacattgccacctaaaggtatgcaccagaaccgaaactaaaacatagtcataccatgaagcatgataaccaaaagctgcgcacatatataagcagtaattaattgcgaaacctgccgagagtgacggcagatgttacatctatatatatatatatatatgtgtgcgtgtgcgtgtgtgtgtgagtgtatggctaactgtctgaagtagatgcttaatacatgttccaaatccaaacaatcaaaggcaaaatgttaagagccttacacagtaacagaactataagctgcacattctacgattcaaggcctgttattaggaatcacgtgagacacatacacctatcataatgcggtctcctaatggcgtcaatatatacagcactatagat

SEQ ID NO: 128712 - DNA, 397 bp, Glycine max
  unsure (1)..(397): unsure at all n locations
tgaaacagaattataatttctataatttgtcattatagagcgttccctggcgtgccttggtgaccgtttggtcacgggttcaaattcggaaacaacttctttgcatattcaagggtaagactgcatacaatgattctctcccgtaccttcacatagtgaggagccttctggcaccagtgtatagttcataatttgtcattacttagataacttctatctttttccggtaggatgagttggatgaaaactacagttgtgtaccaaattacatatccgctgaaaaaaagatagtaagaatactaaggctattttctggatttatgtccaaaaagttaatagtgtgactataatccaacattgtttgtttgtgtagggatactangatatatctatgggt

SEQ ID NO: 128713 - DNA, 431 bp, Glycine max
  unsure (1)..(431): unsure at all n locations
tgactcacaccaaacatgacaangttaacatgctgtcatcaaatctcttcagagataactatcataaagcataaacctagtaaaactacccatcatatctcccaaaacccaatacccacgaaaatttatgtgagaagaagtctacccaaacctgaaattttgaagtcccacacgtagagatgcgcttcacgactccgaaaatggcttccattctcaatttggagcagaaatggtgaccaaaggttggagctttgttggagcttcaatggtggaggaagaagaaaggaatatcaacgtgagagagagggagaaaagcttctgcacttttggctgagtgagtgaggagagagggaacgttgctttntagtttaaaaggcttcctctcttttcttttctttaaagggatgctacatgtctccttttgagtggag

SEQ ID NO: 128714 - DNA, 244 bp, Glycine max
acaagcgatgacagtgagctcaatttagcgtggtcgccgggaggtggtaaacctatagggatggtgggtcatatgtgtatcgacggagtgggggatagaaaagcaccttccccccgctgtctgctaattcactatgtgatggcaaccccatgatactaccacctggtaaagaagaggaggaaatggagggagatatgactctggttcttggcgcgcagagcgaaacctgccgatatacctgggc

SEQ ID NO: 128715 - DNA, 419 bp, Glycine max
  unsure (1)..(419): unsure at all n locations
tgacactattaaaatgccactatgtgagagagaacanatactgttgattatatgtgagagatagcgcactcgagactatacggaacctgctccccatgcgccaatattctactataccttcagtaactgtcatagcaagcatattgaacagagataccagtccctaccgggctccgccgccctgttattgctctctcccactaactatctgattctctgggatagtgttgtgctttaacattaacataacgacattgctcagcacgagaatactggatgcttttatccctgcttattctcttggtgacttatctacgatctatgcgccctgtcggtgtataggaacctaactctcttccatggcactgtgcccttggcccaataacttcctgatactgttgtatatatactaccatcta

SEQ ID NO: 128716 - DNA, 90 bp, Glycine max
ttttttgcgatcccgtagatctctggctaccgtgtgtcacatcgcaagctacaaaaccttatatcattctatatgatgaagacgttgagt

SEQ ID NO: 128717 - DNA, 367 bp, Glycine max
tgctcatgacttgagtaccttcaacagttgtggggtgaggcttgcacgcttcctggtggaaagataaggtgttaccttcaggctctctacatagcactgtcgtgcttgcttttgatctgccctgacggttacaatctccctgatctaaataaggaatttcaatttcaaatgcagcatggagactatggctccaagctctttaagtgtcttcctgccgatcaaagaaaaatatgatgtacccgcatcaataagtagatatcttattacaaaactcctagagattcgccttgaccgaaagatggcattaagtccacgtagcctctggtccatactctctcccctgcaaaccaaggatggaccggctgag

SEQ ID NO: 128718 - DNA, 467 bp, Glycine max
  unsure (1)..(467): unsure at all n locations
gcaagcttgtaggattatggggtacccgtcatatgttgtattaggtggcgatcgggcgatggtgcaaatcaactcttccacatccacaaatcaaacatgaacccaccatccccagttgcccaccatcaactgagctcgcgtacccccacgtagcccttatcctcgttcctctcagcaccgggtccccatcaacccctccaagcttccacaacatccaagcaattcaatatccaaacatcatgaattatcctaaactaagaaaacagggatgaggcagaaaactctgcccaaaacacattccaataccacagctttccctactcaaataccccagtaacattctcttcattctgattcggtaaccgttggatcgactcgaaaagtttactggagggtcctagtacataggtctacattntgaccgttgggatctgctatgaaacgtccagaacccaatatgtactaca

SEQ ID NO: 128719 - DNA, 378 bp, Glycine max
atgaacgaagccatgaattgcatagaatgaatcaacttacaaagttagctacatcagttggttatatagttagctacaagagtaactaactcacaactaactgaattaactcttagttacatagagatcaaccaactaaactaactctaagctaactttagttacatagtaatctatcatctatgctaagatataatacctgcgagtgcttgcataataaaaatattggctttcactactcatattttgaatggctcaataacgctagtctttgtctacgcaatttggatgggaagtaagccattgatgtagggtcaggtctggcactaggagtgatcccatgcttcttgatggcccttcattataatgctatagtgt

SEQ ID NO: 128720 - DNA, 424 bp, Glycine max
  unsure (1)..(424): unsure at all n locations
tgatcaaaaaattatctaatcattccaatccactcaaatcatacagttgctcattcaaatcattcgcagacactcatttcatacaaaacaatccactacatatcaaattcaactagttcactgttcaaacaagctttttgtacaagcaatcaactcaaagtactgaaatttaaatgactgaacataaatcataaaatgactgaaataaaataaattgttcaaaatgcacaaatttaaatgtcctgctcctgtgatttctcttgtgcatgctcattgagatctaacacctgagcggctggtgaatcctgagggataggctgctttaactcagatgcttgtgcagatggcatggaatcattangtatggatactacggatggctctgggatctggtctgtggaagtctcctcctcttgtgccatgt

SEQ ID NO: 128721 - DNA, 455 bp, Glycine max
actctgccactggtaatcgattacatgatactggttatcgatgaccacaaagtaacaactgtagtaacttagaaaattttgagaaaaaatcttttgaaatataaaactgcgctatgttctttttttttgaaaaatcttttcaatacttcccttgtgaagacttcttgatttcttctcttgaatcttgaattcatcttctcttgaatcttgaaatcaaacttctcttgattctttaatcttttttatttcttcttatgaaacttggaattaaacttgatcttgaacttgttgactcaatcatgaaatcattctcttgggctttttgtcatcatctttgtcatcatcaaaactacttgaatcaacttgattcatcatcatgaagcttgcttctacaggtaagtgtctcctccataaggtagcccagaaggatagtcattttacaataaagacaaaca

SEQ ID NO: 128722 - DNA, 209 bp, Glycine max
aaaactacaacagatcggaatggaaaaaaatgcccccgtactcatcaaaatcgtagctttagtgtgttcgtccaccttctctgccaaacaaagaacacaggaagcgaaatggaaaaaaacaaaaagaaaaaacgcagaagacgggtgggcaaatgaaagaaatggtggtgttaaaaaatcgcattctcttagaaaatgtaacaaaaaac

SEQ ID NO: 128723 - DNA, 454 bp, Glycine max
  unsure (1)..(454): unsure at all n locations
agcttgattcgngagctgattttnttcttattttcactctggttattagncaatggatccaacgtaacttccatagaaaaacggccgatagattttttattattattctattcgcagatatttctgattattttattattatccctcaagatattttgattattatattactatttttgattttattagtacacccgaagttgcagcgtgaacgatcgatcaaattttgttntaaaagtgattaaacgatattacttcacaaatgatcagcggaaactcaatttatcatttattaagcgagagcacggtttccataaaacatgacatgaattgaaagtctcggatctatatcttacccgttgtagaacgaacaacgatcgaagaacgggtgaataacggcgaagaacaacgganaaccttactgatttgctcacggaaacatcttggacgtgta

SEQ ID NO: 128724 - DNA, 366 bp, Glycine max
ccacttgaccaaaagcttacctgtttattaacgatgatatcatttgcacccatctttgagctgaattataattgtcaaattgaaccctaagctttgaaattattatctccattttctagactcatcttctccttgaaggggcatctcctctctctcttccttctccattccgctaccattcatcttccaagaagaaaaggaatccattgatgaagaagatcctaggcctacaagctccaatggagcttacatcaccattgtatatacaagccacttgaccaaaagcttacctatttattaacgatgatatcatatgcacccatctttgagttgaattataattggcaaattgaaccctaagccttg

SEQ ID NO: 128725 - DNA, 452 bp, Glycine max
tatggtaagatctgtgacctaaccatggcagaggtcttcactgaggccattgactacatcgcctaatattatgaccagcctttgaggtgcttcacctttgggaacttctagttaacacccacaatagaagagtctgaagagatcctgcgatgccctctgggaggaaggaaacatacctcttctcgggattctacccctccttaactagaatttctaagatagtcaaaatctcgacacaggaattataccgcgaaaagcaagtcgaatatggtgtggctgggataccaagaaaatgtttggaagcaaaagcaacagtcatggcaagtctacgcgaatggaccccgttcatggacatcttggtactttagatctttggggtggtcctctcttcaaacagggatgggttggtggaccggcagagattgatgcttttctcgtctttcatgaccgca

SEQ ID NO: 128726 - DNA, 465 bp, Glycine max
  unsure (1)..(465): unsure at all n locations
cgtatctctccttgattctatttcatcatgtttttacacattgttattgcatgcggatgggtttactgcatgcccgaatatgtgtctctagtttgaagctaacagtacgcttctcttacgcttagattcagtaagaaccctatggttgggtgcctaagtttcattttctaagtataatatgacagtgcttgtgattgcttgtaaaactcaccatgcataatggaaatctaattcgggttgaattagataactggactagattcactaacgaccctatggttgggtgcctaagtttcgttttctaagtagaactagatattgcttgtgatcgttgcacaactcacattgcataatgaaaatctaattcgggttgaattagataattcggattagcttctctatgattatacggtgaaccagtatanatcttgctctttattctctctctttattccattctctatc

SEQ ID NO: 128727 - DNA, 426 bp, Glycine max
  unsure (1)..(426): unsure at all n locations
tatgaattctcatatgtttgatgccaccgttacctgtattgcagacatttcccttagctcgtttcttgtaatattgggtaatggtggcttgtgaatagcatcattaatttcgttagctaaagctgttggcaatttgacccanagtangaagctacaactaacagaggccattatgctacgtacttctttgcttctttttttagttctcacggttgtcagcatggtttgggagaaaagggtgtcgatcgaacgaacttcataaatgaaaagaagaagctactatttgctctggaaactgacnagtgacaagtgataagtgttgctagttagaggtgagccggatctaacgtttattgaggtaccatgtttcattcgacatccccttctataagtgtattgcagtaatgataatatactacgcacact

SEQ ID NO: 128728 - DNA, 448 bp, Glycine max
  unsure (1)..(448): unsure at all n locations
ttattgatatgtgtgtagctgttatagttaattcacttttctctctgatcgacttaaatatttgtgttgtctcatgttgtgtaaatggattttccgttcaatcaaagtttagctcaaataatcaattaattccttggtttctggatcttgtttacanataaatgaatgagtttgtttgatctcttgaaaatgtctaaatttgaattgtcattaattcatgacattatgtgttatggcttcagacatgttccggcttgtatgcatgcctgcatctgtggtgtatagaagcttaattttatttttattattattagncatcatctgtataaactgactctttctaatggcttcagctttgttgagtggacccatacagtcatgtcctctggaactgaagaattactccatcatttccagttacttggtgttgttgaagcactggctgcta

SEQ ID NO: 128729 - DNA, 478 bp, Glycine max
  unsure (1)..(478): unsure at all n locations
ctgcagcttttatccaggcactctctnnggggtgaatcttctcctttcatggcttattctctactggatggcgtctcctctcacgtcttctcctttatcttcgtggctgaaaataaacattgaaggaccttattgaagctcaaagatccagcctncatagaagtttctcaagcaagcttccatcacatgcatccaaaatcttcatgattcacatacatagggactcattaggtaggtttattgttatntttggtttcaatacaaacctaggtgctcatatgggacaccttaggtttgtcgtactttntggttggaataatcagcatgaaaatacagaanaaggtacgttttattgcattactttccttaattttttaaatagtgggcaaagggttcccatggaccctaagagaataaagttcattcctgagtagcccactccaccaagtataagggaaattatgggctcccatgacat

SEQ ID NO: 128730 - DNA, 399 bp, Glycine max
ctatgatcctaagattatattgataaatctgttcatttcttaagcagtgtgcaagcgtcattgtttatcacacattcaatcttactatagcagaacactctagataaaaattctattaaaaggtagcaacagatcttagaccctataagcctatgatgtggacagctgtatttgacatatacggctcttctgggccgccctagcagtcagagttcatagaagttctattgtactgatcatacttactagactcctacacctacactgtggactaaatgtaatgtggacagatctatcattgaaaatattatgatggctgcttgtgctggtgtggattgggatgaagtagggaataggactatgggtttgctacgaacttgggcatgctctcacagctga

SEQ ID NO: 128731 - DNA, 415 bp, Glycine max
  unsure (1)..(415): unsure at all n locations
gcctttttttttactactgaccattcatatgtactggtgaaacatacaaattgtggttgttttttgaagaaaaattacagaagaagcattgagctggaaacaaaagtcttaaatctatgacatgcgagttggagagatattgattattgacattataaaattttttttgcaagtaaaaaaaattgtcaaaagttggtaaaaaaatatttcattagtattcattttctttgaaatatgaaacataaaaggcaggtgagctatttacaaatggagcattgtgatattatgagtattgacactgcttcacgttttgcagaanacagaagggaaaaatctctggcattgcttacacnagaatttgcaagctttttgtctgctctaatgtgagtatcaccaatttcttgaacatttcttg

SEQ ID NO: 128732 - DNA, 448 bp, Glycine max
ttaactactgattctttaagatcatattctatattgttatggttattgaacattagaatatttgcattgtacccttatagaccttacctaaaattgaaatccattaataagaattccttatacatacagattcaatcaagcttggacaatttaaataaataagtggatgtcttcaattgggtagggaaggcacagaaccacaaatttaagtttttaactctaggaacacttatccaaattctgtagctcttatatcacagtaatatgtattctggattatgcctacgcatctaggaaaattagaatttaactgtcttattggaatttgcgattgtatatagactcattcatgaatatggtaaatatatttttgtcaacaccagcttgtcaacaaggtgagaaaaaaaatattacctaaaggttcttttccaatgatattcatttcatt

SEQ ID NO: 128733 - DNA, 356 bp, Glycine max
ggtacagtcccattactttgcagaagcctgcttcttgtggcttcaacagctactaccagaagaatccagctccaacaagctgtgactttggagggacctgcaccttagtttacacaaatccaagtaagatcttaatatctctaacaacctccctgttttttaattagtctaggatctatttcaaagagcttgattacaacttatttcgacatatcttatggcataaacacttatgctaggatagttgctctcaaggataacttcttaccaattatatgaaaatagcttaaacaatttttcacttgaattggagaaacaagatatatatatataagtgcttaaaatataagtactta

SEQ ID NO: 128734 - DNA, 322 bp, Glycine max
  unsure (1)..(322): unsure at all n locations
actgatcctcaccggtggaacatgtangattccacaaggctcggcaatcagtaattctttcccaaattaagatcagtctttttcaatacaaggaactgaaatcttcctttaatttatcgcacataccataaacaagtaaacttagtcaatatattattagggcctcaccctcaaatatcatagattcaacaggtgaagtcaaactataaagtcatgcacttgttgaatgttcgtataccgtaatgtttctgagaaatcttaattgcagtcatggcgaaatataccccacgcggtggtgtaatctcacacatatatacttcgt

SEQ ID NO: 128735 - DNA, 249 bp, Glycine max
tatcaactgctctgagcttggtcttcttgtctctggaaaataactggttggtcattcgcattccaacagttctttatgatataagctaagtcaatagccggtcttatgttttcataggaggtaagggcatcagatcccactcccctcgatctacacaaggctatgattaaagccgggaagcctaatcgagaagagttagactgagcgatcatggtcatttgtccagagatcaaaccgccaatgttcatg

SEQ ID NO: 128736 - DNA, 401 bp, Glycine max
  unsure (1)..(401): unsure at all n locations
ttcttgaccgcatggtctcgcactacatattccatgtcgtcgttgaggatgcatggaataaggagcaacatgagatatccggaaaattagatgaggtgggttcgaagtctcaaaattttaataagaatatttttggaaacagcttttgcatgaagagaagaattgatgttagctttggggcttgcagaaggatttagataataaccattcagctgatatccttctcatggaagtggatcttctatctatactcatgtaggtccttaaacaagaggaaagtctctggtatcagaagtccacagagggtagagagcaagaggcacacggagtanggtggnggagggaccaggtcgtatgcttgagctgagagctgctttcttttatcttttttccttcagctt

SEQ ID NO: 128737 - DNA, 377 bp, Glycine max
  unsure (1)..(377): unsure at all n locations
gagactcttaatcttcattctctttttggttcctcaccatttttgtgcaaaactctcattcttgggtccaaatttcttttttcatccgttgaagctcgggaacatccagatctgagttcttggttcatttgagcattnttgtgtaagcttcatcaaggtaagggggatctttccacttcttgaaccttgatattgntatctttggaagctagacttcattgcatgttgtgttgatgttcaaattttcgtagctattgccttggatggaaatgtgtgatatngttgttttattgaagttttaggttaaaaatgatttctttggttgaaaaacttagggttacctcaatccacttanatggggtttctagcaaagtatg

SEQ ID NO: 128738 - DNA, 449 bp, Glycine max
  unsure (1)..(449): unsure at all n locations
gctcttctttcttggcttattccccagnggatggtgcctcccctctcctcttctnctttgccttccactgcatctccatggtgtaaaatcaccattgaaggacctcattgaagctcanagatccagcctccatagaagctccacaagcaagcttccatcatcctcttgactactataaatgtcttgagccttcataattatggttntctttgtggggcattgagagacaatgtgacctctcccaagacatttgaagaatttaatgttgctagtccttgcttgggaactagccttagagggtttcttttctattgtattccccttatcacctttgggcttagaaggttcaacccctaagatgccttgcgcttggtccttccttggataagagtgaaagtcataaaaatttaaagaagactatcttttaagttggtgctttactcttatac

SEQ ID NO: 128739 - DNA, 151 bp, Glycine max
  unsure (1)..(151): unsure at all n locations
tggcctggaacctcaccctggtcaaccactcataccaatgggtggagaaagaagtcgtcttcagacccaatctcaagacgtggcaatccgcggttcgcgatgggttgcttgaagcangggttactccctacaacggtttcactctggacca

SEQ ID NO: 128740 - DNA, 378 bp, Glycine max
  unsure (1)..(378): unsure at all n locations
cctcttgattcaaggatgcagganacttacaatcctgaggagttcctctgccaagctctgaataatggcatgtgtgatggacttaatgattcaaggttgcaagaaactaattacaatcctgatgagatgatccgaatgatcacttgtgctgcaccttgtgtgcttaactcacccaaactccggcctctaatgagcctggtgagtttactgaattcaggatatatggtgttctggcttcatgaaaaatgtcaaacacactcttattaactcacatttattggtaattattaattntgatggaacgtacgtttaaatcacaatagtgaaattcagacgatcacaaagaatgttgataagatgatattgctagtaattact

SEQ ID NO: 128741 - DNA, 425 bp, Glycine max
  unsure (1)..(425): unsure at all n locations
agcttggaccttcttncatggaatttcctccacctatngcactatcatatctccattctgcaatcagccacacaaatttcatttgctaatccataaagaagaagaaaaccaatcaagtgaaagtactgatttcacagaaaaataacaatctttattcaataatcatgagaaagagcagaaaaggaatcgctttgggcaacatgcaaagggttggaagaaacacacagaacactctccacccatccaataacaaaatccactcaacatgatagagaatcataaaaactcttagganagaatagttacttgttntttntttttcanaaagtattatcctaaaaaagataagcaattttttttttcaatttagaagggcaggggtgcaaatagaagggtgtagtatgacatgcaaaataccttgagat

SEQ ID NO: 128742 - DNA, 481 bp, Glycine max
  unsure (1)..(481): unsure at all n locations
ctaagctatcgattataaccattcttatatatatgcctgatattatcctttccctacagttattaacagcataacaaaagaaagattagacaaaaaaatgctcattaatatgacctacactataacttcatgagccgatgtgcattgtaaaaaatggtgcatcaacaccgtgcttctacttcttgtaataaggatggaaatcagtcttcgggataaacatcatctcccactcttacctcttaccggcaacagtaaactcgaactncaattttatctcttatttattagtattctatatttttatattaaattataaaaagcccgtgggacctgcaaggtccgtgggtaaaacccatggattaaatatatcaggctaaaaagccggaaggactctaaaaaataaggtctatatngaacccaaatcagttgtccaaccctagttntaagtaactattaaatgatcctttaaatgatagaaata

SEQ ID NO: 128743 - DNA, 444 bp, Glycine max
  unsure (1)..(444): unsure at all n locations
agcttaatgcctcaataagcttaacatgattgatatngtagaatatgtagaaaatatctcatatatgtatgatttccttctggctaagaaattttctgagaaacaaattcctaagtagaatgttacatgatataatgaaaagttgagtttaattagtcatgtaactcaatttattaatgactaaaattgttctcttccaagttttacatcttatgaatatgttggtcctgaactgtagtcacttggtagttggttggtgggctttggtcttctatctctgtagagaatttcctgttatttctatagaagtgaatgaacgttccttactcctttgacaaccttgtgaagcatgtgtctgcatttcacctatgtcaatatattntctattaaaataagtacgcacagaaagaattgaggctgctatgatatctatctgtcgcattg

SEQ ID NO: 128744 - DNA, 492 bp, Glycine max
  unsure (1)..(492): unsure at all n locations
actcagctggtacattgggcggggaaatctaattcacctcttgttgttaaccacaagttnttgtcttcggattcantaatttgcaatntacttctaaaacaatgaatcggtgttttaatctatggaattaatgtcatttactatttactatattctcaaagaaagctgaacgatatctaactcagttagttaagttacgtgcttaagttattgtaaatctttgatacttgtctttctatagataaaaaaaaattcttgaagaaaacttctagcgtgaaaaatgaatgcatgtaataagtaatgtgtctttgaagttaaagtttaaaactaaccattttgcttatgatgtgnttggttgagaagatgaanatagagaaaatgaaaatgaaataaaaatacttatattagagtaaagtatagaaggtaccagatccacttaaatctacacctcattttctttatttctctcattccccttctaccaaacacact

SEQ ID NO: 128745 - DNA, 387 bp, Glycine max
  unsure (1)..(387): unsure at all n locations
agcttcgcgcattgtgcttgctaaattgatactgttcgcagcagatctgatcgggtttgcattttactccagcgatgaactatggactatggagccataaatgtgccaacttaaacacattgtatacaattaattcataacgttgacaattgtggatatggatattcatatagtaactctcgtattgatgtaacgtgtacgtggattttaagtttaataatactaatattattattgtttatgcatggagaaagatcttgacctccctttatttttcaacgcacaaaacactgaagctagtcaagcaatgaatgaaataaaattaaaatatatacaaggaaagagcatggaaaaagagatgtgttntattttagacttaaaaagaat

SEQ ID NO: 128746 - DNA, 383 bp, Glycine max
  unsure (1)..(383): unsure at all n locations
tctctccctctgaaattattcataattctcttctaagtagttgttgcaagttgggaatgtttggggaagcagtgacattggtagattctatgatggagtgtagtcatttagcacatctagaatcctataagcttcttanttgtggtctgttngaacaaatgaacaaagagaaggctgaagctgttttttgtagtttactacgatgtgggtataattatgatgaagtggcttggaaagttctgatggatggcttanctaaggctggatatgttgatcaatgctcagaattgctgaatctaatggagaagaatggctgccgttacaatctgagacatactctatgttatgccagatctgatagagcttaacaaattgattgtctt

SEQ ID NO: 128747 - DNA, 328 bp, Glycine max
gaaaaaaaatcacataaagggttacattggcaccatcaggaaataaatgtgatagttttttttatccctctccacatccaaaatatctatcagaatcagataatcccagtttgtaccttctaacatttgtaagtagacccttatcaatttaggctcgcacaatctaaaaacaaaactacaaaagtgcaatcaaaatgagagtcaattctttgcaaagattcataagttgatcgaattgagagaacaccatcggaatgagtgttatagctatcttggtatccttggaaagaaatgtgaacatcccattttcgtaaataaatagagttta

SEQ ID NO: 128748 - DNA, 483 bp, Glycine max
  unsure (1)..(483): unsure at all n locations
tgtgcgaatcanatcactcctgcattttatctctagcatgcattctttcttggttacccactcctcacgnttgggaaaaacaccataactaaatgcgccacaaggcatccctatcgcaccagatccaaatctagaacgatgggtgatcaagaggagacacaggaacagatgaaagccgacatgtcggctctgaaagaacaaatggcttccatgatggaggccatgttaggaatgaggcagctcatggagaaaaaagtggccaccgctgccgctgtcagttcggctgccgaagcagacccaactctcttggcaaccgtgcgccatcctccctcaaacatagtaggacggngaaggaacacgctggggcacgacggctgttggaccttgtggcctcaataatcttaagagggataggcttataatatagaagaagcaacaacaatcaatttaacaatgttctttaaacatgcaagacacaattga

SEQ ID NO: 128749 - DNA, 364 bp, Glycine max
  unsure (1)..(364): unsure at all n locations
atccttaagcacctgangctgcagcttagatgatttatctagagctgccatttagccctaggccctatccaatatctatatacacacatgtacacttctactctatccaatattatcatccttattcattgcctaaatttaataaacattangctcctggcatgtaggctcaaaagtgtaaatgcatcgtggtatatactaattgaatataacactaacttctcttaggtacaattttttaaaagttttgtttccaaatatattaagaaaaatataagccacaagtatttaatgtcctcaattttatccgatatctttaaggaactataagatggaggagtagggagaagaaaaaaaaggtata

SEQ ID NO: 128750 - DNA, 456 bp, Glycine max
  unsure (1)..(456): unsure at all n locations
acttgctaacttaacattgctnagattcacttatttctcgcaagtttccttcatccattaaagttgatagcgctacacatggccgttactgtgaaaagagagatagtgggaactctaaacactttttgtagcatatcttcatagaactacaacttgccagtgtcgtcttgcgctcaaagttgacttttagtgtacaaatcaaatataacgttaacagcataagacaaaaggaattaagaatattaagacaagacaatttaaatcttcccttttgtgcgttgtggcacgagttgcttattgaacctatggacgctactttctgatgaatggcttttgtacttaaggatagagtaattggttcattgcctttgtactatgagcgaagtgtcaaagcacttttcttctgaggactggatngtgaggcagtatcgcccaatgactatacattggctatca

SEQ ID NO: 128751 - DNA, 324 bp, Glycine max
  unsure (1)..(324): unsure at all n locations
tgtaatttagagcaaacttatgcacatacttctttatgaacgttcacttgcacaagacattcttataactaaaaaaaatgcacccatgtacaatcagggcaccttcgttacctagattatttatatgtacttccaaggtgtattttctacctacatcacatgcacttcctcggctaaatntacatacatgcatactcaaagcatttggggtaccaaaaattgcacatgtgcacattccggtatttctaatacttatgcatatacaaactttgtgatgaatcttggctatctacacaataaggtgatacatttcatgctttattc

SEQ ID NO: 128752 - DNA, 462 bp, Glycine max
  unsure (1)..(462): unsure at all n locations
tcttcttaaggaagcttctcaaggaggtgatcttagttatgagaggngtgtgtgtagctaagctctagcttctcaaggaagttttctcaaagaagcttctcaaggaagttttctcaagaaatcttctcaaggaagctacctattcaataaatagaagcgtgtgtaacacttgttgtaactttgatggatgagagtcttgtgagacatacttcaaagttccacttctctacctcttttattccttcaatttcgtgctcccccctctctctttctctccttctttctattcctccattgaagcatcctctccaagcttcttatccaaggctcatcttggtggtgaagctccttcttccatggcttattccctagtggatggcgcctcctctcacctcttctcctttgtcttccgctgcatcttcatggtggaaaatcaccattataggacctcattgaagctca

SEQ ID NO: 128753 - DNA, 412 bp, Glycine max
  unsure (1)..(412): unsure at all n locations
catcaatgattacaaataaaagctagacctagcagcaactcttgagaaaaagctagaggacgagtaagccaaggtatcagtcttgcaagcggacagggaagcaaggaaaagggtgatcgattcattgcatagagaagcaatgatgtggatggacaaattcgcctttactttgaatgagagtcaagatattccccaactgctagctaaggccaaggcaatggcagatgtattctcagccccttgggaaattcatgggctccttaattattgcccacataattaggagccactatggcaatngtatcatcgccttgatttggctagataaatctttttgttctctaataaaatgagggtgattaatcatgtgtgaatccactgcttcaacaacttatctttagcatacattcat

SEQ ID NO: 128754 - DNA, 478 bp, Glycine max
  unsure (1)..(478): unsure at all n locations
gcttctttagtgcgtcatggttaaaaccgagctcgatggtggtgcgagccttttatggtactccgcgggaagtgatggnggaaatcgacattcccattcagataggcccccacacttgcaatgtggtgtttcaagtaatggatataaatcccgcctatagctgcctcttgggaagaccttggattcatgcctttggagtggtcccttcaacgcttcaccagaaattgaagttcgcagtgggtggactnttantgatagtgtcgggtgaagaggatatgttagagagttgcccctcctccgcaccgtacgtagaagcgacggaagaatcattggaaacggctttccaatcctttgaggttgtgagctgcgccctagtggaaccaagtctgtcgctacctttttttttttaaaggnataatgagggngngtgttatgctcaagaacaggattgagccttgaatgggtctaggcaagtact

SEQ ID NO: 128755 - DNA, 428 bp, Glycine max
aagaagctttattctatctacacacacatctcttatagctaagctcacctccttgagatgagaagctagagcttaactacaccccccctataatagctaagttcacccccatgacaaaatacatgaaaatacaacaaattccctactacaaagactactgaaaatacctcgaaatacaaggcaaaaaccctatactactagaatggttaaaatacaaggcctaaatgaaggaaaaacctattctaatatttacaaagataagcgggctcatacttagcccatcggctcaaaatctaccctaaggctcatgagaaccctagggccttcccttggatctctggctcaatctgcttggagtcttctatccaatgcccttgggggtagggatgcatacacgcaaatatatcaagaaccctctaataaacgag

SEQ ID NO: 128756 - DNA, 411 bp, Glycine max
  unsure (1)..(411): unsure at all n locations
aattgaaatgaggtaatttgaagcaaactctcaccttacacaagtccataacatgaatttaaacttggtcaaactggatttacacctaaaatttcaccgaatcaaaatttgactcttcaacacccaaatttaccctagaaatggctctttgttcactttggtcatttggttttctctctagcacagcccaaactttctcacatgttctaaatggcatttcaagctaggattaactcattttaaccttcatttaccacagaatccagatttaaccttccaactctcanagcctcactctttttccactcataacaccacattctcactttctaaccctagggtaattctgcccttcatctctaacaatnttccataagcaatttcagcacataaacatcacaagcatcatca

SEQ ID NO: 128757 - DNA, 427 bp, Glycine max
  unsure (1)..(427): unsure at all n locations
gtgacgaaggaagaagaaaaagaatgacgaagaaaaaaacctgtgatgctaacaaaggaagaagaanaaatgacgaaggatgatcggaagagatgaccaaggatgatcggaagagatgacgaaggagatcggaagcatgggagaaaaatttcgaggaaggcacagcacggccgttctcaagaacgagagaaaattttagggttcagaaaaatgaggagggtatgcttgtcattttgaaattttcttgaggacattattgtccaagccttattttgggatcagcttcccgaanaggagaattgagaagctggaaatcagagcttaagagaaagatctactgagagcttntgcttttgtaaagctaaaaaaaaataataaccaaacactctntaaaaataaaaaagatcttttntcagtagataagatg

SEQ ID NO: 128758 - DNA, 300 bp, Glycine max
aatgcttaattgaacccggtgagagtgtgatccttatttttgagagaaaacggctatcattaagtactgacttttgcatgaatctcttaattatggactgaatgcatgaatttgaggatgatgaaggccatgttttgattgtgatagccacttatccaaaaagctgaccatgtgcatgaatgatttatcccttgcacccagttttgagctgaatgaatgtttgattgattgaaccttgagcctatacaagtttatctcctgctactttgtcttatgttgtaggagagcatcatccacaga

SEQ ID NO: 128759 - DNA, 420 bp, Glycine max
aaaactcgcatattttaactgaaaaaacagaagaccactgtaacttatacctaattttatgagagagtggactaatccaccaacaagtggctagttcgacaaaaattgagttcattgtgtaaataaagtctcgagtggtgattaaataaggttttgatctcctaagtcaataaactgaaatataaagcattgacaaacaagggaaaattgtggcataaacaatccaacaccccattacaaaaaacataccaattctaattcaaactaagggatatatccaaatgaaaggagaaaattaacaaataattaacaatatattccagaattcccatactgcatctacattgtcaaattccatgagcacactcaatatttcactcatggtcaacatttggctcaaatcttgtaaagttcaacata

SEQ ID NO: 128760 - DNA, 464 bp, Glycine max
  unsure (1)..(464): unsure at all n locations
gatatatagatgatctcttaagtttctattattcaataagtncaacattgtgtaatagactaccaagtttaagtaatcaattacaaagtgttagaacaagcaacaaaacttacttttcttgaaatattgacaagttttatcgaattaatcaattgccaaagttttgtaatcgattacccaggccaacttcaaaagaaaagagtttctttaactcaaaataattgattatcacatcttgtaatcgattagattgtgttttgaaattatagattaacacatttgataatcgattattccaaaaactatagaagcttgagaagattaccccattctgtaatcaatcaccaagtttctagaaatacagaataagagggatttgaaccaattaatcgattatctcattcgtcaattaaatatantttttatggtaaaactatatataccctcacttgntcgttctcatg

SEQ ID NO: 128761 - DNA, 441 bp, Glycine max
  unsure (1)..(441): unsure at all n locations
ttctactaataacaataagtagacaacaatagttgatggataagatggagtgtaccattctaagaacatgttgctaacctgtggtaaccaccaagcctaanaagtttataattgggaggactgatggtcacaagctaaaatagttgtctttgtgcttcaaagattggattagtatattatgtaagattgaaaacttggatcacaaggtaaaggtggaatgtaaaccagtgtgatgcgcgtctaagggttggtcagggttaaactttaaattgcggttttattcttatatggtgggaattgttcatgcaagcataactgaaataagaaaaggaagataatggaaaactatatattgtttgccttcatatgtgcagatnattgtagnataggctgaaattatctctttcaccggcttatcctgattttaactctttgatgaca

SEQ ID NO: 128762 - DNA, 300 bp, Glycine max
  unsure (1)..(300): unsure at all n locations
tgcaagcttacactacagagcttcaatcgattcttcannatgaacaacatcatgacggtgaaaaaggcttgtagacacagacgccatcatgacaaactaacccagagctttgcgcacgccacaattgctcccaaatttggttttnttttttaccccagatctgatgtttccaactctagatctggttttttcaaccccagatttgtgacaaacaaaagggttcagagggtttagacacgtttcaccaaagaaccagcacagaagaagaaattgagaagaaggaaggagattcgagggaga

SEQ ID NO: 128763 - DNA, 481 bp, Glycine max
  unsure (1)..(481): unsure at all n locations
ttgattctgatgtatattctaatagagtccttattataatttgatanaccccctcatgagctatggagaaaaagagaaccaaacctgatatatcttaaagtgtgggagtgtcttgcaaaggtaaacatccctattaataagaaaaggaaaattggaccaaaaactgttgattgtgtttttgttggatattctatgcataatactacttatagatttttggtagctaattcataaatgtctaatatttcctatggtactattatggaatctatatatgctactttctttaaaaatatgttgttctttgacaaataaatattataaactttgcttgtgatacttcgttgtctaatttatctctcttgtattaatactaataaagacattgtgtgtgaacctatgtggacgtaaatatctttataagtttacgactttggtcctgaaatttagcttcttttgcttgaagatgattcccatactt

SEQ ID NO: 128764 - DNA, 391 bp, Glycine max
  unsure (1)..(391): unsure at all n locations
agcttctcgatatgttatgcgtctgtatcttgtatgctgagtgaaaattatgaccattttaatgtcccgagagctttcgctggtcaatttctagcatctcgatacgctatgtgcctgaatcggacatgcgagtgaaaacttatgaccatttgaatttctcgagagcttccgttgttaaaattctagcgtctcgatacgctatgcgcctacatcgaacatgcgagtganaagttaataccattttaatttctcgagagattccgttagtcaatttcgagcgtctcgatatgttatgcgcctgaatcggacatgcgcantaaacagtatgactattttaatttctccggagcatctgttgttaaattctagccgctcgatactctatgcgcct

SEQ ID NO: 128765 - DNA, 448 bp, Glycine max
gattatgcgctccatgagaggttggatcaaatggagaatagagatcataatgaagaagaaaggaggagaagagggaatgatggtgttcctagacataaccgaattgatggtattaaactcaacattcctccatttaaaggaaagaatgatccggaggcctacttggagtgggagatgaaaatagagcatgttttctcatgcaacaactatgaggaggaccagaatgtgaagcttgctgccacggagttttccgactatgctcttgtgtggtggaacaagctacaaaatgagagagcatgaaatgaagagccaatggttatacatggacagagatgaataagatcatgaggaagcggtatgtgccggctagttactcaatggacttgaaatcaagctccaaaactaacccaagcaaccaaggggtactatcgctcgattcttatggatg

SEQ ID NO: 128766 - DNA, 458 bp, Glycine max
  unsure (1)..(458): unsure at all n locations
agcttgacgaagagaatggctgacgaacaatcatgaattgnctgcgacaatggctgagggaaatcgcgagtttaactacttttatattcgtgatactacgacggtcgtaagtcaaaaacccgtcgtgacttctttgtccttaattacaactttgacaccaccagacattctaagacggttatttataaccaccttagaatgtacgacgtgaaaaatatattttccccctaattacaaaattgccaccgtgccttatactaaaacggttctctagaaccgtcgtagatcgcgcgatgtagaatgccaaaattctagtagtgcttggttgaattaactaatttgaatttattatattttatattttattttttctccaattatattttaaaaatataaatnttcatataaataaaaataatatttttataantaatggcttaaaaatgtatatatattct

SEQ ID NO: 128767 - DNA, 391 bp, Glycine max
  unsure (1)..(391): unsure at all n locations
ctaagcttatatacatgattaaaattaagatgtatttaatattttactatatantgattagaagaacctactttggcaggaaaataaagaagaagaaggttagtttcatataatatgattaataatgtatacttaaatgggttttntttttaacagacttaaatgaactattaaaaaccccgaaataaagaaaaataaataagaattttcttttaatattttatagaaaaatccaattaaataacaatgcatctacatgtaatcccccacccaatcagataacaaagaataatctatatcccgatgaaaaaaatgttacatgtgcataccacttgacgaaaacatgaactacttcttgaattcccttcatggtttttacattcgngtctca

SEQ ID NO: 128768 - DNA, 465 bp, Glycine max
  unsure (1)..(465): unsure at all n locations
agctntaggttgctcattgactccatatngttatctagaaggacaaagatttttacggggatctgcagaagaacatagaccacagactcttgcaacatgtgtagatttcttattcatggcaagatgagttactaggttgaccaaggcatcaagttttccttcaagctttttattctcagtagatgaagatgaatctgtggccacctcatggactcctctaagaacaatagcataatttcttgcactgaattgttgggagttggaagccatcttctcaatcaaattcctagcttcagcaggggtcatatcaccaagggcttcaccactggcagcatcaatcatactcctctccatgttgctaagtccctcatagaaatattgaagaaggaattgctcagaaatctagtggtgaggatagcttgccacaattcttgaatcttccagtactcatacagctttctcata

SEQ ID NO: 128769 - DNA, 467 bp, Glycine max
  unsure (1)..(467): unsure at all n locations
tgtactcttgttggaggaacccttactcaagctatcctatttgaatacaacaaaccataaaaatttcatcacactcatagcaaatcagaaataaatggcgtgaatggtttatcattacagttacaacaaatcaaacacaagtggtgcacaaatcaaacatgaatggtgcgaatggtttttctttgcaactactatccacaaagtgagatagaggttatggattaaacaaatcaaagcacaaaagtaataatgttatttgtagtgtgagaaaataacaattgaagattgctaaggcgcgaaaaaaattcaattacacttctccaaaaattgagataaagcttcaagattaagaaaatacaagtgaaaaattaagagtaataatggtatctgaggtgtgagaaatcacatttgaagattggaaatgtgtggagaaaatcatgatttaagattgtanggtgtggagaata

SEQ ID NO: 128770 - DNA, 414 bp, Glycine max
  unsure (1)..(414): unsure at all n locations
agcttgataccattacatnnntgagatttggttttggtcanagtactagtgtagaaggtatgaattggaaccttatagaatcttgtaagcaatatcttgaatttagtcgctaattatgtgttgntaaaactagctgaaagcttataagttataagctacaatacaaaaaactagaaacttataagtacctgatttaagtgttagtaagattaactaataagttagttgataaataaaaaaaaaacataaaatgatatatttaaaacttctatttgaatttattntgtataacttatcattngaaaaagtaggacttgtattataaaaaaatagtaaagatttggttattttactcatattatttaaaatcaaactttaataaactaatattggttaaatatttttttctttttt

SEQ ID NO: 128771 - DNA, 380 bp, Glycine max
  unsure (1)..(380): unsure at all n locations
gtgggtactgtggtcacggtgtatgcgtctcctttctttttctttctccacctgccccaggcctcctattgctggaacttgttgaagcagcgtaatcaaacttgccccttcttaggcctacctcgatcctctcgcctgcaaacaccagatctgcaaaactcgaaggcatgtatcccaccatcttctcatagtagaacacaagtaaagtgtctactatcaatgtgatcatttccctctccatcattaggggcgctacttgagccgccagatccctttatctccgggcatattctttgaaggattcctgctcccttttgcacatgttctacaactgcattctatccggngccatatcggaattgtactggtattgcctaatg

SEQ ID NO: 128772 - DNA, 355 bp, Glycine max
agctttgtctgcatttatcacttaaaaccattttttggtccaacgccttaaacggtcctctttgcttttatcggttaacatggaccgttcaaaagcctaaaatcaacatgtaactttaccacttttgcaagaactgcgtaggtctaagttcctcatcgcaattgaggatacataggagcaaaagccccgcttttgtcgaccaccacaagagatcgttaatggtccaacgccttaacgtttatctcctttcaaaatcaaaagatcgtttaatggtccaacgccttaaatgacctttgttcaaataaaatctatcttgcgaaaaaagataaaaacacccttggtgaccacaaaaaga

SEQ ID NO: 128773 - DNA, 484 bp, Glycine max
  unsure (1)..(484): unsure at all n locations
ggtagccattanaagagaatgagcatgtgatnggtagtattacttgaaatgttagtcagtttgtcagaatgattgtgaaggaatgcattgaccgtatcccgatgagagtgtgatccttaaattttgagagaaacgactatcatttagtactgatttttgcgtgaatctttgaaatatggactgaatgcatgaaattgaggatgatgaaggccatgtttgattgtgatagccacttagccaaaaagctgaccatgtgcttgaataatttatcctttgcacccagtttgagctgaatgaattattgattgattgaaccctgagcctatacaatgttatctcctgctaccttgacttaggttgtangagagcatcatccataggaagcatggttcanagaaaatttgtcccannattgggggaagcactgggtaagaaatgaaatggtcaaagtaaatagcatacacacactatttctatatatacc

SEQ ID NO: 128774 - DNA, 386 bp, Glycine max
  unsure (1)..(386): unsure at all n locations
atgcaccttttatctatatacaatatacaattggttgttgcttgcttgaatcttgatttcangtattggattgtcatcatcaaaaacggggagattgtagatgcaattggctttgatgtttgatgatgatcatgattatgtggtgcaattaatgcaaaagcgcttttcaagattaaaattcaagacaatacttcaagaatacaatgcacaacatctagatgatcactagaatattatgaagggaattcctaattgaattatcaaaggcttcggccaagtgattcaaaataaaaagttgttttcaaaggttttactctctggtaatctattaccacacgatgtgatcgattaccagtggccgatacatattataaccgctctataaa

SEQ ID NO: 128775 - DNA, 414 bp, Glycine max
atatatctttttggtttaatataacatttattgataacttatttaaaaatatatttcacaacaaaatataattttatttttcaatgaacttaattataataagctttagcttaactcttcatgtagatcaacatgattaacattttaaaaaataaatacatgtaaaattttaacgtattataacaaatttaatataataataatactaacaatgaatatttattcctttaaaaaaacattgagtatttatctatgatattttaaataagctagcctcttgaatgacctacgacctaatttgtttaactaaataggttgtaataaaaccctctatttggtctaatttgagtctgatgtaaataatgacgtttctgtaaataaaataatattcttgcactttttatagacagcaca

SEQ ID NO: 128776 - DNA, 284 bp, Glycine max
  unsure (1)..(284): unsure at all n locations
tcccatagatcacatggtaaactagaaaagtattatgctttttttttttagtcaaggtttcttattgaagctcttccttatgtactgtgtaatccccaacaaatccttacattntctggtatagaggtagtaatgttaatatttccctaatgtaactctggagtggaagtatgctttacattataatttcctagtatactttggagtggaagtaatgtcttccttatgagataataagcttaaccaatttcagatcntctttttttntgcttttaatatacatg

SEQ ID NO: 128777 - DNA, 466 bp, Glycine max
  unsure (1)..(466): unsure at all n locations
agctngtcgtagtgtaaatctattgatntttctctttctccgcgtatgtgataatgagtcgtcaactataatatttcaagtntgaacaccaaagtgactagcatgagatgaaagtcgtagtgtaaaagggcatgagcttgagctaacatgggcttgtcatagtgcaaatcctttgatttcctttccctacatgtgcaataatgaatcgactgcaatatttcaagtttcatcaccctttgttttatccgtaaaaatcaaagtcaagtaccggagaatttacaaaactgagctagacgacaccctcgtcaacaacaacacatcatgcatttcaagtgtcaacacccttctttctttttatttgttgtttttactggaaatatactcatatcatttcattaatgatcaaaacatgaatacactgcagaggataatcaaaataatgtggacttgaatagaatctatacgt

SEQ ID NO: 128778 - DNA, 440 bp, Glycine max
  unsure (1)..(440): unsure at all n locations
tttcttggagaaatcatgaaccacaactgagagaacgtaagaaaaaagaatggacattgagaaaatttagcatgaagagcttctgcgaattctgattctaaagatacaaaatgaatgagactgtattatgactacaactttgaatatatagtgaagtgtgtagaagagaaggttgtagctaaattacttcagttgaaattctgtgataattcaagcataacagaattataaccgagtacttacataatctgttagctaaactaacaaactgatgggcatgaattctttacagtggaaaatttcacagcagcagatgctgtgaaaaatataatcgtgccttgcatagatcctatatgtaatatataatattctatggaataaattgaatatgttaatggctacgatgttatccacttatcaatngactggagacccgagag

SEQ ID NO: 128779 - DNA, 401 bp, Glycine max
tgcagctttaaggaacacctagctataataattcatggtacacttttgaactttgataatgagaagctggagaccaactaaagtcaacttcttcccttttcttcttcaattcgggcccccctctcttttctctcttctttttttcctcatgaagcatctttcagcttttatccaaggctatttggggggaagctcttttatggttattcctagggatgggccgctcttacctttctctttgtcttcgtgcattcatggtggaaacaccataaggacctattgaagtaaagatcagcctcatagaagctcacaagaagtttcatcattagagatatctattgtcatggatcagtttccataatgactttgagtatgcttaccactatggcaatgtttttatc

SEQ ID NO: 128780 - DNA, 483 bp, Glycine max
  unsure (1)..(483): unsure at all n locations
aagctgcatgcgaattctcaagaaaaacacagatattacactggtataatatgttaatatgcatgtgaacctctctcaaaatatatgacaactcgttaaaccaatcgaatacatgtaaataatnttgaaccaaggaacatcatattctaaaatatatagttatagtaatataatataattgtataaaaaaaagaaataggcaaatgatattttggtggaggtgcatgcctcttcgttttttctgtatttttccctaagaggaaactatataagcaaacaaaataaccatcaaatgtgcagtctaggtataactatcaaactagtaacgacatgacagtaaatcataataaaactaaatacttaatcaaatataatttctaaaaagttagaataaatagataggaaatatttttttatctttagaaaacactgaatgaaataaatatatattcactgtagattttaaatataggagaatattcc

SEQ ID NO: 128781 - DNA, 415 bp, Glycine max
  unsure (1)..(415): unsure at all n locations
tagtgatggagaacacaatcaacatgaagataaaataggttattagagatcgcagttgatcaatatactccacatatagttgagtctaaataaacaagctcaaaataactcaattntattctttccttgttaagttaattagaaggaataaggcacttaatttttgttatcacaactcagggtgttacttacttttatatgtttgactnttagaaaacttctctacgtttactcctcaattcctcaaatcaaatcaatttaaaataatgaactaaattgtaggactagtgtagctcatttcaagcaacaattgtaatggtaaatcaactacacatatagctaaaaaagatgttaaagaacatttatgaaataaagccactaatgtggcaataacactataatctcaactaatata

SEQ ID NO: 128782 - DNA, 344 bp, Glycine max
  unsure (1)..(344): unsure at all n locations
cgaacataacgtttcttttcaatataaggacaattagatagatggatagcagaaaaaaatatcaccacttccttgcatcaaccttatcctctgaacctcccccaccatcgagaaaaccagataaccgaataaattgaaacaaagctggcagagagtgagtccttcgtggccgttcactataaatcatgaaggagttgtggtgcggatggtgaatgggaggccgaggatgatgtcaatgagatcagatctggtagtggaagtgttatattccacgatggaggggggtggtganttgtgatttaaatacatcgtgagtactgaattaatcacaatttttacatatg

SEQ ID NO: 128783 - DNA, 417 bp, Glycine max
  unsure (1)..(417): unsure at all n locations
agcttcctcggagccattcctgcgaatgtttacatntggaaagttttttttaccagtggaacattactcttaatacaaaaatggcatataacctcctcccacatatacaaacatcaatgtaaatntagagcaagctnatgcgcatatttccctacaatcgttctcttgcccaagacattctattaaccgaaaaaaaatgcacccatatacaatcaaggcagctttgttacctagattatatacacgtacttccaaggtgtatttgttacttacatcacacacatctccttggctaaattcacacgcatgcatactccaagcaatttggggtaccaaatattgcacatgtgcacatctttggtattttaatacctatacatacaccaacttcatgatgaatcttgactatctacacaa

SEQ ID NO: 128784 - DNA, 358 bp, Glycine max
tgcaatggtagtcgtgagcccatcaaagattcttcaacctccatttcccataggatataactccaatatgacgtgcttatcatggaggagttctatggaattccattcagcattgtatgaccctaaaacataaggtgcaaagtctaatcaatgcacgctggctgagatttgaggaggagaatcgcttgtgaattctgatgttgtcaagcaatactatgcatgatgcttggggcaatttgaaggttgttgttagatatttccaatgactcattaggatttctaggcttatgctattatggtaaacaacaatcacaattgttataatatggatgactttgatgttgttgtctctcattct

SEQ ID NO: 128785 - DNA, 456 bp, Glycine max
  unsure (1)..(456): unsure at all n locations
agctntccaacacataaaaaatactctattataacaactataactgaagatatgacatgatctatctaggaatgacatcataaaactaacactagacgttgacaactttttaagtattttaactataataacttaatctaatactctacaacaacaacacatacaaaatacacatgtgtatagagcacacatacactatcatagcacaagtacatgcttagaaaaaaactaataatatacaaataataataacaaatactttcaaaaaatataacagaagagttctaataagagttctccttgtgatatatttgtagtactcaaaacatgaggctatagaacaccttcccaacaaaacattataacttatttaattcataatttttaatttaattgaaaaatatataactcttagcgtaacaatatacaaaagggaagtacactatgagcttttat

SEQ ID NO: 128786 - DNA, 406 bp, Glycine max
  unsure (1)..(406): unsure at all n locations
ggtatcttttatgatgaagcagccatcttgtattnttcactaggggaggctagctacataaatcanaagacaccattggtttctatcttgaactaaaccttttgctagtccatttagataaaatataaatataaaaaaaatccaggttttcatgcctactctagtcatgatgatcaagttttaggtaatgaaacacaaataactggtaaatntttagagagaactaaataagaaaatcctaacaataaggggaaaaaatataggaaatcagaatgtccattacaatgtacaaaagcggaaggaaccctaacacaaaaaagtttaattcaatgttaataggtagaatcaattcaatgtgccctgagatctatgacctgcagtacattactgaaaattgtttagagtg

SEQ ID NO: 128787 - DNA, 432 bp, Glycine max
  unsure (1)..(432): unsure at all n locations
agcttgaaggcctaggatcttcttcatcaatggattcctttgcttcttataagatgaatggcagcggaatggagaatgaagagagagaggagacaccactcaaggagaagatgagtctagaagaagctcaccaccataggaggccatggataagagcttggatgaagaaggagatgaatgatgggagaggaagataagagcacgaaattttgtgctctaaaagagctctgaaatctaaagtttaattttcaaatgaccaaagttgcaaaaatgcacacaaatagcctctatttatagcctcagtgtcacacaaanatggagggaaatttgaatttctattcaaatttcactagaatttgtggagccaaattttggagccaaaatttcactaattatgattagtgaatntcagatatggtacagcccactaat

SEQ ID NO: 128788 - DNA, 442 bp, Glycine max
  unsure (1)..(442): unsure at all n locations
ttaacccgtggatcttctcgaaatttggtcttaaactttagaagacacttttccatgatctgaccgttgggatanttgacaagatttctggagtgtgctataagcctcttaatgaagcttctggaggaagcctcttaatgaagcttctagagaaaactacatgaagctgcctctgtaaaaatgcttcccggccttcattaaccgttggatcttctcgaaatttggtcttaaacttcacaagacacttgtccataatctaaccgttgggatctgtgagaagatatctggagtgtgctcgaagcttccattccggagagcatctcttatttaagcatttcagcctttgctttcgtgtagcttaggaaaaacgtcatttcttcttctttatttcttccaaagccatttctaaagttccaagaaatctcttcatcacccacagcct

SEQ ID NO: 128789 - DNA, 335 bp, Glycine max
  unsure (1)..(335): unsure at all n locations
ttataggcccttctacgagaagaatgtanagattaggacatcctcacgccacatgtacaattgatatatcctcataactaacaaaaaacaatgactcttggtggctgaatgtcacatttgggtacctaaagatgtctccaaatttaggatcaattatcactaattttctcaaattggtcaatatcatgagatcacttacatcacaattcttagcagggaagttaatcaaggtctgcaagtttttcaggttgtaaagttgccatctttcaatgttatatcaccacatgactctggtaaatataaatgtctcatcctgtgcatgttccctatgacat

SEQ ID NO: 128790 - DNA, 269 bp, Glycine max
ccttctaagagatatacgacctgtggtatagatgccaacgagctgaaaataaactcacacacactctcacacgccaaaacatgctttgtgggttatattgcctctcacaggagtgagaattaaataacctacacaattatctatttatcatagacaccatgaatgggaaggaataaacaacaaggaaaatgccaaacaacttaacttgtgatggagatatacattacatatatccttaatagagttttgcgtttggcaccatcccatct

SEQ ID NO: 128791 - DNA, 427 bp, Glycine max
  unsure (1)..(427): unsure at all n locations
agcttgtgcgatatatatcacccctgcattttatctctagcatgcattctttctttctttacccactcctcacgtttggttttttagggaaaaacaccataactaaacgcgccacaaggcattcctatcgcaccagatccaaatctagaacgatgggtgatcaagaggagacacaggaacagatgaaagccgacatgtcggctctgaaagaacagatggcctccatgatggaggccatgttaggaatgaggcagctcatggagaaaaacgcggccaccgccgccgctgtcagttcggctgccgaagcagacccaactctcttggcaactgcgcaccatcctccctcanacataataggacggggaaaggacacactgnggcacgatggaaccctcacctgggatacaaccgagcggcttacccttat

SEQ ID NO: 128792 - DNA, 430 bp, Glycine max
  unsure (1)..(430): unsure at all n locations
agcttctaaactttatacaagaatgaagctctgataccacttgttagacaagtggcctcagatattcttaagaaagggggggttgaataaagatattgcaaactatttccccaattaaaattctatttcaatttcaatgccaagtgcacgttcccttaaaaaatgaacttttaaataatgattcaaaaagaacaatctgaatataaatataaagcaataataaataaatgagtttaagggaagagaaactgcaaactcagatttatactggttcagccacacccttgtgcctacgtccagtccccaagcaacccgcttgagagttccactatcttgtaaaattcttttacaagttctgaacacacaaggacaatcattcctttgagtttagatttctntacaacaagagaccatcggtctctcaatcccc

SEQ ID NO: 128793 - DNA, 451 bp, Glycine max
  unsure (1)..(451): unsure at all n locations
aagctatntacagctaatccgaacttatctcatgacataagctctagtataagtgtttcaaataactntntaaattaacttatgatgtgcataagatattntcaacttatttcaatacactcttatgaacaacttatgaaaatagtttaaccttctctcctcttcaattatagaaacaacttacgcataagtatgtacattatatgaactaatttaatatgcacttaataagctgtttaaccaaacactcaatgacaaataccaaagccccttcctgctcttttaacacttcctagttcctgcttcaccccccacccccacctcttatggatgaaactacacggtgactcttgcttgtagattaaaaattcaatgcatgcagccctaatcgttggtccaacatgtagatggcactatatctacccttgtaatatttctctcctgacattat

SEQ ID NO: 128794 - DNA, 261 bp, Glycine max
  unsure (1)..(261): unsure at all n locations
tgatcgaattggaggtagagggagagcaagtcgttgtcgtcgtcgggaaggagatcaacgtcgaaggataggtcgtccggtagggttataatctcggaatgggcgcgtctgtggcctctgttcttgggtggattctccggcatggcgcttatgtcgtcgtggctgaatgatgaagatgatgatttcacataaagagaagaaggtggaggagatttgttgtccctatccattgcncaccanaatctgtatctataacaatac

SEQ ID NO: 128795 - DNA, 442 bp, Glycine max
  unsure (1)..(442): unsure at all n locations
actttgaaacctgataacaattatatgtgtactatcatgtatgcactttgctgaaaaataaattgaagcctgtgaagatgacataaacaaaggtgcattatgtattgctcttttccccccttttcaattntacagttcactggagaaaggtcagccttacattnttcgtgttggttctggtcaggtaaactctggatgttgcttttaatgttatcaagcttaagaatttcaccttcattattgtagttagtgttcaaacttgaaaaacaatagttttggggccaaatcggttgataatcattttgaagattaactgatattcaacccaatgagtaacaggtgatacaaggacttgatgaatgtattctgagcatgaaagtaggggggaagcgttgactgtacatacccggatcagtaagcttctttcttgacagttgatgct

SEQ ID NO: 128796 - DNA, 445 bp, Glycine max
  unsure (1)..(445): unsure at all n locations
ttactcgatgtcgatcagcgcttttatatcgagacactttatttttaattacagaagctctcgagaaatttcaatggtcataactnttcacacggatgtccgattcgggcgcataatatgtctagacgctcgaaattgaacaacggaagctctcgagaaattccaatggtcataacttttcactcggaggaccgattcatgcgcataatatatcgagacgctcgaaattgataaacggaagctcccgagaaattcaaatggtcataacttttaactcagaggtccgattcaggcgcataatatatcgagacgctcgaaattgaacatccgaagctctctagatatcaaatggtctaacttttcacttggaggccgattcaggcgcaaatatttcgagacgcttgatattgacaacaatgctctcgaaaaatcaatggtctaactt

SEQ ID NO: 128797 - DNA, 135 bp, Glycine max
gaatgaaagtatactaagcaagccaacaagaaaaggaaggaagtggtacttgaacctggtgattatcttggacatttgaggacaaatgtttttcaagaatgatggaatgatgagaatcatgaaactggccaaata

SEQ ID NO: 128798 - DNA, 441 bp, Glycine max
tgatgtcgataagaaatcacatgtttgtcatcatcaaaaagggggagaatggtaatgtatgtatacatgattttgatgatgtcaaaagaagaatcaaacaaggctcatttgcttcaacattaatacaagattgtttcaacaaacaaagccttgattcaagatttcttcaagatcaagccttgcctcaaaacaaaaagggttcaagttatccaaggcacatgtaatcaattaccaaggcacatgaaagtgtgtaatcgattacacatcatatgtaatcgattaccagagactctgaacgttgggaattcaaattttaaatgaagagtcacaactgttcaagaaaaacaattgtgtaattcgatacaccaatgctgtaatcgattaccagagaggatttcaaggaatatcgccacagtcacatcttatcatttggtttttgaa

SEQ ID NO: 128799 - DNA, 418 bp, Glycine max
tcccactggaaaattaactttccaaatgttggccttcgcaggaatggccccgaggaagcttgcctcaaagaggtccaggaaggacaaggcggccgaaggaactagttccactccggagtacgacagtcaccgctttatgagcgctgtacaccagcagcgcttcgaagccatcaagggatggtcgtttctccgggagcgacgcgtccagctcaagacgttaaagaagcgctactaggaggcaacctagtaccttttaaatttctggctgctatttgatcactttttatagtaagacgcacctagttgctcatgatcctgggaattaaataaaacaagcgcaagctcggaaggtagtcatacctcacaaaatatatatatgtatgtctaggtagaaagataccttatatatgcatgtatg

SEQ ID NO: 128800 - DNA, 393 bp, Glycine max
  unsure (1)..(393): unsure at all n locations
actatnggattcattaacgtctcgtatgccaggagggttctgatgatgacttctgagttgacatcaaatctgatactatgcaagtaaaaacgcaggttttgtcatcgaaatcaatggatgagatgcccctttccgctggtttgaagaagatcccggcattgcggagttgcttcgcagatggaagcttttcatcccggngagcaccttcattagaatctgttgacgtctgtcgcctttctgtgatctccataagatttgcaacccgtttgtgtcaaggatctgactaatggattattaaccctactatcttccagcttgatagagcaccatgtaaccaacgaatcacagaggttaagtttctccgcgaaatgctttttaaccaacgaaacaatg

SEQ ID NO: 128801 - DNA, 381 bp, Glycine max
  unsure (1)..(381): unsure at all n locations
ngatgtcagagacaatatanactcgttgtgtgcacagaaatactatactcttnggggngattcactgtgtcttctttctatcatcaggtgtagtactcaggacatgggttgcttcgtgtccactccaaaggattctggtggaaatagaaggaggccagggagtattgcggagggttctgtgtatgttcccggtctaagaattcctaaacctgttgattctgcacagtcacttggtgattacttgtccaagaatatagtggagcgcctgtctgctcttagaactcgtatatgtgtaatggctggccaagaaggtcctacaattacaagaacataaaggaaaagtgccacccaacatggttagtgctagcatagatgaatcac

SEQ ID NO: 128802 - DNA, 309 bp, Glycine max
  unsure (1)..(309): unsure at all n locations
cttaatcctcattcttcttttgtntcctcaccatttttgtgccaaactctcattcttgggtccaaaattcttttttcatcccgtgaagctcgggaacattcaaatctgagttcttggttcatttgagcacttttgtgtaagcttcatcaaggtaagggggatctttccacttcttgaaccttgatattgttatctttggaagctagacttcattgcatgttgtgttgatgttcaaattttcgtagctattgccttggatggaaatgtgtgatatgttgttcttattgaangtttaaggttaaaaatgat

SEQ ID NO: 128803 - DNA, 417 bp, Glycine max
  unsure (1)..(417): unsure at all n locations
ctaagctcttatcaggaattctggaggtaagctccttctttcttggcttattccccagtggatggtgcctgccctctcctcttctcctttgccttccactgcatctccatggtgtaaaatcaccattgaaggacctcattgaagctcaaagatccagcctccatagaagctccacaagcaagcttccatcatcctcttgactactataaatgtcttgagccttcataattatggttttctttgtggggcattgagagacaatgtgacctctcccaagacatttgaagaatttaatgttgctagtccttgcttgggaactagccttagagggtttcttttctattgtattccccttatcacctttgggcttagaaggttcaannnntacgaagccttgcgctaggttcttccttggat

SEQ ID NO: 128804 - DNA, 443 bp, Glycine max
  unsure (1)..(443): unsure at all n locations
agctnggatggattcagtctaactatggatctaggtttagtaacttaggctacaacatagaacacgaaagtatgattgattagagaaatactgagaaaagctgctttagtgctaacactgagaaaaatccaaaggaagaatttaaagctgtcatgacaaggagcagaatggcaacccatgtggatgaaagaaaagctgagaagaagatggaggaaaataaacaatagctggcagctaagctggcacttgaaccggttgacgatttagttgaacttgaagaaattgttgaggaagcagaaggtgatgaagaaggagagacaccaataagagattgtcaagaggaaataaagaataaggaagaaaatgaataagaagaagattaatatttgaaatattgaaaacaaaaagagaatgttgttgagattgaaagaagaaggcaagag

SEQ ID NO: 128805 - DNA, 366 bp, Glycine max
  unsure (1)..(366): unsure at all n locations
cttactcatcttcctagacagataggaagattggtcaatttacgccaccttgatattagtggcacaactttggtggaaatgcatgtaacattccattntgttcgtaaataaaattttagagaataatgatgttttataaataaataaataaataaaaatagatatgataaaataatgatttgagaaaaaataaaaaggatatgttattattcatatgatagagaataaaatagagtttcttttatttataaaataataaaaataaataaatagagtaaataataggtcgtgaatacccttagctataaatagcaacataataggtcagttttgagacggactcctcaatctcctttatcttttaat

SEQ ID NO: 128806 - DNA, 460 bp, Glycine max
  unsure (1)..(460): unsure at all n locations
agcttgtctcagcgtttatgcgagacagagtctaacatgttagccatcgccagcaagtaccaagaagaattaaatctagccatggcccacgagcacaaagtggcggacgagtatgcccgagtgtacgcggaaaaggaggctagaggaagggtgatcgactcgttacatcaagaggcaacaatgtggatggaccgatttgctcttactttgaacgagagtcaagaacttccccgattgctagccaaggccaaagcaatggcggacacctactctgcccccgaggagatccacggacttctcagctattgtcagcatatgatagatttaatggcccatataattaggaaccgctaggaagtttgtattgtcactcagatcttgactagttataactttttgaataaaatgagtttatctcgcgtttttnttacttcaaagatcagtgcgaatcaaatcactc

SEQ ID NO: 128807 - DNA, 394 bp, Glycine max
  unsure (1)..(394): unsure at all n locations
ctggttcccaacgctctgttcaagctctccaaaatctagatgtaaatctaggatctctatcagatactatgctagatggcacaccatgtaacctgacaacctcacttatatacaaggtggtcaacttttccaaggaaaatctgatattaatgggaatgaagtgagcagacttagtcaatctgtcaacaataacccagatagaatctaaacctctaggggttctaggtaatcctaccacaaaatccatggaaatattgtcccacttccactggggtatctctaagggttgtaacttcccttaaggtctccgatgttctatcttagccttctgacagactangcatgcatacacaaactcactaacctctcttcatgttgggccaccaaaacatca

SEQ ID NO: 128808 - DNA, 333 bp, Glycine max
  unsure (1)..(333): unsure at all n locations
ctttctcaactatttgatttatgatatatagctagatgaaaggatnagtatgattattctattcaaattatccaatgatgatgattttcaacctatttgtgattcaacaattaagggaatgattcgattgaactatatctaatgcatttgactaanatttcacactttgaacatcatttagagtaactgtgataattngattngcattgttntggtgaattggatagatgttattaaactngattcatattctatnntttgtctggttcttcatctttggtttgggttntcgcattcttttacattcgcctagaaactattcatttgaatccc

SEQ ID NO: 128809 - DNA, 319 bp, Glycine max
  unsure (1)..(319): unsure at all n locations
ccgacccaacccgggcatagtcggtcagtgagaacatgtgatgtacctaaacaggcgagctcctggcagtccacagataaaaggaacaaagaccacaaagcaaggaggcttgtggtggctggccaactgtgaattttgtgtgatatatgggttgtggcctctggtaatcgattaccaagggtgggtaatcgattacaaggcttaaaaatgaagacatgaggctaagatggtctctggtaatcnantaccaaagggtgtaatcgattaccaagcttgataaccatgtcatggagccatgagagcttctggtnatcgatta

SEQ ID NO: 128810 - DNA, 197 bp, Glycine max
gtgtatgggagtcctcatcttgggagcaactttggtcccaccttaagcagcttgaggctatcatctccttcccgtggttaatgtgtggggaatttagtgaagttgtccttccttcggaggatagcggtggctatttctcgacatctacggcagagaagtttcttgatgtcatcaatacctgtggaatagttgggatt

SEQ ID NO: 128811 - DNA, 313 bp, Glycine max
  unsure (1)..(313): unsure at all n locations
gtcatggaagaaggagcttcaccaccaagatgagccttggataagaagcttggaaggatgcttcaatggagaanaagaaagagggagagaaagagagaggggggagcacggaattgaaggaataaaaagggagagaagtngaactttgagttgtgtctcacaagactctcattcatcanagttacaacaagtgttacacgtttctatttatagactangtagcttccttgagaagctttcttgagaaaaattccttgagaagcttctntgagaatanttnnttgagaagntagagnttagttacacacacccc

SEQ ID NO: 128812 - DNA, 429 bp, Glycine max
  unsure (1)..(429): unsure at all n locations
ttttgcgtaagagtatgaacaacggctcacaaatggcagtgagctgcgatatgaatctaacaatataattcaagcgttccaggaagccccggacttgcctctcaatacggggttctggcatctcaaggatggccttcaccttttcggggtctacctctattcctttctggctcacgatgaaaccaagcaatttccctgatttgaccccaaaggtacacttggcggngttcaaccttaattgatatttcttaagcctttcgaacaacttccgcaggttgacaaggtgttcttcctcggatttagatttagcaattatgtcgtccacgtagacctcgatctcttgatgcatcatatcatggaacaaagctaccatgtcccgttgataagttgccccgacattcttgagtccaaaggacatcaccttgtaac

SEQ ID NO: 128813 - DNA, 364 bp, Glycine max
  unsure (1)..(364): unsure at all n locations
taccagtgggacactactcttaaagcaaaaatggcatataacctcctcccataaatacaaacatcaatgtaatattagagcaagcttatgcgcatatttccttacgaacgttctcttgcacaagacattctattaactaagaaaaatgcacccatatacaatcaaggcagcttcgttacctagattatttacacgtacttccaaggtgtatttgttacttacatcacacacatcgccttggctaaatttacatacatgcatactcaaagcattntggggtaccaaaaattgcacatgtgcacatcttggtatttctaatacctatacatacacaaacttcatgatgaatcttgactatctacac

SEQ ID NO: 128814 - DNA, 465 bp, Glycine max
  unsure (1)..(465): unsure at all n locations
aggcttgcaaccttttggtttatctcttaaacaataagtttttttttacatggctaatctgtgatcaaatttatttatctatatgaccttattatagcttgagtggttcttttacacttccggtctgtatctttacctaggctattgttggactaatggaaggggctgggaaataacttgatggcatgatgctaggttccacttattggattgcttgagaatggattggaatggaacctgatggagtgcattcctttccatcctatagccctcttttcttacccaccaatttctggagtaagggacagaactagtcagcattccagtccattccattccactcgtcattatccaaacttagtttaacagtgaaatggataatgcttccgcatgtatcttggtgtttattgtcanagagtaaaagagaagtaaatatgtcctgattgtaatttcaaaatgatattt

SEQ ID NO: 128815 - DNA, 379 bp, Glycine max
ccaacaaattccacattgaatacagtatttattaattatgcaaaaaaaattgggttaactgtcacatgtttataattttataaaatatagagggcttttgtgtaagtttttaagtttaagtgcgaattacaagataggtttaggagtagtttactcttcaaataataatagacttataaaaatgttggacctgatcaatatagtttaaagagtgcattaatggttaagtcaccccctgcccacaatttagtataactaggagcctaacaactgcgcctctattgctgaaacggcggtagttaatggtcctaccaacatttaactttccttattattgtctaattgagataatcatttaatgccatggcttcagtaacta

SEQ ID NO: 128816 - DNA, 344 bp, Glycine max
  unsure (1)..(344): unsure at all n locations
cgttgcatctgtgcattcatcgcatccagtaacagacgttgaacgccgtcctactgatgatactcgtcaccaccaccacctgctccagccataattcaacaggaaaaaaaatgtgcaataaaaattattaaggtttcaggacctcacaacactctactcacgtgtttaactcttagatggtagtacacttgtgtttaatgctctcaataggcttttgtgtaatgtattccctcttgccttttaccactcgtgtntcctcttaagttcctggatggaccaaattacacacacaaggtaatataaaataaaaggaaagacaatattatgatcacaaactgatttga

SEQ ID NO: 128817 - DNA, 472 bp, Glycine max
  unsure (1)..(472): unsure at all n locations
tcctgacccaccatataccttgacccattgtgagaatgtcaatccttaccctcggaagcaaaaaagaaaagaaggaanatttccaatcaaagagaaagcaaaaagagaagaaaggaaattcccaatcaaagagtgggagaaaaaaaagagagaagaaaggaaattcccaatcaaagaatgggagaaagtaaaaaaaaagaagaagaaagggaagaaagttcccgatcaaagaaaacaaaagaaatatgcagaaagatctttggaccggacaatatctgaacaatacagaattgtcaccaaatgaacaaaagaaagaaaaggaaaccatgacctanaagtggtcttctccctttgattaccaaccaaaatcttgtgtgctagcgactntntcgccccgcactatacaaaaacagaanaggantaggccaacataataatatcataagccaaaaacacacataagccgaaaacc

SEQ ID NO: 128818 - DNA, 370 bp, Glycine max
  unsure (1)..(370): unsure at all n locations
agctttcaattcccttaactggggattatatttgtccatggntatgatggatgtgaggcttgaaatgtagcttgagttgagtatcaaaaccacaaacaaccatattattagcactaaccaatcgagggtgcttacagttttttctcctcaaaagaaatagcatgttagagataaaattatggacaaaacttagatgtnagtttttttaggtaatcttagtgttgttctccaattggatntggagtgtcacttcagtgatatgtataatgaaggtttgtatttgttgggaaatacctaagtcccacattggctaaaagttaggcctctcacattattcattctaagatggtatcagagccaagtctgatca

SEQ ID NO: 128819 - DNA, 437 bp, Glycine max
  unsure (1)..(437): unsure at all n locations
acaacatcagaataattatgatatttcaagcaacagatacaatccaggttggagaaatcatccaaatttgagatgggcaagtcctccacaacaacaacagcctatccaatctttccagagtgctgctggtccaagcaagccatatgttcctcctccaatacaacaacaacaacaacagtagtcacaacaaagacaacaagcaactgaggctcctcctcaaccttccttagaagagttagtgaggcaaatgaccattcagaatatgcaatttcagcaagtgacaagagcctctattcagagtctgacaaatcagatggggcagatggctactcagttgaaccaagcttagtctcanaattctgacaaattgtcttcacaaactgtgtaaaatccaaaaaatgtgagtgccatcaccttgaggtctgacaaccaaattc

SEQ ID NO: 128820 - DNA, 453 bp, Glycine max
  unsure (1)..(453): unsure at all n locations
caagcttgtggagattgctgacnatttgttatgtctggttngggttacaagcctacaagtgctgataaaaggaggattcctttggaaagaaaagagaaatgctttgctcgtttacaagggctagaaccgcaggtggagagggttcctatttgtcacatcaatgagagcttttgagtgtagggtggatttacgaagattggggtgctatgttggataaagagaccaaccaggatcagccgaattgggtgcagccatgtcctctggactttgaattgaaaaattggcagcaaccagaatattttgttnttgatttgatgtaattaaacagttttagatactattactatgcctaaggctttagaattcacatattgtcaagcgtactttccttttcaattctangtgatattaataaaatgcatttcgaagacatattccctctttgaatctttg

SEQ ID NO: 128821 - DNA, 480 bp, Glycine max
  unsure (1)..(480): unsure at all n locations
ctttaccagggtatnnttggatatttgttctatctaactacccattcggtatactggctctactaaaaatatgtctttcanagatgattcttggaggcttttaaagacggtttagaattgtctttgaagctagcgtcgtggaaagtcaatnttttccatgacggttttgtgactatctttgtaaggtgtcatctttattatggtttactaataatctgtcttagaattagttttaaaaaaaatgaaaaaaaatgattctaagacaatttttgaacaaaaattgtgttagaatgatatattttctaagacgattttgtccaagaaaagtcttagaatttttttttaaaaaaataaaaataaaaattgagaattctaagacggttttcccaaaaatcatcttaaaaagtagattttctaagacggnttatggaagaatcgtcttataaatgttttgttttttaaaacaattgaaaaaattca

SEQ ID NO: 128822 - DNA, 464 bp, Glycine max
  unsure (1)..(464): unsure at all n locations
agcttgngcagccctcacttcacatattgtttttgtgagcncaaattctaagatgacattagagcctattctgaatccattgttgttgctggtgtcttagaagattgatgttgctggtgtcttagaagattgagattccacaatgactataaataagttaagctttaagcccaaattctaagattagcctattttaatgtgaacaaaccttttagtgatggtgaactgtgaatgaaccccctgngagtatttttccttcctctacaaatttagtgtcaccaacagttggttntcaacctatcaattttacatgctagaaaatgaaacgaagttttaaatactcttactattattttggaactntacccaaaaatcaccattttctaaaatgccaaagttgatagtaaaggattcanaagtacctgtcaattatgttgagagtcatggagagggaanaaaattgt

SEQ ID NO: 128823 - DNA, 492 bp, Glycine max
  unsure (1)..(492): unsure at all n locations
ngcatccnncattttccttattccttcaagctataacaattaaagtattatcaataccatcaaattaaaccaataattaattaaaatggtcacattaattatatgtcatgccatgttgtcaacaatactgcctgataattaaaatcaaaataaatacaaaactcatggtttttaactattagtatgattatgacggttagaaataatctaagttctacatcgattaaaaataatttcaaattagaatatataagtgagggaaaccctcactccttgaactaacttttgaaattgagttagacttttcacattatttattctaagattatattagagtatattatcatatcttctaaccatgactattaaaatttaattaanatgtcaatgtgatattgttatacagaacagatgaatattcaaaagtagagggaatataattatgatggtgaatgatggcgatgggctttcaaatgtangtgatgatgtatg

SEQ ID NO: 128824 - DNA, 414 bp, Glycine max
agcttagccctagaggggatggacctttttatgttttggagaggatcaataacaatgcctataggttggacctcccagaatagtatggagtcagcaacacttttaacatttctgatttaattccttttgcaggtggagttgatattaaggaggaggaactaacagatttgaggtcaaatcctcttcaagggggaggggatgatgcaatcctcccttggaagggaccaatcactagagccatgagcaagaggctccaagagaattgggctagagctgataaagaaggccctagggttctctgaacctcagggtagatttctaagcccacgagccaaggttggatccaattatctttgtacatattagactaggatgtcattatattttggcctttgatttagggctccataatgt

SEQ ID NO: 128825 - DNA, 470 bp, Glycine max
  unsure (1)..(470): unsure at all n locations
ttgagactatgctatccggccccgcatcacagggacttatagagaaatcttgcgtgcccaaggaggcgcaacaacaaggttaggaacagcaccaacagcaaaaggaatagcagtagccagccgtggatgtgccaccacctctacggtagccgccatcgctggattccatctctgctcacctacggaggatagagcttcagattcacacatacatgcagcatatgactagccagcaggcggctaatcaaaggggtcaggtgcagttgaatgagagcttctactggtacacccaacaccagcagagccaggaccccagtcctttcccgtggcctaccccccgaatagttcggggccacaattgcatggctgggagatgaagcccgatttcatatanggggaggacccgtatgggcccccagagacgatggtggagctcaggaggatgatgatatggctgatgtgctggacta

SEQ ID NO: 128826 - DNA, 430 bp, Glycine max
  unsure (1)..(430): unsure at all n locations
agctcatatagtgctctgaggttctttatcaaacttggtaaggctctatctttcttacaattttgcagcttatcttcatggtcaaatttgtttcattcttagaagtttcagatatcaaggacctgagccccttgtccatctgaatcattcatgaacttagtcaaggaagggggggtctttccacttgaaccctaaccttngtttctttggaagctaggtttcattacatgttattttgatgttcaagtattcatagccactaccatgactggaattgataatatgttgtttgatggaaatnttaagtttaagaaatgagttatttgggtggttaaactagcaaaagttatgaataaaaataaatttagaacattntactggatanaatcttgcacgaaaataatcttgcagtgagagctatatggactgg

SEQ ID NO: 128827 - DNA, 233 bp, Glycine max
gaaaggaaaaggggcgaaataagagaaccaaaggaagggatgaaagagaaaaaggaaggaaaaaagggagagaaaggagaaaaaaaaagacagaaaagaagagaaaggaagaaggagagaagaaaaagaaaggaaaagggaggaagagagaaaaaaaaaggaaaaaggaaaaaaagaaaaagaagaaaagaagagggagaaggaaaaaaaggaaaaagataaaggcgggaaaa

SEQ ID NO: 128828 - DNA, 455 bp, Glycine max
  unsure (1)..(455): unsure at all n locations
ncaagcttgaggattatggagtacccttcatatgtggtactaggtggcgatcgggcgatggtgcaagtcgactcttcacatccacaaatcacacataaatccaccatccccagttgcccaccttcaactgagctcacgtactcccacgtagcccttatcctcgttcctctcaacaccgggtccccatcaatccctccaagcttccacaacatacaagcaattcaaaatccaaacatcatgaactatccaaaaccaagaaaatagggcagaggcagaaaactctgcccaaaacacataccaataccacaactttccttactcanataccccagtaacattttcttcgttccaatttgttcaccggtggatcgaactcgaaaatttactggaggtccctagtacataagtctacattntgaaccgtgggatctgctacaaaacgtncataacccaat

SEQ ID NO: 128829 - DNA, 462 bp, Glycine max
  unsure (1)..(462): unsure at all n locations
ctcgcccaggcgagctaggttgcttcctccagaaggcatcgccttctggggaacttcctggaaggccctagtgggcctggtttctatttgcaccccctatttactaaatacacccccttaccttnttttgctgattctttttccgtaacgttacggaactttacgaattacgtaacgatacttgttttcttttcgtaatgtcacgacaccttacggattacgtaatcatcccttctttagcttccgaaatgttatgaaactttacggattgcgcattaacacttccttttgacttccgacatgtcacgaaacttcacggattgtgcaacaatgcattcttttgacttccagcatgtcacggaactccacagattgcctaacgatgggtgctaagtacctcgaagtggtcaaacgaaggtcgcattccaacaacggatggtccccggacgaaattgggtatga

SEQ ID NO: 128830 - DNA, 300 bp, Glycine max
  unsure (1)..(300): unsure at all n locations
cttaaactttcactaaaataagccaatggatggccttcttgcatcaacacagccccaatcccaacatttgaagcatcacactcaatttcaaaagatttttgaaagtttggcaacgcaagtatgggggcattagttagcttttgcttaagaacattgaaagcttcttcttgtttctctccccatttgaaaccaacattnttcttgagcacttcattgagaggtgctgccaatgtgctaaaatccttcacaaatcgtctataaaaacttgctaagccatgaaaacttctcacctcggtcaca

SEQ ID NO: 128831 - DNA, 358 bp, Glycine max
ctattgggatgcgagagtgaaaagccctggccttgatggactcaactttaagtttattaagaagttctggcagttgatcaaacctgatgtccttcattttctagatgaatttcatgctaatggtgcttttcccaagtgatgtaatgcatccttcataacattaatccccaaggtggctaacccacatctctagaatgattatagacctatctctctaataggttgtatggataagattgtggcagagctgttggctaacagaatgaagaacgtgtttccaactatcatagatgaagcgcaatatgccttcatgaaggtagacatttacttcatagtgcactcatagctaatgaggtga

SEQ ID NO: 128832 - DNA, 335 bp, Glycine max
  unsure (1)..(335): unsure at all n locations
ttttgagctttgaaattgtttgggaataagtgtggggggtttttgttcattggacaacnnttgtttgtgactatgcttcatgatgtantttgggccatacttgatgtacattgtatattggttaaatgttggacatgctgaatgaaatgttgtttctcaaaggcaaaaaaaaaaaaaaattcgaaaaaaaaaaaaaaaaaaattcgaaaaaaaaaaaagaaaaaacaaaaaaaaaagccctaaagttgagtgaataagatctttaatggcacaagaatgatgaaactcttggttctactcttcatggttaattnttatctcttacttcttttatt

SEQ ID NO: 128833 - DNA, 479 bp, Glycine max
  unsure (1)..(479): unsure at all n locations
ttcttttacatgcctaactctcttgagtgatatttatattgatggtatatngaatggtgcatcttagtctctatcctttcatatgtgcatgatgtatcatcatgtaggagtaaggagaaaagttctaaagttagaaaaattcttatgaagtttataatctctattttaatcgattatagtcttacaataatcgattacacaggttcttttaagcttgcagagaaggggctcctatcagtttaatcgattacagtcttacaataatcgattacacaattgttttttgagacaatgattgcagagaaaggtctcgtatcggtttaatcgattacttctcttttaaaaaagtttcagaagtaatcaagaacactttaatcgattatattgaagatctaatcggttacattgctcctgagagtttttcagcttttagaaagaacactttaataaattgaaatgataatataatcaattacttc

SEQ ID NO: 128834 - DNA, 452 bp, Glycine max
  unsure (1)..(452): unsure at all n locations
gcaagcttcagtccctgaaaactggttccatatacacgagggagntaagattgcttgaaaccctatccctgcaacaagtcctatggaaatanacacggagattgacaaaaaaatccgcggtattgtgagtagcattttgaaagacgcttctgtgcctgatgctgagaaagatgttccaacatcttccaccccaaatgttgctgtgcctgatgttgataaagatgttccaacatcttgcgctccaaatgctgaagccctcccttcacccagtgaagaggaatcaacagaagaagatgatcaagcctcagaggagacccctgcaccacgggcaccagaacctgctccaggtgatctcattgacttagaagaagtcgaatctgatgaggaacccattgccaacaagttagcacctggcattgcagaaagacttcatagcagaaagggaaaaacac

SEQ ID NO: 128835 - DNA, 419 bp, Glycine max
  unsure (1)..(419): unsure at all n locations
tgcaccttgtgtntgagaactcataaagcttgccagtgctggagaatatgatgacagcaacctctgcatcacagagaacagacaactctttggccttcttcaacaacccatttctcctcttggagaaggtaacttgtctgctgttcaaattctcaatcttcttaatctcaatcttccctctccccatgccttcttttctcctcttccttctctcacacaaaaaaagcttccttctttattatccttcctcaccaaaaaactgaacccaccaccagcattatgggaaagatgggcatgaaatagaaggacacctcccacaagagggttcttaatttatatgcagcacacaananaaataaatatatatatatatattaaaaaaaaaacacaaacagaaacaacaactattttgtatgtgg

SEQ ID NO: 128836 - DNA, 466 bp, Glycine max
  unsure (1)..(466): unsure at all n locations
agcttgtagggttaaagtctcacgaatgccatgtgtagatgcaacaattgttagccgtggctatacaagacatcttaccaaacaaagtcaggttagccataactcacctgtgctttttcttccatgccatatatgtagtaaaagtcgtgatcctgtcaagtntgatgagctggaaaatgaggccacagttatactgtgccagttggagatgtattttccccctgctttctttgacatcatgattcacttgattgtgcatctggtaagagaaatcaaatgttgtggtcctatttatttgcggtggatgtacccgattgagcaatacatgaagatcttaanagggtatacaaagaatctatatcgtctagaagcatctattgttgagaggtacattgcagaagaagccattngaatttttttagaatacattgagaaggctaaacctattggactctccgagtctcga

SEQ ID NO: 128837 - DNA, 432 bp, Glycine max
tctgagagaccatacaagtttcctagcgatttctaattatgtgggccattaagtctatcatatgctgacaatagctgagaaacccatgaatctcttcgggggcggagtatgtgtccgccatcgccttggccttggctaacaagcgcggaagttcttgactcccgttcaaggtaagagcaaaccgatccatccacatggttgcctcttggtgtaaagagtcaatcacccttcctctagcctctttttccgcgtatacttaagcatactcgtccgcgatcctatgctcgtgagccgtggctagacctaactcttcttggtacttggcgatgatagctagcatattggtctccgtctcgcataaacgctgagacaagctccttttggaccttgaacaggcaactaactcctctttcaagaccatgctgtgggctc

SEQ ID NO: 128838 - DNA, 452 bp, Glycine max
  unsure (1)..(452): unsure at all n locations
gcttgacaagccgacttgtttaagaataattatttattctattatctataacatttttatggcattatgaatgacagtatgaagtggcataaagtgcttaaagaagtcccttgcatgtgaaaaaatttcaaaagaaaagcttatttaaggatgatcaccagataatgccttccaagaaaagaatgttttgtaaagacattntcagacaantttaaatattttatttggctatattagtataaatcatgtctaattcatatattttntaatattatgttctttcttttcattctcttttgatatactttgtgttttaataactcgaattcaatatgattntgtacattacttatacaaaatnttataattgtttttttggttagtatttcactaggttttaaaacaattaattggttaaagatgtctntaagtaggcttttaaatatgctcgt

SEQ ID NO: 128839 - DNA, 433 bp, Glycine max
  unsure (1)..(433): unsure at all n locations
gacacatatgttactacaattatatgaaattgaggaggtaatattaacaaccgaatattagtacatgaccgaaaataacatacccgctgtgtcacataacataacaactgcctcagatacagggaaaaaaaatactcctacgccatcattagccgtttctacttattgttgtctttaaaaaacatgttgcccatttctttcgaattgtggtgatgatgtcgatgtccaatggtgtgtcattagcaaaccactgcaagtattcataattgtaagttagtactgcaaatataaaaattcagttccaattgcactgaagnttatgcataccatggaccagtcactctttatgtcgctggttatgatgttccagatccaatgcattatgtaatatccagattcataacagcccgggttgaacgtgactctacatatg

SEQ ID NO: 128840 - DNA, 435 bp, Glycine max
gatccttaagcactgggcatgcagctataaatatcgagatgatcgttattgacaacagaagctcttgagaaattcaaatgctcataacatttaactcgaatgtccaatttaggcgcatcacatatagtgacattcgaaattgaacaacggaagctcttgtgaaattcaatggtcataacttttacactaaggtccgattcaggcttatactatatcgatacgctcgaaattaaacatcaaaaactctcgagaaattcaaatggtcataactattcacacggatgtccgattcgggcgcataatatgtcgagaggctagaaaatgaacaacggaagctcttgaaaaaatcatatggtctaactattcacacggatggccgattccggcgcattatatattgatacgctcgaaattaaacatcgggaactctcgcaa

SEQ ID NO: 128841 - DNA, 372 bp, Glycine max
  unsure (1)..(372): unsure at all n locations
tctaagcataatattgnttgacgacatcagaggtcacgttgtaagtagctctatcccatccatgttggtaagcaccaaggctcctccggagaaagccctcttcacaacaaaaggcccttcgtagttcggggcccatttccctcggtggtccttgacagcatgggacattnttttagcacaggtctcctcatggaacttgcgcaacgactttcttgcaacgcctttattcttgtggacaagccccatgactatggcgtagcctacctcatgagtgacgacgacggttaccccttatcctaatcgattgcaatctatacgacttaccaggaacgctctcaatactaaaggtgccatagtgatgatcgacggacc

SEQ ID NO: 128842 - DNA, 404 bp, Glycine max
  unsure (1)..(404): unsure at all n locations
agctnttgacggactataccaagctctattatccgggacggagatattatctatatataggcttgctaagggtagagagaggaagactagagaattggatcacgtaaagtgtgttaaggatgaagaaggcaaagtcttagtgcatganaaagatatcaaggaaaggtggaaggtgtatttccacaacttatttaatgatggatatggatatgactctagcagtctagacacaagagaagaggatcggaactataagtattatcgtcggattcataaacaggaagtaaaggaagcgttgaaaagaatgagtaacagtaaggcggtggggccagacaacatacctattgaagtgtggaaaactcttggagatagaggtcttgagtggctcaccaaactcttaaatg

SEQ ID NO: 128843 - DNA, 469 bp, Glycine max
  unsure (1)..(469): unsure at all n locations
tctggagcatagtaatgggccatatttgcttgttcttaaatggcttgggatagaagacatagacggatcaaaatttattttgattcccaagttggtacaaatctagtgaataatggctgttgctctcttcacccttgtacccttgttataatctggttagaagcatccatgcaatccataagttccagggtcatgtccagtgtgttcatgtgttgcgggaggcaaatcaagcataagctttgacaaagcatgctagagatattnttagtccttgtcatatctatgattttgttcctgattttatttgtaatgctgcgacagctgatctagctcanaatcctcaaatcaattttcgtaaaagcttatagagttttggtgaaatataagggtcaaatgaaacttcatatttgataagaatagagaaactatacactatataaataaaataaaatcagtggttattcctctt

SEQ ID NO: 128844 - DNA, 452 bp, Glycine max
  unsure (1)..(452): unsure at all n locations
agcttncttgataagaatcctaaagaatctagaggttanctacacccncnccccctataatatctaanctcaccccatgccanaatacataaaaatataaaaaaaagtccctattacaaagactactcaaaatgccctgaaatacaaggctaaaaccctatactactagaatggccaaaatacaaggcccaaaagaaggaaaaaccaattctaacatttacaaagaagaatggatccaaccttgacccatgggctaaaaaatctaccctaaggttcatgagaaccctagggccttctttagtagctctagcccaagcctcttggagtcttctatccaataccctnggggggtaggattgcattctcccctccaccttggaaaggaatntgacctcaaatccgaggttcttcatactctaagcttcttccctcgacacctggtaaaaaaacat

SEQ ID NO: 128845 - DNA, 455 bp, Glycine max
  unsure (1)..(455): unsure at all n locations
tgctgtgggtttctggcttgatgataatgaatacattgnggctctaagagaagcatatcattcgagttcttgccaattcttaagaagattgtttgtaacaatgctcatatctaatagcattaagagaccagatcatgtgtggtctgaaacattggagtatctaattgatagtattctacatgatcagagaatgattacaaacataccangtaaagtatacaaaatctatacatcctttatgagttcgagctactgtttagaactcaaaaattaaatttattatttttgttcatagatctagagttggcaattgaagaattacanaaattggtactacttcatattgaagagatattacaatccaacaaaaaatcattaagaattatcccagcatgccttttccaagacatgtagtgcgatcacactttgattatatatatatatacacgctgaac

SEQ ID NO: 128846 - DNA, 449 bp, Glycine max
  unsure (1)..(449): unsure at all n locations
agcttccacttgtgtattgcatcagtaattataaaggctttctgttttccctcccgtggatgtagccttgatcaaaggtgaaccatgtaattctgtgcgttctttctcatctctctctctcattcattntgctacaacatttgtgtgtatgacatttctgttctgctgcatctcctgctgctattcttgcttgttcttcatcacttccataacagttagccaatgtttaaaatttgaaactacaccactatgtgttggtgtaggcttagaatccctntataaggttgtaagttgtgagatngatttaaaaaataaaagagcaatcgaaaaagttatgtattattgggggtatgtgtgcattatttccattttgcgtgtgaaggaattcggaagcccttctatttagaagttgatgaacatatcgatcaaacattntaaatgttgctaca

SEQ ID NO: 128847 - DNA, 399 bp, Glycine max
  unsure (1)..(399): unsure at all n locations
ctagacttatatttaatattagtactttgattntcagccttgtattttggctatattagtatggtatatgaacattttactatttccttatttgcatagtatgtttagaccaatattaagtatgttatttggctatgtgaagtttataatttatctatgcatgggtgtttgcttcatgatttcatggttcttgtttcttgcttcatgatttggttgatattttttatgacaattgtttggatgtttaaattaaatttgtttgatacgcactttggcttttngttgatgccaaagggggagagaaatgggattaaatcaagaattcacatgagtaatcaacttatttaaaggtaaacataaattcaaaaacacacggggagaatttatgagtgatcgact

SEQ ID NO: 128848 - DNA, 337 bp, Glycine max
  unsure (1)..(337): unsure at all n locations
agcttccagatacagagagctaaatcctctgttggttcttcctttgaggtacttgatgtaaatacctttatatctatttaatgacgctttatgtgttctctatgctatcaagacgtcattttaaatagctttttccttgatcacatagatgcatgctcttgtaggatcattcaacagtgggaactggtctgattcttagaacttgataggacatggctagtttatcttactatcatgagggatcgtggtacggtaacctagttggttgtatgtttgtcttaatgcggntctggtcaagtttagtccaacaagagggatctgaggacaatgcttgatc

SEQ ID NO: 128849 - DNA, 404 bp, Glycine max
  unsure (1)..(404): unsure at all n locations
actaagctaagctactcacagccaagctctaagattgaatatatactctggaaccattacccgacgaagacactgaccaaaaacttatcttctcctttntggacaaagtatgacaagctgggggcaagtaaattttcttcccatcagaccttggatgcaactgtgatcgtatccctatgtcagctaaatcttgacaggtattcaagccatccttcgtctttccttgaatgttaaggagtgtcccaatcacactgtcacatacattnttctccacatgcataacatcaatacaatgtctaatgtccagatcagaccagtacgaaagatcaaagaaaatggacctcttcttccatatgtaaggcttacttttatccttcttttaggtctttccaaatacagtattc

SEQ ID NO: 128850 - DNA, 150 bp, Glycine max
cttactactgcgagcctttttaagcacctttttgtcttaaactgccagaatctctcagtccgccaacacaccccgaccgtagtcttcaataacgggtctacttggaattgaagatggcccgactcaatgccaactatgaacaactctggg

SEQ ID NO: 128851 - DNA, 372 bp, Glycine max
  unsure (1)..(372): unsure at all n locations
agcttgcccaagatcaacanaaaatataattacctacacacctatgcgagtttgcttgcaaaaaaatcccaacaatggtgcaaaaatcgattttgtttcttgcactcaagcttaaacaactgcagcaactntgctttccatgcccgcgatgaaacaatgttcaggcacaaggagaaaagggaaagtgaaatgtgaatgataaaatgattttaggaggggtgtcatttttatttgattgaaaggcataagagcaattgaaaatcttgtaccccctttccactcagtcttagcggacgtgagagcgtgaagaataaggctctattaattttgaatcaaactggagacaatatgaaccacataatatatgcgtgt

SEQ ID NO: 128852 - DNA, 485 bp, Glycine max
  unsure (1)..(485): unsure at all n locations
tctgtanantcctccaatatcgcatgcaagaatggttcatgtgaattgctcgaataacccatctatgaggactctgagtggactctatgctagcgtttggtccaactttcaactgtcgtgcaagcatatgcatttgaaagtagagctctgcaggcctcatttctacgaaaaagtagcagacattagacagtacatccacaaaaagtatagcaatatggacatacaccaatttcaaatactgcatgattntctactgatcggctgggggtcaactaataaatctcatagtaatccaactcaaccttgcaatattagataaaagtttgaattaattggacaagctgagataataatgctgcaaaatttgcttaacacacacacaaacatgcaaagtataatgacaatcttttatatggaatacagtatagaaacttaataacatttagctctccagttacttcttcaatccttccctggcacttata

SEQ ID NO: 128853 - DNA, 500 bp, Glycine max
  unsure (1)..(500): unsure at all n locations
actaagctaagagtgatacaactgctctttggactggctttgttacatataacaagatngtgcagaagtgtgatcctatgaaccttgattcttctttctgaccgaatgaagtgatatctaacatctatatgcttggttctatcatgatgaacctgatccttggcccaacatatagcactaaggttatcacagtagatgttagcatattcttgattaattccgagatcaattatcagacctcttagccaaattccttcctttgcagctttagtaagagccatatattcagcctcagtagttgagagggcaacagaaggttgaagtgttgccttccaactcaccaagcagccaccaagggtgtaatcataccctattanggaccttctcttgacaagatcaacagcaaaatctgcatcagaatatccagtgaggcagcaatctgagtgagatccatagatcaaacctacatatgccatccctttaagatatcttgaaattct

SEQ ID NO: 128854 - DNA, 394 bp, Glycine max
atgtgagagcttacattgtttagcttataatgaaaatgaaaacaaatgttgggaagatataacccaatagatagtcagaatcgagaggatgacacactgaagttgaataatcgagaggatggctcactgaagctgaattggtattagcagttgaagtgagaaatgcatgatagtcgtgaaggtatgtaggaggtcttctatctcgtgtggaacgacgtaaaggtgtggctgaattattttctgtatgtgcactagatatgggtaagcttacaggcacaacatcatgtgtctcaaaaggaaaatgatcaagtacaaatggtgtatgggaaaccaaaggttgtgattcatgtgtttcaggttatgaagggaaagtgatttcatagaaaatcacatt

SEQ ID NO: 128855 - DNA, 256 bp, Glycine max
  unsure (1)..(256): unsure at all n locations
tttacaggtttaaatgattgtggttcatccgccttccatggattcngnttggcttccccatggtttgtgtcttggtttctttgatatatctcatgattggnggtttttttagttgtttaagggtattagtgccaacctacttgggatagttccacttcctagctattgcttctcatanttattaaaaaaaatacaacttaagttattataccatctaaggaaaaatataattattagataaaatcttggactctta

SEQ ID NO: 128856 - DNA, 467 bp, Glycine max
  unsure (1)..(467): unsure at all n locations
gcaagctatgctagaataaactggtcagctgcatcatccactgggaatacacctatattatgaatattggaaagccaagttcacaaggttataaacctcttcttaagtctaagaagtagactttcacaaaacaaagccaatgctttaaaaaaaattaagattcatagccacactttcttttgactggtcatagccacacttatcacttcctaagttaatacataacatcaatttaaagaattaccattatagtaaatcacaaaacatgaagtacaatgtattcaattnttcagaataaaaaacttcacttcgtctctgcaaacttttcaacatattaagcaaacctaacagttattacttaacaaattggggacagataaaggcattggaattggatatattaagtcctaatggtgagcattgaaaaggaaaagttaaatctaaataacattaccaatcacttcaac

SEQ ID NO: 128857 - DNA, 366 bp, Glycine max
gtgtgcgtgctcaaccaattatgctagatttgtgaatgttttctgttgtgaggttcaggaatagtattgttgtggcataatgggttttgaaggatgtagcatgtacggtggggacagcaattttctgtattctcttgtaggctggtttggttattagctatttatgggctcttttaccaatcatgggtaaaaaaaatagcaattttctatttggggatatatttcaaaaaattatcccaacggataagtcgtaacagctgttacgactctttaattcttctatcttttaattgaagtcgtagatatttttatgacttcagagtacatataattttttctacgactttaaaatcgtactttaatata

SEQ ID NO: 128858 - DNA, 433 bp, Glycine max
  unsure (1)..(433): unsure at all n locations
agcttgtgcctcttagtttataatggatattgtattattataactctatggaccaagccatcattctttctattaactcaggcttacataacactttagctatgggggtagttggtccaaacagtaatcttgtggctttggaaacattattggagatgccggcagcattaacaagtttttaggtcttgaacactcgaccaacaaaatatactagtcttaactcattgttttcttcttggacgagggattcacttatggctttggtagaaactaagaggttactataagcccattgtcggtgctaggttntgaaagcactggaggggttgtaagtgtaacctttaactgctaaaaggtttcttcacactcatcattccattcaaagttctttgtctttataagaagaattgttatcgctttggccttctcaatg

SEQ ID NO: 128859 - DNA, 406 bp, Glycine max
  unsure (1)..(406): unsure at all n locations
ttcaatcctataacgcaacgtggcggacaaaaatgggcagttaacttgaatggccattattgtcaatgcggaaggtattctgtgcttcactatccatgttcacacattattgcagcttgtggttacgtgagcatgaactactaccaatatatagatgttgtttacaccaatgagcacatcttataagcatactccacatagtgatggcctcttgggaatcaagcggcaattcttccttctgatgaagcatggacactaatccctaacccaactacaattcgtgcgaaaggtcggccacaatcaacaaagataatgaatgagatggattgggtcgaaccatctgaccaccgacaaanatgtagtagatgtggagctgaatggcacaatatgcgccgatgtccaatgc

SEQ ID NO: 128860 - DNA, 352 bp, Glycine max
  unsure (1)..(352): unsure at all n locations
tattcgcacccccatggttactaaatacaccaccttgctttcttggctgatttttttccgtgacggtatgggactttacgaatttcggaacgatactngttttccttccgtaatgttacggaaccttactgattacgtaatcatccgtttgttggctttcggaatggtacagaacctcacggattgtgtgacaatgcttcctattgatttctggcatgttacagaacttgacagatcgtgcaacaatgcttgcttttgacttctggcatgttatggaacttcacgtatggtgcaacaatgggtgccaagtacctcanagcggtcaagcatagggtgcatgccatcaaacaat

SEQ ID NO: 128861 - DNA, 253 bp, Glycine max
tccctctaaacaatgatgcaactgctttagaaagatatgatcttcttggacatcacggggcttcatggcggaactaacaatatggaactcgcttagatgcgtatgaggatctccacctgctagaccatggaacttgtgcagcaaatgtattagtccagtatgtagaacatatggaacaccctcatcatgatattgaatgcacaagctctcataagtgaaatcaagtgcagccattttcctaagagtcctctca

SEQ ID NO: 128862 - DNA, 362 bp, Glycine max
  unsure (1)..(362): unsure at all n locations
tcatgtgcaagaagctaattggaataaagaagttaccattgaatcagggcaccttgaatagccgaagaagaaagaatctatntttgccgttgatgtagaaatgttaagtatttcggctgggctatgtgatggagttgatgctatggttcacgttcagtcaattntctctgagaatgctcggataggagtgctccttgaaggacttatgcttagttttaatggagctagaatcttcaagagtagtcggatgcaaatttcacgaattcctagtgtttctgcaagtacatctgatacaaaaggacatgcagttacaacatgggattgggttgccaaggtcttgattttacatttgcatgccatac

SEQ ID NO: 128863 - DNA, 443 bp, Glycine max
  unsure (1)..(443): unsure at all n locations
gctcgccgntcaacattntctctctaactccgattccgatccccactctatcttcgatgacgagctcaaactcgtgcgttttcactctcgtcggttaatttaattcaatataatttggaaaatatataattacttgattttgttcttctattgaatgaatgaattactatgcttggttatttatttaggtggagaatgcgttgaggaagaatttcaagtcttacggcgcgtggcatcatagaaaatgggtactcaacaaggggcattcgtccatagacaacgaaatgcgccttctgaatggttntcagaagatggatcctcggaattttcatgcctggaattaccgaagggtaatccctcttttcaaccagagagaaaaaaattatgcatatcgagagtgttttttaccactggcttttacagttaaacatcaaatctcgcat

SEQ ID NO: 128864 - DNA, 359 bp, Glycine max
  unsure (1)..(359): unsure at all n locations
cgtggacgcgctggggtatatataatgagagtgtttctgcagcaccctaaatctaagtaataatattngagtgatactattaaggtatttaaatttaagttcttataattcattttatggccgggagagggaaaaaaataattatatgagtaaaaggatactaatttcatttgaaatatcatcttctctcctgaacttttttataaaataatgataaaaaatagttcataaatgacaaaaataaaaatttaaaagtaataaataagataaatatccattntagttctttaaaatattaggtgataacaaattggtatgaaaaatttaaatttaattatcaaatatgcaataagtgtgat

SEQ ID NO: 128865 - DNA, 330 bp, Glycine max
agagaaaaggcttctgaacttctttcttttggctgagtgaggagagagaaaagctctttggttttaaataaaagggttttctctttttctattattgtatttaagcaatgccacatgtctccatttgagtggagcaagaagggcccactttccctttttgactgtgacccatactcagccacaagagtgagaaaaatctgacctcggtctgcgtggcgtatctctggttccagttcctcgcgtttctctgcgtccgatgaggccagtttttcaaagcaagcaatatatttattaaaacgctcataatataaccccgagcgtgggtcagag

SEQ ID NO: 128866 - DNA, 457 bp, Glycine max
gcttgtagccattagaagagaatgtacatgtgattggaatgatgactaaaaatgttagtcagtttatcagaattgatgtgaaggaatgcattgaccgtatactaatgagagtgtgatccttaaatttgtgagagaaacgactatcatgtagtactgatttttgcgagaatctctgaagtatggactgaatgcatgaaattgacgatgatgaatgccatgtttgattgtgatagctataacgacccgtctcgtcgctacggtatccacactctaatattcgataatttcaatttttataaaaagaactcccttaatttttgcttacgaaaatcaaagtgattttgtcacaacataaattcatccaacaacacaccattacttaagtgaataagcataattacatagaaacaataattctgtacatgtcatacacataacgaaaattaaatatgttcat

SEQ ID NO: 128867 - DNA, 431 bp, Glycine max
  unsure (1)..(431): unsure at all n locations
actacccatcatatctgccaanaccccatacccacgaaattcaaggagaaagaagtccacccaaacctgaattttcgaagtcccactcgtagccacgcacttcacggccctgaaaatgccctcctttcgcgatttggggcagaaatgatggccaaaggttgaagctttgcttggagcttcaatggagaatgaagaagaagaaaatggcaacgtgagggagagagagagctgtctgaaaaagtgtggtggctgagtgaagagagagaanagccttttggttttaaataaaaaggatttctctttttctattattntattcaagctctgccacatgtccctatttgagtggagcataagggcccactttcgctttttactgtgacccacactcagccacaaaagtgagaaaaatctgacccttgaaacgctta

SEQ ID NO: 128868 - DNA, 464 bp, Glycine max
  unsure (1)..(464): unsure at all n locations
agctntataagcgcgggtctgngggacgaatgtcaagtggtcgcaatacacgaagatgatgttccgagtacattggatttggttcgaccatgcccttctgatttccagctgnggaaatggcgagtggaggaacgccccggcatttacgcaacgagcataatgtaaacctttacgggtttaaaaactctatagttgggcctaggctttagagttnttctttggttaagggctttgtgtctttggtttttgaatttataatacaaggatctttcttcatctgttcctacgtctctacccattctcatccatttgcatgtttacttctttatttctgaaacggcagatccgatgacgagtcccccgaaggtactaatacctgggacccgcctatcaacttcgagcaagaaacgaatcanacagaagatgaagggaacgaggatgtgagacttcccccgaattagaaa

SEQ ID NO: 128869 - DNA, 345 bp, Glycine max
ttatacaagttttatacacaaaagttagtcgttttcaccgactaacaataacaatgtcaaatcataaaagcactgagtcagcactgaagaaccttgagctccaagtgggacaattggccaagcaaatagctgataagtcatccaacagttttgtggaaaatagagaaaagaatccgaaggaggaatgtaaagctgtgatgacaaggagtaaaaggtttgtggaggctgaggatgaagagagtgttgggcataataacaaagctgctgaatagaaaggtactgatggcaagaaaaatgatgtgagaggtgaaagcaatcaagaaaaagagaaacaaataatggtca

SEQ ID NO: 128870 - DNA, 296 bp, Glycine max
  unsure (1)..(296): unsure at all n locations
agcttagaacaatatacttgtccttcanttttnttgtcttggcttggcgaccatgatcaacaaagtaccttcgacacctactatatgttgatttgaccaacgctgttatgggtatgctgcgaccaatcctcaaaaccatatttatacattctaaaaggtggggtgcatgtggtcatatcgacatcccttcgtatcataagccatcggtccattttcctttgaaatgcgatcaatccatgttgctatggctggactcaactaacgaaatctttctaaattttgataaaaaaatatgc

SEQ ID NO: 128871 - DNA, 352 bp, Glycine max
  unsure (1)..(352): unsure at all n locations
taagctccttcaactgctcaaggctcttaatatttgatgtgtatccttgnggaaccttcacctaacgaagacactgacaaaaacttatcttctccttcttggacaaagtatggcaggctgggggcaaagtaaatttcttcccatcagaccttggatgcaactgtgctcttatacccatatcagctagatcttgacgggtattcaagccatccttcgtcttgccttgaatgtaaggagcgtccaatacactgcacaaacatttttcacatgataaatcatacagttacgcagacacaccatcngaacaagaatggcctttcattcacttattatctcttggttcaaacggtag

SEQ ID NO: 128872 - DNA, 265 bp, Glycine max
tgccgtgccaacggatctgctaatgagtgtgtattgatcctcatgagcccactagtggatctagcagcaatgacaggcacatgtatcttgtggagatatgaatcacaacgcttaagaaatgaaatgaacatgttgcggcttttgaccaccattagggagtgggtaactgtataaatgctgaatcccttctgatgtttctggccaccaaatcagtgactatttgatgtgcttgcaataaattatataacgtggcgcttctgtgatt

SEQ ID NO: 128873 - DNA, 354 bp, Glycine max
  unsure (1)..(354): unsure at all n locations
aaagatgtttaatttctgatgaatggatcttaagcaagttatctaaggagcctaaggggaaagaagctgcaaggtagtgcttatngccttctttttgaatagtgtggtttacactcttaaagtcatgactccacttgtcaaagtgcttcgtcttctggatggtgaaaggaaatcaaccatgggctatatttatgaagcaaaggacaaggcaaaagaaacaactataagtctttcaacaacaacgaaagcaagtacaaagatatgtttgcaattattgataaaagatagaattgtcagcttcatagggccgtgcatgcagctgcctacttcttaaattcagagttattttatgac

SEQ ID NO: 128874 - DNA, 329 bp, Glycine max
aaaaactgagattttgagtacaagagaactattgaatctctgggacttatattggtattgctccctcatctttctggtttggttgaaaacaaacctttttttttgagaagaacgaatatctatttgagctctttgataagtcgggttaaacaagacctttgaaaattggtggttcaacaactacgactccatttttcgaccagctcatttgcttcattgatcttaataatctgccaggtcctaggggatcagtcgtttttttgaaaacatttaccaattacgcaaacaacttgtcttatgataactcattctcccctcataatagtgct

SEQ ID NO: 128875 - DNA, 468 bp, Glycine max
  unsure (1)..(468): unsure at all n locations
agcttgcttctacacatacaagatgaannattttttatataactngntctcttattggggatagtgggtctttgtgcaattgttgtagcacaagattagtttccaagttgaacctaactatcattacccacccaaaaccttataagcttcaatggctcaatgagcaaggggaaatgatagttaaccaacaagtgaaggtacctttctccattgggacatataaggatgaagttaattgtgatatagttcccatggaggcaggacatattcttttaggaaggctgtggcaatttgataggaagatcatttacaatggcctaactaatgagattaccctcacccatcttggcactaaatttgtgttgcatcctcaaacaccttcacaggtggccaaagatcaactaactatgaaagataagagggatgaggaagaaaaactagaaaaacaaaagaaaaagaatgatagta

SEQ ID NO: 128876 - DNA, 277 bp, Glycine max
  unsure (1)..(277): unsure at all n locations
tcgagtcacatcactgcttcgtttacttgcaaacatatttaggaatggttatgtccttgttacttccagtttcaccttgacaaagatgtcatggaccatgttgaaaatctaaattgattcaaccccatgtcttgcgtaaaaattcgcaatacttcaactgtacatcattcgcatgcatccatgctnttcattggttgcattgctcgttgcattctttcctttgaaaaataaaataaaataaaattaaatgaacttatcacaaagaaaaggaaacatg

SEQ ID NO: 128877 - DNA, 394 bp, Glycine max
  unsure (1)..(394): unsure at all n locations
atgcatgggagatcctgtaaaccactcattgaagaacctccaaagtgaagatgttcagattgcaactattggcttcaaaattcgaaaatctgaagatgaaggaggaagagtgtattcatgacttccacatgaacattcttgaaattgccaatgcttgcactgccttgggagaaaggatgacagacgaaaagctggtgagaaagatcctcaaatccttgcctaagagatntgacatgaaagtcactgcaatagaggaggcccaagacatttgcaacatgagagtagatgaactcattggttcccttcaaacctttgaactaggactctctgatgggacctgaaagaagagcaagaatctggcgttcgtgttccatgatgaaagagaagaagatga

SEQ ID NO: 128878 - DNA, 472 bp, Glycine max
  unsure (1)..(472): unsure at all n locations
aacatgatgagaccacaagcttcacaaataccatttctattactaatgaacaagttatactttcacaacattgacagataagattcacaatgttcaccaggcctctgaagtataaaaatattaccattggaagcagtgaaatttaaagtttaaaaaatgaaaaagttactttgtgtacctgtggacagtatttttagcatgtcaattttccaagtcctgacaaaatttgttgagtacctatggagccaccaacaactgataacaatagaaatagatactcacttatgtcaattcccacaaaaagatttcaaacatggaaaagganatctatttatctgcattaatggcttagcattgtctntagattnggcatcatatgananaagagttacctctntcatagcacacatttcaacatgttggctacacatgacaacatttgaaccaaacaatntataacatgtatacacta

SEQ ID NO: 128879 - DNA, 447 bp, Glycine max
  unsure (1)..(447): unsure at all n locations
tgcaagcttctcaggaggtgatcttagatntatattgttgtgtttagctaagctctcgctgttcaaggaagttntcgcaaagaagcttctcaaggaagttttctcatgaaagcttgtcaaggaagctatctactctataaatagaagcatgtataaacacttgttgtaactctgatgaatgaaagtcttatgagatacacttcaaagttccacttctctccttcttttattccttcaatttcctgctccccccttctctctttcttttcctccattaaagcatcctcttcaagcttcttatccatggaaatttttggtggtgaagctccttcttccttggcttattccctagtggatggtgcctcccgtctcctcttctccttttccttccgatgcatcttcatggtgtaaaatcaccattgaatgaacccattgaagctcaacgat

SEQ ID NO: 128880 - DNA, 317 bp, Glycine max
  unsure (1)..(317): unsure at all n locations
gctggaactacttcacatgtgattgatgtttcctatgcaagttgaaagccttggaggaaagaggtatgcctatgtggctgtggatgatttctccagatttacctgcgtcaactttatcagagagaaatcagacacctttgaagtatttaatgagttgagtctaagacttcaaagagaacaagactgtgtgatcaagagaatcatgagtgaccatggcagagagtttgaaaattgtaagcctactgaatactgcacatntgaagggatgactcatgagttctctgcagccattacaccacagcacaatggcatagttg

SEQ ID NO: 128881 - DNA, 355 bp, Glycine max
  unsure (1)..(355): unsure at all n locations
tcaagctgaactgaatgtatcttacanaatgttgtgtatttcaatccatgaacctgttgtcgctgtataacctattctaacagtggtctgcaacacgtccctcaagtcaatgacataccanagactagaattgccattaaaaggtggattattagcataagtaaggaacacagagactnttggttgtagaggtgtaccatatccaggcattagcgaccgatccgttcttaatgctgctcttccaagtgacatttgtaacagaatgaatggagttgacattgattcctacatgatcagagctcggatcccattcatttttgaagctggcgaactcaaccgcaactaactgattttt

SEQ ID NO: 128882 - DNA, 379 bp, Glycine max
  unsure (1)..(379): unsure at all n locations
tatagaatatataataaaagaactatgactattgaagaatctattcatgtttcctttgatgaatctaatgctatttctccaagaaaggatattttagatgatgttgcagaatctttagaacaaatgcatattcatggacaagattctaaagggaaagggaaaggaagcaatgaagatcctccagaagaagccaaatcaaatgatgaaggtggcatccatggagttcactgactatgctcttatttggtgggactaacaacaagaagatttggagaacctttggtgaatacttangaggacatgataagattaatgagaagaagatttggtccttctcattataataaagaccttcataacaagcttcatatgctcatac

SEQ ID NO: 128883 - DNA, 441 bp, Glycine max
  unsure (1)..(441): unsure at all n locations
agctntgagggntgcgagcncaccatcttatcatagtttaggaccgataatgggtctaccaccacgattatcggctccctttatgcacatgttctgtaattgcattctatccggaaccatattaaaatagtactgatacttgctaacgaaggcaaccattaggtccttccaagtatggactcgggaaggttccaagttagtgtaccacgtaacagctaccccagtaagactttcttggaagaaatgtattagcggttcctcatctttgcgtatgcccttatcttccgacaatacatctatggatggttcttgcggcaagtagtccccttgtacttgtcaaagtccagcacctcgaacttgggaggggtgatgatatagggtactangaacaactcttctatgttagcacatgaataatctttaccttccttaatggccctg

SEQ ID NO: 128884 - DNA, 375 bp, Glycine max
tgttgtgtctctccttgactcacttctcatatgtatttacatatttttacaaaatattcatgagtttctaaaacatgctagaatacggttttctagtttgagctaagggtagttatctcttaagcttttattcataaaggaccttgaggttgggtgccttagtttcattgtatgggtaggaattaagattgatcgtgattgcttgtaagaactcaaagtgcataatggaaatcaaattgaggttgaattagataattggagtagcttatctaataatagagagtgaaccagtataaatcttgttgtccactttctcttgaatcttatctctctctcattgcattcatggtcaatttggtgagttaaaaatatttc

SEQ ID NO: 128885 - DNA, 406 bp, Glycine max
  unsure (1)..(406): unsure at all n locations
agcttgtgaggaatggtgaaacttctaactcttgttgctaatagaatcaataagctggcttgatttggnttatacaacaaattattttctggatagaatcaagtcttctatccttccttgcttaacattggntttggaatttttggctaactttagtggaagcttgtgtggcttctttgtgcctttcactcaaatttttaactagtggttattttgagttggtgcaggtatcagagagaagaagcaaaaatccaagcttgggtaaacctcgaaaatgctaaagcagaggccaggtcaagaaagcttgaggtatttcattgtctaactttagtggaagctgcttgggcttctntgtgcctttcacttcaaattttaactagtgggttattttaactagtgcttcttt

SEQ ID NO: 128886 - DNA, 489 bp, Glycine max
  unsure (1)..(489): unsure at all n locations
tatngacttttacaagattaccttatagctatacacactctgtgttttgnngtggttacgttaacgtaatacaantttacattatgaatgcataaccattaaattttatattaaattaatctaatttaattttttttctctaagtctcttaatttttaaactaaatcctataaatatttagcttcaaaaaaatatatgaataatgcaactnttgtgcctcaataaaagnattctgtcaatgcgtttggtgacgcttaaaatacctgatcacttatacaatttgagatattgttcattggcattttattnttttaaatcagacaagaaatatattataagatagaacggcatatgtaccaaaattaacaaatacgtgaatcacanaacctacactctatgcatggatagaaaaaggttacctnctattaacaatcatcggtcataaatatatttggaaatataattattggatttattagaatggacata

SEQ ID NO: 128887 - DNA, 412 bp, Glycine max
  unsure (1)..(412): unsure at all n locations
agcttatccttatggcctgcctccgacttattcttcgtgccaccccgaagattaagcccagcccctactttcgaggggcaanctccaccttatgaagacntatccgggccagatgatggggaaggagatacccatcttggccccctgctccacctcaaagatctgtccccacatgaactaccccaaccgaacatagtccgccataccccggcctcacccacacctttaaaagaatctgttcccttcgcggaagataagggaaagattgaggcgctcgaagagaggttaagagcagtcgagggccttggcaattacccattctcggatttagcggatntatgtctcgtgcccaatatcgtcattcctcccaagttcaaagtaccggactttgataagtacaaaaggacgacat

SEQ ID NO: 128888 - DNA, 297 bp, Glycine max
  unsure (1)..(297): unsure at all n locations
actaatggttttccttatggtacagttgagatcaaaagcaactccacaaacaagagcttcaaggtcaatggacaccgacttaagccatttctcacaaaccattctttattggacgtagtggtggaagagacttccttactccaccctactcttcctccaccatgacttangaagtttttcttttcctatctcctcctttattgttattacatttgtccgattctatttgatggtttaattgcctctaatcttttaattgtgctacattgaggacaatgtgttgtttatatttggggg

SEQ ID NO: 128889 - DNA, 423 bp, Glycine max
  unsure (1)..(423): unsure at all n locations
agcttgaagaagcatcaatataaatgcactcgtacttataaaaatcaaaaaattgaagttttagtgtgttcttcgagcttctctgcgaaaccaaaagcatgcaagaaaactttaagcataataaactacaacagatcggaatggaaaaaaatgcccccgtactcatcaaaatcgtagctntagtgtgttcgtccaccttctctgccaaacaaagaacacaggaagcgaaatggaaaaaaacaaaaagaaaaaacgcagaagacgggtgggcaaatgaagaaatgtggtgttaaaaatcgcatctttagatgtaacaaaaacgcagaagacggggaaggaaatgaaaacttatgaagggtccgtttatgcgggtatgcagctacggtggaaggaagccagtggtgagataagcaagagcatgag

SEQ ID NO: 128890 - DNA, 492 bp, Glycine max
  unsure (1)..(492): unsure at all n locations
gcttccatactttttttactctaaccatgatgatgaatgatgtaatacaaatatcatatgtattagaagacacaacacaagataacaaccaatacaaattccacttaagggagttaggcatgtaaaagtctaaaaatcttcaaaacttctttaacatttgccttgagaggttgttcaccatattgctgatctcatgttactccccctatctctaacaatctccctttttttggctntgatgatgccaaacttaaatatgacattgagtgcatttggagggtttgggtcttgagattggagctttgatccttatacttatcctgaanaattcttaacacttaagaagagattaattcatcatcatctcatatatattaattcatcatcatatatcatagttttatatattaatgcagngctcaatgcttatgaaatgcaaacaatatgcaaatatgcaacaaagtgtatattcttccccctttggcattaaca

SEQ ID NO: 128891 - DNA, 212 bp, Glycine max
  unsure (1)..(212): unsure at all n locations
cactctcactatttggcacaaaaattcgactaggactagatcgcctgaantnttttgtgtgggtttgttcttccttttccaaaaaaacgaaggactaaccacccgaattcttgtgtgtctgtcttctacctttgccaaaaagaatacgacaaggactaaccgcctgaattcttttgtgtctcccttctcccttntcaaggaattcaaaatga

SEQ ID NO: 128892 - DNA, 491 bp, Glycine max
agcttaagctccttcaactgcacaaggctcttaatatttgaagagtatccttgtggaaccttcacccgacgaagacactgacaaaaacttatcttctccttcttggacaaagtatggcaggctgggggcaagtaaattttcttcccatcagaccttggatgcaactgtgatcttatacctatatcagctagatcttgacgggtattcaagccatccttcgtcttgccttgaatgttaaggagcgtcccaatcacactgtcacaaacatttttctccacatgcataacatcaatacaatgtctaacgtcaagatcacaccagtacggaagatcaacgaaaatggacctcttcttccatatgcaactctgacttttatccttcttttgggtcttcccaaatacagtgttcaggtgttgaacccgctgatatacctgctcaccagtcaacgggatcggcacaatatcatgctcttgacttccattaaaagcttt

SEQ ID NO: 128893 - DNA, 481 bp, Glycine max
  unsure (1)..(481): unsure at all n locations
ttctcctccaagtgcttccttggtatccctaccaccccattcctatnttgcttcactcagtttaactcttgtgtcgagatcttgaccacttttgctactattgccatggaagggtagaatccggaaaaaagatatggtttccttcctcctagcgggcatctcaagatcccttcgaactcttctatggttggtaccaactgatagtccccaaatgtgaagcatctgagcgactagtcgtagtattaattgagggatgtgatgacttcaatggacacttctatcatggccaaatcccagattttcccatacgccttgctgaaggcttgacgtcgaacttgatccatacactgccctagctctcgcaagctggctagttctatgttcttgactctgacatgatagaaccttcgttaaaagatggcgcttggttcgaccccatggtcgctagaatgaaaattctgatggccaatacttcaacacc

SEQ ID NO: 128894 - DNA, 473 bp, Glycine max
  unsure (1)..(473): unsure at all n locations
catgccttactatggagtcattatatagtattgggaggttgatttcggtgaatntagagtacctcttttcaaatgtaaatgggtcaatggaaacacaggtgtgcgtaaagacaaaatgggattcactttagtagaccttaaaaaagttggttacaaggacgacccattcataatggcagtgcaagcttgacaggtgttttatgtagaagatccatgcgactctagatgggcagtggttttgcaagggagaacaatttgtatcggtcaccatgttgatggatcaacacttgatgtcactgacatgccatctttctccaaagatatgccttcaagtactattgaacaagaagaggatgatgtatatgcaaatcgtactgatcatgacgagggtttatgggagaacattcctacgtaactatgtgagcacaaccatataagtattactttacatttctaacatttgtcatgcataa

SEQ ID NO: 128895 - DNA, 426 bp, Glycine max
  unsure (1)..(426): unsure at all n locations
cttggaagggtctaacgatggacaaatatgatggtgtcgcgggtccggataagtagttggatgtctaccttacccaaatcaacctatacataagcgatgactatgttttatgtcgaatcttccaaacttcattgaagggcccaccattgagttggtgtacaaaaattcctctgtacttcatcaatttgttcgacaccttgataacccaattcgacacttagtttgttgcaagtcaaccctatcacttgacttctatggcactggtcaatattatgcaagacaagaagaaacctattagaatgctcaacgaaaggttcaacaaggtcacccttaatattagaggattgaaccctaactggtgccttacaccacttgatcacgaccttatgactaatggcatgccatgtcctacggaccangtactat

SEQ ID NO: 128896 - DNA, 496 bp, Glycine max
  unsure (1)..(496): unsure at all n locations
ttaagtcacctgcagctgcagcttatgtgaatcccgctgaactgcatattaatattagacattgcgacttgttaacgggataaggggcataatttgcggtcgggttagtttgaattaattaacatcttatggattaaagggtcattttccaagcatatagcactatgacagcacttacacataataaaaaaacaatattatagtgtatttgagagagaaggagacagagaacgtttcatacctttctcggccttttgacaaagataagagagagaacgtttcatttttttctgatttgtgagttaatttaaactgtagtatttgaaaagaaaattagtcattaattaattttttcagtatactggttttaagagagagagaacatttcatttttctgatatgtngtgtgaattacagtatttgtaagggtttaaagtatctgtagggtggtaactagttagtttgaatcgattgtgatcaaaatcggtattcaatc

SEQ ID NO: 128897 - DNA, 416 bp, Glycine max
  unsure (1)..(416): unsure at all n locations
atatgacgagactaaaagaatatcttatgaganaagccaatcaaatataaaatttattgtatgaaaaaagggtgggggaagacctaaggctatgcaatggtaagcaatcccttccactttattacatcctatcatcatccttgaatctagttgcattttatacagaaaagtggtatataccatcactgaaaattcatagctgtctaattttagtccttgtgatggacaaatatggatcatatgctagagtattgttcttcaatggcctgtagagagaatgttatggtatatctttttagccacgttgaaatcaatcactgatcatatgctttacattgcaagtgcttagagtaaaatccaatttgattgaagaatggcttcatctaactttcacagctntacctcttataggatta

SEQ ID NO: 128898 - DNA, 423 bp, Glycine max
  unsure (1)..(423): unsure at all n locations
ctgcggctgcagctcttattattatattaatatttattattaaaatatnnngttccttgggaagaaaaagatcattgtaaacaggtgtagcatttgttgctagagaaatgattatttggactcaccaggttcactagagcagacttggctttaactttttcagacagcttcaaattaattccatttttcattatcaaattgatatgaagcacatgatcaaatctttcacagtttttattatagtacagagattagcttcacatgaatggatgttctttttaatataaccaatgatttttattagatatatgtttcacagttttaattaaaaaaatcaacatgtcattatttattagaagaatctgatgacaaaattgtgagaaacttatctgattgtttttcgttttcttaacccaaatcgac

SEQ ID NO: 128899 - DNA, 462 bp, Glycine max
  unsure (1)..(462): unsure at all n locations
tactaagctgtacctttattntaacccttataacttcacggccaaaattgtcatatataaagcaatgttgatgttcaaaggacactttaaatccctttgtaatcaactgacctacgcttagcaagttttggtcaatgttaggtacatatagaacatctgatattaatttgatacctgaacacgttgaaattgcaacagttccttttccttttataggaatatagccaccattcccaattctgacctttgagacattagttggcttcaaatccttgaataaagtcttatcatatgtcatgtggttcgtacaaccactatcaatcaaccaactttcacttgattcactactcaaggttgaataattttcttttatccttacctttagtttggtggttgcactattttcactgcttgctggctggttcttcttgaaaaatactttctgtttcatcaacttatgat

SEQ ID NO: 128900 - DNA, 422 bp, Glycine max
  unsure (1)..(422): unsure at all n locations
agctttctaagatntctgganctcttaccttgttctttcacaaaaaacaaaagtgngctattcatctttttcattctcttctctctttgccaaaaagaattcgacaaggactaatcgcctgaattctttttgtgtctctcttctcccttttccaaaaaaacgaaggactaaccacctgaattcttttgtgtctttcttctccctttgccaaaaagaatacgacaaggactaaccgcctgaattcttttgtgtctcccttctcccttttcaaagaattcaaaatgacacagtctgagaattcttttgattcttccctttcccttaaacaaaagatttcaaaggactaaccgcctgagatatcttttgtttccccttcacaaagtttcaaaggactaaccgcctgagaactttgtcttaacaca

SEQ ID NO: 128901 - DNA, 474 bp, Glycine max
  unsure (1)..(474): unsure at all n locations
gcttatcagtggctgttgtagctnttcctccaccatatctcttggaaaaatcctccatgatgcgttcaagatatgccattgcaagttggcgaccaacagactctactgccacaacacagtaagctaaaaataatagatcatgtgagtccaactaattgtggtataatttataaggaaatggaaagcaatttataaattagagacataaatttcagtagacgttaaacaactttccactaaaacaagcactaccatgcatgcttacttatttaaatttgattacattaatgttgtttcaataaagagtagtagtaatatatgataataatggagccactgtagtgcttaataacgtgaacggagttggtatgacantttttggagtgaaaagtacgttagtagataccatctttgtatgtaagtattaagtgtacgtacatcttgtacatattatatcttntgccgtttaaaaaa

SEQ ID NO: 128902 - DNA, 436 bp, Glycine max
  unsure (1)..(436): unsure at all n locations
agcttctttgttagacctcgatcgtgtcatctttccaggccgatgtctaccgtcattnttttcgatccatttcggtgaataatatttttttgccgagatgggcaaaatgccagtttcggccgaataaatgggaaaatgccagtttcggccgaaacgaaaagtcggttgggctcgcacaaaaaaacctagccgacctacattttaaattttttatgcaacaccaaaacaagaaaacttcctgtgccgtaaaaaaaaaacattacttgacagcgagcgttttgaaaaacaaaattgcgcaacgtcggctgaaaaatataattcggggctttgttagaccgacgccggtattgattttaattaatccgtgacgaaattgcatgatgttgttacgaatgagnatcggctcatctgtaagtttttatatgctcatcagcat

SEQ ID NO: 128903 - DNA, 380 bp, Glycine max
tcaccggatgacgccgatcgaacatttcctaaccgacgtcttgcatatttcgttcaaggattgaattgaaaactcgttaggcgacatctgtcgtgaagtagcgaccgatatttttcagccgacattgcacaattctttttagaaaagctcgctggtcgataatggtctttttacggcagagtaagtcttcttgttttggtgttgcataaaaaagttacaatgtacttcggctaggtttttcgtgcgagttcaaccgacattgtgtttcggccaggataacattagcccacctctgcacaaaaaatatttgctatacgtcattctgcgtatgtaattaaaccatctgtatccgacaccggttgggagacaacggccgctga

SEQ ID NO: 128904 - DNA, 374 bp, Glycine max
agctgcagctttacctagtggaccatttccattctccggtcgttaccaccagtgactcgtcggccaacataaacctgttcaaagccacctttgcccagcttcctctctactttgtagacaggcgaacctcctacttgaacctttttattaacgtatcaatagacaataagcaccttgacatattactcattacgcacaatataacaattaaaaggatataaaagaaaacaatactctctccggaaaaggagctgcgtaggtgtcatcttcttgtgcaacacccttgtttgcactcaatccaccgctctcgtcagccatggcggcgttgtctttttagcgtgatcggatattacttaaagggcctctcttttttt

SEQ ID NO: 128905 - DNA, 426 bp, Glycine max
actcagctgtaaggggtttattctaaggttctggttttccactctacatggttaggcaggggttgtcccaatttactttgagaggctaatcataattttaagacaaataaattttaaaaatgcagctctttttaatcaagaatactttgaaaaaaatatgcttttaaaacgccagtttcaagagcaaacccatatagacctcctttttcttctttatttcaaatctcaagatctaagaacagaccacctaagaaattctaactggaaagtaactttcaatcttaaagaagtatagaattaccaaataactttaaatttaagggtcttacttttaacttgaagggttcaacggtaaagttgcaccgtggtgaccggttatgggttcaaatccgaaacaacatatgttagaatagataaacttgtgac

SEQ ID NO: 128906 - DNA, 393 bp, Glycine max
  unsure (1)..(393): unsure at all n locations
catctgggaggttttttataaattntcacctccccacggaacggaactcttgtgcttacaacttttcataatatttttaaaaagcttgctatcatgaagtcgctataatatggatcactttaatttttatataaaaaattaatattaattgtgttctaaattaaaatacacaatttaaaaagtaagattttctctttgtttatctccttaattatatattttataattgtctgcttcttctctaaacagacatttatagtagcattagtataaaatttctctctcaactttctcaaactactattatggtaccttaaccatatatgtaaattcttaatcaccaatctcttatatcccatctttttatcacaatgtgtgaaatgaattttgata

SEQ ID NO: 128907 - DNA, 403 bp, Glycine max
tcttgcgtagccgctcttggtgctcagaaaatcccaaaaatttatccctcttattactagctattttgaattctttagttcctgaatgtacaaccttcaaattgttgctcgttcccctctttcttttttgcaaaaaagaaaatcaaatgctgtcaaaacatggatgaagtcctaagaaaatcaatatcaaagaaaacatggatgaaatcacaattaaaaagcacaactacctatctttcagagtcctttggttaatatgtcttgtctccttatgtggtggggttatgtttaataatcttatacttgtgccttccaaataatacttatcactaatcctctgttcattaatccaatattgtatgtgattgtataaaagatcatgggttctccacctgcctacact

SEQ ID NO: 128908 - DNA, 416 bp, Glycine max
tattaatggactttgcaaagtgagacgcttgaatgtatcctccatattgtaccatcatatgatggaagggggaatctctcactctgaaattattcataattctcttctaagtaattgctgcaagttgggaatgtttggggaagcagtgacattggtaaattctatgatggagtgtagtcatgtaacacatctagaatcctataagcttcttaattgtggtctgcttgaacaaatgaacaatgagaatgctgaagctgttctttgtagtttactacgatgtgggtataattatgatgaagtggcttggaaagtctgattgatggcttatctaatgctggatatgtcgatcaatgctcacaatcgctgaatctaatggagaagaatggctgtcgtttacatcctgagacatactctat

SEQ ID NO: 128909 - DNA, 354 bp, Glycine max
tatgtgtattttaataaaaattatgtgcctgatctgaatcagattacttcgctaaagggaacacgacatcttttattttttcagataggtggaagcatatggaatatttgatatttcaacaagtgtttttcattggagccaactatatatcctgttagtctgaaccgacttttgcgttaagtaggactttgtatgcgggagatcataaatcacgtacttagatggttactgcaggtaaccaactatctgttaccatataaaaacattctatcactttaagactatgactcactctggcctcactacgcatgtatgttgtgtggatataaacaaatgtgaggtcttctatatgaa

SEQ ID NO: 128910 - DNA, 300 bp, Glycine max
ttcaacacacatgccttgaagttgttacatgagaagaacatgatgagagatcttccaagcataaaggagaacaacaaagtgtgtgaaggatgtctccttggtaagcaacaccgatttcctttctcaacaagcagagcatggagagcgaaagatctattggagctgatacatacggacgtttgtggaccaatgaggacgccatcacatgagaacaacaggtacttcatacttctcattgatgacttctctagaatgacatgggtatattttctaaaagaaaactcacaagtccttggagta

SEQ ID NO: 128911 - DNA, 377 bp, Glycine max
  unsure (1)..(377): unsure at all n locations
tatgggtgagtaccttatgtgtgagactatatgaatcgttcttaccctctaaacacattaagtgaagtgatatgagtgaaattgtgtttcttaaccttgatttggagaattggcctctaattggacttgatgagattgcttgcatgcttaattcttgatttgctgcttgtacttccatttaaccttgtatcctatatttgtgaattcaggtgttttacttgagctccacaagaaagacaaatggctcacaatatgtgtgggatgtgaagtangtatgcaatccatctaatttgtggaaacccctgtggcatttcttctaaaaanaacattgtcatactccctcaaatgtgattctaattttcaacccatgccaatga

SEQ ID NO: 128912 - DNA, 511 bp, Glycine max
  unsure (1)..(511): unsure at all n locations
tctgagtcacctgcggcatgcaagctntctagctnttcgttggtgtatttttatcttctttntgtgctataaagtgtgggaatgtgctcagatatgtggggcaattttggtttgttttgttgcttgattgggttggattgggggtttgtatgggatggccctaggcctataatgcattttgaaacaatgggacatgccacattgtccccgttctcttgctattgatacctaaacgcgcgcccaccaagtgttcggtgaaatgcctcaatggcattagcgcgtgacttttgtaaggaaacaacccatggggcattttggtttgcacatattttctattttttcggacatgcattcattcccgaaaaaggctagagtaattgccccacatatatcctaggcctaggaactaaaattttatgcaaaaagaacacaagaggaggtgcatattgggtaaagttaccctttttggccagcaatcagctatgggccacgctacaataatttccctacc

SEQ ID NO: 128913 - DNA, 464 bp, Glycine max
tacttgtatgtcttgaacaacagtaatgaagttttgccatacatatttaagcataaagctctagttaaatagaataatctgaaaatgtcaaagaattgggtgttgaaaaagcataacaagactttctgtgattagtttaaagatacaatctttgcagatgagaatgcttcagaaacattaagaaagctagcaaatgggcctaaatgaaatgttataacctgtcaaggatacgacataaacaagtattcattgtacacaaaagcacaagatgacaaaagtacaatgcataatatcggtgtcaccctaagggctaaatctcaacactttgcaagtgtcaatgacgccaatccctgtgtagcttccatcccatactttgggttcattgatgaaatttgggagcttaattatgtgaaatttatagtatgtgttgtcaaatgtaaatgggttgacagcaacaccggtgt

SEQ ID NO: 128914 - DNA, 404 bp, Glycine max
  unsure (1)..(404): unsure at all n locations
aacgtgatatttttatgagtggagcatacccgcgggtccttgtttgtaggggctattatagcttttgtagataattcttgactcatagataatagccggtagcttgcagataatgttagagataaactatagcttatagataaaagctagaagataattgtaccttgtagataatatgtgactttgtagataattaactacctgccaatagataaagatattcaaatatattcaaatattaataggttagaaataacctgttatttagggagcccaactgctaagggccgagtatccgtgctccttttgcaaagctgatgtggaagggtgactcgtgtctcaaagtgccatgtanggtgtcatgtgtatnttgtggaccctggacagtacaccaaccaacttca

SEQ ID NO: 128915 - DNA, 451 bp, Glycine max
tgtccgatgcatcagtaatgatggcccgagttatgtttggtaactgttacgaacccggaatgggtttatgcaaagacaacggcggcataactagcctgataaatgccaaaggaaatcgtgggaagtatggtttatgctataagcccactcaggcggatatgaagagaagcatcgcgggaaggaagagcggtggtcaaagctcgcgttggagacaagaaagtgaatgaagcccgccctgccacataagtagaagctgtataagcacgggtctgggagacaaaggtcaagtggtcgcaatatgcgaagatgatgttccgagtacattggatttggtacgaccatgccctcctgatttctagctgggaaaaaggcgagtggaggaacgccccggcatttacgcaacgagcataatgtatacctttacggttttaaaagctctatagttgggcct

SEQ ID NO: 128916 - DNA, 475 bp, Glycine max
  unsure (1)..(475): unsure at all n locations
agtcaccgcggctgcagctaatcccttgaaatagagggtaggttatntgtcctggattcagctaaggactactttccttagcacacttatgttcaatatgttggatttgccctggagatttgccctgaattttctcctttgaaaactattttatttggaaatccttcccaagacaccattgaaccactgatggaggctntggaggaagattataaagatggaaataagataaacgaatcaaggcagtttattgaaggagtattggatcttgaaaagagaatcaatagactagatacattgacttagaaattaaatataacaaattttgtcattgttgaacaaattattagcttataaaccaaatctttaccatttgttaatatgttttacttatttctgatacgagcataataaaatgacatgaatgttcaaaaaatcaaactacaacatgatcttgtaggatttaacaatatgt

SEQ ID NO: 128917 - DNA, 443 bp, Glycine max
  unsure (1)..(443): unsure at all n locations
atatatatatataataaataaaaaatattttgttccttgtgaagaaaaagatcattgtaaacaggtgtagcatttgttgctagagaaatgattatttggactcaccaggttcactagagcagacttggctttaactttttcagacagcttcaaattaattccatttttcattatcaaattgatatgaagcacatgatcaaatctttcacagtttttattatagtacagagattagcttcacatgaatggatgttctttgtaatataaccaatgatttttattagatatatgtttcaaagttttaattaaaaaaatcaacatgtcattatttattagaagaatctgatgacaaaattgtgagaaacttatctgattgtttttcgttttcttaacccanatcgacaaaaaatgttaagtgtgtgccttttttctgctcttgctat

SEQ ID NO: 128918 - DNA, 387 bp, Glycine max
  unsure (1)..(387): unsure at all n locations
gttaaaaaatgtcaaatactatggtttaaatntttgtaaatgatcgacttacaaaagatgtaaaagaaaattttgattgagtgtgtctcagttgattttgtgaaagaaagtttaagtttgattcctataaaatatttgtcaaatactatggtttaaatttttgtaaatgatctacttacaaaagatgtaaaagaaaatttggattgagtgtatctcagttgattttgtgaaagaaaatttaagtttgattcctataaaatatactattaaaaataagtggtgaaatttatgtgtgacttagtttcaaacctatgattaattacctaatcaactcanaagttctaaacttgtatgaatatactgtgctcagagacggaactaggttgc

SEQ ID NO: 128919 - DNA, 381 bp, Glycine max
  unsure (1)..(381): unsure at all n locations
tcgaataccagtttctgtttctgaataaaacaaaagatgtaactcttcaaaaggtttatgactttctcaaactggttctaagtttttctaaaagttataactcttctaaatggttgtcttgaccagacatgaaaagtctatataagcaaggctttgttctgcatttcaagaatcctgaacacttactcaatcaatcctttgcaagccatgaatctctttgaacttcttcttgttcttcttctttctaccaaaagctttctgaagttttctggttttctaaacctcgaaaacttgtactattcatcttttcattctcttctccctttgccaaaaagaattcgacaacgactaaccgcctgaattctntttgtgtctctcttc

SEQ ID NO: 128920 - DNA, 287 bp, Glycine max
tcagaaaaacaaaggaccatgccatcctcctgctaacctactcaggctttcgcaacactttacctgtggggcatttggcttggacgaaaactttgagactatggaatatatcccaatgactccaagaaacattaccccatgctgagggtagtttctccatgcgcgaatatccaggttgtggatcccaacacagattattggtctccgctcactgttttcctgatgaaacatgactactcttatgcagggctgtgccaacatatatacaggcctaaaacgaaatttaa

SEQ ID NO: 128921 - DNA, 427 bp, Glycine max
  unsure (1)..(427): unsure at all n locations
gtgttggtcgctacatagtcctcgatgaagaaatttgtgatcatntattaatatcccccacccaacccaattgattagttccatattcaattctgaatcagatatatcatatttatacaggtgaaatcaaaacttgggattattagttcatatgctgatgcaactgatggtttgataacccatggatggataacaaagattgaagttcatggatgctttgtacggttttactatggggtccaaggatttgctcccaagcaagtctctatttatctgtatacttatgtcatgataacagtcaattatattgtgatttttgcttacatcatgagctgttagttatggaaattcatcttcattcttcaccttgtactcttgactaatttctgcatttccatatcattcatatatcatgtgattttgatat

SEQ ID NO: 128922 - DNA, 459 bp, Glycine max
  unsure (1)..(459): unsure at all n locations
tttagcactgggctcagcttataaaaaaaaaattctctttttcatatgnngatttggtttggttcacaaagtccatctccccccttcttttcatgaacggttaaacgatacgttnttcttcctaactatggattgaaagaaaggtaccaagaaaaatctaaagcaagctagaataataacaatttaagaatgagacagtaacatacgtgattgtctctcctctgtcagtcactgtaaaattgttacgagtgaagaacgatagaatctccccagcagcttgattcggcgccttcttttcaccttcacctataaacgtcttctgcacaatctatttccccatccaccaaaatagtcaacaacaaaacaaaaacccagcaacaaaaggagaacaaccaacaccatctctaacacattcttcactattatgtaaaacttaattgggtgtgtatgtttggttct

SEQ ID NO: 128923 - DNA, 462 bp, Glycine max
  unsure (1)..(462): unsure at all n locations
gcttcgttattttgaatttggcggacaaattcagaatctattacatgtatcttcacattaggcttacgagtagtggcgatagcagtccctaaccctgcccttctcaatgcacgagctaaacacctttcaccaaattgaaaatgagatgggcatgcatgaggaaccatggacctcaatactggcttattacaaaaagatagtcctgttggcaaactgaataaagccaagaactttgtcagtgaagttgtctattctatatagatattgtaagtattgcacataaaaaaataaaatgtaagacatgtctcgtgtgtgataaatatatatgattcaaataattaaatgaaggtacaaagctctaataattgaacaaaggagcatgccttctgacaagactctcttaagttaatctcttattaanaggcaatgatcccatattgaagaaaaatgagaagtcactgg

SEQ ID NO: 128924 - DNA, 430 bp, Glycine max
  unsure (1)..(430): unsure at all n locations
ccttattagcagaaagcgtatatttaattctcttcacatgtttactgcataatggatggactttattttgttctctcccttgctctgctttcttgatctatcatgtggaatgttgtggtctccaccctattgaatttagggaagccctatcgcttttcttctaattgaagtatatatggtgcatagcgagctatcttgtctgcttttggtcattattataaaagaaaaattgacatagcacataccgattgagaattggctcctatgttctaacaatgatatgccgggtttctacaaatcatgatcttttaccctctattaataaccattgttcttaaccacattattgtattgtgaaccaggcccctncagggattttcatatcatcggtgtaagccagaatacccttgacctatgcagcagttgccct

SEQ ID NO: 128925 - DNA, 439 bp, Glycine max
tactcaagcttggaacaggttgagctcatatggattgcggttcttgtcttctcctgctttcatatccacgaggtgccaaacatgtcatatgttcatgctgtcagactgtcaacattgtattagaaggttacttatctttctgtttgctctgagtctctactctgcatttcaagatcagttttgtgcatttgatggggcaagtttggataaacaatttaattgtttatttcagcaaagcctatcgcatgaaaatgagatgaaagcttatgtcataagtgtgtgattcagtaagcttataggagggtcataaataactttcataatcttaactgaataccttcaattgtctacttaagtgcttatatgataagataaacctggtagaagctcttttaatcacccactttcatgagcaactttatgcttcacctgtgatatg

SEQ ID NO: 128926 - DNA, 315 bp, Glycine max
aatttatggaactctagaaatggtttataaaaaaacgaccaaaaaaaaacatttaaaaacatcttaaaaaatcaaacacaacaattctgaaattattaagccaccgcttacatttccgttgggtttcatctttggagaagaaaaggagaaggaaatagagcaaaatcactatcgagtaggtatcctcatttacaacattttttagtgtcttcctgaaacaaagaaatttcaaaggaatcgatacaggattttcaactctacatattgtgttgcagcacaggtacggggaagctcatttgcttggttggatacttc

SEQ ID NO: 128927 - DNA, 421 bp, Glycine max
aaagtactagtgtataaggtatgatttggaaccttatagaatcttgaaagcaatatcttgaatttagtcgctaattatgtgtcgtaaaactagctgaaagcttataagttataagctacaatacaaaaaactagaaacttataagtacctgatgtaagtgttaagtcagattaactaataagttagttgataaataaaaaacaaacatcaaatgatatatttaaaacttctatttgaatttattctgtataacttatcatttgaaaaagtaggacttgtattattaaaaaatagaacagatttggtattctactgatattattcaaaatcaaaccttaattaaccaaatatgcttaaaaatttttgtctttgtgtgaaaaatatacttaaataaaatttttaaaacaattttaaaattaat

SEQ ID NO: 128928 - DNA, 428 bp, Glycine max
  unsure (1)..(428): unsure at all n locations
ggcttctacactgatatatanggttgtgaggtgattgcgatgagcttggccatgtgggtactgtggtcacggtgtatgcgtctccttcctttttctttgctccacctgccccaggcctcctattgctggaacttgttgaagcagcgtaatcaaacttgccccttcttatgcctacctcgatcctctcgcctgcaaacaccagatctgcaaaactcgaaggcatgtatcccaccatcttctcatagtagaacacaagtaaagtgtctactatcaatgtgatcatttccctctccatcattaggggcgctacttgagccgccagatccctttatctccgggcatattctttgaaggattcctgctcccttttgcacatgttctacaactgcattctatccngtgccatatcggaattgactggtattgct

SEQ ID NO: 128929 - DNA, 315 bp, Glycine max
  unsure (1)..(315): unsure at all n locations
tatgactganaatgttagacagttggtcagattgattgtgaaggaatgcattgaccgtatgccgatgagagtgtgatccttaaattttgagagaaacgactatcatttagtactgattnttgcgtgaatctttgaaatatggactgaatgcatgaaattgatgatgatgaaagccatgtttgattgtgatagccacttatccaaaaagctgaccatgtgcttgaataatttatcctttgcacccagtttgagctgaatgaattattgattgattgaaccctgagcctatacaatgttatctcctgctaccttgac

SEQ ID NO: 128930 - DNA, 350 bp, Glycine max
tttattcgttgaccacagagtggtacctggagatatgtcgcggtggtcacgagaccttgtggacgtcaggtggggtgctattgcccaaaaccaagcttgaccaatcccgacccaacccgggcatagtcagtcagtgagaacctgcgatgtacctaatcaggcgagctcctggcagtctacagataaaaggagcaaagaccacaaagcaaggaggcttgtgtggtggttggccagctgtgaaatttgagcgatatatgggatatggcctctggtaatcgattaccaaaggtgggctatcgattacaagtcttaaaaatgatgacaggagactgagatggtctgtggtaatc

SEQ ID NO: 128931 - DNA, 472 bp, Glycine max
  unsure (1)..(472): unsure at all n locations
cctgatgcctgaaatgtctcttctgatggcagtggtcctacatgcanggaagaatttctccaataacaccctcttaatgtcatcccagctgataacggacctgtgagcaaggtagtatatccaatcttttgtcactccctccagagaatgaggaaaagcctttagaaagatatgatcttcttggacatcatggggcttcatggtggaacaaaaaatatggaactccttaagatgcttatgaggatcttcacctgcaagaccatgaaactttggcagcaaatgtattagtccagtcttgagaacatatgaaacaccctcatcatgatattgaatgcacaagctttcataagtgaaatcaggtgtagccatctccctaagagtcctcttacgaggtggaggttgagccatgttctcagtatgaaaaatagtagtggaatgttcaaaatcagaatattcggaatcaccctcaaca

SEQ ID NO: 128932 - DNA, 430 bp, Glycine max
  unsure (1)..(430): unsure at all n locations
tactacaaatggttctaccggatgtccagacatcagaaaaataaatggaaattctgtaattgaattagttaagatgcccacacagataactggtgtacattatgtgcaggtgagttgttgaactatatgactagttcagaagaaagtcagctgtcacatttgatacagtttcttatttgttctcttatattttaaaataacaccagcttctaatgaagtagcttctaagttctctacctttcggtatttaaatactatttacttacaaagggccctttaagttagtgaacttccagctctgtcctcttgatatgccgaagaactaagcaaagttgctcttttaattctgtntgttcttcacgcatgcatgattgcatcttaacttaattgaagataatttgtcaatttagcgtaacatgttgtactacta

SEQ ID NO: 128933 - DNA, 341 bp, Glycine max
gcctccgtactcagtggtcaggcaagtaagctactttgatctatagaatatgataggtataaaagagggaaactctattttctaccgaaaagataaagatatcccctaaaatcaaatattatatattattataggaaagataagacgaaattatatttcttcctatttacattatcttagaaggaaaattcagatcttatcatccaatttcaccattatgaccatcaaggttaaggtaaatcaactccaccatcgtttgtggaggagctcatggaaaaatgtatcatgatatagctctatcaaatccaataagaaccctcctcttcttttatttttttggt

SEQ ID NO: 128934 - DNA, 429 bp, Glycine max
tgttcgcacatcgttcgcgtgtatgatatccactccacattgtttgaagttgatgagaccttcaatcctattacgcaacggggcggacaaaagtgggctgttaacttgaatggtcattattgtcaatgcggaaggtattctgcgcttcactatccatgttcacacattattgcagcttgtggttacgtgagcatgaactactaccaatatatagatgttgtgtacacaaacgaacacatcttaaaagcttactccgcacaatggtggcctcttgtgaatgaagcggctattcctccttctaatgacgcatggacacttatccctgacccaactacaattcatgcgaaaggtcggccaaaatcaacaatgataatgaatgagatggattgtgtcgaaccatctgagcaccgacaaaaatgtagtagatgt

SEQ ID NO: 128935 - DNA, 478 bp, Glycine max
  unsure (1)..(478): unsure at all n locations
gcaagctataactcaaagctatagacatatttttatatcatcttaataaggtttctgganaatcctttcccaacccctcagccacgtccataagagaaacagagtgctatctgtcagtctagtgatatcaaaagtttgattctggaaaattatatcatttctgagcctccaaattgaggttgtaactgctatccaccacattgtccttcttatgttagcatcctttgaaactgctgaggagaaatgctgaagaaaattgtccaaaggtctgcagtgaaacacactttcttcctttatccaagataggaattcccaccatataggcatatatttgccacaagtgaagaataagtgggaagcagtttcaggttgactatgacagaatgggcatatatattatccacctgaatctgcctcttaatcaaattgccttctaggaagtctatcatagtaacctcatccaaggagagggcttaga

SEQ ID NO: 128936 - DNA, 333 bp, Glycine max
  unsure (1)..(333): unsure at all n locations
atatagntataaaccttgattgtattatatcatataaggaaccggggaccatgaatgattccgtttgattggaccacgataataatctngatgttaggtgcagctagaggtttggcacggattcatgcggagtataacgcatcatagatacctcacgggaacgtgaaatcttccaacgtgcttcttgacaaaaacggcgtcgctttaatatctgactttggcctttcgctgctttaaaccctgttcacgcgattgcaatgttgggagggtacatggcgccggagcaagttgaggtgaaaatgctgtcgcaggaggctgacgtgtacggcttcg

SEQ ID NO: 128937 - DNA, 398 bp, Glycine max
  unsure (1)..(398): unsure at all n locations
agctagaggactataccttcgattttcatgngtttgtttctgtctcggcccggatataaagcatgttgcagcaccagctccgcttccctaaccgtactggaggcggttgccgcggctttgtcctctatggttttttggagttttaacatgacctccgagatggaagccatttgatcttttaaggccgatagatcggccttcatctgttcctgcacgccctcttcattatccatttttctggatcgagtgttataggggtgccttggtgttttcttagttatgatgaatttcctaaagaaatatagaaaggtgagtgtcataccctaatatcgtccggggacctttgcttgatgacatgtgacctttctctggtccttgtgaggtgcttggcatccatc

SEQ ID NO: 128938 - DNA, 445 bp, Glycine max
  unsure (1)..(445): unsure at all n locations
cttgaaatggagggatggggggaatttctccaccaaatccttgatgaggattccgcttagattaaagtgttcctctaggtgtggaggttcagcggcaagcaacagcggctcgtatcatccaccggtggtcgtgggtggtggagaaagaagtgttaggctttgggtggcgttttggagaagacgagagtgaaaaatcgtgtttttcatgccgaggaacgtatttataatctgcagatctcgcttagcaagctcatctcgctaagagggagtccactttttcacttagtgagacaattcatgcttagcgcaactccctctgcactaatgctcgctcaacgcaattctctcacgggttggaattgcgcttatcacgcccttctcgcttatcaagacatcaaaaattgttattttcanaatcccaatggtcatactgatgaaagatttc

SEQ ID NO: 128939 - DNA, 422 bp, Glycine max
  unsure (1)..(422): unsure at all n locations
agctngtagactcaagtcttacaatatnaatattaattaacatattatcataaccaaaacaaaagaaggcattactgaaactctccaatcacaaacaaaagaagatggcaatccactcagtctcccttcttcctaaaggagcatccctcagttagccttgcccggccaccggttggttgacacaagacagtctggcagtttccgcatacaacaacagtctgagagtggctaaagacagtggttctgcagtcatattcataccactcaagtattaaaacaaatccacaatcaaattcataacactcgagctcatttatgtacacaatcaaaatcaataataggaagggaaaaaaagacgatccaacttacatgttgaagcaaccctcggacttaacatcccttcaaagaggattaaaacatgc

SEQ ID NO: 128940 - DNA, 416 bp, Glycine max
tgtatcacatatctatgacgcatgaataagagtctgctgactctccattcttgtaatcaaattcagattaattcacaactctagttttttttttcaagttcatgtcctctatatataaattagaacatcaatcctcaacacgggtgatcttaagagtcattctccaagaagaccttgtttgggagtttttcttcaacaatagcatttttaggaatgtttcttaacctcttatctctttcaagctatcttttcatctttattttaaaatagaattgcaataattgtttaagaaaatattaacaatagttgaaaataaccatgtctcataatatagattattagcacaaatctaaatatagttgatatgtgaaaaacaaaaaagtatctatttacaactgttgagatcatgcctttga

SEQ ID NO: 128941 - DNA, 426 bp, Glycine max
catgcaagcttgacgttgaagtatacccttttttgtttgtaattggcacatgcacgcattcacacagtattcaaactctggccattggataaagatcagatgattcatactttatgtttataaatcagatataaaacaaatttaagatctgaaccattcaatcttcatcaaaaaattataaagcagtacctgcatgaatgtgtgtgatatgcaagtgcaccgaatctatgtccccttcaacacaatcaacctaccaataacaataacaagtccaacaacaaaagttgcaaaaccaagccttcctttccttactcacctcaacaacatcacaattcccaacacaacacaatctctgaaccctttctttagtggtccctactattcccaacaccccataaacacgttgcttccaaaattctcactttc

SEQ ID NO: 128942 - DNA, 263 bp, Glycine max
tttattattattgatccgccaaaggaggcggagacactatttgtgataaccctatacccaatttggagcagaggtttgaaaagatgtgggattgcaggaagaagtctgattgaaacatgcctcagattcagctcaataaggctcctgcatcataaaggtcggcaggggtgaagctgtcgccggttgagactgttacagttgcgtgccctgaccatctggaccttgctgatcttactgttgcaagggcattggtgcggccacta

SEQ ID NO: 128943 - DNA, 421 bp, Glycine max
  unsure (1)..(421): unsure at all n locations
taagtcacctgcggctgcagcttctattcctctactntctatttaaatattnttaacattttctgtcttattttgaaatgtgtttcacatagttctattgtaactagataaaaatatatgttttcactaactcaatttatttcctttattttatctctaaattgaatttcaataattttttacaatatataaatatttgaaaataatgttatataatattttgaattactaattataatttttatattaaaaatatacttatttattatgattttaatttactataatttatatataaaatatttttattatagattttaatatatgaattatctttttcactgatactaaaataataatatatcataattactgatgaaggaaanacttaattacacgtgtttcaagaacttcatatata

SEQ ID NO: 128944 - DNA, 505 bp, Glycine max
  unsure (1)..(505): unsure at all n locations
gacacttaaatactcaagctgcatagtgcagaaaatgttatgtgcaatgcagttgcacacaaaatgctgactcttcgtacaagaatgatgaggtcccacttacacgcatatgttggatagcattccaaggtattatagaatttgggaatacattgttatatttcatcaacattttggtaaccccaaatgtattatatagggtaaaagccattttcaatctcaataactgatgttcttttatttagagatttaggagttcaaaataagataagaggtttttcgttgtttactacaagtcttagctagaatcacatgaaattcaaaattaaatatatcttaccaacatcaaactccaatgttgcaacgttgaagtccaacacaagctttctggtggagtctctttggtccaattctggagataacanataagtgatngagcaatagtctatgtgtagaatgaactagttatagacaatatgctagttgtagaatggaatagtataac

SEQ ID NO: 128945 - DNA, 506 bp, Glycine max
  unsure (1)..(506): unsure at all n locations
ggatccttagcacctgcggctgcaagctaaagaggtggaagtattttgtttctcagggaagcaactgtcaagcgtgcatgtgttagagtctatttcatccctaaagtattccaaatattagaaattataataagtagtattcttttaagtactaaaatcaggttatatttaaactgaaaacagagaatgaagctctcaaggaagaacttgcaaaggcaaacgattacgattataagttgtacatcgagtaattaaatttcaggagcaattaaattccgaaacaaattgctagattaataacgaaaacaaaaaataaaaatctagggcacgcctctaatggaatgtagagatacgatgaangaanaaagaaacgaaacttatagaatgactaaagataaatctaatagatataacaactatttaaactaaagataacctaatagctaaagataaaataaagaataatctatagatatacaactatataaatcagaatatttattata

SEQ ID NO: 128946 - DNA, 206 bp, Glycine max
actccaatctttcctgcttggctgcacaatcttctctataattctcttgatttccttgttagaaaattatgcctgtccattattctggaggtggtatggtgtggatacacccgctcaccaacccacacatttaaatctatacttaccttgcacccatcacatatttctctgactcttaccacataataccgctttatatactcctc

SEQ ID NO: 128947 - DNA, 305 bp, Glycine max
  unsure (1)..(305): unsure at all n locations
agctntatctgaagaactcgctaagcactctttctgaactaagcgagttcatcctttgaggatgaacattcatcctcttgctgaactacctgtggctaagcgaggctgaattgctaagcccaggtaacttaaccattttatttttgtgatagtcgtgcgctaagctgagcattcttgagccaagcacaattggttgcggcatccgctgagcttagctcccataacttagtgaatttttgtcagttagtgccgtacgcacttatctggtagctaatcatgcgtacctacctagctatagactatag

SEQ ID NO: 128948 - DNA, 492 bp, Glycine max
  unsure (1)..(492): unsure at all n locations
tcacctgaccatgaagcttgcagaggtcggtggcagactcatgatataatttaatgtgtagtggctttgtctcatacctccattacacttcagttgtacctcagcttgcttccctatttttattaattttgttcatgtttatgtgtgagttgaatcttccccgcgaggaccaaaagataaaaaaaattgtaaatataggaaccaaaatgaatgttttaaactataatgactaaaaaaaaatgatcacaactataaggactaaaaggatagttaaatcaaaataaaataaactagtgcaaaataatggtggtgtggttagacacttttagtcctaaatgtctcgttgtaaacatatatacctctacatatgtgtgcatttaccaccattagtggaataaaattttaaatgcacacccttctatggtatatatcctatataggcattgcntagtagaaataccaaccgngaaccagaaaattgtggattcaacc

SEQ ID NO: 128949 - DNA, 480 bp, Glycine max
gattatattgtctatgatatcatcaataaccattttatattgagaattattgtctactataggttgtctttttaaaaaaagttatttccatttattcatggctaatttgagacccataaacagtccatcgaagttcagctctgacaatggaacattaacccaagtttgtgaagaatctgctcacaaaacctctagaatcatcatttcagattagagtcattataccaccacattaagtttaagagaaatactaaccatatattttttagcacgttcttttagatcttctttctattattagatgagatttaataaaaatcataaatttttgtggtatcactcattaattaataaatcttattcacaattttataattgtaaataagatttaactaattaactaatacccaataatgtgtcaattggtaacaatcttctaattaaatataatttgtgggaatgaatcttgcattctcctat

SEQ ID NO: 128950 - DNA, 487 bp, Glycine max
  unsure (1)..(487): unsure at all n locations
agtcacctgangcatgcagcttgtanacacttattgtttctcgtattggtttcaaatggcaaaggagttagagctttagtagtaagaatatttgcttattagtctggagatggatcatggtacactaacatgcttttatttagtacctttctgcacataaaaagtgcccaattttgtatgctttgtcctggagtgacgaacaagattgtgcgagagactgtactaaggttgtcacagtagatctttggagtctgaaaaaactcagaagagattgaatccataggatttcagcttcagtactcagcctcagtgctggactgggccactaaattctgtttcctgcgccaccacaaaattaaattggggtcaagatatatacaagcacctaaagtggacatcttatcattcatctatatatgaggcctagttntcatcacagaatgcaataagaggtggctcgtgagcacgaataatttgaattaatgga

SEQ ID NO: 128951 - DNA, 484 bp, Glycine max
gctggtacaagtttatggttgtaagtcgggaaaattatgtatacactacacagttttgtactggtgtaggaaattatttatgaacaagaacttactagttaacattaaggataagatgtgcacaaaaaacaaggaaaagttaaaaaaataatatatgaataattaacctctcaaattaataactatgttaataaatggatagttggttactcattaatttaacatcaaaacccagcagtgttaccacttctgatttgaattttttatcaagaattctttttgcaatttttgtcccaaatttattatgggccccttccccaaaattttgcttcaataattactacaaaattcttattgtgttatgagcacaaagagcaaatatattttaattcatgcaaacaaatgtcactgaaaccaaaagataggaatgggaatgagctgcaatggactactcttattggtgactggtgagtaatatgaatct

SEQ ID NO: 128952 - DNA, 464 bp, Glycine max
  unsure (1)..(464): unsure at all n locations
cttaagtcacctgcggcatgcaagctntgcctttagggcttgtacctcatctctttcttccgaagctntaacctcattgtctctcacagtctttagatttgggagccaatccaatccttgtgtccggactctcagccacttatgatagccgccgatgatcccattactgcttcccctaagctctctgtcctttcttcacgccgcatcccatgccttgcgaactccttggagtaccctcgcgttgtggtcaccgaaaccccgtgcgatgaaaggcgtgatgctttcgtctgatggcactcctctcatggggtagccatgctgtcttatggcgaggacgggattataattaatacaaacccttgttcccatcaagggaacatttggacatccttcgcatgaagatagaatcctgattcttccttccttctagcgagggaaccaattaacagacgcccctccatgct

SEQ ID NO: 128953 - DNA, 495 bp, Glycine max
  unsure (1)..(495): unsure at all n locations
ctaagcttgtctgagatccctatttaagactaagtttcgatcatgcttcaatcaagttctaatgcaacagtacatttcccaatgctaaagtcacctaactgtgcacacaaatgggtgatcagaccataagcataccaacattaagcattgaatgaagaattgaacacagaaaacacaatcaattagatattatgtatttacatcaactgttcattataaatccccaactatggtgtttagccaatcattacaaagaaaccctaacaataaatgagattaaaagcatagaatgatagtttcttacacaagaagggggattcctcatcctcttctcagcatctcacactcactntctactcaataatctctctcaaatgacaaaacctaggcttcaatgcacaatntgttcctctttgctgcttctaaggctcttttcccaaaatatgcactgtggaatgatgtgcacaagtctcaaaggtgtgtgtaccctaattc

SEQ ID NO: 128954 - DNA, 422 bp, Glycine max
gcttcctcggggccattcctgcgaaagcttacatttggaaagttagtttacaagaaatataacaatcattacaaacaagggccaaacaacacttctcatggcacgagtgtcaacatgcactttataaaataatcatattggggtcgtgctattttatgacacatacgtatttgcacacataaaaattttgtatgaagcattttacgacacctatccatgtacatatttttttgacaaaccttttcatgctacatcctatatatatacacacacatttttttggaaggcttcttttgttacctactcacaaatacacatattttgaaaaacacttttacgctacccatccaacactttgtaaggcacttcatgctatatatattcatattatgcaaggcattttcatgctatacatattcata

SEQ ID NO: 128955 - DNA, 334 bp, Glycine max
  unsure (1)..(334): unsure at all n locations
acaagcatttcatcatctgacacccttccaagaaggaccatgccgatgttggaacaaatacatccatgccttcctgagtccatagtaaacattgttgatgtgaaagctgatggtaactgcgaatatcatgcatctgctgccctattacgtatgggtgatgattcatggtcattgtggctcaaccatgtgcttaagaacttccanattgtttgatgactatatatacttgggtggcgggtctacctatctgaggaataaagcgatccctacttgctgacggattatccatggtatactatacacctttatagttccgtctgttagataaaattcg

SEQ ID NO: 128956 - DNA, 481 bp, Glycine max
  unsure (1)..(481): unsure at all n locations
agcttctggaaggagaatcaacttgatgtttttatgtcctcttgaagggtgacanngtcaatgaaggaaatcnntccttagngaaaagaaacactttcttacaatnntcctcgcnnaataagggggttganacacntnnaggagaananntagaaatacgtagaacctcaattaagaaaattatcatngntaaaaattataccctatcnntttgcaatannctgtagatnnntgagtggttcaatgaagcannattaacnaactttcctcactttcactttcgcctctnngcaaaataattannaattttcttctcatgggtgtatcaactttctctctcttatnngtgtatcattctctttccttcgggtggatgagaaaatcatgaannactggccaaatacagggctaaaaggcccaaagtggagaaggacgaaatgcccaagtggagaaggacaaagcccccaagtggagaaggatg

SEQ ID NO: 128957 - DNA, 465 bp, Glycine max
  unsure (1)..(465): unsure at all n locations
tactctgcttggacaagattgttttttgtgccgacattgtgcaattttttatttatgtttcagcaacgccggccaataatagttttattacgatcaagcaaattttcctttttgatttcgctcagtaataggtttaccatcgaggtcgcctggggtatttcgtgggaactcaaccgccgttgtgtttcggttgacattggccagcattgatagaagatgcaaagaaaaatatagccgaccatggcggcaaaaaaaatcctcgacaaacttggataaaaaacaattctagccgacatcggccaagaacgattaccggtcgctgtatcccgaatagaatcaccgaatgaagccaatcgaacatttccatatcgacatcatccgaaaattattaatggattcaacagantagcaatagcccacaattggtcgatactacaccagactgatatttgtggacagacctca

SEQ ID NO: 128958 - DNA, 482 bp, Glycine max
  unsure (1)..(482): unsure at all n locations
ttaagccacctgcngcatgcagcttcttgcatagctgctcttggtgctcataanatccgaaaaacaaatccctcttattactagctattttgaattctttagttcctgaatgtacaaccttcaaattgttgctcgttcccctctttgttttctgcaaaaaagaaattcaatatgaaacaaaacatggagagaattgtgatggttattattactcgaaccagaaggaataacatctaaacaagtcatttaaattgttggccctgctccctagtttgtacttggtggtccttactagaaaacatagcatttgtagttaatttttttaggttttgtaaaattgtagttcgaaatttttatctagcagaatttccttttctttttagtttttctatgtacttttgtaaatctaggtttggtaataaaaatatttaaacttcaagaaaatactaatatttatattatcaacatatttgtaccaaaca

SEQ ID NO: 128959 - DNA, 476 bp, Glycine max
  unsure (1)..(476): unsure at all n locations
ngaagaaagagtcatagatgctnttataaaatctataatttatagtttgtaattgcagtatgtattattgaactcatcacctcacgaacgaattctattaattattttaatacggttaattctttggacataaaacataataacttgcatttgaaggatcaaatcagtataaagtaaaataaaggaggtaaaaaaggagaaattgtttatctttgaaggacataatgagaaattgtttagaaaataatcaaatactactgcccagttagatactttgacttggtgcccaacagcaattaaagtgcatcgacaatttctattttgacttagtgtgcatgtgcaacagcaattatagctttcaacggtcaaggttctcactgccacattaactattgttgcccaagtggcacttatatatctacaatagtattacacaatatataggagtaacgatgacatcctgatgaagtgatata

SEQ ID NO: 128960 - DNA, 298 bp, Glycine max
caagcttatcggaggcgagtacacagttgatactgcgacaccgcaccgattattcaacattcactacttcaatcaactgcaatgagatacaatcgatgacttctctttctataagcagcttagaagaagacacgaacactttgctcgagtggttagagcatctaatcgatcatattgctctggaggagtacccaggttctggaagaacactttagtcaatcaataagataatctaaacgactacttcattgaattaatcaacaatcttgcacatttaatcgaatacatgcgggcataa

SEQ ID NO: 128961 - DNA, 302 bp, Glycine max
tcttaatgccgtaacctatggaacaacacaaactaaatgactgagtgtaactgaaattgagtggaaccaaaagtaacccctaacaaccaacaaatcattcagcatttgttctgtcaaaatgcgtaatgcattggatgtctaatttgggcctttattacacacatgaactatacgctcctattacgtgttgatccccaaaccaatttgtggtcattcaacttttcaaggagtgggactttattaattgccgctatgatctctcaacttattataatgtgtgcggtatttatttcttatttgag

SEQ ID NO: 128962 - DNA, 331 bp, Glycine max
  unsure (1)..(331): unsure at all n locations
tcaacattcaatttcgtgcgtctcgatatgtgacgggactctatcanacatccgagtaaaaagatatggtcgtttgtattggctcatagcttcaactttcaatttcaagcgtctcgatatgttacgggactcaatcagacatccgagtaaaaagttatggtcgtttgaattggctgagagcttcaacattcaatttcaagcgtctcgatatgttacgggactcaatcatacatccgagtaaaaagttatggtcgtttgtatcggctcagagcttcaacatttaatttcaagcagtctcgatatgttacggtactcaatcaaacatccgagt

SEQ ID NO: 128963 - DNA, 84 bp, Glycine max
ggggaggagaggggtttattttaaagaaaaaaggaagggagagcaaaaaagaagaaagaaaaagaggaaaaagagaaaaaagaa

SEQ ID NO: 128964 - DNA, 356 bp, Glycine max
aagaaactcggagacacactcatagttcaccttctctatctattctccatcaattcccacacccctctttctatctcattccctctctccatagaggcttcctctctaagcttcttatccaggcactctctcggtggtgaagttactccttccatggctaactctctaagggatggagcactctctcacctctcctctattatctttcgctgccactccatggctgaaaatcattattgaagctctaacacccagcctttatagaaacttcgcaagcaagctcctctcagtgtgatcacaacatcagagcctcaaatcggttgtcatcaaccttcatcaatttcaaatctaccttc

SEQ ID NO: 128965 - DNA, 491 bp, Glycine max
agcttactacattgatgcatcctggctatttcatctttcgatttgggcatttaaattttggaggcttaagtttgataccaaaggagaagatggtgagatgacatccctctgttaaccaccttgataaactctatgaaggatgtttacttggcaagcaattcagaatgagttttccaaaggagtcaaactcaagagctaagaagccactcgagctaatacatgttgacgtctgtggaccaatcaagccaagctcactaggtaaaaataactatttcctccttttcatagatgatttttcaagaaaaaacatgggtctatttcttaaagcaaaaataagaagtcttttctaccttcaacaagttcaaagctgtagtgaagaaagaaagtggtcgaaagatcaaagccatgatgaatgaccgatgaggagaattcacttccaaagagtttcgagagttatgtgaagagaatggaattagacgtcccatgacggg

SEQ ID NO: 128966 - DNA, 482 bp, Glycine max
tatctcatgttagacaccctaatatcagcagttgcaaactatctctgtttactgggtgccaacttaaagtgcataaaaaagttaaataatgctcaaaataggaaatcctagcttaaatcttaccctttccttgatgtcacccaaagtcggcaagtacaacttatagaattcctctttatatgcaaccacaaaccttaataaagtttagaaaccaacaagagtaagacaattagaatttgtgtgatttgtataaatttaagggacaacaacatacatgtactatattatagtattttcacttttaaaggactaaagatgaattattgaccataattgatatattagcatttgtatatcactaactcgctcttacttagtatgtctctcaacttgcaattacaaattcattgcaactcagcatttgtgtaggtttaaatacctgatatagtaacaatggatgatggatcaagactaacttctaa

SEQ ID NO: 128967 - DNA, 400 bp, Glycine max
  unsure (1)..(400): unsure at all n locations
gcctccgtactcaggggtcaggcaagtaagctactttgatctagagaatatgataggtataaaagagggaaactctattttctaccaaaaagataaagatatcccctaaaatcaaatattatatattattataggaaagataagatgaaattatattttttcctatttacattatcttagaaggaaaattcagatcttatcatccaatttcaccattatgaccatcaaggttaaggtaaatcaactccaccatcgtttgtggaggagctcatggaaaaatgttatcatgataaagttctatcaaattcaataagaacacttctcttctttntttttctttgttggtgtgtttccattctttactagctgtctatacatgtcattnccccccctatatttt

SEQ ID NO: 128968 - DNA, 462 bp, Glycine max
  unsure (1)..(462): unsure at all n locations
cgttcgcgtgtatgatatacactccacaatgtttgtttttgatgagaccttcaatcctattacgcaacggtgcggacaaaagtgggctgttaacttgaatggtcattattgtcaatgcggatagtattctgcgcttcactatccatgttcacacattattgcagcttgtggttacgtgagcatgaactactaccaatatatagatgttagttacacaaacgaacacatcttataagcttactccgcacaatggtggcctcttgggaatgaagcggctattcctccttctaatgacgcatggacacttatccctgacccaactacaattcatgcgaaaggtcggccaaaatcaacaaggataaggaatgagatggattgngtcgaaccatctgagcaccgacaaatatgtattatatgtggagccgaagtgataacatgcgtcgttgccaatgcatctgacat

SEQ ID NO: 128969 - DNA, 437 bp, Glycine max
  unsure (1)..(437): unsure at all n locations
atccttaagcacctgggctgcagcttcataaatactgacgtttacggtctggttgccagagttagtcattaacttatgtaaggtgaagaaagcatcgcatttgtgttcccttgactcanaaagcgagatttgatccgtaaagttttcaggaagatccgcaagaccattattaattaaaaaagaaaacatattgagattcttgatatgcaaaattgatgggggcagttcattcaaacctgattgtactaaaaacaacgctcgaagagattgtggccaagtgttgctgctaaggctcttaagcgatgagcacccgctcacatttaaaatttcaagcttcgggagagagcaaattgattcatcaacataaggcaagctttcacaaccacgcatacttacatatttaagatgtgggcatgagacaactttgggacactcat

SEQ ID NO: 128970 - DNA, 430 bp, Glycine max
ctattcattcagacataacttggttttcaaattaaagagatagtggattcaagattggaagttaccttttctcatatttttagagaagctaaccaaacaactgatgctcttgctaatgcatgggatgctaattgcttttgattgtcatgttttttgttgtgttcctgattatttgtatttgcctattatcactgactcttcttgagttcatttttatagaggtctctagtcacggttcatccatgaccaataaaaataaagaagacatgatgcagtatttaatatgatcaagctatgaatttggatgataatttaaccaaggagatctacttaattgcttgttataatggagagtattgtaacctctaatattgttatcgatcctatgataaaaatttaactgatatattaagcaacaaatgaaatctaa

SEQ ID NO: 128971 - DNA, 439 bp, Glycine max
  unsure (1)..(439): unsure at all n locations
gacccggatccttaagtcacctgcngctgcagcttaaggaaactgatgcttgtctatctttaacccagcttgccatgaatcagaaatctgcacctgctgcaagagtctatggcctatgttcttctgcatatcaccatacatatctctgtccttctttgcagcaatctagagtcaatgagcaacctgaagcttatgctgcaaacatttataatagaccccctcagcagcaaaaccaacaacaacagaataattatgatctttcaagcaacagatacaatccaggttggagaattcgtccaaatctgagatggacaagtcctccacaacaacaatagtctatccctcctttccagaatgatgttggtccaagcaaaccatatgttcctcctccaatacaacaacagtcacaacaaagacaacaagcaaatggggctcctct

SEQ ID NO: 128972 - DNA, 482 bp, Glycine max
tagcctcttttattttcagagttcagaagcaccattctttttagtggattcctccaaagaactatctactttagcttcaagagctttttccagctctttatgatctttgaacagttttttttaacttttaaaagaatgaatgagtttgaaagtaattcatgataaatgaacttatagtacttttcgaaatgaaagtaattatataaataaagtaagtgtttaatctgattatctagtaacaagagttgtcatctagtaattaataaaacagtgatttgaaaacaatttaatatataaaacttgtgtgaaagttgtgtcaatgttaagccttaaagaatactcatataagcttaaagagagtagtaaaaacacttagtttatatgtgttcactcaatctaagctacgttcagtttcctttcaaacaatataaggtccacgaagcagtgattgattataacaagatgatgacctgtactcctgg

SEQ ID NO: 128973 - DNA, 401 bp, Glycine max
agcttagtcccaaattctgacatattgtcttacaaactgtgcataatccgaaaaatgtgagtgacatcaccttgaggttgggcaaccaaattcaagtgcctccaccagtagtagcacctgcacctgaacctatcaagcttcattctacacctgaaaaagaggatgagatagttgcacaaaagagaaagcttcctaacaaaaattttcatgcaggtggaccttcttctggtaattctgacttacagcagccccctatccctcttccattcccacctagagaaattctaaacaaaatgatggaagaagcggaaaaggagatcttggagaccttcagaaaagtagaggtgaacatacctctgctagatgccatcaagcaaattccaagatatgccaaagttttg

SEQ ID NO: 128974 - DNA, 485 bp, Glycine max
  unsure (1)..(485): unsure at all n locations
tcataccacaacaacacataatctggtgtgcaaaacccctcaattcaatgggttttctaggtttgaaaaggtgaaatttagaatgaggtaaatttgaagcaaactctcacctcacaccagtccataacatctatttagacttgttcaagctggatttacacctaaaacctcaccgaatcaaaatttgactcttcaacacccaaattttgccctagaaatggctcttggttcactntggtcatttgtttttctctctagctcagcctaacctttctcacatgttctaaatgacatttcaagctagtattaactcactctaacctccatttaccacagaattcagacttagccttccaactctcaaagtctgactctgtgtccactcataacatcacattctcactgtctaaccttgggttagttctacccttcatctctaacagatttccatcagcaatgtcagcatatatacatcacaaacatca

SEQ ID NO: 128975 - DNA, 319 bp, Glycine max
  unsure (1)..(319): unsure at all n locations
gctcccgaatatgacngccaccgttttaggagtgctgagcaccagcagcgcttcaaggccatcaagggatggtcatttctccgggagcaacgcgtccagctcagggacaacgagtataccgacttccaggaggagatagttcgccggcgttgggcatcactggttacccccatggccaagttcgacccagatatagtcctcgaattttatgctaatgcttggcctacagaggagggcgtgcgagatatgcgatcctgggtgaggggtcagtagatcccgttcgatgcagatgctctcnaccagttcctgggataccctt

SEQ ID NO: 128976 - DNA, 445 bp, Glycine max
ggcctgtccgatgcatcagttatgatggcccgagttatgttgttgaacggttacgaacccggaatgggtttatgcaaagacaatggcggcataactagcctgataaatgccaaaggaaatcgtgggaagtatggtttaagctataagcccactcaggcagatgtaaagagaagcatcgcgggaaggaagggcggtggtcaaagctcgcggttgagacaagaaagtgaatgaagcccgccctgccacataagtataagctttataagcgcgggtctgggagacgaatgtcaagtggtcgcaatatacgaagatgatgttccgagtacattggatttggtacgaccttgccctcctgatttccagctggggaatcggcgagtggaggaacgccccgacatttacgcagcgagcataatgtaaacctttacgggtgtataagctctat

SEQ ID NO: 128977 - DNA, 304 bp, Glycine max
  unsure (1)..(304): unsure at all n locations
agcaccgcagctgcagctggcaccctcctcacttnnttttttggagcccattttttttacgcacacagagcctactctgaatccattgttgttgctggtgtcttaaaagattgatgtcgctggtgtcttagaagatcgaaatcccacaatgactataaataagttaagctttaagcccaattctaagactagcctattataatgtgaacaaaccttttagcgatggagaactgtgaatgaaccccccgggagtattttgccttcctctacacattttgtgtcacccacagatggttttctacct

SEQ ID NO: 128978 - DNA, 454 bp, Glycine max
atttttccttattccttcaagctataacaatttgatgtttatcaataccatcaaattaaaccaataattaattaaaatggtcacattaattatatgtcatgccatgttgtcaacaatactgcctgataattaaaatcaaaataaatacaaaactcatggtttttaactattagtatgattatgacggttagaaataatctaagttctacatcgattaaaaataatttcaaattagaatatataagtgagggaaaccctcactccttgaactaacttttgaaattgagttagacttttcacattatttattctaagattatattagagtatattatcatatcttctaaccatgactattaaaatttaattaaaatgtcaatgtgatattgttatacagacaagatgaatattcaaaagtagagggaatataattatgatggtgaatgatggcgat

SEQ ID NO: 128979 - DNA, 427 bp, Glycine max
  unsure (1)..(427): unsure at all n locations
agcttagccctagaggggatggactctttttttgtttggagaggatcaataacaatgcctataggttggacctcccacaatagtatggagtcagcaacacttttaacatttctgatttaattccttttgcaggtggagttgatattaaggaggaggaactaacagatttgaggtcaaatcctcttcaagggggaggggatgatgcaatcctcccttggaagggaccaatcactagagccatgagcaagaggctccaagagaattgtgctagagctgataaagaaggccctanggttctctgaacctcacggtagatttctaagcccacgagccaaggttggatccaattatctttgtacatattagactaagatgtcattattattggtccttgtattanggcctcataatgtaggtagggtaccct

SEQ ID NO: 128980 - DNA, 467 bp, Glycine max
  unsure (1)..(467): unsure at all n locations
tatccggcccccccatcaacagggccttcatagagaatatttgcgtgcccaagtaggcgcaacaacaatgttatgaacagcaccaacagcaaaatgaatatcagtatccagccgtggatgtgccaccacctctactgtagccgccatcgctggattccatctctgctcacctacggaggatagagcttcagattcacacatacatgcagcatatgactagccagcatgcggctaatcaaaggggtcaggtgcagttgaatgagagcttctactggtacacccaacaccagcagagccatgaccccagtcctttcccgtggcctaccccccgaatagttcggtgccacaattgcatggctgggagatgagccacgatttcaaatatggggaggacccgtatggcccnccatagacgaaggtggagctcangatgatgatgatatggctgatgtgctggactacttcat

SEQ ID NO: 128981 - DNA, 377 bp, Glycine max
  unsure (1)..(377): unsure at all n locations
ggatcctctaagcacctgcngctgcagctttttttctacttcattganattttttttggnaatgtaaaaataggagtttgcattatctctctttttcagncatttgcttccctatctatttcatatttctcgatataagaatttctacaaagattctagatcatatgcctattcatttgtcccattgccttactcacatcttttattgcctcgcccattgctagtgttgattcaaagtctaaataattgcaaaaggtataagaaaccgccttatagcactcataatttgtaaagatgtgagtctcacttaatatctntagaaaattaatgtattctaatcaatccatttacatcgtaaacaagatgtcttgagcttt

SEQ ID NO: 128982 - DNA, 331 bp, Glycine max
  unsure (1)..(331): unsure at all n locations
cgatgaccaattgtgcacaagtaagtggaaatctttgagatcacganggtaattgctacaaaagtgaaaaaagtctccatttgactcatctattgtcaacgcgactgacatgtcatcaatgcatatgagagggggtttggtgagatcataagagggaaaaaatgtaccaacaaaatggtagtagtgttgaagtgcgtgtgatagacattgctttagttctgggactattgtagctgtgaaatgagaggttggatgagggaattcatataaaaataaaggttggcttggagagaagaaaagccaaggaatgtctaagaacgttatggggagg

SEQ ID NO: 128983 - DNA, 442 bp, Glycine max
  unsure (1)..(442): unsure at all n locations
agcttctaatatggattatatttatcaatgttctctgtttntgccgatgtcattatattctgaatatagaacatacattcttctaggtcaagagttcttttggcattgtgacataatcaatctattcctgatcacaaatgggcctcttttatagttgctctgctgcagtcattgccttctattaatcacgcaagttaacatttgaagctggcattgtgaagggaggcccactatggtggcatcataagccgcaatggcatgttcatacttcatacgtggaatttttgctttccaccacctgccatttataaccttgtcgttacttcatactgctaatgatatttgatacaagagaaagagaaagtaatttatgcatgcacgtgcatgcgtgtgcatgtanggatgataataagaattaanattgatggaactggatacaaag

SEQ ID NO: 128984 - DNA, 471 bp, Glycine max
aagctcactcttataagttgaaggaattattgatataagctgtttcttgtgtagctataaaacggatttgtgatgcgactgcattcttgttgataccttataaattgcggacttatttgtgagcttgattttgtggtagcagagcgaaatggggttggaatgactcatatctcttccttggaaatacaaacagaagagttgatgtcgtctcatctgttctaaggaagcagttatgactcttgcgagcctgcacatgtctgtcaatccgtacagattatatagacattcatacgatgttgggatgcttgtatgatgtacaaatggaggccatgtttgttattggacgtcactctatgatttgtatttaatgtgcacttcaatcgtttggaactgcgcccaatgagcataatgacatgtctttgtattttattttagcaagtactcatagtcgaaagtataagagatattttg

SEQ ID NO: 128985 - DNA, 496 bp, Glycine max
tctaagtcacctgcggctgcagcttgaccttcatatgcaatgctatgtattttttgtggtacacttgaacttgaatagtcttcaagggtcactctccttggctgcttatccacgatagtgtctcctctaactgctgtatgagattgcccttgagtaggaaaactagaagatgcctcagaagatcgaggttcttctcctggagttgctgctgcttctaagtcctgcaaaaaatttataattctctttgtgtttcgtctcctagaagtagcgttaatctccaaatctatgggaattaaatcaccagcaacaaatctcctttacatacaaaacaagcagaacaacaattatccaattccaaagaacaataaattctgcagtaattaaatattcacacaaataatcaatgaatcaaagaaaaagaatgaatcgatgccttcaaaataaactaaactctccaaatagaaataagttccccgacaacggcgccataaatact

SEQ ID NO: 128986 - DNA, 449 bp, Glycine max
  unsure (1)..(449): unsure at all n locations
gcctcggaatatcggttgagaatgaagcccaatctaaccttcatggttntcttcaaggtaaccatgattctaagctttttccttggtagtttaagcttatccttgcatcattttctgactttggaaccaccattgtatgttttacgcttcctttgaaaaaccctagagaaatagactttatgaaagttatcctttgtctgaaatgggtgctatnttcgtgaccttcaatgaaccccggtcgcattggcgtgatcggaacttcaaaatgattctccttctgtagaacccgaaataccccttagccttttcatgtagtaacatgagtataggactcacgatatcgctgtcaactttatttctgaaatccattgtatgttccttcattntgacgtatagagacttgcgttggaccgatcagcatgaatgagaaagagacctctaagtgacac

SEQ ID NO: 128987 - DNA, 420 bp, Glycine max
gcagctatactatagttggcgacgacatattatttttttttacctctgtttctatatataagaaacaaaagacaatattttcttggtcctaattataagaaacatattttttgttcagccaaaaatatgatatattcattaataagtaccagaggtgctaagtcaagacagagttttataagtacaaatcatagctggttctctaacaggccttgagattacacaagctgaaagaactacattagggtaatagtgcagaactgtatcctatttccctatgttcgtgtccgaagaaaaccatctttgatatctgaagaccactgattgaaatgagatgtgaaattcttatctaagtgtctgagccatgtccatagcataaacactgcatcggtcattattttatgagcattgaaaagagca

SEQ ID NO: 128988 - DNA, 436 bp, Glycine max
attacccacgctagtaaaactaaaacatacatacaattttagattactttttgtgcaactcctccaaagctctctcaagaaacccgcatgtctctatcgatgagatctgggcatcaatcttagtgcagagaaagattacagggaaatataatatcggcagtcacaccatataaagatgtcatattcttgaacattcaacagtaaaattgacagcagaaagaatcatattcaacaaacgtattttgactatatatcaaaatattaaagtgacaaataaaattcatttgatttataaagccatagtggataccagctatcattatcaatatataagagcatcacatagagccaatatacatgtcaattacaccaaccctactaagggttggatctgatctaatggatagaagcttcagaataccatgaatacaaccta

SEQ ID NO: 128989 - DNA, 455 bp, Glycine max
tgcagctcctctctctcgcctttggctagttttactttatttactacgtcatgtcaagatatgtagcccatttaatttaatttaattcatactaagaatcgttgtaattatataaactatgctttttattttaattttaaaaataaagataaatttttcttgatttttctaaataaaatacttgtttatctcatgatttttaaaacatttttttcatttaattaaacacaaataaacaaattttaagcgtataatttgtttctaaaaaatgttcagttgatgatgtggttttgccacttacgtaaatgccttaaaattacatattactatgatctccttaatataaaaaattttcctttatgttattcttcaatcaaatttaaagttttatttcgacgtaacaacatgcacattagtttattacctttgctgtcttaaatatgtggtgcgtttac

SEQ ID NO: 128990 - DNA, 402 bp, Glycine max
ctatcataattttacatatatatttctttggtgcttttctccctttaattttgtcttcttattagcattgtgatgcgagtatgtttaactcgacggtaaatctaaacacgctcatgttaaaactttgagaaaacaaataaatttagttaagccaactttgagtatgtggttttcttgttaaaattattgttaatgtgctaaaataatgtttgtataccaatttttgtttttaacatttttattttaacaaaataactaacagtgtaatataattcagttataaataatttttgtgcatgcagaagagatgctgtgataaattatctatatagccaatattttggaatatataactattaatattgtatatgaaaattaatatatatgtattaaactattcat

SEQ ID NO: 128991 - DNA, 352 bp, Glycine max
  unsure (1)..(352): unsure at all n locations
agaatgtcaatccttaccctcggaagcaaaaaacaaaaggagaaggaaaatttccaatcaaagaggaagcataaaaaaaaggagagaaggaaaatttccaatctaaggaaaaaagagaggaaaggaaattcccaatcaaagagtgggagaaagaataaagagaaggagaagaaggaaagaaagctcctgatcaaggatcgatagaaaacagaagatatatgcagagaggtctctggaccaaacaatatctgaacaaattctgaattgtcaccaaatgaacaaaagaaagaaaaggaaaccataacctanaagtggtcttctccctttgattaccaaccaaaatcctgtgcgt

SEQ ID NO: 128992 - DNA, 331 bp, Glycine max
aatatattccgagtcttcggatttggtacgaccatgctctcctgatttccagctgggaaattggcgaatggaggaacgccccggcatttacgcaacaagcataatgtatacctttacggttctaaagctctattttgggcctatctttacagtttacattttggaacgctctgtgtctcttgttctgaattataaacaaggatctttctcatctgttctgtctctaccatctcatcattgatgttacttttttctaaacgcatattcatgacatccccgataactatactggaccgcttcacttcagcagaatgataacggagataagaat

SEQ ID NO: 128993 - DNA, 414 bp, Glycine max
  unsure (1)..(414): unsure at all n locations
agctntaacctcattgtctctactgntttttatattgggagccaatccaatccttgtgtccggactctcagccacttatgatagccgccgatgatcccattactgcttcctctaagctctctgtcctttcttcacgccgcatcccatgccttgcgaactccttggagtaccctcgcgttgtggtcactgaaaccccgtgcgatgaaaggcgtgatgctttcgtctgatgggactcctctcatgggacatccttcgcatgaagatagaatcctgattcttccttccttctagcgagggaaccaattaacagacgcccctccatgctagccaagagttggtcccaattcgcctttcctttttcgacgcacgagcggtgaccttgtagcggatagacgggcctaccttcttggagaa

SEQ ID NO: 128994 - DNA, 394 bp, Glycine max
tcggaagaaagtgatgaggtgcaagcgctaaggcatttcttgaattatcccgggtagtcaaagagaagttcaagtccatagccatcaaagtatgaagagagtatgatgaactaagggacgttaatatggccaccgatgataccttggaatgagaaaccaatattgcccgatatgaagaacacgaccaaaacaagttttgaggggctttatatggcagcaatagtgagctcaaactctgaagaggtgaaaggaatcatcatgggtcaaaggcatgatctggaaggacgagctaaaggcttgccttatgtcgaaaagaaatttgtcccaacagttaaagtgagactaaagggaatatgtgggccatcatcgatgagtgcaaagagaagctaaatct

SEQ ID NO: 128995 - DNA, 482 bp, Glycine max
  unsure (1)..(482): unsure at all n locations
atcctctgagtcacctgangctgcagcttacaagcagcttccatttttattgttgacagtaatcgattattgataactggtaatcaattactagagagtaatcactctggtaacttagaaaatttgagaaaattcttttgtaaaacaaaactatgctatttggtttttgaaaaattcttttaatacttatcctatatgaagtcttgacttgttgcttcttgatttcttctcatgaatcttgaatcttggattgaattcttgatgcttgatcttgaagtcttaaatcaatcacttgggcttttggcatcatcaaaattgttgttcatcatcatgaagcttgcttctacaaccaattgaataggaacattttgccttggaggcatgggtaagggaaagatactagtataggtaaaatccgtgttcctttcttagcctncatagacaacgtcttatatgntgaagggttgaagtataacttattg

SEQ ID NO: 128996 - DNA, 462 bp, Glycine max
ataacctttagaattctgctattctctctctaagcctttcctaattcctaagaatacttacccccttctcataaaccaagacccatctacacatacccaaaactctccataactcactaaatcatcatctcataattaatttaattcttttagacacttaaattaaatttaattattctggcaacttacttaaatcacttgtaaaaacaattaataaaaacacaatgttacttatgaagtggtgaacttcactattctaacacgcatcttatatattctcttatgattgtaatatcaactgaacaattgtacaagctataactaaatatcaaaagataactgtatatatatatatatatatatatatatatatatatatatatatatatatatatatcacttctgatgatgtaacttaattatgtgtatctctgtctatctatgaatgtcaatatgctcata

SEQ ID NO: 128997 - DNA, 444 bp, Glycine max
ctgcagcttatgatgttgaacagattatttatgagttttgatgataacaaagatgatgacaaaaaccctaagagaatacaagagaatgatttcaagaacaagattcaagaatcaagagaagtttgatttcaagattcaagaaaagatgaattcaagattcaagaaaagaaatcaagaagacttcacaagggaagtattgaaaagatttttcaaaaaaaaaaaacatagcacaattttgtttttcaaaagagtttttctcaaaattttctaagttactagagtttttactctctggtaatccattaccagtttcctgtaatcgattaccagtggcaaagtttgggttcaaaagctttaactgaatttgaacgctccattgatttccaatggtgaattgatacaaatatggtatcgataccgtgatctgatggtgaatcaaatcat

SEQ ID NO: 128998 - DNA, 364 bp, Glycine max
ctgcataataaagggggttcaatgcaaagttaccactccattccatcgaaccttgaggattgataaagccatcaagataagtcttcattaaaattggtcttgaatattgcttccatggtcttcgaagataagtcctaaccgggttttgaaacaacaatattccaaaaagttcctcgcatatcgtgatggatgcttcatagaatcagaagcctcttgattgaagctctccaaaagatcacttgaagaggtcctaaagattctgcattatttgttttatattacaggtgaatttccaatcaaaagtatgacccatcgtgtcaaacaaaaaggagtgaatggtccaatataccaaataaactaaatc

SEQ ID NO: 128999 - DNA, 420 bp, Glycine max
agcttccacttgtgtattgcatcattaatattataggctttctgttttccctcccgtggatgtagccttgatcaaaggtgaaccatgtaattctgtgcgttctttctcatctctctctctcattcattttgctacaacatttgtgtgtatgacatttctgttctgctgcatctcctgctgctattcttgcttgttcttcatcacttccataacagttagccaatgtttaaaatttgaaactacaccactatgtgttggtgtaggcttagaatccctttataaggttgtaagttgtgagattgatttaaaaaataaaagagcaatcgaaaaagttatgtattattgggggtatgtttgcattatttccattttgcgtgtgaaagaattcggaagcccttctattaaaaagtgatgaacata

SEQ ID NO: 129000 - DNA, 471 bp, Glycine max
  unsure (1)..(471): unsure at all n locations
tactcagctagtatagctaagcactatcacagtcgagctttgatcttgctccaccgccgccaccatcatcttagacttatattttaatattagtactttgattttcagccttgtatgttggctatattagtatgggatatgaacattttactatttccttatttgcatagtatgtttagaccaatattaagtatgttatttggctatgtgaagtttataatttatctatgcatggttgtttgcttcatgatttcatggttcttgtctcttgcttcatgatttggttgatattttttatgacaattggttggatgtttaaattaaatttgttcgatacgcactttggctttntgttgatgccaaaggtggagagaaatgggattaaatcaagaattcacatgagtaatcaacttatttaaagttaaacataaattcataaacacagggggagatattatgagtgatcgacta

SEQ ID NO: 129001 - DNA, 430 bp, Glycine max
  unsure (1)..(430): unsure at all n locations
agcaccgctgctgcagctaatanatcttatatggtttatatttatcctcttgccatttttaccttaagttttatgggataatttcttcatttggttttgatgaaaaccccatggatcaatgcatataccacaaggtcagttggagtaaaatatttttttttttatatatgtagatgatattttacttgcagccaataacatgaggtgaaacaatttctctctaagaattttgacatgaaggatatgggtgatgcatcttatgtcatcggcattaagattcataaagatagaccttgatgtattntaggtctattacaggaaacctatattaacaaaattttagagaatttggatgaaagattgtcaccaagtgtttgctccattgtgaagggtgataaagttaatttgaaccaattctcatagaatgact

SEQ ID NO: 129002 - DNA, 385 bp, Glycine max
  unsure (1)..(385): unsure at all n locations
tgaatgtccaagtttcttgtgccatacctatggatttcctttgttggataatagaaatgctacattctgatttgatagtttactaagattaatcttataaagattatctttcctcttagtagtgaaaaagttagttctcattnttgtgttggacaacacacccttctttgctaaaggaaacatcaagttcattagcacataattgacttatgctaagcagattgtgtttaagccctttaacaaaaagtaaattatcaatgtgaggagtgagatcaatacttatctttcctactcctactattntctctttgtgatttcttctgaaagtgactgttccaccatgcatgggagtcatgcattggaacatacatgtttctcttatcat

SEQ ID NO: 129003 - DNA, 384 bp, Glycine max
  unsure (1)..(384): unsure at all n locations
agcttgtctatatggaagcaagttaaattctctnttcaaagtaaaaacgttgtttctacttcaaaaccctttgaactacttcacatagacttatttggtgcctctagaactatgagtttgggtggtaattactatggcttagttatagtagatgattactcaagattcacatggactttgtttttgaaaaccaaagatgaagcttttgatggtttttgcaaacttgccaaggtcattcaaaatgaaaaaaggtcttaacattgtttcacttanaagttatcatggaggtgaatttcanaatgagtctcttgaaatggtttgtgaagaaaatggaattcaccacaacttttctaccctaagaacacctcaacagaatggtgtcat

SEQ ID NO: 129004 - DNA, 411 bp, Glycine max
  unsure (1)..(411): unsure at all n locations
tgagatgaagaagtgtngaagggtgaaacttcctgctnttattgttgaccacagagtggtacctggagatatgtcgcggtggtcaggagaccttggggacgtcatgtggggtgctattgcccaaaaccaagcttgaccaatcccgacccaacccgggcatagtcggtcagtgagaacctgtgatgtacctaagcatgcgagctcctggcagtcaacagataaaaggaaaacaagaccacatagcatggaggcttgtggtggctggccagctgtgaattttgtgtaatatgtgagatatggcctctggtaatcgattaccaagggtgggtaatcgattacaatgcttaaaaatgaagacagggggctaagatggtctctggtaatccattaccacggtgttgttatctatta

SEQ ID NO: 129005 - DNA, 339 bp, Glycine max
agctaggtaatccatcacaggttctcactgaccgactatgcccgggttgggtcgggattggtcaagcttggttttgggcaatagcaccccacctgacgtccccaaggtctcctgaccccccgcgacatatctccaggtaccactctgtggtcaacaaataaaagcaggaaggtcacccttctacactttctcatctcaagcttgtaggattatggggtacccatcacatgtggtactatgtggcggtcgggcgatggtgcacaacaaagtttccacattcacaatgcgcgcataaacccaccattccctgttgcccaccttcaactgagctcacgtact

SEQ ID NO: 129006 - DNA, 287 bp, Glycine max
ctgcgagattcctcacggaaaacgttactgaaacgtttctgaagcgcctcggcttatattatcttcacggaaacaatgtttccaagcaaattcgaaagagagagaagtgcctaaggggctggaccctttccttcttcacttcctcccctatttatagcaaaataggggaggtggttgccgcccagctcgcccaggcgagcatggttgcttcctccagaatcaaccgccttctggaggaatattccagatggcccatgtgggcctgggtgctatatcactcccatcac

SEQ ID NO: 129007 - DNA, 478 bp, Glycine max
  unsure (1)..(478): unsure at all n locations
tctagtcacctgcggctgcagcttgtatttctntnacaaaggttntgtgatgttgatngngagagagtgactcttgacaggtggcctttgagaaggtttcaaatgatgataacgaggtactaattgcaaggtttggtgaggaggagattaaagaggctatttgggagtgtggtagctcaaaaagccagggtcccaatgggtataactttggatttatcaaagaattttggtctttgttgaatgaggatgttactaatttccttaatgatttctatgagtctgatagttttgttagaggttccaatgcatcattcatatatctcattcccaagataagtgaaccgcaagggtagggggattatagaactatctccttggtgggttgcatgtataaggcggtgacaaaattattggcaaaaagactccaaaaagtgcttcatagggttattgatgaaaggcaaagtgctttcttgggagg

SEQ ID NO: 129008 - DNA, 437 bp, Glycine max
tactaagctagaaagtccttcggaattcatttgtgtgtgtatttctgtatggtatgagatgatatgcaaaagttgggactcgtgttagttgtttataatggaatgagcctaaacacttgagcttgagtgaaacaatgactatgaggctttggctgatgattctttccttgatatctgtcattctcactagcttatttcagttgtgactctaatgcatatgttcctatctttgaaaagctgcatgtttgtaaaaagcaattgattgaagcattccatgatattcatttcatatgattgaatttctgtgtgaagcaaacaccatttggattgaccactatattttgtcacttgaggacaagggaactgttctttctttgcttaaggacaagcaaaactggtaaattggaagaggtgttagtcgtcttatacgactaact

SEQ ID NO: 129009 - DNA, 505 bp, Glycine max
  unsure (1)..(505): unsure at all n locations
agtcacctgcggcatgcaagcttctagaaggagatcaactggatgttctatgcttcttgaaggtggcagtccatgaggaatctccttggaaaagacatctttaaattcctgcaataagggttgaacactangagaaacataaatagttaactgattagaattatcactctctctcttttgtgatcactcttttcctcgggtgtatcactcttctttttcatattcctttgtggagcctcactattttctttctcttgttctctcttttctctcattctgatttggtcatcacacacttctctaggggatagaggtttaagagtaaacaaggaagatttgatcaacaaacgttgcatttgtgtagtccacgcgtccagaaataagcgttgagattcgtccagttgatgatatacaccaccattgtcaccagctcttgccatgattaaggaacacagaantttgcagtaaaataaaaaaaattaggacctcaccacactctactcac

SEQ ID NO: 129010 - DNA, 417 bp, Glycine max
  unsure (1)..(417): unsure at all n locations
tcgggcgatggtgcacaacatgttgtccacatacacaaagcgcgcataaacccaccatcccctggtctcccacgtagcccatatgctcgtttctctcaacaccgggtccccatcaatcctcccaagcttccacaacatgcaagtaatacaacattcaaacagcacaagctatcacagccaagcaaaatagagcataggcagaaaactctgccaaaacaccaaccaaatcacagcttttctcacttaaagaccccagtaacaattccttcgttccggttcattaaccgttggatcgactcgaanatgttactggaagtctctagtacataagcctacattgtgaccgttgggatctactagcaaacatccagaactcattctgcactactctgtccacagacaaccacacacaagcat

SEQ ID NO: 129011 - DNA, 460 bp, Glycine max
agtcacctgaggctgcagcttggcctctagttataatggatattgttttatataactctatggaccaagccatcatcctttctattaactcaggcttacataacactttagctatggggtagttggtccaaacagtaatcttgtggctttggaaacattattggagatgccggcagcattaacaagtttttaggtcttgtaacactcgaccaacaaaatatactagtcttaactcattgttttcttcttggacgagggattcacttatggctttggtagaaactaagaggttactataagcccattgtcggtgctaggttttgaaagcactggaggggttgtaagtgtaacctttaactgctaaaaggtttcttcacactcatcattccattcaaagttctttgtctttttaagaagatatgttatcgctttggccttctcaatgattcttggcaagaat

SEQ ID NO: 129012 - DNA, 369 bp, Glycine max
tcgcgtgtatgatatccactcgacaaggtttgaaataaaggagaccttcaatcctataacgcaacgtggcggacaaaaatgggcagttaacttgaatggccattattgtcaatgcggaaagtattctgtgcttcactatccatgttcacacattattgcagcttgtggttacgtgagcatgaactactaccaatatatatatgttgtttacaccaatgagcacatcttataagcatactccacatagtgatggcctcttgtgaatcaagcggcaattcttccttctgatgatgcatggacactaatccctaacccaactacaattcgtgcgaaaggtcggccaaaatcaacaaggataatgaatgagat

SEQ ID NO: 129013 - DNA, 490 bp, Glycine max
  unsure (1)..(490): unsure at all n locations
agctntattgttctatttatatcattngtattttatacactttacaaagatatttgtgttatgtagtgtttaatttgtgtatatactaaacatcatgtgaacaaagtataacgttatagtgtattataatacaaactagtttgaagattagagtgattaaagtttggtcgatgctgtttgaaattgtcgatgtgtgtagttatcaatgcggggagtaaagagagtagagaaatgggtaattatttttctaaggttgtgctacgagaaaaaaaaaggttgagtaataaaaatcattaattttttctagtactcttcatctttgttttttgtgttgtcttataagtttatttaaaataaaatataaaatataaaataaatatttttgtgctattctaattatgttctaatattaatataaggtgcattacaaatgtctatttaataaaatgaaaataatgacctatataatttaaaaaatgttgtatacatg

SEQ ID NO: 129014 - DNA, 310 bp, Glycine max
  unsure (1)..(310): unsure at all n locations
tctanctattgaaaaacaccaaccattttcctataaaagttatcatctatacagcaacttatccatcatggagtcgaaatgtgggtgtagaggaaagtggcgtggaagatgaatattccagcctctctatttctaagtgcttagataggcagatcattgtttgtgatgcgacgatatgtttgcgtacgagtgttattctttccgcatggagaggaaatagaaaaagacaattagtgtaacgggaatgattcaacantacgcagtttacacataccccacggtacatanatcatgtttcacatttattata

SEQ ID NO: 129015 - DNA, 457 bp, Glycine max
  unsure (1)..(457): unsure at all n locations
ggatccttaagtcacctgcggcatgcaagcttatggcatatgagcatcatttgtctattactgaccaaaaatagaagatgactacgatgttaatgcaacagaacatcaccacaacctctcccatacaagtacactacattctaaataaacctacatccttctctttctgtttatgcttttcttaactaaaccctattagcttctagagttatagaaaattactaacattgtgaaagtgtaagtttctaagtttgggtgataacacattaatttattcaaccaaatacattatcaaactccagcatcccactaaaaatataacgggattagacaccccaatacaagcaaaaacacaataacaagtacaaacaaaacactaagggaagttcanataatggtagccaaaagcaaaacttaccaagacacaatagacacagcagacacgagaagaggagcg

SEQ ID NO: 129016 - DNA, 449 bp, Glycine max
  unsure (1)..(449): unsure at all n locations
cttaaataaatcactcatagtgtataaaactcacactttctgtgttttatcctattcccaaaccataactgcaccatgactttattttgcacacgacttcctatcgaatcaaaaataaaacgtacgatcacggaccaatatgattttctcgagggtagtggttntttggagaggaagttgggtgtttatgtcttttcctctttgttcaggtggggtgggatatcgccagtcgagaacgaccttgaatggcaatctgaagggaagagacaccaaaaatgggttttcctttgtcggcagtcacctaccttgccgaaaatttatctggcttgaagaatttctgtcctctttctttcattgatcgagaattgcttcgtttaccttttcacttcctttcgatctttgatcgggaatccttccttttctttcttttgtgttttcattatttcatc

SEQ ID NO: 129017 - DNA, 430 bp, Glycine max
  unsure (1)..(430): unsure at all n locations
gcttatcagtttggcctaactcaataccttcttatggcctttttgaccatgaccccacctacttcttgtccttcattgttttccaatgaggtaaagaacatcattgaactaacctaatcgatgcttaacctatttaaattccatttgtttttgcttgaccccaagaaaacaactagttttctcaactggtggcctgctgtgaaagacacccttttttttcaaaaggttttcctttttaccttntgcaagccaatgatcattttcaaccagatcccattgctcaaactccaagacaacccaagtcttctcctcatccggtttcttttttggctaagaagaagaagagctccccagctagaatcaccattaatccttcactaactccacagacaggtattattttcactactacaaaaatgatattctatga

SEQ ID NO: 129018 - DNA, 464 bp, Glycine max
cttagtctaatataataatcccaaaatgtcaaagaattgtgtgttgaataagcataacaagactttctgtggttggtttaaagatataatcattgtagatgagaatgcttctgaaacattaagaaagctagcagatgggtctaaaagaaatgttataacttggcaaggatacgacataaacaagtattaattgtacacaaaagcacatgatgacataagtacaatgcagatcatcggtgtcaccctaatggctgaatctcaacacttcgcatgtgtgaatgacgccaatccctgtgtagcttccatcccttactgtgggttcattgatgaaaattgggagcttaactatgtgaaatttactgtatgtgtttttaaatgtaaatgggttgacaacaacactggtgtgcgcaccgatgatatacgatttacgttggtagacttgaagaaacttggttaccacaatg

SEQ ID NO: 129019 - DNA, 469 bp, Glycine max
  unsure (1)..(469): unsure at all n locations
atcttagatcacctgcagctgcagcttgactaactnagcangttttnctgtgtaactctggccaaaagtctcaaccatcaaatcctcttccctctctgccttcagcttataatacaacaagcatactgctagaataaatagcagactcagaggagctcgaagtgcaatgcagtatgttacaaacaaaagcatggttgatgaatatattgtatgacggacccaacgataaggtccaaattgcacaacagcagttggctccaccacattttctgaatacttggcgagatacaatggtgcgttatactgcattagcagagttgtaatgattaaagcccagattccaagattgctccacccacccggtatgaggtgaagctcacgcccttcatatgctgcaagccgatggccaaccatgactcctgtgctgaacaatatgcgagaccatgtcngcaagttcacataccacttt

SEQ ID NO: 129020 - DNA, 184 bp, Glycine max
tattattttctgcatctatagctcaatgcggttgtttttacagcaggataacaagcgctgtactattgtaattgagagtgatgtaacaagacacatgatattattcttcatttttggtggtatctcttctgttcatgagctataaaatctcttatgataaaatgaatcatattgcgagtgtatg

SEQ ID NO: 129021 - DNA, 409 bp, Glycine max
  unsure (1)..(409): unsure at all n locations
agcttgaatcggacatccgngtgtataagtttgaccattngaatttctcaagagcttccgntgttcaatttcgagcctctcgacatattatgcacccgaatcggacatccgtgtgaaaagtcatgatcatttgaatttctcgagagtttccgatgtttaatttcgagcgtatcaatattttataaccgtgaatcggacctccgtgtgaaaagttatgaccatttgaatttgacgagagcttccgttgttcaatttcgaatatcactatatgtgatgcgcctaaattggacattcgagtgaaatgttatgaccatttggatttctcaagagattccgttgttcaatatcgagcctctcggtatcttatgggatcgaatcggacattcgggtgaaaagttatgaccatttg

SEQ ID NO: 129022 - DNA, 455 bp, Glycine max
  unsure (1)..(455): unsure at all n locations
tcgatacgctcgaactaaacatcggattctctctcgatattcanatagtcataacttttcacacggatgtccgattctggcgcataatatgtcgagaggctcgtaattaaacaacgcaagctcttgagaaattacactggtataacttttcacaccgaagctctcgtgaaagtcaaatggtcatcacttttcacactgatgtgcgattgaagctgataatatatcgatacactcgaattattcatcgcaaactgtctagaaattcacatggtcttaaccttttacacggatgtccgattcaagcgcataatatgttcttaggtgtgaattgacaccagaagcgtccgagaactcaaatggtcaaacgtttccacaaatgccgatttaagcttttattatcgaatgctcaaattgacacggaaccttgaaaatcaatggcttgatttcaacgatgt

SEQ ID NO: 129023 - DNA, 405 bp, Glycine max
  unsure (1)..(405): unsure at all n locations
agcttaatgagagtagtagaaacagntattttatactagttcactaaacctgagctacatccatttctcctttacaaaacaataaagggttcctctaatcaatgattgattacaacaagtattatgacctgccactcttggctttacaagtatcctgtagttcactactagcacaacccttagacccccctaaatctaagaacacctaagtattggtttgtcactaagtcacgcctgcctttcacaaacaatcggtttgaagaatcacagtttctaacactcaaagagtgtgcttacagtaaagtaagactcagtataaaaactttgtctagcaaatgatagactctatgagtactnattttctctcaataggatttcttttgaatctttctcgctttttcttta

SEQ ID NO: 129024 - DNA, 409 bp, Glycine max
  unsure (1)..(409): unsure at all n locations
tggaccttcttctatttattctgacttactacagcctcttatccctcttctattcccacctatagcaattccaaacaaaaaaatggaagaagtggaataggagatcttggagaccttcacgaaagtagaggtgaacatacctctgctagatgccatcaagtagattccaagatatgccaagtttctaaaggagctgtgcacccacaaaaggaagctcanaggaaatgaaaggattatcatgggcagaaatgtgtcagcattgataggtaaatctgttcctcacattcctgagaaatgtaatgacccatgtactttctatataccttgcattattgtgaacaatatatttgagaatgccatgctatatctatgagcgtaagttggtgtcatgcctctgtacattttcaat

SEQ ID NO: 129025 - DNA, 113 bp, Glycine max
tacaataagtgactttacagtgccactgatgtctagcccaacagtaggggtgaaaccaccatgaatatctgccattaggctttgagtgaagacaggggggtatcaaccaaagg

SEQ ID NO: 129026 - DNA, 471 bp, Glycine max
  unsure (1)..(471): unsure at all n locations
nttatcatgggcattgtgttcatccagcatgtgacttaatcttgaaacaatgtcgggctgaattccagaatgttgactacaaaaatgaatattaaaatacattcataactgtaacaaagtattatgcgtcaatgattacttttttggggaattcaaataaaggattactacctcatgacattaattctattttaaacttcattttctgtgtcaaagatatatagttgtgcaaatttatgttgttttccaggcattggtaataggttgcctatcctgtggcatggttgaccatgtatcctaattgtaggaggtcctctggaatcattaattgatttgtctagtttaataccagtagaagtaaaggcaaacatcatgttatatgctcgtatgttatgttgataattnttactatcaatcgtattatcaccaaatagaagtcgttagagatctttgggtggaatttgtaataat

SEQ ID NO: 129027 - DNA, 372 bp, Glycine max
  unsure (1)..(372): unsure at all n locations
tgatgacaanaattaataactttgtggaagatcataaatttaatattagttctaatattgtaaaatagtagttcttgttctctaagttatgttttcaaattagtctttatcaccactttacaatgacatgatcgatatatatatatatatatatatatatatatatatatatatatatatatatatataaccatatatcataaatatcatttctttataaaatgtcaacatttaaaattattataaataacaaacaataaagtacttaaatggaaatgaaagttatatgtataagaattataaaatatttaagtcttttatgttttcctcaatcaaataagtggaaaactggccattaatcgggaatatcgt

SEQ ID NO: 129028 - DNA, 398 bp, Glycine max
ctatctactctgggtgtctacagacaccaccatttgtgaaaacaatgatgaccacaggcagctggtaccgaactcacgtctggataaaagatgaagtgtcacagacatgcttgataccaaaaaattaattgcggcagtagcaacagatgaaagcataaacatatggaaccatatgatcatattgatggagagagaatttacatacacatatagtaataaaagtattttataaactaaaaaaatggttctaaccaattgaacttctcaaagttatttaaacaagaaattccttttgatcaactaatatccacaagcactgccctttcaaacttaaagaaacttattttctcagttcaagcttgaaccagagatattatataatttcaagtctttgggaa

SEQ ID NO: 129029 - DNA, 434 bp, Glycine max
  unsure (1)..(434): unsure at all n locations
tactcaagcttggaaagaaaagctgtgaaaggaccacttcaatgagtaaagaataacaaactatcaccctaagtcagccacaaccataagcatcaatggtgcccttgaccttacatttcaacaaaattgcataacatattgattctccaaaagtccaatggccaccatacgaccttccacccaactatacacctctaaccatggcaaatttttcagaaagtgacccactaatgactcagcagctagtggtgcaacaataggctcaaccgcagatcttgttcagaacatgtctcagccccaaaataataaccttgcttctcaaggaaattctttgaactatcaagacactacaaacacccatcaagtggtagggtaggggggtttcaaccancaccttctattgagcaggtttagttcaaagaaaaattacaaat

SEQ ID NO: 129030 - DNA, 459 bp, Glycine max
  unsure (1)..(459): unsure at all n locations
gcccgagtcattcatccctatgagatgttgttgtagtattggcgatcagaattgccattccttggattacggggttgaaccaatctcatgcttttacaaaaaggttcatcaagtcaagttgaaatatggaagtaaccgtcttgcaaaattggggcaaaagatgaatcgagtcacatcactgcttcgtttactgccaaacatatttaggattggttatgtccttgttacttccagtttcaccttgacaaagatgtcatggaccatgttgaatatctaaattgattcaaccccatgtcttgcgtgtaaattcgcaatacttcaactgtacatcattcgcatgcatccatgcatttcattggttgcattgctcgttgcattctctcctcganaaaataaaataaaataaattgatatgaacttatcaaatagaaaaggatacatgctttacggcgttctcac

SEQ ID NO: 129031 - DNA, 357 bp, Glycine max
atcatgctttgattaatgccaaaaaaaataactacggcaaatgaaaagggtgagaatgaaggagaaacccatgctgtgactgccattcctatacagccaagtttcccaccaacccaacaatgtcattactcagccaataaccaaccttctccttacccaccgcccatttatccacaaaggccatccctaaaacatccacaaagtctgtctactgcacttccaatgacgaacatcacctttagcacaatccataaacaccaaccaagaaatgaattttgcagcgagaaagcctgtataattcaccccaattccggtgtcctatgctgacttgctcccatatctacttgataattcaat

SEQ ID NO: 129032 - DNA, 436 bp, Glycine max
  unsure (1)..(436): unsure at all n locations
gctactaaggaggtgatcttagatntttatgtgttgtgtttagctaacctctcgcttctcaaggaagttntcgcaaagaagcttctcaaggaagttttctcatgaaagcttgtcaaggaagctatctattctataaatagaagcatgtataacacttgttgtaactttgatgaatgaaagtcttatgagatacacttcaaagntccacttctctccttcttttattccttcaatttcctgctccccccttctctctttcttttcctccattaaagcatcctcttcaagcttcttatccatggaaatatttggtggtgaagctccttcttccttggcttattccctagtggatggtgcctcccgtctcctcttctccttttccttccgatgcatcttcatggtgtaaaatcaccattgaaagaccccattgaagctc

SEQ ID NO: 129033 - DNA, 439 bp, Glycine max
  unsure (1)..(439): unsure at all n locations
tgctggaactacttcacatggttttgatggggcctatgcaagttgaaagcctcggaggaaagatgtatgcctatgtggttgtggatgatttctccagatttacctgtgtcaactttatcagagagaaatcagacacctttgaagtatttaaagagttgagtctaagacttcatagagaataagactgtgtgatcaagagaatcangagtgaccatggcagagagtttgaaaacagcaagtttactgaatactgcacatctgaaggcatcactcatgagttctctgcagccattacaccacagcataatggcatagttgaaaggaanaacaggactttgcaagatgctgctanggtcatgcttcatgccaaagatctaccctataatctctaggctgaagccatgaacacagcatgctacatccacaacatagtcacact

SEQ ID NO: 129034 - DNA, 285 bp, Glycine max
tctacacaaaactccagggctaccagggttcaacaaattatattattctctttctgactccacagtttgagcctaggtgaactctggataccttaatagcaccttcatctagccttcagtactcaaaggctgcccacttgtagggattgttggcgatccagaagaaggaccacggagtgtgatcaagaacatgggaataagggtgggcgctgatatacttgatacagatgtgcatgaagactgtgcactcttagacaactactccgttggttctagactagtctc

SEQ ID NO: 129035 - DNA, 451 bp, Glycine max
  unsure (1)..(451): unsure at all n locations
ngaaccgtgttatcaaacatcaatggttcttctatttggctgaataacatgaatgaagttgctcagaaatttctttctccttttatgcatatagctagccatatctaatattcatacatgccatgctatttctttatctattttcatcacatcaactattttatcacgccattcttgtacacaaagaaattatataaatacaatttctgttagtctcttagagatatgagtcatatgactttttctacaaatcattcaggtgtgcttattcaataaattaagccaatgaaatgaaatagaggatgtatgacatatagtacagtagcttccatgaatatatatatatatatatatagctgaatcgctgttatttctcattgtttaaaataaaaaataagtgccaggcatgacaccgcaccacattctctttntcaaaatccagaaattaata

SEQ ID NO: 129036 - DNA, 302 bp, Glycine max
  unsure (1)..(302): unsure at all n locations
gcttgtataggtctaccattactgttgttgatttcanaagacagggattgtgcatagcggcatgattatttatgacctattggcgcgtgcatagattactgcatttagccggatccatgataaatcacttccgactccgcctaaggaaggcgaccattatgtcctttcaaggatggactcgcgaacgatactagatagtgtaccaagtaacagctaccccagtaagactttcttggaaaaatagtattagcggatccccatctttggctatgcccttatcttcctacaatactatcttagga

SEQ ID NO: 129037 - DNA, 354 bp, Glycine max
atacagatgcgtctctgagtgaccctgctatctttcatacacacgggcatgtgcttgctggaatgactcttgtacaacgtgccgaatcatatccttctagcgagctcccatgtctacatcatacggtgctgatagttgcccactgtgcatgtgtgtgatgtaccatgccatatgcacgtcatataatttctattgatcgcgtcacacagcagaagctctcgtatgtcatccaatatttgtcggcttgcgacaaacaattggtgcaaggacataatatttgcatcttatccggggacctctgtggaaacaattgtagaattgctcgaccctcctatatctgggtgagcgacttga

SEQ ID NO: 129038 - DNA, 479 bp, Glycine max
  unsure (1)..(479): unsure at all n locations
agcttgtgaggaatgttgaaacttctaactctgtgtgctaatatattcattaagctggcttgatttggtttatacaacaaattattttctggatagattcaagtcttctatccttccttgcttaacattggttntgtagtttttgtctaactttagtggaagctgttgtggcttctttgtgcctttcactcaaatttttaactagtgtttattttgagttgttgcaggtatcagagagaagaagcaaaaatccaagcttgggtaaacctcgaaaatgctaaagcagaggccaggtcaagaaagcttgaggtatttcattgtctaactttagtggaaactgctggggcttctttgtgcctttcactcaaatttttaactagtgtttattnttaactagtgcttctttgtgcctttcacttcatagtggaagctgctgtggcttctaatatgtatggctgaaagcgaattgtgattttgag

SEQ ID NO: 129039 - DNA, 466 bp, Glycine max
  unsure (1)..(466): unsure at all n locations
gattaccttatagctatacacactcttttgtttggttggtttacgttaacgtaatacaantttacattatgaatgcataaccattaaatgttatattaaattaatctaatttaattttttttctctaagtctcttaattnttaaactaaatcctataaatatttagcttcaaaaaaatatatgaataatgcaacttttgtgcctcaataaaagtattctgtcaatgcgtttggtgacgcttaaaatacctgatcacttatacaatttgagatattgttcattgcattgttgattttttaaatcagacaagaaatatattataagatagaacggcataggtaccataattaacatatacgtgaatcacataacctacaccctatgcatggaaagaaaaaggtacctcctataacaatcatcggcataaatatatgtggaaaaataattattgatttatataatggac

SEQ ID NO: 129040 - DNA, 281 bp, Glycine max
ccttatatggtgcaacgaatgctcttgtttaactctcacctcaagcttattttcgataaacctcgatctagatgggatgcttctgttattactaatattttttaccatggtgtagttgtgattataaatgaagttattggaaaaatattcaaagtgaacaggcaccaactcaataaaatcttcaagctttttcatgagagcccctcagtagaggaggaatttgtggggaacctctctttggtcttgcaccaattctatgttatgatgtcccttgaatggca

SEQ ID NO: 129041 - DNA, 345 bp, Glycine max
  unsure (1)..(345): unsure at all n locations
cgattccccaagcaaaagaacaagcttccacaacttatgatccaacttggatgttggaagccattctcggatgtcacaaacttcaatacagtcagcatctccacaggcacaaacagaaacattaaaagatgatgggctatcacgattttcattgaattgatccatcacctccggttcagtgctctgaagctgacgcatccatctcatagacttaatggcctgtgaaacatgatgtacggcagctaactcggatgagaatggatcagcaactgtctgaaccacatgtgtggaaactggacatacttcacaagccanagagctatcatcatgatacaagcttgggca

SEQ ID NO: 129042 - DNA, 446 bp, Glycine max
  unsure (1)..(446): unsure at all n locations
agcttanagtcatggtccgattgatttactttctactaaagacatattccttcaaccttaagcatgtaagcacgaagacgcttgtagttctggtctggtggcaaatgaccggtaaagtgcacattcatctatccttaagggttgaagaacaaagaggcttgatgtaacatcctatttttcataaaataaatgtaaaatgattctatttaaaataaatagaattttacgaaaataatgagttttttgtaattaagcgaataagagaaatagctctattaattaaaataatagttttaaggcatataaaataaatatatgttcgttttagacattgtatgtattcatttaatatggagagtacgatagacttgttttatattacatgatgaaggagcgaaaagtggagttaataatagactcaccataccctaactataaatacgtat

SEQ ID NO: 129043 - DNA, 368 bp, Glycine max
acctgaacaagctaataactgctttgatgataagattatgggtggtttataagacgcttcttctgaacgcccaaatactactaaactacaggttgttgaggggactattaacaaaaaaagaaatcaattcgaagactgcgaagaggccaaccagcaatgggttcttgcgcagtccatgggcctgaaccatgtatcacattctgaatgtatacactctttctcatctatggagtctcgggacaggatagaagctttaaagatgggaaacagatatattcagagatgaatatcttgtactataacattatggggctgagtagatgccataaatgggcttctatcacgaatttggtgggtaaatataacat

SEQ ID NO: 129044 - DNA, 348 bp, Glycine max
  unsure (1)..(348): unsure at all n locations
agcttccatctagtgttaatcagagcactttatcttcaagtaggtgctctttaaacctccattaattnttagctttaccttcacctccattgntgtttcttcattnttctccacgtatctcctcacatgtcttgtgctaaatgttgttaacatgattctttagaatttccactgattaaacttgctacagaagccagatgtaattttctatgtgttgcaacctgccctccggcggnggcgcgaaaaggtctcttggatgggccaagggtgcatcttccatcgaaggaaaacacatggagtcaccaccaacgtttattctaggaaatcgtcggaaaaacaaagaatgga

SEQ ID NO: 129045 - DNA, 443 bp, Glycine max
  unsure (1)..(443): unsure at all n locations
tctattgatgtggcatggcggagcctctntggcttgctatcccaaccacgggccttggcctttgttcttcctttctaagatatttttccttatgtcagcttgcgtaggtttatagcctaacccaaacttcccacggtttccttatgtgcttaccatgctggttctgccgccgttgtttttgcccgggctcatatccgtaccccaacatcacccgggccaccatcattgccatatcagacaggcgagactgctcagagagggaatctacagaggcaatgcttactacctcaaaagattggaaagccgtttccaacgactcctccgcggcttccacatatggaatataggaagggcaacttaccaagacgtcttcctcacccgatactatgaccaaatgtccctacattacgaacttcaacttctggtggagtggagaggggatg

SEQ ID NO: 129046 - DNA, 324 bp, Glycine max
  unsure (1)..(324): unsure at all n locations
agctntatatggtcttaagcangccccattctttggttgaaagactgcaatctactcttcttcaatttggttgtgtggcaaacaagtgtgatccctctcttttcatttacaagacttgctctcacactacttatctcttagtctatgtagatgatatcatcattaatggcaattcttcatagttgattcaacacctaaccactcaactcaactcaaaatgttctctttaacaacttggtcaactggattactatnttggcattgagactaaatctctttctgacaggtcattacttctcactcanagcangtatnaaagggatt

SEQ ID NO: 129047 - DNA, 403 bp, Glycine max
  unsure (1)..(403): unsure at all n locations
gacttgagtaacacactttgtatgttcaaaattntagaatttgatattaattgtggttaagaaaatatgtatctaaaatatttaaataaactcaacatgaagcaactacgacaaataggtataaatatctgcagaatgttatcaaacttaaaatgtgacgacctttaagactaaatcataaaaaaaatagtatcgatgaatagaaacaaaattagaagttgaagaccaatcgattaatttcaatagaggaaatcttgaaaggaaataatctgattctccacatacgagtagtcttgcaacaaagaccatcacaaagccactttcattgcttgaatgaaattaataattgatgcaaaatattatagcaaaacataagatcacatactatgcactacgatgatcg

SEQ ID NO: 129048 - DNA, 476 bp, Glycine max
  unsure (1)..(476): unsure at all n locations
acactttcgatactataccttacggcatgccatgtancttattttctaatcgagatctgttgttcctctgtctattctggaggaaatatttcgtataagtggcacacacctaatgatgagctcattgtaccattcacagacagacaaccaaacagatgtcttcaatcgggtcattgaatagtatcttcgcgcttttgttcataagataccatcttcatgaggcaaattccttcattgggtggagtggtcgtataacactttgtggcattctgggtcaaggacaactgcatacgagattacgtttggcaagaagccatttaatgattctcagtacatttccagttcttcaccggttgaggccgctaacatttatctactaatttggaagcaatttcaaataaattacaaaaagctttaaaatgtctagatgaatgaagaccattactgacaccatataagaatggtaatctccaaat

SEQ ID NO: 129049 - DNA, 453 bp, Glycine max
  unsure (1)..(453): unsure at all n locations
caaagtatatttcgacattgcctaagttcctggcccataaaattcacatcttgaagaggagtgagaaggtttggtttgattgtgatttgcaggactacccttttggacccgatggtcctgaatcatgagattttatacaattgatacatttgtaatctcttatacaaatacaatgttttaagttacggttgatttttcaatcactaaaaattacactgtattattttaaactttaatgatgttttaatttanaacaaacttgttaacataagattaatttaaagccaaaaaaaacaagtaagggtaaaccaattagcataataacaagcaacgcgacaataaatcaagacaatgaagaaaaaaatcatcattcacaaattgtgagtccatttttatttcttcaagtctttgtattttacaagttttagatactttattataatatcttaagtt

SEQ ID NO: 129050 - DNA, 386 bp, Glycine max
  unsure (1)..(386): unsure at all n locations
taaatatctttttatctatttaatgatgtttagtatgttcactatgctatcagaacttcattctaccatgcgttntccttgatcacgtagatgcatgttattttaggatcattcaacaatggaaactggtctgattcttagaattggataggacagggctagttttgtgtattttcacgaggaatcggngtatggtaacctagttgttgtatgtttttcttaatgcggtcctagccgagtttagtccaacaagaggaatctacgaacgatgcatggtcaggattaggctagactgtcatgaggaatcggggtttagcatttcaggagacaccataanacgcatgagaanttgtaagtagagaatatccttctaacaccangaacct

SEQ ID NO: 129051 - DNA, 483 bp, Glycine max
  unsure (1)..(483): unsure at all n locations
agatgaggaagtgttgaagggtgaaacttcttggctttattgttgacctcatgagtggttcctggagatatgtcgcggnggtcaggagaccttgnggacgtcatgtggggtgctattgcccaaaaccaagcttgaccaatcccgacccaacccgggcatagtcggtcagtgagaacctgtgatgtacctaatcatgcgagctcctggcagtctacagataaaaggaacaaagaccacaaatcattgatgcttgtggtggctggccagctgtgaaacttgattgatatgtgagatatggtctctggtaatcgattaccaagggtgggtaatcgattacaaggcttaaaagtgaagacaggaggctaagatggtctctggtaatcgattaccaaggggtgtaatcgattaccaggcttgaaaacgaagtcatgatactaatggagcctctggtaatcgattaccagcctgtgtaatcgattacac

SEQ ID NO: 129052 - DNA, 385 bp, Glycine max
  unsure (1)..(385): unsure at all n locations
gctctaacanngnggggatgtgctcaaatatgtggggcaattctggtttgttttcttgcttggttggtttgaattgggggtttgtatgagatcgccctaggcctataatgtattttgaagtaatggggcatgccacattgtccccgttctcttgctatngatgcctaaacacgcgcccaccaagtgttcggtgaaatgcctcaatggcattagcgcgtgattttcgtagggaaacaacccatgggacgaattttggtttgcacatgttttctattttttgggacatgcattcagtttcgtaagggctagagtaattgccccacatatatcctaggcctaggaaccannagttttatgcaagagaacacaagaatgggtgcatatt

SEQ ID NO: 129053 - DNA, 388 bp, Glycine max
aaaaaatatgtatcttcatgaaagacgacgtttctagaaactcgaatcctatgtaaatgaggatcatagcatataaaaccttcttgatgggttgagtaaccaatataaacacatctaacagattgagctgtgggtttggtgtgttctagtggctaaagatgaacatagtagacacaaccaaaggtgcgaagagtggaataattaagtggcttaccaaataaccttaagaaaggggaatcattatttaatgcctgagaggacaaccaattaataaggtggataatagttgagagagcttcacaccataaacaggatggcacaaatgagtgcaatattaaggtatgaacaacatcaagaagatggtggtgtttctataactaccttgttt

SEQ ID NO: 129054 - DNA, 422 bp, Glycine max
ctgcagcttttatccaggcacattcgttggggtgtttcttttcttctatggcttattcccatgtggatggtgcctcccctctcctcttctcctttgccttccgctgcatctccatggtggaaaatcaccattgaagctcaaagatctagcctccataaaagcttcacaagcaagcttccatcatgaaggtacctttctccattgagacatataaggatgaagttaattgtgatatagttcccatggaggcaggacatattcttttaggaaagccatggcaatttgataggaagatcatttacaatggcctaaccaatgagattaccctcacccatcttggcactaaatgtgtgttgcatcctcagacaccttcacaggtggccaaagatcaactaacaatgaaagataagaacgatgacgaa

SEQ ID NO: 129055 - DNA, 391 bp, Glycine max
cactaagtaagttgccaactcaattgcatgtctttcattctttaccttcatctgtattgcaggttacaggttgcacactttatggtggagctcatgggttatgcttgtgtattcccactgaagaaacatctcatgaagttaattacattggaaaccagcctagacaaaattttaatgcaggtggattttctggatttcaacatggccaaccttaccagcaacataatctattgataactcaccctggtaatcagttcaataaagaacagggtgggctacctaacatgccatatcatcaatggcctatcttatctgagagaacaacaaagctggaagaaacttttgctcagtttatgctggtctcattgactaatcataagagcacagagtc

SEQ ID NO: 129056 - DNA, 285 bp, Glycine max
  unsure (1)..(285): unsure at all n locations
tgggtatggagtatcanaagattcatgttntgcccgaattgattgcatattgtacagactttaatttgaagaattgtccaaatgccctacgggtggggtatcatagtacaaagtcaaagatgatgaggattgtagtagtgatgaaaactcatagaacggccctccggcgaaggagtcatggtatctgtcgatcattccaanggttaagcgtctttttgctatggagacgatgctaaagaccatacatggcatgcaaatagaagaaactgtgatggaatggtccgt

SEQ ID NO: 129057 - DNA, 440 bp, Glycine max
tctatccaatgctacttttgtggtggaccctctttttctttgtttattatttctaatgacattgatagtatgcatgagagaacaagctacattgacctgcatacaaatgcaagaaaaaaggttaattttctggttagattgatttatgtaattacaatattaataatatatgtgaacttcattcatttttatgatttggtgaactaccatgctaagaaatgtcttgatctaattctaatattgatatctgaacctctttatctctatttgattgttagtgattcacttaattattttctcttctgccatactatttgacctatgtccaatttaaacctaggaaaaaagtttaaactatttctaatagaagtttgtctacccctcaaaaatttcaaatattttgtatctaatcaattatattcttaagtactattctaatt

SEQ ID NO: 129058 - DNA, 418 bp, Glycine max
  unsure (1)..(418): unsure at all n locations
tgattggatatcgattaccagatagtaaaaactctggcaacttatacaattttgagaaaaactctgttgaaaaacaaaactatgctatgtttgttttttgaaaaatcttttcaacacttcccttgtgaagtcttcttcatttcttctcttgaatcttgaattcatcttctcttgaatcttgaaatcaaatttcccttgaatcttgaattttcttgatttcttctcatgaaacttgaaattaatcctgatcttgaacttgttgactcaatcttgaaatcattctcttggaattttgtcatcatctttgtcatcatcaaaactacttgaatcaacttgattcatcatcatgaagcttgcttcctacaggctttagaaacaaaatataataataataataataaggtatanactgatgatg

SEQ ID NO: 129059 - DNA, 438 bp, Glycine max
  unsure (1)..(438): unsure at all n locations
tgtggatcacacttgatccgcatgaagcgtacttatcaacttgttctccttgcggatcaactngatctgtaagttcaacacctactgtggatcatctattcctattgcagatcaagttgatccgcaagttcaacacctactacggatcatctattcctattgcggatcaactacgtctctactgcggatgacctatatccttaagcggatcaactacatacctacaaactgcactacacaaataaaaatggaagcagaatgacacaagaaaagggacattatgcttacctcgatgaagaacataatggaagctcgcggaagaacagaagaagaagaagcactcacacaatggacaaagaggcagttcgcataagaagaacagccacctcgcggatgaagcaaggatgctcgcggaaaaccatgcatagctcgcggaag

SEQ ID NO: 129060 - DNA, 377 bp, Glycine max
tattagaggagtgtgtatagttgagctctagcttctcaagaaagcttcccacagaagctgctcctggaagtttctcaagaaagattctcataggagtgtctcacagaggctacatgcgctatccatataagcatgcgttacaattcttgtgactatgatgaatgagagtcttgtgagacacaactcacagttcaacttctctcccccttttcctccttcaatttcgggctcccccctccctctctttctatctctctttcttttcctccattgaagcatcctctccaagctttttatccaaggcacattcttagaggcgaagctccttcttccatggcttattccctaggggatgacgcctactctcacctcttctt

SEQ ID NO: 129061 - DNA, 250 bp, Glycine max
aagccttcctgttttcatgtgctggaaaaagctccggaaaagatcagccgagcgcttcaactgtccaacgttcggaggaattacaaagttcgacgtcttgcgttttatggactagatcttgacggggagacctgaactgctttcatcatcttgtcccgggggtcacatggtaatgattttacctattgattacttttcccccttcacggtaaccatcatcagtattatgttactaaataataatccccgc

SEQ ID NO: 129062 - DNA, 286 bp, Glycine max
gcataactatgagtttgggaggttcatgctatggccgagtcattatgcatgacgacccctgactctcatgaactacgcttctgaccaccatatatgaaacgattgacggcgctagctaactggccaacgtacttccatttgaactcacgcccctacattgatgcacttacaattcttactgcaggagacttacacaatgaatgtgatcgaatgtcgcgtgacaaacatggcatgcaacacatcctttgtacactaataacacctcaccagaatggtgtcctggaga

SEQ ID NO: 129063 - DNA, 396 bp, Glycine max
ccacgctatgtgctcgcgactggtccctttctttccttcgcaacttgagttcactattgctaccccatagagctccgcgatatttgttccggccatactcttccttgcgagccctcttggtctctcgttcaagggctcttgcggtaattgcattctcttcccgtaacccggcacactccttccgaacgtgtgtagctgccaacttgaacttctctttggcgagttttgcctttcctaactcgcttttgagagcttggacttcctcgtcctcttccggtgcttcaaaattctctttgctgacgactgttaacttggctagccaatctaaacctcgtatgcgaactttcagccattcgtggtacccaccaatgatgccattacgaatgcctctaagct

SEQ ID NO: 129064 - DNA, 360 bp, Glycine max
agtcggggtattatttatactgaccatgcaactctgaagtacctgttgaagaatgctgaatcaaagcctaaattgatcaggtggatgctttggatccaagagtttaatttgtagatccgtgatcggagcggtgcatataaccttgtggctaaccacctaagtatgattgagtgtgcgtctgaggactcacccattcgggatgattttttggatgaccatttgtacattttgtataatatttctgattccttcccccactccttggtttgctatattgagaattatttggttgcttctatttttcctcctttagcatccaaagctcaaattgataaaattaaaaatgatgataagcattat

SEQ ID NO: 129065 - DNA, 385 bp, Glycine max
gcatgcaagcttctcacctatgttgctgtttatttttgtatgaagagaagaacaaaagggttcagccccttaggcacttctctctctttcgaatttgcttaagaaaattgtttccgtgaagaacatccaagccgaggcgcttccgtaacgttttcgtgagtaattacgcgaagattctcgaccgttcttcaagattcatcgttcgttcttcgttttcttcagtcttcaacgggtaagtacctcagaccaagcttttcaattcattatatgtacccgcggtgggccacattttgtttcatgcatgttcattctcgcttcattcgctttctatacccccttttgacgtgcttaagccatttatttaagtcatttctcgcttaatcta

SEQ ID NO: 129066 - DNA, 350 bp, Glycine max
aagcgcatatgcacttgcaattccaaggtatcaaacctctcaccaacaaaggtttgaagaccatcaaacctttccataatcttcgaaagaagagatgaatcttctccttcatgtccttcttcaccaacatttctatcacccttcttcacccaagagccatcatgctcctttatgtaaccaaaggatgctatgactgaagcacctataaggaattgtagatgcaattgcctttggtgttttgatgatgatcataatgatatgatgcaattgatgcaaatgggcttttcaagattaaattcaagacaatacttcaagatacaagtcacaacatcaagatgatcactagtata

SEQ ID NO: 129067 - DNA, 380 bp, Glycine max
  unsure (1)..(380): unsure at all n locations
agaagaaaagacatggactctatttgggaagttcctgtaaccnaancatctaatgcaattggtatcatcatcatcccattatgattaatcaatgattatcataattttaagtgtaaaatacaaatagattctactcatctgtgtacactaattgctctatacataaataaaaaatatgtgattaggatcaataattgtctactaaaataaaattaagctaattaattgaattcctatatttgaaatgaaatctggatttctcaattaattaatgcagctaactactttgtcttgcgtcatttactagtggttttttttctgtttcttgaatgggcttcgcaaaagccagagacactacgtgatttattaagtgcgatctc

SEQ ID NO: 129068 - DNA, 349 bp, Glycine max
  unsure (1)..(349): unsure at all n locations
acgatcatcagagtactttcgacacctattgtatgttgatttgaccaacgctgttatgggaatgttgcgacaatccttcacaaccttactgatacattctgagaggttggttgtcatgtgaccatatcgacgtccttctctatcaaaagccatcgtccatttttcctttgaaatgcgatcaatccatgttgctatggctggactcagctgacaaaatatttctaaattntgataaacaaatgtgttggcaaggagtgtatgctgcataaaattagttatgaataacaattctaagtatatatgaaacttaattaacgtgaccatcaaatattaaatcttacccaatttc

SEQ ID NO: 129069 - DNA, 380 bp, Glycine max
taaatgttgacctttgatgatttttaccttctggacagaagacttcctttcataaatttactctaccaaacaaaaaaatatgtgtatgcatacaaattctcaaaaatgataaaaaaagattctaaattcatgatcatattaaaataaaagcataaggtgttaataccccaaaagtcaaatacaagtttatagatggaaaaccaatcatatcttctgaatcaagtctcttagtattttactactattacatttatctttttgaatacaattaaaaccacaattaatacttatgactatctttatctctttgacttacaatgagatgtgcagcagcatgagcaaattggttgaatcattctactgtggtcagctatatggtg

SEQ ID NO: 129070 - DNA, 443 bp, Glycine max
  unsure (1)..(443): unsure at all n locations
cgataccctcagatccgctatgatcaacaccccagttctggcccttcccaatttccatgaaccatntgtcgtcgagacggatgcttcaggcactgccatgggggctgtgctctctcagcaagggcacccattagcgttcttcagcaagaacttcaaccctcgccttcttaatgcgtcaacctatgtgagggaactccatgctatcacatccgcagtgcgtaaatggaggcaatatctcctcgacagctccttcacgatcctcaccgatcacaagagtcttcgcgagcttatgactcaggtgattcacacgccagaacaacactattacctttccaaattgcttgggtttgattacacaattcaatacaaaacgggagccaccaacgttgtggctgatgcactctctcgcagaccaccggaaccaggcgagttgctgatcttat

SEQ ID NO: 129071 - DNA, 476 bp, Glycine max
  unsure (1)..(476): unsure at all n locations
gaaaactgaatcataattgaactgttcattgttttgaatttatccgacctactcaataagngcaaccgaactttgttgattctagttgatttatatacctagtatagaattgaaggaccattcaattgtctgatattcacgataataaaataagctttctgcattgacaatttatattgatattgatcactggaaaattgatgtggtatgtaaaatagtggtaattntgtaacagggggcgctaacaacataatttttaatattgtgtaaaaaaaataaacataatttttaataaattatttctacatatggttgaatttttcaaatgtatgcaacctactaagtttgaatcccgaagcatcgatgctgatgttaatatgtatgatcgactaaatcacatgcattgtgatattggtgtagagacactttgaagaaagtggtgtngacatgataatgataagaatgaataataatat

SEQ ID NO: 129072 - DNA, 472 bp, Glycine max
  unsure (1)..(472): unsure at all n locations
tgcagctttagccaatgactaccttgattttttttttgatagcccttnngagccttgtgtccctttccttgttttgaagctcactacaagccttaaatgaaaaaccatgatatcaccatatccttaaggaattctggagctttggaattgttttgggaataagtgtgggggggttttgtttcattggataaattgttttgttggctatgcttcacgatgtattttgcgccatacttgatgtacattgtatattggttaaatgttggacatgctgaatgaaatgttgtttctcanaggctatagagtaaaaaaaaaaaaaaaaaaaattcgaaaaaaaagacaaagaaaagcaataaagttgagtgaataagatcttaaatggcacaagaatgatgaaactcttggttctactcttcatatataaattttatctttacttctttttattntcttaatatgcacttattcccca

SEQ ID NO: 129073 - DNA, 422 bp, Glycine max
  unsure (1)..(422): unsure at all n locations
ctcctacattntatctctagcatgctttgtatgttggtctcgtccttngncacgggaagccggaaggtccatatcaccttcttaattgtacacatggggcactgcgcccccaaatgcgcaagtaagaagagataattttccgggttctcgtgtccgtaaaatgcattcatatcatgcatcgcataagcatctcttcataacatcataatgggcatatcctgcatttgtccgttatcatattctagcctcacattgtgcatgagtcatggcatcatcatgcgtatgcgttcaacaaactttgtgatctgcaaaattgcataccatttgttttcatgtttgctcatccttgcgttttcctctacaaaacaaaaacaaaataaggtggaagcgtgatacttcacactacattcttattttcatgt

SEQ ID NO: 129074 - DNA, 495 bp, Glycine max
  unsure (1)..(495): unsure at all n locations
gcttgaaataattcaacatcgcgatatattatgattcttnttatnncagnncacatttgtttgagttatattataccttcctttacacctgttgagaaacaatcatttttgctttctcttttgtttggaaaacggttatttcacactacttttttaatacatattctctgtatacttcttacataaatgtcaaatcgtaacagagaatatcagctgacttcttcaatagatgtataacgaatagaaacataataattcaggtaagcaagtaaatggaatatgtctccaataaatttatgccatttaacaatcgtttgtatttgtaaaatatattccgcactgattatcatttaccttttaatgacacaagagagaagcacaacanggaacaaatntgttaggataagtctaccaataaaagaagaatttctcgcattccaattacttaacctctgattagcttttgtagaatgtctcggtatgtcttatgtcact

SEQ ID NO: 129075 - DNA, 404 bp, Glycine max
atacaacaccattttgaatttgttctcttgtttggagcaaaaaagttgacatcggcattctgaatttaatatcatccttaatgtttccttgattgttgacaccaattatagtccagtctataatttccatggaaatgttgtgggcccacattgcttctacataacttggtgcaagacatttcaactcgaataaaatctcagcttcattccattcatgctctgaaaatattccctccgctttgcattctagatcacaccatagtatcgggtcccatgttctaaatatgtaattacatgaagaactaaattgcatagtgccattgatgagtacgctgaacttcaaaatcaacaccatgtccatgacactgttcaatctagatattatagaacaacataccgcaatc

SEQ ID NO: 129076 - DNA, 485 bp, Glycine max
  unsure (1)..(485): unsure at all n locations
gctttcaaccgttcttcgacgttctttattttttcttcatcgntcttcgatcttcaacgggtaagtacctcgaaccaagctnttcgattcattctatgtacccgtagtggtccacattgtgtttcgtgcatttttattctcgttttgtttactttntatatcccctgttgacgtgcttaagccattttacttaagtcatttctcgtttaacttaaaaacaaaataaatttccaccgaacgtttgaattgtattatccattaacttcggttaaaacaaattccgaccgttcggtcgtgtcgtaaccacgttggaaatcaaaaagaggtaaaaaataatataataatcaaaaagacatcttttagtaaaataaagcggaaaatcaatcggaccgtttctctttgggaattctcattcttaaccgaatngantaataactanagtgaaactaaggctaaaatcaactcgcctagtcaagctcgtccac

SEQ ID NO: 129077 - DNA, 293 bp, Glycine max
  unsure (1)..(293): unsure at all n locations
tctcacacgacctatatgctcccactcgttttctgcctttttttaaatatgccgggccgctgtaagcacatgtcactaggaaagaaaaagattgaccagtctacctcgttctcattnttttttttccaggtcatgcanttgttatctcaagttatttctcgtaaacatatntaataattttaaaaataaatatattttaattctaataaaaatttatggttatatttatttttaataattntttgttttgtgatgtgttctaaaaaataaaattttacttttatttttatact

SEQ ID NO: 129078 - DNA, 443 bp, Glycine max
  unsure (1)..(443): unsure at all n locations
agcttctagacattgttcttctgaaattgttctagnctttctttgcatngctnngacacaatattcatcagttatagcataatctattttctttggcttgatctcagaaagcaacctatgttcttgagaaaattccttgttaggaccttgtccttaggatcaccaatgatttgggactttggataatgtttccttagcaagtgtccaattggttctctgacctcttccggctgatggtttgcaaatggattggatgtaggttggttttgactggatgtagtagtatactaaatgatatcttctatctttatctctgcagaagactcatctagctctgagattatagtctcaagcttgttatcattaaatctcacatcaatggcatctntcatagttagagttntggagttatacactctatatgccttggatgatttagagta

SEQ ID NO: 129079 - DNA, 479 bp, Glycine max
  unsure (1)..(479): unsure at all n locations
catccaataccctgatgaggangacccttatgtnctttttactggtctgattcatgngcttccaaagtttcatggccttgcatgtgaagacccgcacaaacatttgaaagaatttcacattgtcggctccaccatgaaacccccagatgtccaagaggatcacatatttctgaaggcttttcctcattcattatatggagtggcaaaggactggctgtattaccttgctccaatgtccatcacgagctgggatgaccttaagagagtattctttagaaaaaaatttccctgcttccaggaccacagccatcaggaaggatatctcatgtattagacaactcagtggagagagcctgtatgagtactgtgagagatntaagaaactatgtgccagttgcccccaccatcagatttcagaacaacttcttctgcaatattgttatgaaggacttagtaatatggagagaagtatgatagat

SEQ ID NO: 129080 - DNA, 485 bp, Glycine max
  unsure (1)..(485): unsure at all n locations
gcttccattaccgcaaccatctatctatgatgnaatgttaataggaatttatttggattctaagtttgttgttccataaattactattattgttcataaaaaatatgtgcattgtgagtgaaccctagtttcccgtttgagattccataccatgattaatacggatagtttggattagttgtggtatggattcttgaattgtccgttcggacagtttgggaactctctntnttttacttcattcatagtgttagtgtttagctctactgagctttaaaagattggctaagattntgttaaaacataagcacttanacaatgaaggaaagctggagttgctgcacatgatgtccaacgttatgtcaaggaatgagatcgggctgcacaatgtacaaggcaagataaaatgtcaaatgaagaatngaagttgcaggatccacgatgtcggatacaatgtcctgacatcctgcccgagaatactggag

SEQ ID NO: 129081 - DNA, 443 bp, Glycine max
  unsure (1)..(443): unsure at all n locations
gacacttatantactaacctgaacatatgacattatgctccagcttgttatggagtttgtttatgagnattaatttattgtaaataggggaagttagaaactgtatagcagatccgtatggatctgattttgattcttattttgtatctgtaattactttctctaaaaataaataaatccatcatgtgtgttcttagacacggtctctctaaatcttatagctatatcataattgaaacacttaatagaagtgccaaaataagaagtggtgcatggaggtcacctatggctagtggctgccttggatggtggctgcacaacatgatgactggattcttgactcttgatcatgcccactggacatacgctcctaaacataccaacttgtggccagaggaaaagactaanaaatgtgtatatgactgatttgatgtaatttacaa

SEQ ID NO: 129082 - DNA, 487 bp, Glycine max
  unsure (1)..(487): unsure at all n locations
agcttataagaacanaatcgcctcaactttttctaatatgcatgtgaattangacgcatcaacaagaatcaagccaaggctattgtgcaagcaatcaatggggcaaaacacaccaaatgattatgatgatggatggctcaaattctcacaaaggtaaactcatcactttcaaattaagctttcaaaactatcatgacatgtagaggagaatcaaggatttcaagtcacaaaatgtcaaaaacttttattttcaaaacaattacccatttcttgaacatatcctataattcaaagaaaaacatgcaaagtcgtacatgcacacaaaattgacccaaaatattaaactaacaatccgacgaaactaacaacattaacaaattaacaaaaccaagaaaactagcagaaccaaagaacactccccccctacttaaacaacacattgtcctcaatgtagcacaattaanagaataaaaacaattaaatcatc

SEQ ID NO: 129083 - DNA, 337 bp, Glycine max
  unsure (1)..(337): unsure at all n locations
aaggttcatcaagtcaaggagaattatggaaggtgtcttcctgtctganggggcaaaagatgaatcgagtcacatcactgcttcatctactgccaaacatatttaagattgttgatgtccttgttacttccagtttcaccttgacaaagatgtcatggaccatgttgaaaatctaaattgattcaaccccatatcctgcgtaaaaattcgcaatacttcgactgtacatcattcgcatgcatccatgcttttcattggttgcattgctcattgcattctttccttgaaaaataaaataaaataaaataaaatgaacttatcaaaaagaaaaggacac

SEQ ID NO: 129084 - DNA, 447 bp, Glycine max
  unsure (1)..(447): unsure at all n locations
ccattctgnnntaaggntgttgtgatgatgtntgtgatgtttataggctgaaattgctgatagaaatctgttagagacaaagggtagaactaacctagggttagaaagtgagaatgtgatgttatgagtggaaaaagagtgagactttgagagttggaggctaagtctgaattctgtggtcaatggaggttaaagtgagttaatactagcttgaaatgtcatttaggacatgtgagagaggttaggctgagctatagagaaaaacaaatgaccaaagtgaacaaagagccattgctagggcaaagttgggtgttgaagagtcaaattttgattcggtgagattttaggtgtaaatccagtttgaacaagtctaaatggatgttatggactggtgtgaggtgagagttngcctcannattacctcattctaaattcacctttcaacct

SEQ ID NO: 129085 - DNA, 386 bp, Glycine max
tttctactgcaaaaccctttgaactacttcacatagacttatttggtgcctctagaactatgagtttgggtggtaattactatggcttagttatagtagatgattactcaagattcacatggactttgtttttgataaccaaagatgaagcttttgatggtttttgcaaacttgccaaggtcattcaaaatgaaaaatggtcttaacattgtttcacttataagttatcatggaggtgaatttcaaaatgagtctcttgaaatgttttgtgaagaaaatggaattcaccacaacttttctaccctaagaacacctcaacagaatggtgtcatggagaggaataatagatcccttgaagaatgagctatgactcttctatatgaaac

SEQ ID NO: 129086 - DNA, 468 bp, Glycine max
  unsure (1)..(468): unsure at all n locations
agctggtgaaaagaataataatatttttttgttttttaattaaantaaaataaagagaaaccaacataaaattaaattaatcaattaagacagacaagatgagagaagccaatattagaaacaaaagttaattcagaagatgagaatgttgagagagtttaacctaccataactactcttgatgtaatattaatgatttttctctatttaaggttattctaattatcaactgcatctactcatatactctaactatgattcctcaagtgaaagagcctaatttatttattttctctgtctaatctctttaagaggtaaaacatttaaattgcattaagaatagggatatatattagattaaataaaatcattatatccctagagatgaattatntagatatcattttccagttctattagagaataacacttcccattgctacccctaaaacttgcatgcatatgagt

SEQ ID NO: 129087 - DNA, 424 bp, Glycine max
  unsure (1)..(424): unsure at all n locations
tattagtgcaccacctaagccattattgtgtgttccatcttcttttgccctgaattgcatcacaagattataagattaatttggtgataaaaaagatcttaacagcactgcgttagttagctagtttgttaggttagttagattagttaagctttctgttgtaactacctatcaagcttctccatcaagctgttcatcctcttgtatatataaacttatgctaccatttaataaagcttgagatgcaattntgatcatcttaaacgttttcattgcacgtttctcttgcatggctaaatatatctttgatatggtatcagagctcttctgatgaagagctctgctgcgcactcacctcctttntcatacttctctcaactgtaatcattcatcatgaatgaaacaacactcagcaacatggaaa

SEQ ID NO: 129088 - DNA, 372 bp, Glycine max
  unsure (1)..(372): unsure at all n locations
gcaatctggtatgcttagatttgtctggcagatccattcgactcctattggtcgactccattaggtacatcgcgagctgccaagtcatgacatttgactattgacaccatctcattaatggaggcagtgcaccacttcacactcatgatagctacctcaaaggagagtggtgcagcctcagaatgacattgagaccattaccatctgagagaccgtcgcctatatcataaccgttcgtccaaacaggggttctcctatatcttctaacccttccttcaactggagtntcataattaataatatgagagtcattacgattagtatcagtaccctgagaatcattctcaacatcttcattttgatcctcggttc

SEQ ID NO: 129089 - DNA, 384 bp, Glycine max
cctgagcaatactttactttggagtaaaatatcaacgtttatatacttgacataacatattgccgtaattctattcaattatcaatgatccattatattaatgaagttcaaaatagattccttcgtttctataataaaagcatataattctaaggcagatagtttcgttaatataggtcttgctcagtcagtggtctgggatgccatggtgccttcaaaaaagaggacacatgtaggtcgtccaaagcctttgtatgttgagaagctcatgagagacctatgcactattcttcacgaacaacagtcttatttttctgcatcttctgacgaggatcttctttttgaaagtgacacgccaatggtatcggtagagatacgacatgg

SEQ ID NO: 129090 - DNA, 321 bp, Glycine max
atatattgggcgcatatttaacactgtcgaagactaaattttatatattgatcattcaaggccgcatttgtgagccatacgataagtcaaaaaaatattatatgacaaatatgttcatttgctgacaatttgagatagtcacgttagacacacatattataaattttggaaaacatttgtgaagactacactagaggctgacttcaatggtttggatcatgtttaatatgtcaaaccatgtctactctgactaagaaacaactagacaaatgatcatgactaataccggcctgtgaatgaacatttgagtttggcgatgat

SEQ ID NO: 129091 - DNA, 467 bp, Glycine max
  unsure (1)..(467): unsure at all n locations
aagagttgcaagagacatgtttgtgttatctcnttgatttgtaattgcagttacctttggttgtcattccctgcttaaacatctcagaactttgttaatgagatcctcattaggaaacatctttcctaatgatgcaagatgatttactatatgtgtgaatctcttttgcatatcttgtatggtctcattntgattcattctaaaaatttcatattcatgagttagggtgtttattctagatgtctttacatcagttgttccttcatgggttacttgtaatgtatcccacatttcttttacattcttacaatttgatactctaaagtattcatccatgcctaatgcagaggtaattatgtttttggcctttaagttatattgtacccttcttctttcttcatcccattgttccctgggtttttctatagttgcgtttcttactaccattgtanggatgtaaggaccga

SEQ ID NO: 129092 - DNA, 326 bp, Glycine max
taaactagatgcctcggttaacctggtaacccatctggccatgtattaaaaatctgcacctgtcgccaaactttgtggtttatgctcctctgccgaccaccacacatacctttgcccttctgtgcaacaatctgaatcaattgaacagcctgaagcttatgttgcaaacatctacaatagacctcctcaacctcaacaacgaaatcagccacaacagagcaattatgacctctccattaacaagtacaaacccgggtggaggaatcatcctaaccttagatggtcgagtgcttcacaacaacagcaacaacaacaaccttattttc

SEQ ID NO: 129093 - DNA, 215 bp, Glycine max
tgacgcgcaaaagagagactcgaacctctaagaaaactgaaacgataatgactgtttacacagatgtccgacagattgccgtatatatcgagacgcttcatattgacaaatgaagctgggtggaaattggaacgacaatacggttttactcatatgtgcgattgagtgccgaatatataaagacgctcgatattgagagcagaaactctgagcaa

SEQ ID NO: 129094 - DNA, 409 bp, Glycine max
  unsure (1)..(409): unsure at all n locations
tgtataacctaccatgttctcatagtgatacactggaacgtgtctactatcagtgtgatcatctccctttccatcattgggcgcgccacttggtgatgcaatcctaccccgcaagggcattggatagaagactccaagtagattgggccagagatgcaagagaaggccttatggttctcatgagccttanggtaaatttcgggccaatgaactaagtatgagcccacttatctgtgtacatattatattaaggtttcattattcttgggccgtgtatctagggctcaataatgtaggtagggtaccctagaaatgtacgatttttcagccctcgtattttagggcacctagactagatcttctgtattatgggtagcattcggcatttcacatgccttgagtgaatatt

SEQ ID NO: 129095 - DNA, 297 bp, Glycine max
aaggaatgcattaaccatatcctggtgagagtgtgatccttaaattttgagagaaatgactatcatgcattactgactcttgagtgaatctgtgaaggatggactaaatgcatgaaattgacgatgataaatgccaagtctgattgtgattaccacttatccaaaaagttgaccatgtgcttgtatgtattatcccttgttcccaggattgactgtatgaattattgattgactgaaccctgatcctttacagtgttatcttcttgctccatgaccaccttgggtgaaagcatcgtc

SEQ ID NO: 129096 - DNA, 364 bp, Glycine max
  unsure (1)..(364): unsure at all n locations
tccctatgctgtccctatatatgtaaaacagtcccacaatcccaatcttacaaaatcatattcatatgtcatcggggcatttcaccgagcacttggtgggcgcatgtttaagcataaatagcaagagaatgggggcaatgtggcatgccccattggttcaaaatacaacatangcctaaggccatcccctacaacccctcaactctaacaaatcaagcataataaaccccaaaactgccccacaaatatgagcacattctcacaatttaaagcaccaaaagatgaacaaaatgcaccaatggaaagctaaaaactcaaggattgaatacttacttgttggagtgagtaggaatacganaaatga

SEQ ID NO: 129097 - DNA, 436 bp, Glycine max
  unsure (1)..(436): unsure at all n locations
tgcaagggttgggcacttttcatgagtctcgcatcttatctcatgaacagagaggcgtttagcgcgatgtttgcgcttatcgaaaagactgtttttcagaaaatatttttctatgttattgttcaatcctttttccatgaaattgaaacccttatgtgtaacatccaaagattagctgatatactactatgtacatactatatagaatgttccaaatgatttagatgcatgataataaacaaagataatagaatttaaaactgggttgcctcccatgaagcacttcttttacgtcattagcttgatgcttttacctcactgggtgatcttatgttttggttcctactntcagaaccccttccattacctgtaagcaaacattgtgttctggagtatgcttgtcttcaacaaataaatcanaatcaatnttctgatc

SEQ ID NO: 129098 - DNA, 429 bp, Glycine max
  unsure (1)..(429): unsure at all n locations
ctgcattgcaacattcagattatttgtcattgcacccttatagaccttacctaanattgaaatccattaataagaattcgttatacatacagattcaatcaagcttggacaatttanataaataagtggatgtcttcaattggttaggcaaggcaaagaaccaagattttcagtttttaactctaggaacacttatccaattccatgttatgctagtgtgatcctgtatctgcattgatagtaagtacctaaagtcacatgcgctaataggctgattacatctttcacaatgccatgtcccatctgcgttattagtcacctttttgttacattgtctattccctatcttgagagggcaccctgnataacagaagttatcaaccttaatgtgtgaaacaactacaaagacagaatatctatcgggcttct

SEQ ID NO: 129099 - DNA, 363 bp, Glycine max
tagtcacacacgcttgacatcatgaaagtgctcatatatccaacactacatacatgacatgaacataagattaatgtctaataaacatattaataacatatttacattcatgatccaatctatcatgtttcaaacacgaaaattacctgtaattaagtaatataaccatacaagctgttggccagtgctctgagaagcatcatttaactgttcatacatatgcaccagcgcggcagctccccatgcatatctcccactcttagccaagtttcgaaaagcgtccaaatgaactacatgagcatgtgattcactctcgttagcaaatagagtgctaccaaccaagtggttgagattcgcatgatc

SEQ ID NO: 129100 - DNA, 405 bp, Glycine max
  unsure (1)..(405): unsure at all n locations
ctgcagctctatgtagtgctcaggagcttttatntatttgtctatgaaanagaaagcgcgcgtgacactgtgttgtaactgctgatcacatgcgaaacctgtgagacacactataaagatcaacttatctctctcttattgtccttcaatcatgtgcccgactctctctcactctgtgccttcattgaagcgtcttatacaaggcactctcttagaggtgaagcttctccgtccatgggttattccctagtggatggagtctcctctcaactctatggctatatcatactgtgcatctccatggttgaacatcaccactgaaggaccctattgaagctcaatgatcccccatgctagaagcttctcgagctagccctcatcactctggtgtgcgattagtgaaga

SEQ ID NO: 129101 - DNA, 362 bp, Glycine max
actaaaccgtacacccgtttatttaaaagttacataacaagacaaaaccccttcagtcaagaacagtaacattaccgttcctttactctgtcacatggttgtcctttacagatactctattacagataagctcaatgtctaatcttattgcaacagttaagattcctgccccttttcttcttttttttaataaaaaaacgttcttctttgggcatgatacatttgtcatcaactctggcttgctgttgaatcttacatcgtcttcatcttggatatctccagaacataaaatgtcagatgaatcttgcattgtaagattattatacaggaaatgaggagtatgttgaccatgagacacacct

SEQ ID NO: 129102 - DNA, 489 bp, Glycine max
  unsure (1)..(489): unsure at all n locations
agcttctagccaaatggacttaccttanattatttcctttgatagcccttntgaaccttgtttccctttccttgttttgaagctcactacaagccttaagtgaaaaaccatgatatcaccatatccttaaggaattttggagctttggaattgttttgggaataagtgtggggggtttttgtttcattggacaacttgttttcttggctatgcttcatgatgtattttgggccatacttgatgtacattgtatattggttaaatgtttgacatgctgaatgaaatgttgtttctcanaggctatagagtcaaaaaaaaaaaattcgaaaaaaagaaaaagaaaagcaataaagttgagtgaataagatcttaaatggcacaagaatgatgaaactcttggttctactcttcatgntttaaatttatctntacttctttntattttcttattnntttcttaatatgcacttatttccctttgctctctat

SEQ ID NO: 129103 - DNA, 270 bp, Glycine max
acatgaaattattgagtttacgtatttgttttacataatgaaatggtaaaagtgacataccattcctgtcaaaaaaaaaagttaaatatcattatagtgccggattttgtacacttccatgcatgaagagacatttcaatgtataaatccagtggccattttgtcctttcttgacaagtgatctcgttgtcattatgatgacaatcttaaaatactatttaaacttggacttatgtatgttttcaatcctttaatacgatgaatcttaat

SEQ ID NO: 129104 - DNA, 461 bp, Glycine max
agcttcaacattcaacttcgagcgtcttttatattatactactcaattagacatccgagtaaaaagttattgtcgtttgaatttgctcagagcttcaacattcaatttcgggcgtctcgatatatgacgggactcaatcagacatccgagtaaaacgatattatcgtcttaattggctcagagcttctacattcaattttgagcgtctcgatatgttacgggactcaatcaggcatccgtgtaaaaagttactgtcgtttaaattggctgagagcttcaacattcaatgtcgagcgtctcgatatgttacgggactcaatcagacatccgagtaaaaagttattgtcgtttgagttggctcagagcttcaacattcaatgtcaagcgtctcgatatatgacgggactcaatcaggcatccgagcaaaaaggtattgtcgtttgaattggctgagagcttca

SEQ ID NO: 129105 - DNA, 323 bp, Glycine max
  unsure (1)..(323): unsure at all n locations
tagtaatgacccactaacctagaattgtgattacttattgccattaacctanggaattaaaaaaaacttaatggctgagtgtaactgaaattgtggcaaccaaaagtcacccccaacagccaacaagtcatccaccatttggtctcccaaaatgctgatgcctatgttgccaattgtgcccttattacaacttgaactaaacctaactaaagcccttttagttgattaacccaaaacatatttttggtcagccaactgtacaaggattgagccattatttatacaaactaaacactctaaaattgaaacaaagtggtgtcatt

SEQ ID NO: 129106 - DNA, 418 bp, Glycine max
agatagagagaagttgtgctagttcctttaatgttcaagaagaagagaatgtgggacacccctgcaccaaatgtgacactccactccgagatcatgtgcacatcataggtttacaccactttggagcattcggtggatggaacaatgtgttattggcgtgccctaacgatcgcatgagcacatgcaggatctatgggtgtggttcaatgacctattgccctggcccatatgcaatgccttaaatatggaagggtgtggtatctgatgcagggtgctataagaagataagaaatcggcacaccgctgcaccatatgtaacactccactctgatatcatgttaagaattatatgtgtagccaaactctggagaaattggtggagtgaaaaatgtgtaattggcaatgcctgccctctatc

SEQ ID NO: 129107 - DNA, 242 bp, Glycine max
cgcttgtggttgatttaaggatggcctttgggttgactgtgttgtgggtaatgagaagggccagtattggttgagtaatgatgctgttgagctggtgggggattttccatgtaggaacggcagtcgcagcatgtgtttctccttcattctcaccctcttcatttgccccagttttctcattcatccaagcaggatgattaaatttgcctcttttcatacccactgtgatcctttcgtcagcg

SEQ ID NO: 129108 - DNA, 284 bp, Glycine max
tctgttaccttgcattattgggaacaataattttaagaacgccatgctagacttatgagcatcagtgagtgtgatgcctctgtctatttttaataaattatctctaggaccttcgcaatccacaaatgtggtaattcatttaggaaatagaagtgttgcttaccctgcaagcttcatagaggacgtactatggagggtaggagaacagattaaccgtactgatgttgatgctcatgaaatggaagagggattctcccagcgttcaatcccaattattttacgca

SEQ ID NO: 129109 - DNA, 381 bp, Glycine max
  unsure (1)..(381): unsure at all n locations
tctgatcatcatgncttgatanatgcaaaaaaaaaaaaaactagggcaaatgaagagggtgagaataagggagaagcccatgctgtgactgccattcctatacagccaagtttcccaccaacccaacaatgtcattactcagccaataacaaatcttctccttacccaccgcccagttatccacaaaggtcatccctaaatcaaccacaaagtctgtctaccgcacttccaatgacaaacatcacctgtagcacaatccanaaacaccaaccaagaaatgaattntgcagcgagaaagcctgtagaattcaccccaattccagtgtcctatgctgacttgcttccatatctacttgataattcaatggtagctataaccct

SEQ ID NO: 129110 - DNA, 428 bp, Glycine max
  unsure (1)..(428): unsure at all n locations
gactctcgattctctggaacttgcttaactctngattctgtggcttcatcaaaataaacnnggatgacattgcttccacaaattgtgccttcatgtgcgagttgaagtgtgtcccacatctccttatcacttgtgcaatttgagattctaaaatgttcatctattcctagggcagaagtaataatgtttttggctttaagattatattgaactcttcttctatcttcttcagaccatttatctctaggtttttctatttttgtggctgttgatgcgcttccatctattatggagggaacataatgtcctatttctatggcttcccaaatgttgtagtctatggcttcaataaagaattgtcattcaagtttctagtagtggtaacgctcaccattaaagatgggtggcctatggatgggagttacttc

SEQ ID NO: 129111 - DNA, 371 bp, Glycine max
  unsure (1)..(371): unsure at all n locations
gctgctcatgaagatcctatacagcacctgagtgggactggnttgtactcactacctgagaacacattactacatggaaccagtgcataagtgcttcttaaggatatattnttctctcatgaagatggatcagtacatcaaggacatttgaaacttcgtgcagaaggaacaagagactntacttgaagccttggaaaggctgcaagagataattagaagtttctcacatcatggcttttcacctcanaggctagttcacattttctatggtggagtgtcctcacacaattggccaagtttggatgctacttgtgagggtaatctcaatttaaaccccttactaatgacctcaagtgtagaagcaaagactt

SEQ ID NO: 129112 - DNA, 130 bp, Glycine max
  unsure (1)..(130): unsure at all n locations
ggtcttcgccagtgaaaggatcaatgggggttcgatatgtgcaaatttgatcatcccactangacgactgataaaactggggcaaataaagagggtgaggatgaaggagaaacccatgctgtgattggca

SEQ ID NO: 129113 - DNA, 210 bp, Glycine max
aaactaacccaaccattttaaatattacaacgcttataacccaagtgtattataagggcactcaaagcctggccctatacatatttggccaaatgaaaaacactgacgacataaaaaaatgccactctattaaaattactaaggtaacgtacttatttcctcttaagccacaccaaatgtgataagccaggctcgttattctgaattgat

SEQ ID NO: 129114 - DNA, 347 bp, Glycine max
attcgattaatattttttctaaagagaaatgtccaattaattcttttctattattttatctaaatatattttcgatcatcttattattatcttgcctctttttggttttaaatgtagctatggcgtgaaagatcggttgcattttattctatcacagatttaaagacattacaccgttaatgatcggcggaaatctattttagttttgattacgcgacaaaatggcttaagtctatggccctagcacgtcataaaggggtatggacagccaaccaaatataaatataagcacgcgatacaagtggggaccacttatggcacacataacgaattgaaatgttctattt

SEQ ID NO: 129115 - DNA, 470 bp, Glycine max
  unsure (1)..(470): unsure at all n locations
gaaattggcatctgaagtctatgagttctgtgcagataagnnctgtaaagcgtgangtggtgctgaagtaaaagatgcacggatgctagttattgtgtaaaggaagagggaatatcagctactctgagctnggtcttccttgtctctggaaaattaaatggttggtcattngcattccaacagttctttatgatataagctaagtcaatggccagtcttangttttcataggaggtaagggcatcagatcccactcccctcgatctacacaaggctgtgattaaagttgggaagcctaatcgagaagagttagactgagcgatcatggtcatttgtccagagatcaaaccgccaatgttcatgtccatccttgtgattaagccatagaccaacctagctctgntctgtgttcaaattgaagtgcgggaggtaggagctaggtttgagtacgagaagacgctccatgtctg

SEQ ID NO: 129116 - DNA, 436 bp, Glycine max
  unsure (1)..(436): unsure at all n locations
aataaccccatatgtgattctaaaaatgaaatgaaatcattcccaattctccttgtgatggtctgattatcaacttcccttggtaacaaacaacgcatgagaaatcattggactaaagaatctcatggttcttcaatgagagtccacgtgaattttaactatattttgcatcatcatagacctgtgatagcccaaccggtcatgtcccacaacaaacttatatggattcataaacttctagtttaggatagcatttcaattgtactttgcttgaaactaaagcaattgtaaagtacaactttgttcttccaagtaagaatacattagctnttccaaaatcttcaattatatgtgtagtactagaaattatatactaccattgactgtgtgcattactaaacaagaaaattttcattattgctcatagaaacacata

SEQ ID NO: 129117 - DNA, 177 bp, Glycine max
caccccacgggggggggggaaaaaaaccccacccccccccaaaataggaaaaagggggagcgagagaacggcaacccaaggacgcccccagcaaagcaaaaaagagccggagaacaaccaaacagggcaaccgcggccaaaaaaagcaaaagccacggaccaaaaaaaaggcgggaa

SEQ ID NO: 129118 - DNA, 458 bp, Glycine max
  unsure (1)..(458): unsure at all n locations
gcaagcttggaggaagaaggagatgaatgatttatatgtatagaagagcacganattttgtgctctaaatgagctctgaaatctaaagtttaatattcaaatgatcaaagttacaaaaaaaaatgaacacgcatgacctctatttatagcctaagtgtcacacaaatttggagggaaatttgaatttcaattcaaatttcacttgaatttgaaattgaatttgtggagccaaattttggagccaaaatttcactaattatgattagtcaattntagctatggtttagcccactaatccaatttgtggagccaaaatttcaataattatgattagtgaattntagctatggttcagcccactaatccaagatcaagtccaagattctcaactaagtatgcttaggtgtcacgaggcatgtaaagcatgaaggacatgcacaaagtgtgactatataatg

SEQ ID NO: 129119 - DNA, 325 bp, Glycine max
  unsure (1)..(325): unsure at all n locations
cgcttgtatcctanggaggggattcgagcttaatgctgatggtttttctttgaagattctgaggaagaacatgactactctagctcagacatggagcgttctttccttttctaacctcattcccacctcacacacatctgatgtgaccttggacaaagccaaattgatttatgggattattatgaagatggacatgaacttggggtacctcatctcccaccagatctctctgattgcacaacatgacacatccaaacttggattccctgccttgataacagctctatgcaaggccagaagagttcagtcaaactctatatccctg

SEQ ID NO: 129120 - DNA, 435 bp, Glycine max
  unsure (1)..(435): unsure at all n locations
gcaagctnggagagatatggcacagactctctcagttgtcttttttggtaatgtaaaggaactactggaagcagagcctacaaaatggttagcacatagtgctgcttcttcttgtatgctttgcggtgtgagatttcatcccatcatgtgctcccgtcatcactgccggatttgtggaggaatatattgcggtgagtgttccaaggagcgggatttgtagccttcacaattccgattttctgacccccaaagagtatgtgatgtatgctgagtccgacttgactctgcgcacccttatttgatgaatcatgtgagtaatgctgctcagttgccaacccatgacctgacagatctgagcactgtgagatcgtggattaattctccttgggggcagtctatggaatatgaaatttacaaggcaactaacactatcaa

SEQ ID NO: 129121 - DNA, 249 bp, Glycine max
gatatataagataaagcaaggatgtgtatccggatatatctgattgaagccagacggatatcacccgactctgtagactattatatttggagctggaagttacttttttattgaccatcgcaccctggttgaaaacctggtgaaccctaaaagctcgttctgggagtacttgtctagtacaaccagtcgacctggataaactgacctgatcactgatcactgatcatgaataacacgcatctgtcttct

SEQ ID NO: 129122 - DNA, 440 bp, Glycine max
  unsure (1)..(440): unsure at all n locations
cctggctcgcctgggcgagctgagctcgcctgggcgagctgggcggcaagcatctcccctattttgctataaataggggaggaagtgaagaagaaaagggttcagccccttaggcacttctctctctttcgaatttgcttaggaaaattgtttccgtgaagaanatccaagccgaggcgcttccgtaacgtttccgtgagaaattatgcgaagattctcgaccgttcttcaagattcatcgtgcgttcttcgttttcttcagtcttcaacgggtaagtacctcaaactatgctttttcaattcattatatgtacccgtggtggtccacattgtgattcatgtattttcattctcgttttcatttaccttttatacccctntttgacgtgcttaagccatttatttaaggcatttctcgcttaatctaanaataaaataaa

SEQ ID NO: 129123 - DNA, 466 bp, Glycine max
  unsure (1)..(466): unsure at all n locations
gtgtggcctagtgacctttattgagcccatctgctanggttttaacgatggtcacgttactgttcacaaagagagcattgtaaggtttcattttcaatctttggggttactgttcacgtgcatggtactgttcacgtagcaactccattttcgttttctgcttcaaattccagtttcgctgtctgcttttaatttcaatttcattgtcatttctgtcttctaatttcagttcgttgtctgttttagttttcgtttctgctattaatagaaggatgaatctctagtgttgttttctcttgaggattaagcatagctctctttgaggctttgttattaatattaaattctgataagtttttccccttcaccaattattctgtattngttgctaatattaattcatgcatgcttaatgttngattagttatctntgcgcttaattaacgctcatgcctaatggacatgt

SEQ ID NO: 129124 - DNA, 336 bp, Glycine max
  unsure (1)..(336): unsure at all n locations
ctctagagtgtggggatgtgctcaaatatgtggggcaattttggtttgttttcttgcttgattgggttggattgagggtttgtatgagatggccctaggcctataatgcattttggagcaatggggcatgccacattgtccccattctcttgctattaatgcctaaacgtgcgcccaccaagtgttcggtgaaatgcctcaatggcatntgcgcatgattttgtagggaaataacctatgggacaatttggtttgcgcgtgtttgctgtctttggagcatgtattcagtttcataagggctagaatgattgcccacagacaccctatgcctaggaa

SEQ ID NO: 129125 - DNA, 309 bp, Glycine max
cgcttggctcgtgcagagatctctacagagagatatgtccatgttctatagagtgttgttgggcgaagacctgcagagaactgagcttcaagaggaagtcatcctaagagcttgagatgagtttgtgagtgattgtgaggttctagaggtggaggagacatcctaagactcttctctttgttgtaaaggaagcttcccagatatggagagctaaatccactgttgattcttccttgtaggtacttgatgtaaatacctgtatatccatttaatgaatgtttggtgttcactgtgctatcagaacttcat

SEQ ID NO: 129126 - DNA, 427 bp, Glycine max
  unsure (1)..(427): unsure at all n locations
atggcttattccctagtggatggtgcctcctctcacctcttctcctttgtcttccactgcatctncatggtggaaaatcaccattaaaggacctcattgaagctcanagatctagcctccatagaagccccacaagcaagcttccattaagtggtatcagagcacaagagcttcaagtaggtgcttcttaaacctccattaattntttgctttaccttctcttccattgttgtttcttcatttttctccatgtatctcctcacatgtcttgtgataaatgtttttaacatgattctttagagtttccatcgattaaacttgctatagaagctagatttgattttctatggttcanatttcttgttcttgttcttgaaccatgaattgtgttgagcttaagttcctttgagttttgtctggtattttt

SEQ ID NO: 129127 - DNA, 370 bp, Glycine max
gagcatttcttggtaaaactaactttccaaatgtttgccttcgcatgaatggccccgatgaagcttgcctcatagatgtccatgaatgacaaggcggccgaaggaactagttccgctccggagtatgacagtcaccgctttatgagcgctgtacaccatcagcgcttcgaggccatcaagggatggtcgtttctctgggagcgacgcgtccagctcatggacgacgagtatactgatttccaggatgaaatagggtgccggcagtggacatcactggttactcccatggccaagttcgatccataaatagtccttgagttttatgccaatgcttggccaacagatgatggcgtgcgtgacatgagatcct

SEQ ID NO: 129128 - DNA, 440 bp, Glycine max
  unsure (1)..(440): unsure at all n locations
gctntccacaagtcctaaatacatttanactantattatctcactntagaccccaattacactaaccccgaatttagtttctctaaccctcanaatctcacagttttctacctacaacattgtcattctcacatttaaccctaagttaactntccccttcatgtctaccagttttccatcagcaatttcagcacacaaatatcgcagagcatcatcataaaaccctaaaacagaatgggtaattttggctcacatcaaacatgacaagtttagcatgctttcaacaaattcctttataaataacaaccataaggcataaacttagtagaactacccatcatatcccccaaaaacccaatacccacgaaaatcatgtgagaagaagtctacccaaacctgaaattngaagtcccataacgtagaggtgcgcttcacgactc

SEQ ID NO: 129129 - DNA, 467 bp, Glycine max
  unsure (1)..(467): unsure at all n locations
ctaagcttctatggtcttgtgtcatagtcatatttagacatgtgtgttgtccactttattgtgtcactttccatgcatcagtttttntggataaaattgccctcatataaaaagggctaggagactcttcggtgttgttggggcaacaaacaatttatttgtgtgatttcgtttcaacaaccttaaaactttgatgcaccttcatcacatattggttcagtgcatttttgaccgcatctttactgtcaaaatccatgccaacatataattcttgtccaacattaaaattcgttggcatgtccagaccacaaatgtcctcctcgtccggatgactccaattgatattattataatgcatagcatcattccaaaatggattttgaatttctggtacacctaatantttataaaaaaaaatcacgtcaacaaactactcctatgtagttaccattaaatacaantctcat

SEQ ID NO: 129130 - DNA, 482 bp, Glycine max
  unsure (1)..(482): unsure at all n locations
agcatgttctcgcagccttaaatgtttatatnncttatcgngngcgctnctatggcactcactatgttgtcttgtatgcctacattttatgccttcaatttgcattcacaatgaaactcaattgactgtacttttttctctacctttatacttcatttcggtcttgctattgcaccttcaatccatttactccctaacttactaggaccagtgctgacaatgttctaatgtttaagttagattcatgccaattttagggacaaaaactgaactttcactctatgcatgtgaaaatttaaaactccatgagagctgcatagtgcatatcgattccttccctcttgccaatgtggagtcaaactgaatggtaggattagtatctttgttggcttcgggtaattgaattccaggaattagctctatttctctatacccttctctggtttctatagtggacacgcaccacacactctctaccacgt

SEQ ID NO: 129131 - DNA, 402 bp, Glycine max
  unsure (1)..(402): unsure at all n locations
ttcttcaacatgcactatactttctggttttccaatcttaaggatgttttttcctacagaggatgggtctgtacttcggtgagctgcctaacgtctctcctaatgaggtgcagactgtatttgtattgctattatctctgtattttcagcacacctagcactggattacatatataatatattgatctttgctgcgcaaaaaaaaaagacaactgagtttgtaactaaagtaagaaactctntgaacagagtaagagtttcagatttacttctcaacacataaagccaagtaaaacgagtgtgggcatcaacaaatgttacataatatctgttacctgtgttggacaagagataatacccccacagatctgtatatatgagttcaaagggagtggaatattc

SEQ ID NO: 129132 - DNA, 423 bp, Glycine max
  unsure (1)..(423): unsure at all n locations
ggtttaaggactaaatcccacattttattccttttaaattgtttcaattcatcatgcatagctaacaaccaatgttcatcatgcaatgcttcatctatgcttttaggttcaatcttagaaacaaaagccatgttattgcatagaattctaaatctaaagcgagtggttactcccgtagatatttcacctatgattttgtccaaggagagatctctttgtgttctccattcctttgggaggtctctangaggtgtggcagtgatttccttgctntgatcaagatccttatccttggattcatcttcaagtgcagtgtgcttatattaaaaacctacatcttcatctttcaaagcattntcttatacaagagaagtagtttcatcacaaacaacatgtacagattctttcacacacaatgttctc

SEQ ID NO: 129133 - DNA, 490 bp, Glycine max
  unsure (1)..(490): unsure at all n locations
atactatcgcttatgatcgaatcaagatgattcanagaagttntgatgattttaaaggtgttgacaaaatgctcaaaggtcaagaacacttcatgataacaagatgatgatctcaaagaatgagttcaagatgttcaagattgattcaagaacacttcaaggtccatgacgaaatttgatttcaagaatcaagtttcaagattcaagttccaagaatcaagatcaagattcaagactcaagattcaataatcaagagaagacttaatcaagataagtatgaaaaagttttttcaaaaactgagtagcacatggatttttctcaaaacttgtttaccaaagagttgttactctctggtaatcgattaccagattgttgttatcgattaccagtatgaaaatggttttgaaaaaaagtttcaactgaattgacaacggtccaattgatttcaaaagttgaatcgatacaatgtgtggtatcgattacagttg

SEQ ID NO: 129134 - DNA, 254 bp, Glycine max
aactaaacgattcctcgcaattgatgatgtaaatatgaactggaatcagcgaggttggcattttacactatttcacacgaatggcatggaaacatacagatgtgctacatttaaagattgatcagctgacaatgtttatataacccatattcatagcaaatactgaaagtcagactaaagatagtagtactcatgagacatttcatcaagcaaaaaataatcactgtccaaaattaataacattaactaccatg

SEQ ID NO: 129135 - DNA, 334 bp, Glycine max
  unsure (1)..(334): unsure at all n locations
ctcactgcctaaganaatacaaatatatctatcctcacataatcacatgctcataacaaaacatctcaagtacaacacaacatctctcacacacaattcattacccaccatcacgtagcaagtcacaatgatcatcacacagacgttatgcaacatatatactaagactcaatcctatattgaatgtggtatcttgtcagtgaaaaataacactagggcaaatctctccaccaaagggaggctttcttcacaacatctgaatttcccaatccccttcagcctccatactttgatttacaaacattgcaccaaagaatcccgtcatggttttaaa

SEQ ID NO: 129136 - DNA, 478 bp, Glycine max
  unsure (1)..(478): unsure at all n locations
ctggatattttactattatgngngngcttcngtatctcntcctgtttaaaaaggtgataattcactcctcatgtgttgtttatgtttggatcatgtgatgatcttaaaccttgtgtttgtgagagcaaatggctaggtgaattactttaagaaaccttgtgatggaggactccgagacacaatattttgatatgatgtaacattggaacaagagtttttattttatttgcatgacgtatcaaacatgtcattttactttatttgataaacttgaacagtcttgttttaagtcataaatatttctaagaaattntatttggtaacagtgaagcgaatgtgagcattacccacgtcgactgatttacgattntattgaataaaatcgatttaattagattccgcatcttatatactgttgttttttcatttatatgtatggtggagtagaaggatgattctaagtggtacattaacgatg

SEQ ID NO: 129137 - DNA, 164 bp, Glycine max
agaagctcacccccacgccgcggaaaccacacaaagcaaggcccgcaccccaggaacgaccgcgcacgcacccaggagccaacaggcacgacagcatacgcacgaacgcgaagcaagaccccgcgaccagaggcgagaagggcaactggcccacagaaacaaga

SEQ ID NO: 129138 - DNA, 464 bp, Glycine max
  unsure (1)..(464): unsure at all n locations
catgcaagcttgaaatgaagacatgtcggaaatttctttttatatccaaagcagaaaattctctanaccttcaaagaaggtagagagtaacaacaacaccttcacatgctttgaatatggaaagcaagttcacatcaaatctgaatgtcctaccttcattagaaaacaacttgttgaaaagaaaggaaagaaggacagaaaacagaatatatcctacatagcttaagaagacaatgaatctacatcctctgattcttttagtgaagaggaagttgaaaatgtatgcttgatggcagactcaatggatgactccttaaccattgaagaaactgaggtaaatccataatttgaagaagttgtggaagcatntaatgaaatacatgatgaagcacaaaggcttgttggttcagataataagctgagaagctatctanaactacatatcactaaattggcttcaacac

SEQ ID NO: 129139 - DNA, 368 bp, Glycine max
  unsure (1)..(368): unsure at all n locations
tcaagataaggccatactcttctccaaaatcttatttctttcttaaataggnggctgtgntcatgctcatgcgcttatcgcaattctaaaccgcttatcacacattattgaatttcggctgtgcgcgggctnttctcgctcatcaaatggactgaagcggtgtacttatcaggatgctcctttgctcagcgaacatgcacagctcatccttcttccagattcttcctcgcgttcatccgatgagtgttgcactcatcggatggctcgctaagccgacaggttggcgagagggtgaaaatcagcactacacaaactcacctaattaaccgtaaattgagagaaaatgactataaacacacaaaatggaa

SEQ ID NO: 129140 - DNA, 228 bp, Glycine max
caacgtttcgctcatctatgattgacctttgaatgcgagcggatattcctgaacctcaaatttcggatgatcatcatgcactgctgtatactttgtatatgcgcacacctcttgatctaatatattcatgggcctcggacacactatttgaacgcaagcggttcgctccatcataattctccgattatcgcgaaccaagagaagatatacactgttatgcattccttc

SEQ ID NO: 129141 - DNA, 391 bp, Glycine max
  unsure (1)..(391): unsure at all n locations
tcctagggcatagatgactctccaagactttgtgattatcattgatngangaacatgtcatttatcataagctacaccaatataaaggaaatttgtcaatataatttgtattgtccagagttcacaaaatacacgtgacatcttacgtgacacttcgagacacacgttaaccttccatgtcaattctgacacaagagcacggacacccagccctaagcagtcatgcttcccaaccaataggttatctctaacctctaattatttgaatataatgtcattcctttatctcttggcaggtattcaattatctacaaagtcacacattatttgtaagtaacaattatctactaacttttatctctaagctatatattatctctaactttatcta

SEQ ID NO: 129142 - DNA, 366 bp, Glycine max
aatacctatatatctatttaacgacgtcttatccgctctctgtgctatcaccacatcatttcagtgtgattttgccttgatcatgaagatgcattcttcgttaggatcattccacaatggaaaccggtctgatccttataacctgatacgatagggctccctcatcataatatcttgagggatcgagggatgataacctacttgtctgtatgctattcttaatgtggatctggtcgagtttactccaaccacaggaatctgaggatggtgctagatcacgattacgctatactatcacgagggatcggcgttagcatttacgacacccctaaacacatgaccttgtaagcgagaaatcttatacat

SEQ ID NO: 129143 - DNA, 459 bp, Glycine max
  unsure (1)..(459): unsure at all n locations
ccaccattctctccttttggatatttctcatnctttatcaaaananngaacgagctttcgtcttgtgtggtaactggcgtttaacaccgtaagtcgactagcagggatcaaaagatcaatgaatgatagtccccggacgaaattatggtatgacacaaaatatcaagtgaagactgaaatatagagttaaaagcatattggaataactagtagtattatggtattttgtttagcatttatcgtacattagtgtttagagaattaaaacagccagttaacttttgaggttttggatttggactaattaaaataattgcctacttatatttagttcttccattgtttattgcaaggtgtagtttataatttgataactttcatgtcatcttctttactataccttgacttaatatgtntaatgagctagttaatgtattgacaattttggtgttatgctat

SEQ ID NO: 129144 - DNA, 337 bp, Glycine max
  unsure (1)..(337): unsure at all n locations
agcttaacctacctaagtaagttatttacttctaacctgctttcttcgaagtcagaccaatgtctttgttgccgatattggatcgaaagccctgctggcaatccttgattcagaagttccaggggtgctgcgaaagccttgttgggaaggttgaagtcatcggaaggaatgaagaggctgtggaacagaatcaagcangggtgatgtgtgggcgcgactaggtttgaagaanaacctagaggcactgaggttcataaagaagctagaggaaaggtttcagcgcgaaagggcaagatctacttcaaccaanagctgctaacactagggttagaagcta

SEQ ID NO: 129145 - DNA, 453 bp, Glycine max
  unsure (1)..(453): unsure at all n locations
ctgaagttttctggtttttcttccttgaaaacttgttctattcatctttttcattctcttctccctttgccaaaaagaattcgccaaggattaaccgcctgaattctttttgtgtctctcttctcccttttccaaaagaacaaaggactaaccgcctgagaattcttttgtatccccattcataaagtatcaaaggtttaatagcctgagatctttgtcttaacacattggagggtacatcctttgtcatacaagtagagggtacttctacttgggtttgactgagaacaagagagggtacatctcttgtggatcaattctagtggagggtacatccactangttcaaagagaacaaaggagggtacatcccttgtggatacttgcttgtaaaaggaattttacaaggttgaaagaaatctcaaggactgcangtcgcttggtgactggatgt

SEQ ID NO: 129146 - DNA, 357 bp, Glycine max
  unsure (1)..(357): unsure at all n locations
aacgaaaggaacctagcgaggggaagacttaatccataagaggatagcccgtaagagcactacaacatgtgaaaactttgatacacatcgagaacgattcaatctaagaaccaagagaccatagtcttgaaactcaccaaagagtaagagtttattcgtattcaaatatggtcacaagcaagagaataccaacctacttataggaagcangtagtgtctctctcttaatacaaattatgcgtacacctagttctaaagaaataaaagcataggccacagtacgcttaagacccctattatatcttaaactaaattcaacagaaacataatctaatggtgaagatggacattagtatc

SEQ ID NO: 129147 - DNA, 309 bp, Glycine max
  unsure (1)..(309): unsure at all n locations
caaaggaagcggntccaactaagttaattgaccctgacttatgttaattggttatcatatttctttattatgtcatgacatcatatatgtttgtggattgtgtttctcttggccactatcatttggggttccagtccttccatgcttccacaaacgcttatattcaattgtacatcaagacgatacaataatatgtacaacaacctatttaaatcggttaaagtcagatcaacctcatgaccaaacgtatgattatttcacttctactgttangactatttcaatagttgtaatgggcatatgatgctc

SEQ ID NO: 129148 - DNA, 410 bp, Glycine max
  unsure (1)..(410): unsure at all n locations
ggtaaataaatcttggattatggttagcgctgtctctagaacgtttccattgaatttaatgatgaaatctgtgcattttcaggtgaaaaagaggctaagttttgaattgcaaaatgtagcaattgggctaagcttagcagctgggctaagcacatattcaccgctaaacaaaacttcagcgcgcttagcgcaatggagaatctggcagagcatcagcatcaaagctgcgcgctaagcgtgagatcagtgcgttaagcgcaataggtgcctttagctaggctaagctcaaggctggcgctaagcccaatttcacttactcgcgctaagcgtagcatcgtgatttctgagcctatttaaagcctgtcttgtgcagaattanggtacnncgctttatgacagcttctacagac

SEQ ID NO: 129149 - DNA, 437 bp, Glycine max
  unsure (1)..(437): unsure at all n locations
ggtctctctgccctactggacagacttcttgatctattcgttnggccttncttgatcacttcaaggtagatggcgaatgtgctgcaccagtaagaggagtangaggaggaggagagttgggtggtgtaaccatttgcctgtaaacaaaaaaacattaatttaggatgtttatcaacaaaactcaataacttatgtaattcaatggactgaaattaaatatataataaaaaaattacattagacgatgttaattaattctccttcatcatgatcattacgattagcatgaatgtcgtcagcttcttcttctctgatgatgttaggcaacatttgtgtggacaaaggactagcataagtatcatcaatgtatgaatcatcgtcttcaacattaacacctattgttgtcctatgtagaaccactgaccacctttcatcac

SEQ ID NO: 129150 - DNA, 429 bp, Glycine max
  unsure (1)..(429): unsure at all n locations
aagaaccttgaacaatatctcaacaaaagcgagtattggtattgattaaaacatggggtaatcgattaaaataaaaggtttcaaaaactaataaccacacaacaacacaatgtaaatgattaacatgagaatgtaattaattaaaacaatgtaaaacacaaaatgagaaagtaacacatgtatttttagaaaaagatattcaaccacgtatcaacatactaagatattgaagaaaatatcagacatagaaagcatatataacaagctacatgtactacatcataacatcattcaatactagatccatctaagatgcctagttcattcctaataaagaagaacatatctctagcaagagggttaatanagatgtcagctagttgatgttcactaccaacaaactcaatgcaacattcaccccttgataca

SEQ ID NO: 129151 - DNA, 447 bp, Glycine max
ctataatagggggagaagtgaagtgtttttggttcattcccttatgtacttctctctctttcgaatttgcttggaaaaattgcttccgtgaagaaaatccgagccgaggcgcttccgaaacgtttccgtaacgtcttcgtgaggaatttcgcgaaggtttcgtccgttcttcgacgttcttcattcgttcttcatcgttcttcgatcttcaacgggtaagtaccttgaaccaagcttttcgattcattctatgcacccgtggtggtccacattgtgtttcgtgtattgttattctagtttcatttactttttataccccccttttgacgtgcttatgcacatttatttaagtcatttctcgcttaacctaaaaataaaataaatttccaccgatcgtttgaattatattatccgttaacttcgggtaaaatgaattccgaccattcg

SEQ ID NO: 129152 - DNA, 442 bp, Glycine max
  unsure (1)..(442): unsure at all n locations
gagaagcntctgtgagaatacttcttgagaagcttctctgagacaacttccttgagaagctagagcttagctacacacactcatcttaaaactaagctcacctccctgagaagctttcttaataagctagagcttagctacacacacccatctaaatactaagctcacctgcttgacaacatacatgaaaatacaaaaaaaagtccctactacaaagactactcaaagtgccctgaaatactaggctaaaaccctatactaatagaatggccagattcaatgcccacgagaaggaaaaacctattctaatatttacaaagaagagtggatccaaccttgacccatgggctcattaatctatcctaanggtcatgagaaccctagggccttccttagtagctctagcccaagcctcttggagtcttctatccatacccttggg

SEQ ID NO: 129153 - DNA, 323 bp, Glycine max
accatgcaggaaccgccggtctcacatccatttgatgcaggtcaagatcaaaatgagctactattgccaaaatttctcgttgataggctttcttaaatacaagagaaatggcctatatgttgaccactccttctctttgagttaatcctttagcaacaagtattgccttatatctctgaatgctgccctctaagtcgatcttcgttttgaagacccatctacatacgatggctgttacaccaacaggcaactcaacgagatcccatactttgttagatgccatataatgcatctcatccctcatatcattataccacaaattt

SEQ ID NO: 129154 - DNA, 427 bp, Glycine max
  unsure (1)..(427): unsure at all n locations
acacacaaaatgaaaatactaagtatttattacctatacttaacagaaaatacttataacactacaaaataaccataaattgggagagtttggtacaatttatacaagttttatacacaaaagttagtcgtttttaccgactaacaactcccccaaatttatagntttgctggcctcattccataaagtcagaaatgtataaacagaatcagaagggctttctcaggcttgtagtgaggcttggctacaaaaaattcattggtttttcaaggattcaaaggtttagattctaagagagcacaattcctagacttatcccaatggtctttntcatgcgcttagctngctcactagcttttcactttcattggcttttgacctttgtacatcaacacactttattcttttcttcttttttttgaacata

SEQ ID NO: 129155 - DNA, 439 bp, Glycine max
  unsure (1)..(439): unsure at all n locations
tgtgttgttttccactattcggatggaccttgtgtttcttctaatgctcttctaaaaatgaaatgcaaatgtcttaaatctcattattggttatgaaattctatttgtatactttcattcctccttcgccgcattatttttgagaaaatgtgtgttgatctaatcaacttggggttttgtttctttaccaaacgtgttcacattntagtaaaagtttacatgacttcatgtcttcagtctttacttttcaagacttcaatgtcttcagtctttacattccaagacttcaacgtcttcagtctttacatttcaagacttcaatgtcttcaatcattacattttcaagacttcaatgtcttcagtctttacatttcaagacttcaatgtcttcagtctttacattntcaagacttcaatgtcttcagtctctacattttca

SEQ ID NO: 129156 - DNA, 342 bp, Glycine max
ttgctactagaggcctgattgcggctgaatggagaaggagaacgatgaatgaagacaccactgcaagtagaagatgagtctagaggaaactcatcaccataggaagccatggataagagcttgatggtacaagacgatgaatgatggaataggaagagaagacaatgaaatctagtgcttgaagtccgaactgtgaagtttaattcgtaaatgatcaaagttgaaaacaatgcacacacatgacctctattgatagcctacgtgcacacgcatatgaagggatattcgaattgcactcgaatttgacattgaatttgacgagcccaaatttcactaattatg

SEQ ID NO: 129157 - DNA, 456 bp, Glycine max
  unsure (1)..(456): unsure at all n locations
gacacttaaatctaagcttctagccaatggctaccttaaaaatttcttgatctcctctttgagccttgnttccctttccttgttttgaagctcactacaagccttaagtgataaaccatgatatcaccatatccttaaggaattttggagctttggaattgttttgggaataagtgtggggggtttttgtttcattggacaacttgttttgttggctatgcttcatgatgtattttgggccatacttgatgtacattgtatattggttaaatgttggacatgctgaatgaaatgttgtttctcataggctatagagtcaaaaaaatataaaaagagaaaaaaaaaattcgaaaaatagataaagaaaagcaatatagttgagtgaataagatcttaaatggcacaagaatgatgaaactcttggctctactcttcatgtgtaaatttatcattact

SEQ ID NO: 129158 - DNA, 441 bp, Glycine max
  unsure (1)..(441): unsure at all n locations
gagtcacccgccgcatgcaagcttgcatgatttacattctccctctttcttatgcattttcttcttgacatcaccaaaatcttcatgatttacatgcgtgtcaatggatttgcttgcccctgattgacaaagggtgcagatgacgacgttagtctctgcatgctatcggactctgagtctgacggatagcagaagggtgtttatacggataaccacttangtatttccgcctaccacctagctttacgcgtcaggattaacataaattgtttgtacggataaccacttcggtatatccgcatgccacatgacttcacaggtcaggattaacaaaaatcgtttgaacggataatcacttgggtatatctgcatgtcgtcaaactcgttgtctctggatgacanaggttcagaagacgacgttagtctccacgggtcaacggg

SEQ ID NO: 129159 - DNA, 446 bp, Glycine max
  unsure (1)..(446): unsure at all n locations
tccttgtccttcgttagaacatgatggacatgattngngactttgttgattcatattgggcaaaantggatgagggaaagagtggtttttcgaaatcttcactttatgcagaattttgctgttgaaatgtgcaacagaattttgcataagtgcagaaaaatgctatgtatttgctggttgtggaaagagtagtacaaaatgagttctggatggtttttagtagatcccaacggtcaaaatgtagacttatgtactagagacttccagtaaaattttagagtcgatccaacggttaacgaattggaacgaaggaaatgttactggggtctttaagtgagaaaaagctgtgaatttggtttgagctttgggcagagttttctgcctttgccttgttttgcttggtttgtagttggtgatgatttggatgttgaactacctggatgttg

SEQ ID NO: 129160 - DNA, 350 bp, Glycine max
aatccttaccctctgaagcgaaaaggaaagaaggaagatttccaatcaaagagaaagcaaaaaaaaagaaagagcagaaggaaaattccccaatcaaagagtgggagaaagcaaaaagaaaagaaagaatattcccaatcaaagaatgggagaaagtaaaaaaggaagaagaagaaggaaagaaagctcctgatcagggattgaaggaaaacagaagaaatgtgcagagaggtctttggaccggacaatatctgaacaatacagaattgtcaccaaatgaacaaataaagaaggagaggaaaccacgacctagaatggtcttctccctttgataccaaccaaaatcccgt

SEQ ID NO: 129161 - DNA, 386 bp, Glycine max
  unsure (1)..(386): unsure at all n locations
agagatcttcatcagcagtggaagaccatttctcagctttctttgancaccaccacgccacaggctatgtgaccaaaaagtcccctcctcctcctccacatgtggagtttcctacctctccacaactcatatttggggaggagattcttcacttcagccaccctcagcaccctctctcaatggtggatcttcctgacttgttcaattgtgtggggtgcaaagagtatggctctggaaagaggtttgtttgccagcaatgtgactttcagcttcatgacttctgtgccttggctcctcctgctctcaaggcacacccctttcactcacaacactctgtcgtgttgcattccaaaccatgtaaacatacatatatatacatctctttg

SEQ ID NO: 129162 - DNA, 237 bp, Glycine max
tttggctctaacccatatttttgcttactcctccatgtgttctcattttttcatgatccctacagctggctaagtttacagattttaaggccccgataacttgttaaactaattgtttcatggcaaattttgtctgctgaacctgatggtgattagtcctgatttgctgtattttgggtgacctaactaattttcaaattaaggagaacctaaattaaggctgtacatgatttgcta

SEQ ID NO: 129163 - DNA, 400 bp, Glycine max
acacttcaaactatgctggtttaagtctacccgttgaagactgattaaacgttttcgaactacaatctgaagaacggcgagaatttcgcgtaattactacggaacttacggaagcgcctagcttgattttcttacggaaataattttctcacaatttcgagagagaagaagtccaagaagctgaccctttttttttacttctcccctattatagaaaaaatgggagaacttgcacccatctcgccagcgacaatgtgcttcctcaaacaacacctttggagaagatctggaagccaatggccaattgtttgcaccccttttctaatgcacccattatgttggaattctttcgaacgtcaacttacaattgacgatctatttcttcgaagtacatctacga

SEQ ID NO: 129164 - DNA, 442 bp, Glycine max
  unsure (1)..(442): unsure at all n locations
tctaangatataatcattcctgcgaatttttagattttcttctattttttgcaaaggaattngaaatcgattgatgacctgctttaattaattgtataaaagtagttcccatttccaacttaattatattgataaatgaccaaacattgcaacttaactcggggtagaacaatttcaagatttatctaatcctttgagcactgacgtctgcataattagctttttatataattatgatttaaatctgcatttgattctttaaatctaagtcacctctgtgggtgggttgctgaatttttaacctctgcattgaagcatctcgttccaactatttttcatcttgtacataactgtggtttccaattataaagattgactttgtttatatataaaaaaaggtcattgtttctccctaaatgtatgtatcttctcaattataaaa

SEQ ID NO: 129165 - DNA, 412 bp, Glycine max
  unsure (1)..(412): unsure at all n locations
atctccttgacttgactctcctcttttcatagttnttggagtggacttaggcctacgtactcgcgctaagcctgcactactcagtgatcgcgggtgcctgtattcgtgcttagcgcacatcctcttgcttagtgtcagtgcgtattttcgagcttagcgagggtgcctgtattcgcgttaagcgtgtgctgcgcgcatcttgggctaagcctttntttcaaaattttgttattttcttcatcttttaggcctttaatccctcattntcatatttgtaagccatgaataggaaaaacatcaattcttaacaattaagcatgaataattgctaaataatcattnttaaggatatttccattatatttttagtataaaaaatagatcatatttaacggntatcatncatcattca

SEQ ID NO: 129166 - DNA, 407 bp, Glycine max
  unsure (1)..(407): unsure at all n locations
acaaatttggaacaatggtagaagatatgtgaaagttttgtatatgaaaanttgggaagaagaaataggatttaagagatgtggggtgggttattgaaaaggaagaaggaatttggaaaatgggggaggggtctcgggagtaattataaactgatggagggggtgggctttattttttcttttctctcttaagtgaaacggtgcgtttcaaatgcttcccaagaaccttctcaaagtgaatcctctgttgttgcaccagtaatctcctctggttaggatgcctgtgaagatcccaacaattcaaatcataatctttgcgaaagctcgtggaaaccagtgggagtgagtagcagttcagaaaatactcaaaatagagtcagaggtataaatattacatgatgatggag

SEQ ID NO: 129167 - DNA, 427 bp, Glycine max
  unsure (1)..(427): unsure at all n locations
cttatgttgcatnttggagtaatggggcatgccacattgcctgcattcttttgctattcatgccaaaacatgcgcccaccaagtgcccggtgaaatgcctcaatgacatatgggcatggttttgtaagcttgggattgtgggactgttttatatgtatagggacagcatgaaggatttaaaatgagtgcccgaatgcgattctaggcctaggaacccaagcttttaatttcaatacaaggaagcatgacttacgcctaggaatctaagttttggttntgaatgtaaaaaggcatgaatattangacatgtttgagaggttnttattagaatntaaatttggctgccccatgaggaataccttgcacctangtagcttggaaaatacctttcaacggtatgtatatatgtgaatatatatagcatgga

SEQ ID NO: 129168 - DNA, 331 bp, Glycine max
  unsure (1)..(331): unsure at all n locations
aatgctngcagcagtcttagtgctgagctattctattgttcgctcagcgcccaccactctacactcaaaaatgcatgattntagctaagtatgcccatatcccgagttagcgagagttgtaggttttctgatctgcatatctcaccaagtggtctaatccacgcgctaagcctgactctaaatttgaaaaaaaaaaagaagcttagcgcaagggttcgctaagtggaaggtcttgagaaaccaaacgtctctctggctagcttattgcatcggtgcgctaagcgagaatggtgaaaactgctcaagtaagtgtaacggtggatacactcac

SEQ ID NO: 129169 - DNA, 455 bp, Glycine max
  unsure (1)..(455): unsure at all n locations
tgcagcttaagccactaactctgaatcatgtgtgttgtcttcaacaatngaaagaagctacacagtggttcaagatgtcacagacttctgctttcactcctatntttcatacatggatgaactaagagaaaacttaccccatcatgaanagccgttagatatccagtaagttatctcctccaattatatgttggatatgaaacaagaggcttgttgagaaaaaatttagacaaattcaattgttttcttgctagactgtcattattgccatgttgcttgttggtgatcatggttggcgtgccattggatatggctttaatcacatgtattgctatatggaagagtccatacatgctgttcatagggtggaaaaggctattagaagatttgatgggaagaaagggaccattcttagaaactgaatggtgtcccattgctggccttgcatcattctc

SEQ ID NO: 129170 - DNA, 470 bp, Glycine max
  unsure (1)..(470): unsure at all n locations
ggtcttcaccgatgaaaggatcgaagngggtctgaaatgtttctaattttatcatcccgcttggatgaatgagaaaactgnggcaagtgaagagggtaagaatgagggagaaacccatgctgtgactgccattcctatacagccaagtttcccaccaacccaacaatgtcattactcatccaataacaaaccttctccttacccaccacctatttatccacaaaggccatccctaaatcaaccacaaagcctgtctaccgcacttccaatgacgaacaccacctttagcacaaaccataacaccaaccaagatatgaattttccagcaaaaaagcctatagaattctcctcaattccggtgtcctatgctgacttgctcccatatctacttgataattcaatggtagccataaccncagccaatgttcatcaacctctatgtctccgagaatacgactcgaacacaacgt

SEQ ID NO: 129171 - DNA, 445 bp, Glycine max
  unsure (1)..(445): unsure at all n locations
cctgaagacaagggtgtagttaatggcagtgtanaaattgcttccacggacgtcacacaacagagacatcggtgattgaggagttgcgatcacatgtggagagtctattataaaaatataaaccgcgattaatctaaagggtattataaatagtgcaccatagagcatatgaggtagtggtgcaccctagaagctgtcagaaaattatgggaagaaagtgatacttaagtttgggaggaatcgatgagcgaggatcgagtatactatagatggatagggagacaaagagaaagtggaggaaacataatattgtgacataggataaatgttcgtatggctttaagtcactattagctgtagtccacactcgatgatcttagaggttcaactagattattatccaatatgacaatatagatggtgagcctatatactttctggacat

SEQ ID NO: 129172 - DNA, 331 bp, Glycine max
atttcaccgttggttactaccacgttgaccctataactataatcttaccctactttatgttcgttctaataatgaaggatatgtcatcagattattttgcacagttgaatttcttgcatagtatcactttgaaatgttgttagcaactacgatggcgcttataaaggatggaaaaatctatttgactactgttgtgtatccacttctaaagaatcgcctgtacccatacctgtctttttgtctattgtacgcttgtgagccggacaatacgaggaatactctgaaaaatgatgtacttagcacgtccttgactgactgtttacttattact

SEQ ID NO: 129173 - DNA, 376 bp, Glycine max
  unsure (1)..(376): unsure at all n locations
ctaaacatgtgggtatgctctttcagataattgaacgtgtacgtcaggtggcttaccgccttcacctaccaaccgcaacccaacttcataatgatttgcattgccccctcctctgggcccatcatggaccattacccactgaaccaaatccttggccactcacgaccatcaacaatcagctggtgccacaccccctctagattttggattctatactggaccgcacaacagacccacccatttacttggtgcttgttcaatgaatggggcatgccctagaggacacatattgngagacatgggaggacgtccgtgatacttaccaccttgatgacaatatggattctggggaaggaggtattgttaccaattcacc

SEQ ID NO: 129174 - DNA, 313 bp, Glycine max
tcatgaagtatgcttatagggtctcatacatgaaatgatgcatcatacccgtgtaatcttgaccagaatatagctattctataataatttgcatcactgaccactaaaacaattattatttgtgtatattggactccaggtgatgcatgaatattatgtacaagatatcagaaggtaatactttggcaaaaaaaccaatacttgtgtcatccattacctgaaaccacccaaattgtattattctgcattgttattttcatccgtctatacattcgcagtgtgcttattgtcaaacaatggcacatgcacaacc

SEQ ID NO: 129175 - DNA, 289 bp, Glycine max
tcaataacaatgcctatagggtggacctcccagaagagtatggagtcaacaccacttttaacatttctgaattaattccttttgtaggtggagctgatattgaggaggaggaactaactgatttgaggtcaaatcctcttcaaggggaaggggatgatgcaatcctccctaggaagggaccagtcactagagccatgagcaagaggctccaacaggattgggctatagctgctgaagaaggccctagggttctcatgaacctcagggtagatatctgagcccatgggcc

SEQ ID NO: 129176 - DNA, 358 bp, Glycine max
  unsure (1)..(358): unsure at all n locations
tagagagtttagagagaganagggccaagttctagagcgtgngagagattnngctgcgcgaagatctgcagagaccagagcttgaagaagaagttgtcctgagagcttgagatgagtttgtgagtgattgtgaggtcctagagatggaggagacatccccactacttgtatttctgcaatctttcatcttctcttctctttgttgtaaaggaagcttctcagttatggaaagctaaatcctctgctggatcatccatgtaagtacttgatgtaaatatctttttttatctatttaatgatgttttgggcgttcactgtgctatcataacttcattctaccatgcttgtttcctgatca

SEQ ID NO: 129177 - DNA, 443 bp, Glycine max
  unsure (1)..(443): unsure at all n locations
acaccacgccggaaatctgaattgcccccagcattgaccaccttggagtggtccacgtcagccacatcactgatggaccggaccgaaggggaacgaccatggggttttacccagtggtcgcgatgcagtttggacggccgtcgtttggacaaacgagagttgtgccaatggttaggtgtgccggtatcngcaccatcaagctcggcgtcactgtcaccactgtcgtcgttgccggagtcgcgcccaggagtgtcatcggtgaagggtaatggggtgtttggcggcgtctacactggtgatggagggaaccagctatggttctgataacttttcattttggcgcccatactactcatgtcctccacgacggtgagtngatgttcctccccgtcaatcatggcccgtacactctcatggaagcccagtctctgatttgtccggat

SEQ ID NO: 129178 - DNA, 433 bp, Glycine max
  unsure (1)..(433): unsure at all n locations
atctatctntaagggagagaaatacctcattaaaaaggtgtttgtgcactgattccatgtagtgatgccattcttgggtaataaacatagttagtcttatgccttcctgttgcgtgaaaagagaatgcatagagtccaatgtattctaccggtacacagttctgtttcatcgtgttggtcaacttgatgaacttcctcatgtactacatatggtcttcatgggccgaaccattaaacagattattcttcgacatttataggaacacatgtttgaagtctaatgtgactccttcacgcatatcgaggagttggatggtattggtttcccccaaattaggagtgaggtagtccataagggtctgcattattagagataaaaggagcaccgtgaagatcaagactaagaagagttttgactgttacatgcctaact

SEQ ID NO: 129179 - DNA, 411 bp, Glycine max
  unsure (1)..(411): unsure at all n locations
acaagataatgcttatcttaacgcaaaanatgtcatgctcatccccctgatttgagagcgaactcacgtaatctatttatgcacacgcatacatgtggaatatccaaccatttatatcaacatagaggctatccaacacattctaattgtcacacacatatacgcatttgaaaagaacatacattctcacgcccaaggcattgcgtcaaagttcacacttaattatatcctaaacatttactattacaaactacttacacacatttgaaatatatatcatacaaaatttattgtttctctcacatttatttatatgcatttggaatgctaattacatcccgcacacacctgcattcaaaaaagaattccatgctatcatacatccatttaggacaataatcattcacactt

SEQ ID NO: 129180 - DNA, 442 bp, Glycine max
  unsure (1)..(442): unsure at all n locations
cgacacttatattactcaaccttcgcacttgataatggagaataaangaacttctctagagctttgttttcatggngcnccgaacaaaggtggagtacggaggattgccttgagggtccgcacttatgcaatcatgaagctcagctccaaactcgaaagtggaggacacatgaacagccctaatcaataacattcatgtggctccggaaaaggatgagaatggaggattgccttgagggtcctctcttatgcaatcatggaacacaactccaaactcaaaagtggaggacacatgaacagcgctaggcaattacattcatgtggctccgtataaggatgagaatggaggattgccttgagggtcctctcttatgcaatcatggaacacagccccaaactctgaaatggatgacacatgaatgacaacgcaattcatccatgt

SEQ ID NO: 129181 - DNA, 416 bp, Glycine max
  unsure (1)..(416): unsure at all n locations
attgtgtctgtgctaattgttgaaccgaattatttgtacgtggtgactggtgaacaatgttgtaaccaccaccatcactatcactaccactactactaccaattgcagttgatccatatgaagtagtaaattatgtatttgattttttctccttgctatcgtgacaacctattttgtctagtgaatgaagattttggaggaaaagagattaattttttattgttagggtgtaaattcttttacaacaatattcgccaatgtttttaaaggactaccttataaaaacaatcttgtacgtagagctagcatccaatacaaacacgtgaatctattatnaaatttcatcatgtgagttcaagagatngaattctcttcatgtccttttcaaatatcaatgtccattgtgttctaattgg

SEQ ID NO: 129182 - DNA, 418 bp, Glycine max
  unsure (1)..(418): unsure at all n locations
gatgcccgagtcattcatccctatttatatgnttgtcgaagatnggcaatcagagatgccattcctttgattatagggttgaaccaagctcatgcttttacaaaaaggttcatcaagtcaagttgaaatatggaagtaaccgtcctgcaaaattggggcaaaagatgaattgagtcacatcactgcttcgtctactgccaaacatatttaggattgtagatgtccttgttacttccagtttcaccttgacaaagatgtcatggaccatgttgaaaatctaaattgattcaaccccatatcctgcgtaaaaattcccaatacttcgactgtacatcattcgcatgcatccatgcttttcattggtgcattgctcattgcattctttccttgaanaataaaataaaataaaatgaactta

SEQ ID NO: 129183 - DNA, 445 bp, Glycine max
  unsure (1)..(445): unsure at all n locations
gcgatcattaattccaaaacatatggggagttcttttgtttgaacggaacannatatcttgcatatactctgcttgtatcttgatttcaggaattaaattgtcatcatcaaaaagggggagattgtagaagcaaagactttgactttggngttttgatgatgccatatgatcatgatgttttgatgccttatgaagatgcgattctcaaagtttaattcaagacaaaaaaatccaagaatacaagatataacatcaagaagatctctagtgatgtatgaagggaattccaaattgaaataacaaaaggcttggccaagaaatttaagctaaaatgtctttttcaagatatttactctctggtaatcgattaccagatgatgtaattgattaccagtatccataatgattataacagccattacatatttgaattatatttacact

SEQ ID NO: 129184 - DNA, 434 bp, Glycine max
  unsure (1)..(434): unsure at all n locations
cttaaaaagttgtgactttcgaaagaatcttcataaacaagtcacttaaagaattgacttttggaaatgtatttttcgaaattagtcactggtaatcgattaccattaaggtgtaatcaattacacatcaacagatgtgactcttcattttgaattttgaaaattaaagtgtttagaaacactggtaatcgattacaagtattgtgtaattgattacacaagttaaaaatgtttaaacataagttgtaactcttgaaatttgaaatcttaacattntaaaacattggtaatcgattaccagagagtaaaactcttttggtaatgatttgtgaaaacttcttgtgctactcaatggtttggaaaacttnttttgacttatctngattgagtcttccctttgttcttgaatcttgaatcttgagtcttgaatcttg

SEQ ID NO: 129185 - DNA, 333 bp, Glycine max
  unsure (1)..(333): unsure at all n locations
agatgaggaagtgttgaatggtgaaactttctgctnttttgntgaccacagagtggtacctcgagatatgtcgcgggggtcaggacctttgggacgtcatgtggggtgctattgcccaaaaccaagcttgaccaatcccgacccaccccgtgcatagtcggtcagtgagaacctgtgatgtacctaaacatgcgagctcctggcagtcaacagattaaatgaacaaagaccacaaatcgaggatgcttgtggtggctggccagttgtgaattttgggtgatatgtggattatggcctctgctaatcgattaccaatggtgggtaatcgattac

SEQ ID NO: 129186 - DNA, 388 bp, Glycine max
  unsure (1)..(388): unsure at all n locations
aaagattgtggtttgtggtaaattntgtgaagtcgagcaagtcggagacctagcatggagtgcatgtaacatgaaaaaggagaattaagtgatcatttatttgaaaattttattttttagaaaagactttagttttgtaataaattttgtagactcaagcaagtcgaagattcagtatgtcattcataaaaattactcacatgttattgaaatgtcaccaagaaagtcggagactcagcatggagtgcacagagcgtaaacgtgtattaaagaaggctaatgcatattttcaagaataaataaatagttgacatagtgctaccaaatcaaataaataaaatgggaatacaaagggataaaatataagtgaggagtatagttagtaatt

SEQ ID NO: 129187 - DNA, 416 bp, Glycine max
  unsure (1)..(416): unsure at all n locations
cgcttgaattcattctttggacccttnggagctattcttgccttgtatgnnnncancntcatctcgtctactttcagtattctttttcttcattttaagcgagttttcaccgatcgttcataccgtaatctcgcttaatcaccgtttaaataaaattcaaccgatcatttgtgttgtaatctcacttaatcaccatgtaaatgaatttcaaccgatcgtttgtgttgtaacctcacttaatcgttgtttaaataagtttcgaccgatcgtttgtgtcgtaaactatttccatcattgtaaaataagttttaaccgatcaataacgccgcaagttatctttaaaaaaggattgaagattaatcaaacaaaaccaaataaaaaccaactcataaacttcttcatttcatcaaaaaatc

SEQ ID NO: 129188 - DNA, 448 bp, Glycine max
  unsure (1)..(448): unsure at all n locations
ggagagaaagagagaggggggagcacgaaattgaaggaataaaagagggagataagtggaactttgaagtatgtctcacaagactctcattcatcaaagttaccataagtgttacacatgcttctatttatagactaggtagcttccttgagaagctttcttgagaaaacttccttgagaagcttctttgagaaaacttccttgagaagctagagcttagctacacacacccctctcataactaagctcacctccttgagaagcttctttaagaagattcctaaagaagctagagcttagctacacatacctctctaatagctaagctcacctncttgagatgagaagctagagcttagctacacaccctctataatagctaagctcaccccatgacagaaaanacatgagaatacaaaanaaaaagtccttactacanagactactc

SEQ ID NO: 129189 - DNA, 230 bp, Glycine max
atgccatctacctcgagcaataaggagagaaaagaaaaaagaaattcgacaagaaaagaaagaaatttcatcaagaaaagaaggaattccacaagatggggaacaaaagaagaagaaattccatcaaaaggagaaaaaaagaagaataaaaagaatctctgtcaaaaacaaaaatgtgcaagtctgacaacatttgacatcaaatgcccaagataaaaatgaagaaccac

SEQ ID NO: 129190 - DNA, 407 bp, Glycine max
  unsure (1)..(407): unsure at all n locations
atgatcatcctatctgggatatgttatgtatgctgtcaaatacatgggccctaaagctgggngagctaaaatatagttgacgctgtattctcgaatctatttgcaggcgctctctactcagcacaactttgatagaagtctaaaagaactgcacatatgttatattaagggacctaaacatgggaattttgggctttctcgtttctgggattatctaaactataatgaatattattcacatgtcaacaatgagatggggtactgatgccgctgaaatttgccagctctgacgatgaattacataatgcacagctaagggctaggaatcaagctgtggcaatgaattatggcataatgcacagccaagggctaggaagcctctnttacaggtcaacattgctgtgact

SEQ ID NO: 129191 - DNA, 449 bp, Glycine max
  unsure (1)..(449): unsure at all n locations
ctcatgcttctgctgccgacaggatatattatacaatctgggatatttctcccttattggttcctgttccatgagccagcagtcctcccaaaacctgattgtgtccccacaccccactttccaatttattgcagattgaaacagaccatgcacagcttgttcatggatgactgaccttaaatcctgccaccatatggattcattggtgactgatgttcacaactatgtttgaattttgtgctgcttgttgtgttggaaagtcacatagactatcatcttttctatctgaaactgtatattctgctcctcttgaacttatatacagtgatttatggggaccatctcatatttcatcctgaaatggtttctcttattatatcatctgtgttgatgcctattctaagttcacttggatctgttttcttaanaataaatcagaanaattttct

SEQ ID NO: 129192 - DNA, 372 bp, Glycine max
  unsure (1)..(372): unsure at all n locations
tatgaggggnactgctcccctggctgaattactggtggcgtctccataaaggcattcaacgacacagcatcaaatttaatcagcctccctctaactcgaacctgttttggtgatttgtcttcagggtcatacaagttccagtaaaactccttgaccagggccacatcaatgtgcctgttcatgaactggatcaagaccttgtgccagttccgctgatcagctcccggtggaattcatcatattatgtgatgaaaagattaacattcctctacggaaggatgttccgggagtgaatgttctatgagtaatgttcccaggccccttcagtagtgaatctggtggtatcataaggctcctgcgccgggatgctgt

SEQ ID NO: 129193 - DNA, 499 bp, Glycine max
  unsure (1)..(499): unsure at all n locations
tgacactcataatactatcgcttagcgcatagtcaatgtcgaataatatgactatgctgtgtttttaatgtgtaaaggatgaaatcagggagatttctttttatgacccaaataaggagctagggcatgagagaaaagggataacccactcacttggggaccctttcctccattattcttccacacctcttgtttcctttgtatatttgtaagcctctcatgacaataagaggctaaaccacccattattgggagctcaacaaccaaatactctttatgtaatgattctaactatctatttaatgctattntgatattattgtctcttttatatgcttaatatcatgtttatggtttgatcacccaagctcatgtagtgttatagggtttatgcatcggaaaatgtttatctcctaagaactngaaaagaacatctacgtaatccatgtctatggatagaatgatattatttagcccttattatgcatctctattctta

SEQ ID NO: 129194 - DNA, 430 bp, Glycine max
ttttacaaccacacacgcgctttagaatctattgcaaactatttttacactcgtttaaattctaacaaccacctgaatccaaccgacaatgcctttccttatttggatagctcgggtatatgggtcgagcctacccctagctaccacccaacaaatgatcaaaaagaaataaatattactcttattgtctctttttatgagactcaattaactaagtcatcaagattaagaaaattacttaatctagttactagcattaaacatgacctatattaacatgtttttcagaatcaaacaaaacattaataagacatacttgtagtcctttaaaaaaacaaaaagaacaaaatgaatggcctactttttagataaatatataaactaaagaaaagcttatgaatggtctcttgtatggttatatttattattc

SEQ ID NO: 129195 - DNA, 406 bp, Glycine max
  unsure (1)..(406): unsure at all n locations
acttacagttcttacactggctgagacagataatttattgcgttctgttgtannagcaacgcatatcattttgtggtatttttgctcgattcgatggttgtgggttatttctgatccattttaattcttaatctgagagctgccagaaactggcctaccccagtccagatatcttgcttattttttattgttaccagctttgttataagtggaagttgatttctatatattaagtgtctcaaatcacttgttctcacaagtgtatttgagggaaaatcattgtctaactcgtgagatgtgcaataaccttccgaacatatcactacccgcgacagtatatgttaatgatagccactcggtttacattgtacactatatattggacggactcctcttttctaaatga

SEQ ID NO: 129196 - DNA, 495 bp, Glycine max
  unsure (1)..(495): unsure at all n locations
ctgcagcttaagaataatggcctatcatatttttatttccagaangaaattcaatcagtagacctccaatctttaatggagagggttaccactactggaaaacccgaatgcaaatttttattgaggcaatagacttaaacatttgggaagccataaaaatagggccttatatacccaccacagtagaaagaaccacaatagatggaagcacgacaatagaaaaacctancgatagatggtctgaagaggatagaagacgagtacaatataatttaaaagccaaaaaaataattacattngccctaggaatggatgaatatttcagggtttcaaattgtaagagtgctaaggaaatgtgggacactctacaagtaacacatgaaggcacaacaaatgttaaaagatctaggataaacacactaactcatgaatatgaactaattaggaggaatgcaaatgaaagcattcaagacatgcaaaagaggttcacacata

SEQ ID NO: 129197 - DNA, 429 bp, Glycine max
  unsure (1)..(429): unsure at all n locations
gctagtctaaatatatgttggaatagagggaacaatagaggtaatgactgaccgatgcataaccgggttgagggagtaaagctcaatgttcctcccttcaaaggtagaagtgatccagatgcctacctggactgggaaatgaagactgatcacgtatttacctgcaatgactacactgatgcggagaaagtcaagctatcagcatctgaattctccgactatgcccttgtttggtggcataaataccagatagaaatgttgaaagatgaacgacgagaggtagatacatggactgagatgaaaaaggtgatgagaaaaaggtatgtgcccactatctataacagaacaatgcgacaaatactccaatggctgtcccaagggaatntaaccgtggaagtatattataaagagatggaaatggcgttagtg

SEQ ID NO: 129198 - DNA, 367 bp, Glycine max
  unsure (1)..(367): unsure at all n locations
caaacaatgacgatgaccaccacgacgcgagtagctcaacagtccatcacgacaacgatgacgacgaccacaacgacgcgagtaactcagcgggagtcattttcgggggtgagtagcttgaacaaggcagagtgagtgagtagacaaagtcatgagagtcattttcgggagttgttgtacgacgttgtttcgggttttcgtaaacccgtggactcagagcagactcgggagtctacacaaaatttgacgagtctatgcaaaatcggacgagtctactccggttntaattctgcttccgatttaactcgtcaacccttaatagaatcataaaatcgtatgaatttacgatttaaattgcgagtttaac

SEQ ID NO: 129199 - DNA, 444 bp, Glycine max
  unsure (1)..(444): unsure at all n locations
tgagcattaatttatatgctccagcttgatgnggagatttataatataagcnagangtatctttgtaaggtttaaaaaaggctgtttttagtgtgtaatctgaaaagcctaagtaggagcaagttccccggtctgaacctgtcttttcttctttcttattgtactctgtctgttttatataaatatatacaatgtgtggctgagtaaagcaactcggcacttctctaatgtaatgtgtatctcaaacccttcaacaatatagttcttaactttaagagaaacaaagctatatattctactaatcatcaacatcaacagtggtaagttaaaaaaaacattgtttttcttattaatagtaaacaaacaaatttaaaagcagtctctcaagttaggattcttatgcagtggttggccttgattttcttgtcatctcttcttcataaa

SEQ ID NO: 129200 - DNA, 428 bp, Glycine max
  unsure (1)..(428): unsure at all n locations
ataatgaagtgtagaagggtgaaatttcctacnntttattcgtgaccacagagtggtacctggagatatgtcgtgggggtcaagagactttggggacgtcaggtggngtgctatttcccaaaaccaagcttgaccaatcccgacccaacccgggcatagtcagtcagtgagaacctgtgatgtacctaagcaggcgagctcctggcagtcaacagataaaaggaactaagaccacaaagcaaggaggcttgtgtggtggctggccagctgtgaactttgattgatatatgggatatggcctctggtaatcgattaccaagggtgggtaatcgattacaaggcttaaaaatgaagacaagaggctaagatggtctctggtaatcgattaccaagggggtgtatcgattaccatgcttgaaaatgacgtc

SEQ ID NO: 129201 - DNA, 419 bp, Glycine max
ccacgtatagcacaatcaactgccactacaaaattttatccccactttacaattcttattgatacttttatatgattagccaagtggacaaaaattatccaataatttgataagaaccttcggacaatgccaccgcactgattaagaacttactaataagagcaacaaactaatgtagagctcataccttgttaactggcagcgtataaagctttgagctttgatcacccacgactgttccaagagcaatgtatggttttcttcgacccacagttccaagagcagtgtatggttttcttcgacccacagttccaacaacagtgtagggttttcttcgacttttcttcgataggaggttctgtgggttccagcgagcggtttccgacagtatcgaaatcaatgtggggcaatgtgggggt

SEQ ID NO: 129202 - DNA, 451 bp, Glycine max
tgagaacctgtgacgtacctaaacaggcgagctcctggcagtcaaccaataaaagaagaaagtccacgaaacaaggaggcttgtgtggcggctggccagatatgtatcttgggtggtatctggaaattagcctctggtaatcgattaccattcgtgggtaatcgattacagggcttaaaaatggagacaggatgttaaatggcttctggtaatcgattaccaattgtgtgtaatcgattacacagggtgatagggcactggtaatcgattaccagatgggtgtaatcgattacgcagtgttacctgctactggtaatcgattaccatttatgtgtaatcgaatacacagtgtaatttttagtcaccaatgtgcaaagactgggtaatttcgttttgggcactggtaatcgatacatactttggtatcgataccagagaggaaatccttgaa

SEQ ID NO: 129203 - DNA, 442 bp, Glycine max
  unsure (1)..(442): unsure at all n locations
ggaacttacatctaagctgttgcaaaatataaaaaggatgttttgttcgtttctctagtttttctcaccaagnaaaaatggatcattttaagggccaacgccttaaaaggaccaccttccaagtaagaagaatcgcttgattcgcccttttgaaagaactacgtaggtctgatttcctctttgatggagggtacgtagcagcaagagccccgcttttgtcgacctcaaaaattaaaaagaaataaaatttaaatacataacttcacacaattctaatttaaggttattatcctttgggataaacgtgagaggttctaataccttcctcaaacataaatacaactcccgaatctggaatattcttcatgattcgtttccttcggttnttccgatgttaaccacaaataaacgttggtggcgactccatgcattgtcctctcat

SEQ ID NO: 129204 - DNA, 466 bp, Glycine max
  unsure (1)..(466): unsure at all n locations
agcttcttgtagacctcgatcggcatcttctctttctatgtcgaccgtcatttttttcgatccatttcggtgaatgatatttttttgccgagatgggctaatgttttcctggccgaataaatgggaaaatgccagtttcggccgaaacgaaaagtcggttgggctcgcacaaaaaaacctagccgacctacattttatattttttatgcaacaccaaaacaagataacttcctgtgccgtaaaaaaaaaaaaaacattacatgacagcgagcgttttgaaaaacaaaattgcgcaacgtcggctgaaaaatatcagtcggtgctttctcacgaccgatgtcggctattgagttttcaattcaatccgtgaacaggaattgcatgatgtcggttaggaaatgttcgatcggcatcatcctgtgaagttttnttttaggcctcgatcagtcatcattcctgaccgacg

SEQ ID NO: 129205 - DNA, 395 bp, Glycine max
tcaccggatgacgccgatcgaacatttcctatccgacgtctctcttatttctttcagggattgaattgaaaactcgttaggcgacatctgtcgtgaagtagcgaccgatatttttcatccgacattgcacaattctttttagaaaagctcgctggtcgataatggtctttttacggcagagtaagatttcttgttttggtgttgcataaaaaagttacaatgtacttcagctatgtttttcgtgcgagttcaaccgacattctgtttctgccaggataacattagcccacctctgcaaaaaaaatatttgctaaccgtcttcatgcatatttcattcaacgattgaatagaatactcaatagccgacaacggtcgtgaaatagtcccgactgata

SEQ ID NO: 129206 - DNA, 322 bp, Glycine max
ttggtttgaagctcactacaagccttacatgaaaaaccatgatatcaccatatctttaacgaatttaggagctttggaactgttttgggaataagtgtggggggctttttgatgtcctaaacacgcgatctcctggccttcgccagatgaatggatctgagaccacctagcatggaggcttgtgtggtggctggccagctgtgaactttgactgatatatgggatatggcctctggtaatcgactaccaaggcggggtaatcgattacactgcttaaaaatgaagacaagaggctaagatggtctctggtcatccattaccc

SEQ ID NO: 129207 - DNA, 317 bp, Glycine max
  unsure (1)..(317): unsure at all n locations
ttganaagattcctaaagaagctagagcttatctactttcacctctctaatagctaagctcacctgcttgagatgagaagctagaacttatccacacacccgctataattgctaagctcacccccatgacaaaatacatgaaaatacaaaaaaagtccatactacaaagactactcaaaatgcctcgaaatacaatgctaaaaccctatactactataatggccaaaatacaatgcctaaacgaaggaaaaaacctattctaatatttacaaagataatcggacccatacttatcccatgggctcataatctaccct

SEQ ID NO: 129208 - DNA, 414 bp, Glycine max
  unsure (1)..(414): unsure at all n locations
atgcaagcttatttataaaaagatggatcttttttttatcttttagggactactcacaccatttggagttctgtactattctactggccctgcaaaaggtagatagatcaagtaagcacaaaaatccgaaaataagccataattattaattaactcaatcatttgcctaagaccaaaactaagttaaagtgagaaaataaggagcaaagagatgtcaattgagctaagaagaatagaanaatactaaactacaaatgttcaatcacactacttatggatgtcactattgaggctaggtcgattatgggatttggtaagaatatcaacatggagtgtggtggaatagaanatcacatgttggattgtttgtggaagggcataatgacgtgtgtatgaagtacttagcatgatgga

SEQ ID NO: 129209 - DNA, 329 bp, Glycine max
  unsure (1)..(329): unsure at all n locations
cgcttctatatatggagagtcgaatcctctgttgtttcttccttgtatgtacttgangtaaatacttgtatatctatttaatgatgctttatgtgttctctgtgctatcagtacgtcatttcaatgtgtttttgccttgatcacctagatgcatgctttgttatgatcattcaacagtgaaaactggtctgattcttataactngataggatggngctagcttattgtattttcacgagacatctgggtacgataacttagtttttgatatgttatgtcttaatgcgattctggttaagtttagtccaacaagaaacatctgatgatga

SEQ ID NO: 129210 - DNA, 345 bp, Glycine max
  unsure (1)..(345): unsure at all n locations
agctggatttcttttagacggaatctattctttctatgatggagccaaacccaatcacccttattaagaactagctcttttcttcctctattgcctttagttgaatacacctttgtttggttctctatttggttcttaaccctctcatgcatcttctttacaaattctgacctagattccccttctttatgtataaaagaagtgtccagtgggaggggaataaggtctaacggtgttaggggattgaacccatagacaacctcaaaaggggactgcttggtggttctatgaacccccctgttganggaaattctacatgaggaagatactcatcccaagacttat

SEQ ID NO: 129211 - DNA, 335 bp, Glycine max
ttctaacaacttttcttatgtcagcttgcataggcttaatacctaacccaaacttcccgtggttacctcttgggcttaccatgctggttctgtcgccgctgttcgtgcccaaacccattccgggctcgtagccgtaccccaacatcacccgggccaccatcattgccgtatcagacaagctaagcttcctcaagagagaatctacggacgcaatgcatattacctcaaaagaatggatagtcggttccaaagacttctacgcggctctcacatatgggatagaggaaaggcaacttaccaagacatcttcctcacccgatactatgaacaaatgt

SEQ ID NO: 129212 - DNA, 392 bp, Glycine max
  unsure (1)..(392): unsure at all n locations
agcttgcaggtgtacagaactcttatctttacattgttataacactngcaagaaatggacgtagtctcaggtttgagacgaacaagtagaattctttgtgtgctttcttgtgtcttgaactatgacagggttttcaattttttaagatcttatatttcatcttgttgtacaaagaaatttttcctcattatatgataaagtttgaatcgaaccttctaagtggttcaggttatctggacagatgataacatgtttcattctgagaaagtttattttctaaacacattcacccccatcttatgtattgctctacatattctcctttntttctaacagatgacactcctaagcgaaaggatgaatcattgccaatgatccattgatcattgatt

SEQ ID NO: 129213 - DNA, 113 bp, Glycine max
acttgaatgttggaataatcttgggtctgcgttcatagatacttgttacgtaggcatgctaatgatgtattcgagccatactagatgtgaagaatgatatcttatactctctc

SEQ ID NO: 129214 - DNA, 464 bp, Glycine max
  unsure (1)..(464): unsure at all n locations
gcttaagaganagcacaaggtcataaccaattttttatattgaataanaaggcagaaggtacctgaagtttctcgaagtgaaaatggcgctcactaacgatgagaataggtcatatcaagctatgaaaggtctgagtctaacttacgatgaatctttgaggcttgagtatgccctatagtctatcaaaggcttttattttggctcaacctgatctttttaaaagtttgatatgacctgataacctctttaaaagcctttnttataataaatatttaatattttatggggtaggaatccaataggaaagttaaagaaaaatgaaagttaataaaaataatgaggaatatagaagggcacatgactcacatctaaattgtaattaaagtcttattcgattataganatagacattatggagcagtaatgtgtgatcaacatctgataatattacaaaaattaattg

SEQ ID NO: 129215 - DNA, 439 bp, Glycine max
tctgtatcggtggcagcagaggagcacaaaccacatacccttgagacaggtacagatttctaattcaaggccagctgggttaccaagttaaccaatgcatccagttttccttcaagcttcttagtttcaaatgatgcacatgggtttgtagctacctcatgaactcctctaatgactatggcatcatttctggcgctaaattgctgggagttggaggccatcttctcaattaaatttctggcttcagcaggagtcatgtctctaagggctccaccactggcagcatctatcatacttctctccatattactgagtccttcataaaactatgggagaagaagctgttctgaaatctgatggtggcggcaactggcacatagtttcttaaatctctcccagtactcatataggctctctccactgagttgtctaatacctg

SEQ ID NO: 129216 - DNA, 426 bp, Glycine max
  unsure (1)..(426): unsure at all n locations
tgggcgagtcccgtccaggtagtaccgaagaagactggcctcacagtgatcaaaaatgagaaggaggagctgattcctactcgggtgcagaacagttggagagtctgcattgactataggaggctgaaccaggttaccaaaaaggaccattntcccctgccattcattgaccagatgcttgaacgcctgacaggtaaatcccactactgtttccttgatggtttttctggttatatgcaaattactattgctcctgaggatcaggaaaagaccacattcacctgccccttcggcactttggcttataggaggatgcctttcggcctgtgcaatgcccctggtaccttccagtggtgcatgaattagtatttcagtgagtttttagaaaatggcatagaggtggttatggatgatttcactgatatg

SEQ ID NO: 129217 - DNA, 478 bp, Glycine max
  unsure (1)..(478): unsure at all n locations
ctgcagcttaacatagaccacttcagggtgctgtactatttacatggacttgatggggcctatgcaagttgaaagccttggacgaaagaggtatgcctatgttgttgtggatgatttctccagatttacctgngtcaactttatcagagagaaatcagacacctttgaagtattcaaggagttgagtctaagacttcaaagagaaaaagactgtgtcatcaagagaatcaggagtgaccatggcagagagtttgaaaacagcaggttcactgaattctgcacatctgaaggcatcactcatgagttctctgcagccattacaccacaacagaatggcatagttgagaggaaaaacaggactttgcaagaggctgctagggtcatgcttcatgccaaagaacttccctataatctctgggctgaagccatgaacacagcatgctacatccacaacagagtcacactgagaagagggact

SEQ ID NO: 129218 - DNA, 466 bp, Glycine max
  unsure (1)..(466): unsure at all n locations
aataccttcatctgacttagcatcaaattttcctaagttatcttttccgttattcaatacgaaacatttacaaccaaagatatgaagatgtgagatgtttggttttctgccattgaacaactcatatggagttttctttaaaatgggtcttattaaagccctatttaaaatgtagcatgcagtgttaacggcttcagcccaaaagtattttggaagaggagtatcatttaataaagttctagcaatctcttccaaagatctatntttcctttcaacaacaccattttgttgaggggttcttggtgcagaaaaattatgctcaatcccatgcttatcacaaaataattcacattctttattttcaaactcacccncatgatcactcctaatagatataatcttgagatatttcttattttgaatgatttttgcnnagtttctaaatgcttganatgcatcattctta

SEQ ID NO: 129219 - DNA, 469 bp, Glycine max
gcagcttgtctagcgttatacgagacatatactcttatgttagccatcgtcagcaagtaccaagaagaattaaatctagccgcggcccacgagcacaaagtggcagacgagtatgctcaagtgtacgcggaaaaggaggctagatgaagggtgatcgacgcgttacatcaagaggcaacaatgtggatggaccgatttgctcttaccttgaacgggagtcaagaacttccctgattgctagcctaggccaaagcaatgacggacacctactccgcccccgaggagatccacagacttctcagctattgtcagcatatgatagaattaatggcccatataattagaaaccgctaggaagtttgtattgtcactcagatcttgaccagttataactttctgaataagatgagtttatctccatgttttactccaaagatccacggactcccgcattttatctttagcatgc

SEQ ID NO: 129220 - DNA, 479 bp, Glycine max
  unsure (1)..(479): unsure at all n locations
tgttcgtgctcgtgtgcttatcacaattattgaccgcttagcacacattagtgaattntggcttagcgcgtgcctttctcgcttagcggatgaactgaagcggtgcgattagtgagatgaagcggtgtgcttagcgaacctgtacagctcatcttcttccaaagtcttcctcgcgcttagcccgtgagtgttgcgcttagtggacgctcgctaagccagcaaattggcttatcgagaagatgaaaaacaacatttttcaaagcttgcctaattaacctgaaattgaaagaaaattattgttaaacacacaaaatggaagtactaagtatttattacctatacttaacagaaaatatttgttacactacaaaataaccataaattggaagagtttgatataatttacacaagttttatacacaaaagttagtcgtattcaccgactaacacttggtaacaaatatctgagatgagaaagt

SEQ ID NO: 129221 - DNA, 266 bp, Glycine max
tgaggctggtagtccatcctgcccacctccgctggtgatggcatccttttatatcacgtgtgtggatacttcctgatggcaaacatatagcaacccgaactattgtctaagatgaaaatatgctattgacaacacttgatcgatgtgagaacaaacgataggggaagagggagtgaggcctcacatacctttcttgtgatataggaccagagagatagactaggcgtgtcatgctctgagtgcacacgacgaagaccaacggggga

SEQ ID NO: 129222 - DNA, 459 bp, Glycine max
  unsure (1)..(459): unsure at all n locations
agcttctttnggaccttgaacaagccatcttcttctgttttagaaccacgctatgtgctcgcgactggtccctttcttcccttcgcagcttgagttcactattgctaccccatagagctccgcgaaatttgttccggccatactcttccttgcgagccctcttggtctctcgttcaagggctcttgcggtaattgcattctgttaccgtaacccggcacacttcttccgaacgtgtgtagctgccaacttgaacttctctttggcgagttttgcctttcctaactcgcttttgagagcttgtacttgctcgtcctcttccggtgcttgaaaattgtctttgctgacgactcttaacttggctagccaatctaaacctcgtatgcgaactatcagacattcgtggtacccaccaatgatgccatgacgaatgcctctangctcttgatctgttcttaacg

SEQ ID NO: 129223 - DNA, 412 bp, Glycine max
gctcttgagatatttctttcatatttgcttggtagtcgtgttattatttatactgaccatgcaactctgaagtacctgttgaagaaggctgaatcaaagcctaaattgatcacgtggatgctttggatccaagagtttaatttggagatccgtgatcggagcggagcatacaaccttgtggctaaccacctaactatgattgagtgtgcgtatgaggactcacccattcgggatgatattttggatgaccatttgtacattttgtataatattcctgattccttcccccactccttggtttgctaatattgtgaaatattcggtggcttctatatttcctcctttagcatccatagctcaaattgatcaatgtacacgtgatgatgagcattatatttgggatgacccctat

SEQ ID NO: 129224 - DNA, 444 bp, Glycine max
  unsure (1)..(444): unsure at all n locations
aaccttcgantctcactcaattcttcaccaaatcacgtcccgtaaagcccaatcttcctctntntcactcctctttcacttccaccgatcaaaatccagaaaaacttcatcaaatggcagagtcatcaaagaagagaaagggatcatcctccaccgctaccgctgctgcccatcgccgtcacggcccatccggagcacccacagcacctattcctccttctttgtcatctccaagatcatcaacactgttttcatccgatgatcaacgtctacggtacctttctcagttttcttctagaataatcttagaccctaagtacctagacgtagagttctttaatgatgaaacgtttgattgttatcaagtgtttcaaaattctggtcttgttgatttcatgtcattaaaaatgccatattatcctgaacttgtaaaggtcttctact

SEQ ID NO: 129225 - DNA, 357 bp, Glycine max
ttcatgacttacattctcctcctctttgatgatgactaccacctgtagggtataagcagcaacaaagagaaaatatctatgtgcatatagctgactcccccattggtctgcagtgagagcttatatgagacagtcgaagatttcatatttttcatatgtaaacaaattgtctcatagacaatagataaagtggcttactatggtatcttttatctttctctccccctttgtcaacatccatatcaacctctgactacagaggagaaagacgttcccacttgctgcattattctctaccattgccggaatagatgaatccaattgcctggctgtccatatctttagatctatggcttc

SEQ ID NO: 129226 - DNA, 431 bp, Glycine max
taatgacaataacatcacttctggcactagattgctgggagtttgaacccatcttctcaattaaatttctggctctagcaggggtcatgtctcccagggctccaccactgacagcatctatcatacttctctacatgtcgctgagtcctatctagaaatattgtaggaaaagctgctctaaaatctggtggcgagggcgactagcacataattttttacatctcttccactattcatataggctctctccactgagttgtctaatgcctgaaatatcttttctgatggtcgtggtcctggaagcacggaaatttttttctaagaatactctcttgatgtcataccaactcgtgatggaccatggagcaagagaatatagccagtcctttgacactccctttaaagaatgacgaaaggccttctgaaatatg

SEQ ID NO: 129227 - DNA, 330 bp, Glycine max
agaagagtgagtcagagatgcaagagaacgacctatggttctcatgagccttagggttgatttcaagaccatgggctgagtatgagcccactaatctttgtacatattatattaaggtttcattagattcgggccttgtatatagggctctagaatgtacgagggtaccctaggaaagtataagctttcacgccttgtatgttacggaaccaagactaatattagtgtcaagggtagctatataatatcacatgctataagggaataatcgatgcgtgggatggcgtataaatttatttgataggcagaagaccgcccattcttatttaa

SEQ ID NO: 129228 - DNA, 262 bp, Glycine max
ggaatggaaaaagaaagaggacgaggggaggagaaagggaaagggagaaaaacgatagagaagaaaagaagtagagaaggcaagggggaagaggaggtagaacggcgggagaagaaaacgagaagaaaaggaagagaagaaggggggtaaagaagggaaaaacaaagagaggggggacggagacaaaaggaaggggaaggaggaaagaaagtaaacggagaggggaaaaaaaagggaggcaggaaaggaaaaaagggggggg

SEQ ID NO: 129229 - DNA, 487 bp, Glycine max
  unsure (1)..(487): unsure at all n locations
ctgcagcttgactcactcatnctatacctattgttacattngacattaatggactggatcatgtatatagattgaatgaggaacaaataaaataaggatttcacttacatcatccataattgttgtacatatatgttcaaacttttgtcacctactattatttcactaacatcagaatgttaggaatatcaatgtagctccatcaataatttcaaatttactcccatcaaacttgatttctattggcttgtcgtaaatatcaaaactcaactttatcagcccacgcatcagatcattggcatccacattagccggtgttggccatgtgtagccactttgtacggagttatttatgcatcctgcatggttaatgaatgtgggtcaatagttcatgtctaattatgaatgtgttacttcatgtacaacanaacanacgtgttacctcatgtgatacaactntgacaagctgtgtgggccatgcaatgaa

SEQ ID NO: 129230 - DNA, 443 bp, Glycine max
tgttcttgtcttgaaggcaatgcttataggctttgagatggcctctggtctgaaaattaattatgctaaaactcagtttgggatctttggccaatgctgttatttaattctgtattgcagagtttcagtttgggatcttttgcttttttcttgcaaggtggaccttgtgtgtatccaagagaccaaaagggaggactctaataagaacatttgtcaagccatttggggggactcgactgctcagtgggattgtgttccttctgtgcaagctgctggtggcctgctatgtatgtggaataactccacttttgaggtagataaaaaggagaaaggttgaagtttcttattgcttgaacggatatgcattaccaataatcaatagttgttgattgtcaatgtctatgctccatgtgatcttgttgggaagaaagctctatgggatg

SEQ ID NO: 129231 - DNA, 287 bp, Glycine max
  unsure (1)..(287): unsure at all n locations
ggagtctatccgacatncgagataaaaggtattgtcggtggaatttgcccagagcttcaattttcaatttcgagcgtctcgaaatattacagcacttaatcggacatcttagttaaaagttattgtcggttgaatctgctacgaacttctattttcaagtacgagcatctctatatactacgggacacaatcgaacatctgaggtaacaantattgtcgtttggaatttgtacgagcttttgtttcaatatacaagacgcttgatattccttcggacacaatctgac

SEQ ID NO: 129232 - DNA, 352 bp, Glycine max
cgactctttacaccaagaggcaaccatgtggatggatcggtttgctcttaccttgaacgggagtcaagaacttccccgattgttagccaaggccaaggcgatggcagacacctactccgcccccgaagagattcatgggcttctcggctattgtcagcatatgatagacttaatggcccacataattagaaatcgttaggagacttgtatggtctctcagaccttgactagatacgacttcctttttgaaataaaatgagttggtcccatggtttactccaaaaaaacttgtgcaaatcaaatcactcctacatttcatctctagcatgcaatttctttctttacccactcc

SEQ ID NO: 129233 - DNA, 389 bp, Glycine max
  unsure (1)..(389): unsure at all n locations
acccgtcatatgttgttctatgtgtcgatcgggcgatgacgcaaatcaactctcccactttcacaaatcaaacatgaacccaccattcccagttgccccccttcaactgagctcacgtactcccacatagcccttatcctcgttcctctcaacaccgggtccccatcaacccctccaagcttccacaatatccaagcaattcaatntccaaatatcatgaactaccctaaaccaagagaacagggcagaggcagaaaactctgcccaacacattccaataccacaactttccctactcaaataccccagtaacattctcttcgttccgattcgttaaccgttggatcgactcgaatattttactggaggtttctagtacataagtatac

SEQ ID NO: 129234 - DNA, 475 bp, Glycine max
  unsure (1)..(475): unsure at all n locations
tccctcaatggtaaatattttctctgtgtatcatcacatcaaagtttcactacaccaaaatatgtgtagtttggtgccaaatcaaattctaactaaatcatctacaagtgataacgactgtcgaatcgctccaaaataataaaactaggaaattctgttgtataggattaacctaggtcgattcagagataccaattcattttattcctacttcaattcacttataaacaacatggaaaatttcatcaaatagtttgtaggcgaatgtaaacgaatgcgaaaatagaaaaacaaagatgaagaaacaaaacaaaatatgaatcaagtttaatagcatcaatccaattcaccanatcaatgcaaattgaattatcacaattactacgaatgatgttcaaagtatgaatgttcggtcaaatgcattagagatagttcaatcaatcaatccctatattgttaagatcgcaaatatgat

SEQ ID NO: 129235 - DNA, 481 bp, Glycine max
agcttatcccatgcttctttggccgtttttgctttggatatcttctcaaatgtatcttcatctaccgattgataaatgagaaagagagctttcttgtctctctttcttgactccttcaacgtctcctttacaccttggcttagcgagacttcatcttgctcctcgaagccattctctacgatatcccacacatcttgagctcctagtagcgccttcatcttgatactccaattatcatagttgttctttgtgagcatcggcatttggaaaggaaaacctccattcgccatcttttgaggatcttgaagctctgataccactttgttggaaataaggctttttatgtttaggaaaagtgtttaggaatattggagactttgaatagaaatttgataggaaggagaattctttatggaggagagaactttgtatttttgcttgatacaaatgtgtaggattacatttctatttatactactct

SEQ ID NO: 129236 - DNA, 426 bp, Glycine max
cttcaaggcctacagaatctacctaccatagagcaacaaagtaatcatcagcagggatgtcaaatttctggagtcagatagttgggactggaaaaatgataagaggtccgagtttcaggaggagaatgaagatgttgatgaagaacccataagaggaaccagatcactttcagacatctgccaaaggtgtaatgttgctgtgatggagcctgagggatatgaagaagctacagctgatcagaaatggataaatgcaatgaaagaggagcttacaatgattgaaaaaaataaaacatgggagctggtggacagacctaaccacaagaaagcgattggtgtcaagttgggttatagaaccaagctcaatccggatggttctgtaaacaaatacaaaggcaggcttgtggttaaaggatatgcttcagt

SEQ ID NO: 129237 - DNA, 431 bp, Glycine max
  unsure (1)..(431): unsure at all n locations
agtcttgggtccttctaagtagtaacggcaaatcattagtagcattaagtcgaaaggacttagaactttgttgttaaaacataaaaaaaaaataatgtaaagatatttaataattaaataatatttgaagttaaatgtataattttgattntattaattatttaattagtattataattatagtattatttatttaactattaaaataatcattatatattttaaattattataaaaaaataatcacataattatataattaataatttcatatattatatataataataaaattatagataaatgtataattatattattagtaattaggtacatgcataagccaggcagggagtgatatattcaaatccgaccctaaccccaaccccaacccagctttcttgagtcgaaggggaatccaaccccgatcc

SEQ ID NO: 129238 - DNA, 440 bp, Glycine max
gtataagcacgggtctgggagacaaggtcaagtggtcgctatattctaagatgatgttccgagtacattggatttggtacgaccatgccctcctgatttctagctgggaaattggcgagtggaggaacgccccggcatttacgcaacgagcataatgtaaacctttacggagttaaaagctctatagttgggcctaggctttagagtttttccttttgttaaggctatgtgtctcttgtttttgaatttataatacaaggatctttcttcatctgttcctacgtctctacccattctcattattttgcatgttcacttctttttctgaaacggcagatccgatgacgagttccccgaaggtactaatacctgggacccgactatcgacttctagcaagaaatgaatcatacggaacatgaaggaaacgaggatgtgggac

SEQ ID NO: 129239 - DNA, 407 bp, Glycine max
  unsure (1)..(407): unsure at all n locations
attgggtgaggacaagtgtgatttccaacatctgcactttatgcagaattntgctgtcaaatatgtgcagcagaattttggctttgtgcagaaaatgttgtgtatttgctggttgtggaaagagtagtacagattgggttctggacgttttatagcagatcccaacggtcacagtgtagacttatgtgttagagacttccagtagaattttcgagtcgatccaacggttaacgaattggaacgaggagaatgttactggggtttttaagtgagaaaagctgtgatattggtttgtgttgggcagagttttctgcctccgccctgtnttccttggttntgatagttcatgatgcgttgggatgtgaattgcttggatgttgcggaaacttggagagattattgggacc

SEQ ID NO: 129240 - DNA, 483 bp, Glycine max
  unsure (1)..(483): unsure at all n locations
ctcaccatataccttgtctcatggtgagaatgcccatccttgccctcggaagaaaacaaaaaataaagaaaaagaacgttcccgatcaaagatcggaagaaagcaaaagatgaaaattcccaatcaaagattgggagaaagcaaacaagaaagaaaaattctcgatcaaagatcataagaaaacaaaagaaatatacagaaagttctttggaccagacaatatctgaacaatacagaattgtcacaagtaaacaagaaaaggaaggaaaccacgacttggagtggtcctctccctttgatcgccaaccaaaatcctgtgcgctagcgactttcttgccccgcactatacaaaacagaaacggaataggcccaaacactcagagccaaattcctcaccaaaacaccattcccgaaaaagtcctattaatccatgatcacgcatgtaatctttgatttgataggaaatgatttgcanaatcaagt

SEQ ID NO: 129241 - DNA, 442 bp, Glycine max
  unsure (1)..(442): unsure at all n locations
gctgcagcttatttcataatgaaatattctgtgaccacctcatggactcctctgagaacaataacataatttcttgcactgaatcgttgggagttggaagtcatcttctcaatcaaattcctagcctcaacaggggtcatatcaccaagagctccaccactggcagcatcaatcatactcctctccatgttgctaagtccctcatagaaatattgaagaaggagttgctcagaaatctggtggtgagggcagcttgcacacaatttcttgaatctttcccagtactcatacaagctttctccactaagttgcctgatgcctgaaatgtcttttctgatggcagtggtcctagatgcagggaagaatttctccaagaacaccctcttaaggtcatcccagctgaaaatagacctgngagcaaggtagtatagccaatcttttg

SEQ ID NO: 129242 - DNA, 396 bp, Glycine max
ggactagtgtataaagacctataagagatggcaaagagatttgagattgtcttgtccaatttgaattatatcattgagtttaatgctaaaagaagctccccttctggctaccttcttggtctaaacaattttgctgattggagccctagtgagttccaagaaatctacttacatagccttgatatgcctacagatagtgctcctaagctgaatggccctcttttatcatgtattgctcctgcatcgttagattggaggaataaagtagctgttactgcaattaagaatcaagggagttgtggtaagtttttgttatcactttcataatgcctccaatgtttgttaagttcttttttataaagcatcatttgaccaacatgtagtttattttaaatt

SEQ ID NO: 129243 - DNA, 438 bp, Glycine max
  unsure (1)..(438): unsure at all n locations
ctcactcaatgcttcaccaaatcacgttccgtaaagcccaatcttcctctttntcactcctctttcactttcaccgatcaaaatccagaaaaacttcatcatatggcagagtcatcaaagaagagaaagggatcatcctccaccgctaccgctgctgcccatcgccgtcacggcccatccggagcacccacagcacctattcctccttctttgtcatctgcaagatcatcaacactgttttcatccgatgatcaacgtctacggtacctttctcagttttcttctagaataatcttagaccctaagtacctagacgtagagttctttaatgatgaaacgctcgattgttatcaagtgtttcaaaattctggtcttgttgattcatgtcttaaaatggcatattattctgaacttgtaaagtctttactgcatttaaaa

SEQ ID NO: 129244 - DNA, 269 bp, Glycine max
ctgactcggatgttcgattcaggccaataatatatcgagattctcaaaattgaataacggaagctctcgagaaattcaaattgtcataacatttcactcggatgtctgattcacgcgcataatatatcgagatgctcgaaattaaacatggaagcgcagcgcaattaatcgggctaaccttgaattctaggcctgatcgccctaatttgagtggctactttactctgagcttcaatcaaggcaccttactttggcccgtggcctcttat

SEQ ID NO: 129245 - DNA, 484 bp, Glycine max
  unsure (1)..(484): unsure at all n locations
agcttgtangattatggngtacccatcacatgtggtactangnggcggncgggcgatggtgcacaacaagttttccacatccacaatgcgcgcataaacccaccatcccctgttgcccacctccaactgagctcacgtactcccacgtagcccatatcctcgtttctctcaacaccgggtccccatcaatcctcccaagcttccacaacatccaagcaaaacaacattcaaacagcacaagctatcacagccaagcaaagcagagcaaaggcagaaaactctgctcaacacaccaaccaaaatcacagcttttctcacttaaagaccccagtaacaattccttcgatccaattcactaaccgttggatcgactccaaaattttactggaaatctatagtgcataagcctacattgtgaccgttgggatctactagcaaacatccagaactcattctgcactactctttccacagccaatcacac

SEQ ID NO: 129246 - DNA, 311 bp, Glycine max
  unsure (1)..(311): unsure at all n locations
tgattagtagggggcctgatgaccttgntggtggtgatgttcacttcgtagaactgacagaggcacgtaattagagttggaaaccccaggaccctgttggacttctttgggtccactgngtgtcctgcgggcgcgatccctgcaacaatagatgacatcgaaatagtttgaccatatcatactacctagtgcgaggatgaccttgcggggacgccctgagatatgagcgtacaatgaaccagcgtgattagtcagggtatccactgaaaaagataaataaagtctcttcgagcaaagatcaggaaatcgct

SEQ ID NO: 129247 - DNA, 412 bp, Glycine max
  unsure (1)..(412): unsure at all n locations
tctttgttgtaagggtggaacagacaaaagaggttntttggtgggtttatattcttaaacctattctaattgtaagactagtcagtaacatctcttacaacttttgtctcatcaaatcaaagaaagaattaacacgggctctcttttttttttttttttgcagatatgttgaaattataaagagagaaggtttggagatatctcaaccagctcttgacccaaattcaacaaagatacaccatagaattacaattagagctagaaccaagaaatttcataggtgattntttgttagcctatccataagcacttgctaagataaaatcaaagcaaatcactgtgaggccaactgagttatatcaaaggaaagtatgtctatcatgtagatgatgttgttttaacaattattttc

SEQ ID NO: 129248 - DNA, 421 bp, Glycine max
  unsure (1)..(421): unsure at all n locations
gactctaacatgttaataaaatttactctgttggctgactaaaaaaaagatatttattattagagaaaggattatattttctttataattcgatatagaatgtaatttttatttattcaatcattaaattatatctatatactatcgagatcgtttgcatcaacatttgttaaaattgaacgacaataaataggtaatcaaatgattcacatttagtatattttagattcttttattacgtcgattttaatttatatgaacaaaatatcaaatgaatttgcattgatataaaatnttgcatgtgtaatctatgtgaaagagactntcaatccaacatcgaattttaatgaaacatttatcccgttgaaagtatagatcggtgtaataattatcanagatactctagtgtaatttgatcagt

SEQ ID NO: 129249 - DNA, 466 bp, Glycine max
  unsure (1)..(466): unsure at all n locations
ctgcagctgaaagtcactcagacgactatgttacaaaagtttgtttntgccaatagagacccgttctcgtcgttgcacttatagagttagacatgtgattggtttgcattaagtaataaaaaaaaatctagtagttagcacctaaaatagaattatacaaacaaataagttggggataaaaaagaaaaaagaatgttgaatccaaggcgaacgtggaatcaagagaagagagaaacataacgcatcatagaccacacaaggttggtcccaatatctgtttcagccaataacgtctcatccttccatatctttatcttttcattttttttctctctcattactattttttctctcaaccaaattaacttcatcctcatacgaattataacatataatataatattataaatataaggattgaaaaggaaataaaaaaagaacaatcttatagtatactagcatagtt

SEQ ID NO: 129250 - DNA, 415 bp, Glycine max
attagaagttacacatttacacaatgttaaaggaagattaacaaatattcagtccccctttaataagttcttggatctgaccctataggtagatcatcctatattgtaagcaataatcagtcttccaacttttcatctgtgtttatggtgcaaagccatatattgctactatacataagaatagcatcccttcctatgaaatagctagatctttcctttacagctcaactgttccacccccaacacaagaggatgaaagcacaattgtatattatcctgatcacttctaagataactaatccaagcactatctaatgaagataatagcatttgaaagcagcatgaataccttcttatgatggtaagaatcacgcctggaatcctactcacattcccataatatcacggaatatac

SEQ ID NO: 129251 - DNA, 447 bp, Glycine max
  unsure (1)..(447): unsure at all n locations
ccaacttttactatatacaaaagataagcacctctttntcattntcttacaaatgaaaagagtctcattagtatttcttaaggtgtagagcattaaggtagtctaaaacctaaatgatcattgtttaaatattgtacttttagtttctttgattttatagacaactagtagggtacctgtgccaaatgagcataaaatggagaaataataaaatcatatatctaactttagcgtggaaacgaaagaataagcttatcatgttaaaattgatttacttttattatattgcattcctaggaatactaaatatataaaaaaggaatactaaataaagtaaagttggtaagaatgggtcattgaggtgataagcgaatatgcctgtattttcttatttanatattcacagagacaatcaaaaacccttctcgtctttccaccattgcatat

SEQ ID NO: 129252 - DNA, 476 bp, Glycine max
  unsure (1)..(476): unsure at all n locations
cagctttttaaaccttcagaaaaaaaaaaatgatattatcttctccataagctaacaagttaaaataaaatcagctctatggagaagttaaatcatcttagcttcccaaaaggtaattgtaacttatgcataagctaattttaacttacagggtaaaattatttcattctttccttcttatattcttctcctatgtgtgagtggtggcatttttaacatttgggtagtgcactgaacaattaccttagaacatagcccctgttttttcatatntagatttcaggattctaaacaacctataagagacttcaaaaaactgaatactttctcatcaacttcagagtgttgctaggtgcacccagcattattgttggtgcacccaacattcttaataaatggcanaatcggcctcgctttattttcctccaccgatcaactgatccggtagaggaaaatattatattttctttaaatac

SEQ ID NO: 129253 - DNA, 193 bp, Glycine max
tgactactcaccctaagaaaacctgattcccatatcttatggattttggagcttggaattgtgttgggaataaatggggcggggttttggttcattggattactctgtttgggccatacttgatggacattgtgtattggttaaatgttggacatgctgaatgaaatggtgtttctcaaacgctattaataaa

SEQ ID NO: 129254 - DNA, 502 bp, Glycine max
  unsure (1)..(502): unsure at all n locations
actaagctctggaaatggagttggcggtctcaactataaatttttgttctttctttctctcctatgggttattatgatttgcaaaacaatataagcaccttcaattgcagccgccatcaacacaaactcaaccatacaaatgacttcatcaactatacaaatgatttcatcaactataccagtaccagatgtccttcctctgttttttactatgcccctccatcctattatgatcagtccctgcgctctttaatctccttatgttctatggttaaacttcctgtcagacaagattctcagttcatcanaaacccatttggattnttaaatgctgaaattacctctgaattccagttntcaagtgaatgtcaccagtgttataatgaagaaagaggagaccattgccgacttgacagcaacggaactttttattgcgccaagaggtaataccttaacagaacttcaaaaagcttaatggttgcatgaatatatatatgtatac

SEQ ID NO: 129255 - DNA, 174 bp, Glycine max
aaaaatgtatgcgcgaagaaaatccaagcccaggcactttcggtacggatccgcaacgtacccgagagggatatcgcgaagaagacgaccgaacctcgacgatctgcaaacgagcatcaacagcacttcaagctcacaatgagttagtaccacaaaccaagcctaacaaatcaa

SEQ ID NO: 129256 - DNA, 452 bp, Glycine max
  unsure (1)..(452): unsure at all n locations
cttcggagttacagagccaattcgtcttcttctttagtcctttcttcttctggcttcaattcttcagtgggctttccttctgagtccagcatcttgggatgttcccaacctttgatgacagctttccaggttctgctatccagtgatttgaggaaggccaccattcttgctttccaatattcatagttgcttccatcgagaattggtggtctgttcactgagccgccttctttctccatgttcatcagagattatctccctagatctcactctgtgatatctagtgttggctctgataccaatngaaattctgataccatgggacagatgtcgtacaggatgtcactgacatcacgctccagaacatgcacattatatgtgtccgtatgaacagattanacatgtatatatcacaagagagatcgttacccagttcggtgctacctcaccta

SEQ ID NO: 129257 - DNA, 351 bp, Glycine max
  unsure (1)..(351): unsure at all n locations
atatggacttactagagtagcacatcagtcgaagcttgtggcatatcaaccgtacatggagaagacaatagaatgatataaaggaactctgcaattggagggccttatccgcgctatacatttaaacagtgaagaagtggattgtgagctttgcactattgttatgcactatatacaacctctatctcctgtattatngacgcttcatacgacagagatgtattcattttgtacatcacgatatacttaactgaacaagacgcgaatatgatataatgtttggggaagtatgttttcaatgcttaatcattctcagacatgatgtttaagggctaaatctatgcttgatac

SEQ ID NO: 129258 - DNA, 451 bp, Glycine max
  unsure (1)..(451): unsure at all n locations
actcagctgcggctatccttcaccaacactgccgtgattcntgtcttgtccacatttaaggcgggttgtagcaccggctccgcttccctagctgtactggaggcggttgccgcggctttatcctctatagttatctggagttttagcatgacctccgagatggaagccatttgatcttttaaggccgatagatcggccttcatctgttcctgcatgccctcttcattatccatttttctggatcgagtgttataggggtgcctttgtgctcttttagttatgatgaaattcctaaagaaataaacaacggtgagtatgccaccaaaacatgaatatgcaaatgaatgatcggagcacttggatccaccccaagggtttttatataacgtgatgagttcagaacttcttatcttataaaaagaacaaagctttcatctagccaagaatatac

SEQ ID NO: 129259 - DNA, 392 bp, Glycine max
tactcagctagaaagacttagggtatgtctttcaaattttttaccctcggcctgtgcaatcatccgtgaaatgttaatcctagtaataaccattctaattctgaattagtagatgtttcttgatggttgatatttcatgtgaacacgtgattgctgagcatttgacagtagaccaagctgctgggctaatatagggataccagcttatggatactaacaacatacgcatgaataacattgatgaattacgattacggtagataaacttggtcatcaagtcccgaatagatgtacaactctatggaactggagtttgcttccctttatctcaacttattcaagctgtcttaaaataatgccttattagatgagttttatttcttacgactctt

SEQ ID NO: 129260 - DNA, 454 bp, Glycine max
tgcagcttccatttaatttaagcgtctagatatattacgggacacattccgacatccgagtaaaaagttattgtcgtttgaatttgctcagagcatctgttttctatttcgagcatctcgatatattacgggacataatgagacatccgagtaaaaagttattcctatttgaatttgctacacgcttccatttttaattacaagcgtctagatatattacgggacacaatcggacatccgactaaaaagttattgtcgctcgaatttgcttagagcatctgttttcaatctcgagcgtctcgatatattacgtgactcgatccgacatccgagataaaagttattgtccgttgaatttgtccagagcttctattttcaatttccagcatctcgaattattagagcactcattcggacatcttaattaaacgttattgtcgtttgaaattgctac

SEQ ID NO: 129261 - DNA, 422 bp, Glycine max
  unsure (1)..(422): unsure at all n locations
tgatgttccgagtacattagatntggtacgaccatgccctcctgatttccagctgggaaattggcaagtggagaaacgccccggaatttacgcaacgagcataatgtaaacctttacggttttaaaagctctatagttgggcctaggctttagagtttttccttttgttaaggctttgtgtcctttgttgttgattntataatacaaggatctttcttcatctgttcctacgtctctacccattctcattcatttgcatgtttacttctttttctgaaacgacagatccgatgacgagtccctcgaaggtactaatacctgngacccgcctatcgacttcgagcaagaaatgaatcaaacggaagatgaaggatacaaggatgtgggacttccctcagaattagaaagaatggtcgcccatg

SEQ ID NO: 129262 - DNA, 505 bp, Glycine max
  unsure (1)..(505): unsure at all n locations
ccgtaccttaagtcaccgcggctgcagcttccatagtctaatgacatttaaacttgttttaactcactntaatctccaattaccactaaatccagatttagcttttcaaaccctcaaagcatcacacttttccactcatatcactacattctcactttttaaccctaggttaactctacccttcatctctatcagttttccatcaacaatttcagcacacaagcatcacaagcatcatcataaaaccctaaaacagaatgggtaagcttgactcacaccaaacatgacaagtttagcatgctttcaacaaattccttcacaaataacttccataaggcataaacctagtaaaactacccatcatatctcccaaacatccaatacccacgaaattatgtgagaaagaagtctacccaaacctggaatttgaagtcccacaacgtagatatgcgcttcccgactccgaanatggcttcctttcacgaattggagcagaaatggtgtg

SEQ ID NO: 129263 - DNA, 405 bp, Glycine max
  unsure (1)..(405): unsure at all n locations
ctttggcattatcangctngttatgccgcccgtgtctttgcccaaacccattccgggttcgtaaccgttccccaacataactcgggccatcattactgctgcatcggacaggcaagcttgcccagagaaggagtccacggaggaaatgcttaccacctcaaaagactggaaaaaggtctctaatgactcctctacggcttcgacataaggcatagaggatgggcagctcaccaagatgtcctcctcgcctgatacgataaccagaaatgcccttccactacgaaatttcaactttttggtggagtgttgaggggaacaactcctactgagtggatccacgggcgccccaacagacagctgtangggggttaatatccatctattggaaagtaacttgacaggtgt

SEQ ID NO: 129264 - DNA, 473 bp, Glycine max
  unsure (1)..(473): unsure at all n locations
agctngaaccanaaccggtgagagtgtgaacttattactgtgagtgaacgactagctgtgagtaataatctttgcatcaatctctgaattttagaatgaaatgtataaatgaggacatgatgaaggccatgattgtgcatacacaagccttttgaccaaaaagcttaccttgaatgataactgtaccctttgcaccctttttgagctgaatgattttgtcaataattgaaccctgaacctgaatgattatctctagataccttgtttagattctaggagagcatatggttcaaggaaaatttaccccaaatttgggggagtgaaactgtttgggatgcaaagaanaagataaggcatcagcacacaaaataaataagttatgtgttaaaaaanaacanaagaaaaagaaagcagtcaaagaaaatgtgtgctgatgtaataagggtcaaagcaaatgaaagtgaaagctactg

SEQ ID NO: 129265 - DNA, 456 bp, Glycine max
gtcatcgaagtctaccttcttgtcttgttctatatttgattcttctattccagtatcaaccattagacataggttgacttcctcttcatcctcttcatcaaaggtggtgtcgtccaagtcctcccaagtgcatatgaaacttttcttatccttcgacttatgcttctttttgtatttggacttctcctattctgggcattctgacttgaagtgtctaggctttttttcacttgtagcatattattgaacttttctcttttctttccttgaaaaccttcttggatgagttctttcatctggactcattgttgttcttccacatcttacaaatcttccttgagataaatggtagctcatcatcttcatctgatccttcttcgtcagaggagttctccatatttagtgctcccggcgtggcttctgatgatgaattggatgatgacactctggatgatg

SEQ ID NO: 129266 - DNA, 433 bp, Glycine max
  unsure (1)..(433): unsure at all n locations
ctgcagctgaagctggagaaagctgaagatgtttgtttttacttgcctaactgacgcaatcctaccccgcaagggcattggatagaagactccaagtatattgggccaaagatccaagggaaggccctagggttctcatgagccttagggtagattttgaccccatgggctaagtatgagcccgcttatctttgtaaatattagaataggttttttccttcgtttaggccttgtattttggccattctagtagtataaggttttagccttgtatttcgaggcattttgagtagtctttgtagttgggactttttttgtattttcatgtattttgncatgggggtgagcttaaatattgtagggggcgtgtagcaaagttctagcttctcatctcaaggaggtgagcttagctattagagaggtgtgtgtagct

SEQ ID NO: 129267 - DNA, 432 bp, Glycine max
  unsure (1)..(432): unsure at all n locations
cactctcatactaagctcacctccttgagaagcttccttaagaagattcttatagaagctagagcttagctacacatacctctctaatagctaagctcacctccttgagatgaaaagctagagcttagatacacaccccctataatagctaagctcaccctcatgacaaaatacatgataatacaaaaaaaaaatccctactacaaagactactcaaaatgcctcgaaatacaaggctaanaccatatactagtataatggccaaaatacaaggcccatatgaaggaaaaacctattctaatatttacaaagataagcgggctcatacttagcccatgggcttgaaatctaccctaaggctcatgagaaccttagggccttcccttggatctctggcccaatctacttagggtcttctatccaatgtccttg

SEQ ID NO: 129268 - DNA, 467 bp, Glycine max
  unsure (1)..(467): unsure at all n locations
agcttgtcactggtaatcgattaccaaaaccatgtaatctattacacaaagctntttatgaaaggatatgactcttcacaattgantttaaatttcaacgttcagatacactggtaatggattgccaatatcttgtaatcaattacaccattttgaaatcaattggaacgttgcaaattcagttgaaagcttttgaaatcaaactttgccactggtaatcgattaccagtttcctgtaacttagaaaaattggagaaaaactctnttgaaaaataaaactgtgctatgtntgttttttgaanaatcttttcaatactccccttgtgaagacttcttgatttcttctcttgaatcttgaattcatcttctcttgaatcttgaaatcaaacttctcttgattcttgaatcttcttgatttcttctcatgaaactnganataatcttgatcttgaactttgtgactaatc

SEQ ID NO: 129269 - DNA, 506 bp, Glycine max
  unsure (1)..(506): unsure at all n locations
gcttcttagtttcggatgatgcanatgggttngtagctacctcatgcactcctctaatgactatggcatcatttctggcgctaaactgctgggagttggaagccatcttctcaattaaatttctggcttcagcaggactcatgtctccaagggctccaccactggcagcatctatcatacttctctccatattactgagtccttcataaaaatattggagaagaagctgttctgaaatctgatggtgggggcaactggcacatagtttcttaaatctctcccagtactcatgcaggctctctccactgagttgtctaatacctgagatatccttcctgatggctgtggtcctggaagcagggaaaaatttctctaagaatactctcttaaggtcatcccagctcgtgatggaccttggagcaaggtaatacagccagtccttngccactccctctaatgaatgaggaaaagccttcagaaatatgtgatcctcttggacatctggg

SEQ ID NO: 129270 - DNA, 466 bp, Glycine max
  unsure (1)..(466): unsure at all n locations
ttacagtcacctgcggcatgcaagcttcagaccaaggcaacacaaaatctaggtatccaaaacccctcattntaatggattntcaagggttgagaagtgaaattgagaatgaggtaaatttggagcaaaccctaacctcccacaagtctataacatcaatttaaacttgctcaaactggatttacacctaanattccaccgaatcaaaatttgactcctcaacacccaattttaccctagaaatggctctntgttcactttggtcatttgtttttctctcttgcacagcccaagctttctcataagtcctaaatgacatttcaaactaggattaactcactttaacctccaaataccactaaatccagatttggccttccaactctcanaaactcactctntntccactcataacaccatattctcactntctaaccctaagtaactctaccttcatctctaacag

SEQ ID NO: 129271 - DNA, 431 bp, Glycine max
  unsure (1)..(431): unsure at all n locations
attgggatgagcaaaacaatcatattgaaaaggtcaccaattcaacatagaactgtggcaggcaaatcaaaatctgataatgggaatactatgaaaaacaatccatgcatgatactaaagaanaatctgagtattaagcattctcctctggtgaaagtacaagtctacaatagatgaaagaggaactgctgagaagtgacaagaatccaagaatgttccagaacataaaatacagtgaacctactcagttntactctccacaatccacatacacccacaaaaggggaaaagaactcctacaagtgacaaataataaaaccaacatacctattatccttaaagcattcaaaaccatacatatccaaaactccaatctgtatcttggaattgatatcttgcccaacagacctatngatcttagcaacaagcct

SEQ ID NO: 129272 - DNA, 426 bp, Glycine max
  unsure (1)..(426): unsure at all n locations
gagagctccaaaaccttgcttctctctagcactttttctctaggaaggtatgatgaactaagacgtggagagtggtatttataggctaagttaggagacaaggtgatgaataggacttatgatgaatgagaactcataagtcctatggttagtaagcctttaatttcctattaatctaacctcttcattttctaactcatctaagcctttaattcaattatccattattcttttatctcacctatcatttcaaacttgttatgttattttattttattttaataattatattttctaattctaccaatggatcaacaatcaacaattgttataacatccaaaattctgctatgcacactttccattaactgccataagcttattttattttattntattatattctaggcccaaacgctacatctt

SEQ ID NO: 129273 - DNA, 441 bp, Glycine max
  unsure (1)..(441): unsure at all n locations
aattcatgatttaaagagggagttgaatagctctggaggcaggtatttctgatagaactttgactcaacctgaagtggagctcaagaaatctcttcaagagcagctatggcatgcagctaatgcctatgaatcgatgttgaggcaaaaggctagagtgaaatggttaaaggaaggggacagaaattctgcttacttccataaactgattaatcacagaagaaggcacaatgctatccaaggattgatcattgatggggtgtgggtccaggaccctagtagtgttaaaaatgaggctcttaatcattntaaagacagattctctgagcagaatcttaatagaccaaccctggatggtgtgcagctaccttcccttcgtcaaagtgagaaagaaacccttgtggccagattcactgaagcagaagntacctcagctgtgtggg

SEQ ID NO: 129274 - DNA, 480 bp, Glycine max
  unsure (1)..(480): unsure at all n locations
agcttgttctatgtggccattcactnggcggattttgagtttgattcatgcatttggatttcagaacatcgcttcatatgtctgaacaatttacatatattaagtttctcacattctatacaggtagctgcattagctactcttgccattcttagagtaattgctgcttcatcttcatcaaaggacaatgaaaatgtctccatcaaatgtattacattttctcaacctcctgttggaaatgctgctttgaaggagtaagtcttcctgttttttttttttctcactttctaaattggttaactgcttatccttttccaaacctgcaaaacaaggacattagttagttatttttctttttttgcttttctttccagctatgttaatagaaaaggttggcagcaatatttcaagagttactgcattccagaagatttggttccacgtattttatctcctgcttattttcaccattataatgct

SEQ ID NO: 129275 - DNA, 453 bp, Glycine max
acattccttccaaagattatgtttacttttattgaagtccctatactctttgtgcgtctgtgcacactttctccattgatcatatctttctttatttagatggtcatgaagttcattaagctattttaaatctttttgtaaagctctcaatttgttttccaactcttgaaagttttccaataaagcaaattttctttggtaattgtatcattctgaagacaaagcttagtctcttttatcttaagagtttcacaagcatcacatgcttgagtggactcttctagagaaccatctgctgtatcttgaaagcctttctcaagttccttatgacctctggatagctctttaaaatcttttcacaagattttgtaagctcttgaaagaatggacgagtttgaaagcagctgatgataagcttacttaagagacttacggtcattgaaatctacctca

SEQ ID NO: 129276 - DNA, 299 bp, Glycine max
  unsure (1)..(299): unsure at all n locations
attgtgcgaaacaagcttcgagggcctgtaacatggcaagccaggaagaaagganaccgttgtggctcatccattggaataagcatagagtcgatccttccatgtagaaggaagccacggtcagacgctcattgtcgggatcaatgatagtcgaaactggggatttgaaatcacccgggatattcgcaataggatcactattcaccggatgaagagtgatatgggaggtaaaggagtatgtagtcagtaaattatctgttgttgaaggtgttaagcgacttaggctctatccgggtgtg

SEQ ID NO: 129277 - DNA, 432 bp, Glycine max
  unsure (1)..(432): unsure at all n locations
tgtcaaccttgtttattcatcaattatggacagaaaataccttccaccacctagagaaggtactcttgcaggcccccatcaatcaacattaatgtaatcaagagttcctttggtggtgtgaattgctttaggaaatttaatcctatgttgtttgccgaaaacacagtgctcacagaatttcagttcatccagtttctgatttcccaatagctgctatttttgaagtatcatcatacctttttcactcatatgacctagcctcatgtgccacaattgagttaagtcaggtatgctcttattggatcttgatgcaacagctactagaccatcatcaatacatgttgtaccttgaagtatatagagattacccctctttatacccttcatcaccattgtagagcctntctaaattttcatgaccccattttcagt

SEQ ID NO: 129278 - DNA, 432 bp, Glycine max
  unsure (1)..(432): unsure at all n locations
gtaacaaaatattttaacaatntagtttggctagacatggttggtgtcttggtctaagatacaaaccctctgcaatatataggaaatattggttattggatagttaatagaagttttagtacacttatattttctctgtacttgctaaataaatcagacactgtcatttcaccaacaaagttggttactgaaggggtagcaaagtgacactgttatcatgttccatctcaccatttgtgaacaattatatgcttgtattaagtggttctgtgaaataacagcaaccaactgcacaaatatatctacatatgtaaccttagtaccactggtacttttcaatatatataatatctattnttgctgangcaaaaaaaaatgagtctgactggacctaagtcatatggttattttttacttaatctttcatcttat

SEQ ID NO: 129279 - DNA, 406 bp, Glycine max
ttatgtaaaccctggtgttgtcttatggtcttatatatatatatatatatatatatatatatatatatatatatatattattgtacttgtagctctgtagtgagaagaattaaaggaatataatctttattttttatggatttaatatcttaaaagtaagaatgtgtgtaaagtacataaaggcacatgggttttacaattgactctttaattcaaattcacgccccagagcttattaatagtttatacttgggcttgtcttgtaacataagtacttgagtaagtatttgagaaagtttatcaacataatctatgatatgttcataaattgtttttgcctatatcagtaggctcaatatgataaccttaattatgaaaataactcatatatatatatatatatata

SEQ ID NO: 129280 - DNA, 479 bp, Glycine max
  unsure (1)..(479): unsure at all n locations
agcttcgtgcaactgaagcatgggaataagatagtctacactacacattgtagatttctcaaacaatattacttatatcgtcgataaaaaaagcttttaatagaagacaaaagtctggatttgcctcaatacctttatccaaaagaaggatgaaaatgagaaaaaaaatatgaaagaaaagctcaatattctttgatattccatattggtttgtcctagatgttagacattgtattgacatgatgtatatggagaaaaatatttgtgatagtttaatcggcacgcttcttaacatcaaaggcaagacaaaggatagtttgaatggtcatcaagatttggtttacatgggtatacgtgaatagttgtgtcatataacaacagaaggttgagaaacatattntcccccaacatgtcatacattgtcaaanaagagaaaataagtntatatcagtgtctacagagcgtgaaagtgccactgg

SEQ ID NO: 129281 - DNA, 485 bp, Glycine max
  unsure (1)..(485): unsure at all n locations
ctaagcttgtcttcttgggtgctgaatgtggatgaagccatttatttgagatggattctntagaatctaacaagacctggcatttagtagacttgcctcctggctgcaaaccaattagatatgaaatcattgttgtgtaacaactttgatatgaaagacctcggagaagcaagtgtaatccttggtattaagattactaggtcaaaagaggaaatttctttggatcaatctcactacattgagatgatcttaaagaaatatgattactttgactgtaaacctactagtacaccatatgatccaagtgtaaaacagtttaagaacactggtgaaggtatacgacaaactcagtacacaagtatcattggcagccataggcatgccactgattgtactagattcaacatagcctatgttgtgggattattatgcaggtttaccagtagacctagtatggagcactggcacgctattgaaaggtaatg

SEQ ID NO: 129282 - DNA, 479 bp, Glycine max
  unsure (1)..(479): unsure at all n locations
ctgcagctagttaagtagtctaacctaggagggctgttaaattaagcctagtccaacaagagggatctgaggatgaagctnggattgattcantctaactaaggatcgaggtttagtaatttaggctacaacatagaacacaaaagcatgattgattagagaagcatctttatatacatcagctggtttgttagaaagacccaacacctttacctactgttgtcaatcttacttacttgcatttntactatttttagcctagacttagtttaattctgttctaaaccatcaattatcaatgtttctttcaacaatgccttatttctgaattcaaccctgtctaatactagttccctgagtttgatactcagattcatccatttgtaaatttaaatacttgacgactcggtgcactttttggcaaaccggaatttccttgaacatattngtataaagaaaaagtggaccaaaaagtaact

SEQ ID NO: 129283 - DNA, 367 bp, Glycine max
ttttgtttaaggccttgcaccaccaccaaccctaaattaatgagggcgtagttctatatatctcaatcacgcccccgaaaaatagtttggacgatctataataaatgaaaccagtatgtacttgacaatattcattgcaattggaggagccttcccaaataactctactgataatgttttttgaggtcaagctgagtctatacttttgacgagatatttaagcctgtcgcgcaaagaccatagatacccatgtgatacagaacagccccaatctatccgtctaaagccacgacgtgttttatgagaatgcttgttggcacacacactctcaacatgttggattaatatgttataaaataaatctacg

SEQ ID NO: 129284 - DNA, 492 bp, Glycine max
  unsure (1)..(492): unsure at all n locations
gtcacctgcggatgcagcttttganacagcgttgtactggaattgatttcttttactggcnatcgactactagagaggtaaaagtctttggtaaaagaatttgcgaaaaattcatgtgctactcaatgttntgaaaaaacttttagtacttatcttgattgagtcttttctcgattcttgaatcttgagtcttgaatcttgttcttgattattcttgattcttggttcttgaaaacttgaaacttgaaacttctctagaatctttctcttgattcttgaattgttcttgactcaatcttgaaatcattctcatggcgcttttgtcatcatctttgttatcatcaaaacaccttgaatcaatcttgattcatcatcatgaagcaatgaagtttgcttctacagtgcaagcgcacaacatcacctacctacattctttgatccatctgatacaagggaatttatttcaaggattacccaatgaagatccctatg

SEQ ID NO: 129285 - DNA, 446 bp, Glycine max
tgtgggccatcatcgataagtgccacgagaagctaaatctaatggcgactcacgagcaaaggctataggatgagtatgccaagatatcagcataaagggaagctagggaaagggtaattgattcattgcaccaagaggcaacaatatggatggaccgatttgctcttactttgaacaggagtcaagaacttccccgattgctagccaaggccaaagcaatggcggacacctactccgcccccgaggagatccacagacttctcagctattgtcagcatatgatagacttaatggaccatatgaatagaaactgctatgaagtatgtattgtcgctcacatcttgactagttataactatttgaataaaatgagtttatcccacgcttttactctcaaaatcagcgtgaatcaagtcactcccgcatttatctctagcatgcattgt

SEQ ID NO: 129286 - DNA, 506 bp, Glycine max
  unsure (1)..(506): unsure at all n locations
aagtcactgggctgcagcttctcatggaatgccttaaagacttaatgattaatcttttatgggattggcgtcgattccttgaaaagatcattgtctcaccctaaaggataaggcgacgtgtcatgctttgattggagaggaatgaatcataatatagacagtgccatgtgcttcttgtccgtagcaaaagagacctttaaaagaatatttcatgaaaaccttctatattgtcctttacttaaattcaaatgttaacaattcanaacacaagagagacaaattgaatttgtataaaatagaacatgtgcatttccttttttcgtcattcttagtctttttgagtttgtttgagattggacgcacaagttaactaaaagacagtgtataatactaggtttcacaagggtggatgctcgctagatataacgtgtnggacactagataaaacagagcaatctcttcaatttatgaacaatgctaaatattgtaagccctttccatatatt

SEQ ID NO: 129287 - DNA, 496 bp, Glycine max
  unsure (1)..(496): unsure at all n locations
ctaagctttagccaatggacttaccttgaattaattcctttgatagtccttttgagcctcgtttccctttccttgttttgaagctcactacaagccttaaatgaaaaaccatgatatcaccatatccttaaggaatnttggagctttggaattgttatgggaataagtgtggggggttattgtttcattggataacttgttttgttggctatgcttcatgatgtatattgggccatacttgatgtacattgtatattggttaaatgttggacatgctgaatgaaatgttgtttctcaaaggctatagagcacaaaaaaaaaaattcgtaaaaagacaaagaaaagcaataaagttgagtgaataagatcttaaatggcacaagaatgatgaaactcttggctctactctctatgtttaaantttatctctacttctttttattntcttatnttttcttaatatgcacttaattcccattgctcctctattcctttg

SEQ ID NO: 129288 - DNA, 256 bp, Glycine max
cacaaaactggcgaggaaataagaagagaatgaagatttagagcctcttatgaaagctctgagggaagaagccacaataacacttatatgaaagttggaagaagaagaagaaaatgtattgctctcccttcccttgaagaacttgtgcacaacataggagaataaaggttctaagtctgttttctcttggagaagcgaggagatataaggctctaggcttgcttcaaatgaaacttggttaggcttagtgttgaca

SEQ ID NO: 129289 - DNA, 467 bp, Glycine max
  unsure (1)..(467): unsure at all n locations
ctcactcatattctggaggagccttgcctcgaactattgtctccttttctctctctccccttccctgcacataacattcaacaagttatataaaacgtgattttactcaaagtttaagagagattctattggaatatttccattaatcccgttgccacattattagtgttattaccacattgttactattgtatctttattaatccatcttctagaaaagcacctatttctacatatgtacccttttaactatctataatgtgttgttgaattagctttataattcaacaaaaccatggaaaaattactagcaacaagtaatgagctgattntggggggagaaggtaaggaggcacattngctcatacaacaaatgccagaactccaaacctaaattcttaaagtaaacagaacanaaaaaanaccttggtggccagatcaaacccagctactatgttaaattgact

SEQ ID NO: 129290 - DNA, 493 bp, Glycine max
ttcaacaaatgtcttcacaaataatcatcacactgtctatatttatcacaactacccctcatatcttccaataccctatacccacgaaaatcaagagggaaagaagtccacccaaacctggattttcgaagtcccactcgtagccacgcacttcacgaccccgaaaatgctctcctttcacgatttggggcagaaatgagcaccaaaggttggagctatgttggggtttcgatggagaatgagggaggagaaaatggcaacgtgagggagatggagagagaaggcttctgcaattcttctgctgagtgaagagagagagagagagttgctttttggtttttataggctctttcctcttttcttattatattattcaagctctgccacatgaccctatttgattggagcaaacagggcccactttctcttgttgactgtgacccatacttagtcacaatagtggtgaaaatatgacctttgagacgctaaaatc

SEQ ID NO: 129291 - DNA, 314 bp, Glycine max
aaagcatcgcatttgcgttcccttgactcagacagcgagatgtgatccgtaaagtcttcatgacaatccccaagaccattattaattaaaaaagaaaacatattgatattcttgatatgcaaaattgatgggggcagttcattctaacctgattgtactaaaaacaacgctcgaagagattgtggccaagtgttgctgctaaggctcttaagcgatgagcacccgctcacatttaaaatttcaagcttcggtaaagagcagaatgattcatcatcataaagcaagtctttcacaaccacgcatactaacatatt

SEQ ID NO: 129292 - DNA, 418 bp, Glycine max
  unsure (1)..(418): unsure at all n locations
aacttacttgagttgtatatcaatcgaagtaattgagatataaaacgaagatggaaaaaacaattgaaggatataaaagaaatttccaagtaaagggcattacccgcaatatacaattaaacagtaaaaaggtggtttgtgagttttgcacgaatgttatgcactatatacaacctctttttcctttattttttaagcttaaaaagaaagaattatattcattttgtacatcaaatttacttaacttaagaatacattaatataatataatgttgggttaattatgtctttaattcttaaatttttttagatttgatttttagtccttaaattcttgtttgattagtcaaggtctctcaactatttgctattaaggtttntagttcctaaatgattattttgctaaccaatgtccctc

SEQ ID NO: 129293 - DNA, 334 bp, Glycine max
  unsure (1)..(334): unsure at all n locations
gctatacgagacatcttgtcaaacaaagtcaggttagccataactcgcctgtgctttttcttccatgctatatgtagcaaagtcattgatcctgtgaagtttgatgagctggaaaatgaggccgcaattatattgtgccagttggagatgtanttttcccctgctntctttgacatcatgattcacttgattgtgcatttggtcagagaaatcaaatggtgtggtcctggttatctacgatggatgtacccggttgagcgatacatgaagatcttaanagggtatacaaaaaatctatatcgtcctgaagcatctattgttgagaggtacattg

SEQ ID NO: 129294 - DNA, 419 bp, Glycine max
gtaccttgatatatttgagggactcatggtcattatgaatgactaattccttgcgataaaggtagtgttgccatgttttcacggcccgcactaaggaatacaactccttatcataagttgaatagttaagagtaggaccaattaacttttcactaaaataagcaattggatggccttcttgcaacaacacagtcctaatgacaacatttgaagcatcacactcaattttaaaagattattgaaagtttggcaacacaagtatggggggcattagttagcttgtgcttaagaacattgaaagcttcttcttgtatctctccccatttgaaaccaacatttttcttgagcacttcattgagaggtgctgccaatgtgctaaaatccttcacaaatcgtctataaaaacatgctgagccatg

SEQ ID NO: 129295 - DNA, 435 bp, Glycine max
  unsure (1)..(435): unsure at all n locations
ctgcagctnacattntcgngaatgttactttctatttcttagtggattgattcaccttaacagcccaaaaaatcatataagcataattagatgcaacaactcactcatctccaatcttcatatgattgcaccanatgaaagcccaaacactgatgagaatgttatctcacattcatccaacatttccataaagaactccaagatggaaattggtaaatcatatataagttacaatctttaattgcataattattatatcttgcccttaaatcattcagtgagatggcatagccctttaatccctaattttttatatgaggctctcaagtggaacacctctcttattttttttataaaaattgtgtggggaaaatatttttttctatatgagcaactttgtttaaaagaagaaacaactttttcttttttttttat

SEQ ID NO: 129296 - DNA, 404 bp, Glycine max
  unsure (1)..(404): unsure at all n locations
gcatgttgtcgcaacgtggccctttgcgggcgagcgagggcgaggctcacgggtgcgctttccanaggaggaaagatgcgtggagttgccaccaacgtttatttgtggaatacgtcggaaaaaccgaaggaaaccggtcaaaatgaaaattctaagttcgggagttgtatttacgcttgaggaaggtattagcacctctcacgtttgtctcataggacaacagcctattttttagaattgtggaaattgtgttaacttaactatatttctttttatnttttaaggtcgataaaagcggggctnttgctcctacgtaccctcctttggagaganaatcagacctacgtagttctttcttatgtgtgaatcaagtgattccttttacttngaaagggtgatcattt

SEQ ID NO: 129297 - DNA, 458 bp, Glycine max
  unsure (1)..(458): unsure at all n locations
agcttcttcttcttcttctaatgggttgcncgttgcgtntaagagatcgnggatgggttgcattgtgtgaaagttttttcagccataggatcttgagataaatgtgggattatcgtatatctgttcacactagaatttttaaatgaattntcattttttttcttttttatttgtctttttccgagtttatccttgatcttctttctctcttcatcgatgcacctcactgacattgccaccctcctcctctccttcctcctattgtcatcgtcgcttcgccagaagcacttcctctgtaaaggcaaataccacatgaaggggggttgaattgtgatttaaaattctcgtaagcctttttaataaacaaatttatcatttgataaaggttaaagatagaaaacaagatttccacaaacaaacttagtcacacgatgtccaacaattaattaaaacaaaag

SEQ ID NO: 129298 - DNA, 358 bp, Glycine max
  unsure (1)..(358): unsure at all n locations
actttngtttgtgaaagttaggagtgacttagtgttaaacaatacttgggtgttcttagattcagagaagtctaagggtgtaccaaaaatggctagaatacttgtatagccaggagtgacaagataaaatacttgttttgtaatcaaattttttattagtggaattctttatagttgtgtaaaggagaattggacttagttntgtttgaatgaaccagtataaactaagtgtttatacgtctctcttaggcgattttattaagtattctattagcttgttttctcacctttttcctaccaagtatttaatttgaaaaccttntaaaaatatcgctttatatntattggacgatcaact

SEQ ID NO: 129299 - DNA, 418 bp, Glycine max
  unsure (1)..(418): unsure at all n locations
aagttgacgaccgctcttgtattagttttgcctaacccaagagaaccctttgaggtgtattgtgatgcatcaaagatgggtttaggaggagtgttgatgcagaatggtcaggtagtggcctatggttctagacaactcaagactcgagatgaattatcctacccatgatcaggagttagctgttgtagttttttctcttaagatgaggaggcattacttgttcggctccaagtttaaagtgtttagcgatcataatagccttaagtatttgtttagtcagaaagagctcaacatgcgtaagaggagatggttagagttacttaaggactatgattttgagcttagctatcatcctatcaaagccaatgtaatggctgacaccttgagtangaaatccctatatatatcttccttgatg

SEQ ID NO: 129300 - DNA, 458 bp, Glycine max
  unsure (1)..(458): unsure at all n locations
tcttgaactagcttggccaatctgctcccataacctgacctagttgttaatgtctttccttaccctcggaagcaaaatataatagaaggaaaatttccaatcaaagagaaagcatatagaaaagaaggaaaatttccaatcatagagaaagcacaaagaaaagaaggaaaatttccaatcaaagagaaagcataaagaaaagacagaaaattctcaatcaaagaatgggagaaagtaaaaaaggaagaagaagaaggaaagaaagctcctgatcaaggatcgaaagataacagaagaaatgtgcagaaaggtctttggaccggacaatatctgaacaatatagaattgtcaccaaatgaacgataagaatgagaggaaaccatgacctaaagtggtcttctcctttaattgccaccaaaatttgtgtgtagcgactttntcgccccactaaccaaaca

SEQ ID NO: 129301 - DNA, 412 bp, Glycine max
tgggatcaatactacaaaatgatgggaaaattaatgaggatgtcacacagagaatgcaagcaagatggctgaaatggagaaatgcatcaaggttatttgtgattgcaaagtacccaccaaacttagaggctaattttatcgtattgctatacatccactatgctctatggtagtgaatgttaggctttaaagggacagcaaaagaaaaatgtgagtgtggaagaaatgagaatctgataaaaaaaaatacacggagagaaaaacctgtatgatttctcttgggagaataagaacgaaaataaacaaaatgagaagataaggaatgaagcagtgggaaaaatttcaaggttttctgataccatgttagtaaacatgattcaattgagaggaaagtataaaacttagataagtt

SEQ ID NO: 129302 - DNA, 440 bp, Glycine max
aaaaccaaacattaacgattctccacctgtaaatcgaaagggggtgggaggggttgcaaagtattacaaaaacaaaagctaattcgcaaacctaacaccaaaggatcaatgattgaaacgaggggtttgtttcttcaaacgaaagaaagaggctatgtctctgtctgggttcgaatcaaaatcaaatgaaacagatgaagtcgatattacggattggtttgatgttgttctgttctgatttagaacaacacggaacgtctacttatagtttctgtatacgcctcgaatcgcccctttcacaagtaaacttggctgtgtgcaaccttctttcaataactgacacgcaaatatatatttgttttcattctaaatttacatttatgatacaaaatttaagttacgatatatattgataataactaaaaaaaacacattgaaat

SEQ ID NO: 129303 - DNA, 323 bp, Glycine max
cttggccttgaagaggcgtctcctctctctcttcctttaccattccgctgtcattcatcttccaagaagtaagagaattcattgatgaagaagatcctatgcctacaagctccaataggagcttacatcagatatcatcctcttaggtaatacattgtggcgatagggactatcagtgatgatgcatcaccaaaagagaaaaactctagatgaagcttcactgttattaagcgagttagagaccctgcatgaccacagatcgacctccactccttatggctcacatagacccaagcatagggcctaatatctcaatgtgtgtg

SEQ ID NO: 129304 - DNA, 324 bp, Glycine max
  unsure (1)..(324): unsure at all n locations
agaaacagggagaaacccatgctgtgactgtcattcctatactgncaagttttccaccaaacccaacaatgccattactcagtctataacaaacctcctccttacccaccacgcagttatccacagaggccatccctatatcaaccacaaagtctgtctaccgcacttccaatgacgaagaccacctttagcacaaaccaataaaggaaataaaacaccatcaaaaaggaattttgcagcaaaaagctcgtatggctcaccccaaattccgtgggcatatgctaaacttgatcccatatctacttgataattcaatggtagcca

SEQ ID NO: 129305 - DNA, 452 bp, Glycine max
  unsure (1)..(452): unsure at all n locations
agcttgacaaaccatanataatnntnttttangtgtatcattcaccccttccncattttcttgacaaaccataaataattctcttatagtcgtaaccttattgtattgccaacttaacagcacacaacaatcacttgataaataagtgcttccagctcctatttcttagtttttttaattaccataacccacagttgacaataatgctaaagcacaataccatataatgagattcgaatcaactgtgtgctattatttatatcccggcaagaaaaaattacctaagacacttccccaaatttgggacaaatttgtcttgatccataaatgatctcctataacctgagatagggtatacacaacagcatttgcattcagcttaaggttcaatgacaaattcattcatattangctgaacagggtgcaagggattcattcattcactggtaaca

SEQ ID NO: 129306 - DNA, 494 bp, Glycine max
  unsure (1)..(494): unsure at all n locations
ctaagcttgggccaaccctttaattaagttcatgatttttctctctactccaagcagcattgatgtgccatcattatcttctattttctaaaccctttttgctccattataattattgattggtcttaattgtcaattaattaggcagttttattatttgggctcatttagctaatttgatgtttctaatctaatttcaggaattaatgaaacattgggcttaatccggattttggttgtggacttgaagagggcaaataaagcagcgcttaccttagttaatttctaattaggaaatttcgcaattntattttatgttgctcagtgtttatttcgttttgggccagagtattgtaatacggcccagtgactatgagtgactctttttaaatagttgccttgtgattcgagtagggcattctattctgctatgctatattcattattcagagctctggttntaggttttcacgtttttctgtgcccttttacag

SEQ ID NO: 129307 - DNA, 415 bp, Glycine max
gctctagtaagttctacgatacttgtgtggataacgcctatgctatagagtatgtaactccgatcatagggatcaatttccagtcgcatagcctctaataattctgtaaagcttccgcataatttccttcagatagagctgacatccgtcaccggcgtgattcagttcagagaatctccgctccagaaccgcacgtgagaatttgatctcatacggcttctcccttatgtgtggtatgataaaaatacatagaatcaataaagattgctgtattctattattaactgaacagggctagtgttttacaaataatatctagccaacctttctgagaaaatgatctcttaacattagtatgctggactggataaaaaaacagaactccacaattactatctctcaccgctgctatttc

SEQ ID NO: 129308 - DNA, 99 bp, Glycine max
gacgacgcggacgcatacgagaggaaaacgcatacaaaccagactgaaaagaatacctgtgccgggccggacaggccgagagaaaaccaacggccaagc

SEQ ID NO: 129309 - DNA, 313 bp, Glycine max
aagcccctcatattttttttttggctacggggggaacaaagctattaacagagcacttactattacatacggaattgtcattctatgttatattacagaatctatatatcaattatgttcatccttaatgttatcaattcgttctagaccttaactatctggatcggcatggttcacaaatatatgtcttcaatatctttagtttctatcactcatagagaattagtctgttggcttctataagattatcttttaaatatctagacctatgacattattatttcttacatactcctcattttatctatattat

SEQ ID NO: 129310 - DNA, 481 bp, Glycine max
  unsure (1)..(481): unsure at all n locations
agcttgaataattacctgcatgatattccagtttactgccanaacctgcaagagcaactnttctcatctagattgaccttgaatgcaagtggatatttttgaacctcaaatttcggaccaccaccccaaaccacagtccactttgaatatgccaacacctcttgatctaatatattcatgggcctcggacacactntntgaccctntgccttttgtttctctcctaattttctgtttttcgcaaatctagtcatcatatacacttttatgcattctagcatagctacgatgggttgctccctagcttccaaaatcctaccattaaaagcctctaatatgttgttcatgaccatattgcacctgaagtactctgacatgtgagcctttgaccaaaatctcggatctagctgcatcaaccagtcatatgcctctntagagacctannaatacaagtcgtatcaatttttacaagtcatatgca

SEQ ID NO: 129311 - DNA, 485 bp, Glycine max
  unsure (1)..(485): unsure at all n locations
tcctagggcatagatgactcgccaagacttattgattaacattgattgatgaacatgtcatttatcataagctacaccaatataaaggaaatttgtcaatataatttgtattgtccagagttcacaaaatacacgtgacatcttacgtgacacttcgagacacacgttaaccttccatgtcaattctgacacaagagcacggacacccagccctaagcagtcaggcttcccaaccaataggttatctctaacctctaattatttgaatataatgtcattcctttatctcttggcaggtattcaattatctacaaagtcacacattanttgtaagtaacaattatctactaacttttatctctaagctatatattatctctaactntatctataagctactggttattatctacaagccggtaattatctgtaagggttgtaacaacctctataaataaggactcgcaactctcactcacttctat

SEQ ID NO: 129312 - DNA, 487 bp, Glycine max
  unsure (1)..(487): unsure at all n locations
agctnngtcttntaagggtatacgaattaatgcctaggattattaaaaatntaatgactgcccacacgtactgtctcgtggggggtatgaactgcttgacaagaaacttatggaggagaagagcaagcgtggacatgaggaacatttgtgtactgaaagcccaacactcaacatcgacccaccatccccagttgtaagacacttgaagtggaagatcgcctgcaaaaagcggcatggccaaatgacgtctgaagtggcacaagaaattgcagacacaaatgtgagttcatatattttttggttactgtcattgccaaataatggttagctaacctagtcaaatntattttattcaaattcaacaattgtatatccatgcaggattcattacaggaacaagcaacataggggagttctgttccgcatgggtgacaggacatactcaacacggcccttggccgacctgagcatccangccatgttcgtg

SEQ ID NO: 129313 - DNA, 467 bp, Glycine max
  unsure (1)..(467): unsure at all n locations
cgcaatccgtgaaattccgtaatgtggcggatatctaatagatgtgctntttcggagccccatctactcgcctagtcaagctcgtccacaaaaataggttgtttgaaagtttatcatttcagtttcttaccaagtaaaatggatcatttttaaggtccaacgccttaaaatgatcacccttcaagtaaaaagaatcacttgattcatgcataataaagaactacgtaggtctgatttcctcttcgatggagggtacgtatgagcaaaagccccgcttttgtcgacctcanaaaataaaaagaaataaagttaaggtaacacaatttccacaattctaaaaaaataggttgttgtcctttgagacaaatgtgagaggtgctaatactttcctaaagcgtaaatataactcccgaacttggaaatttcattntgaccggtttctttcgttttccgacngtttcacaaat

SEQ ID NO: 129314 - DNA, 359 bp, Glycine max
  unsure (1)..(359): unsure at all n locations
cttattaattgcggctttgatatgcatatcaagtttcctacgcaacgaacacaaccaaacaacaacatgttgcctgtgacacaaaagtacgagctgccaatgtgccctacatgtcatgcacattacatacgtatacaccaaaacatcatttcaagtattattcttaaacatgacttactgatggaagtaaggtccaacgtacacctctcggtcagattccttaagccatctttcaagatattgttggcactcgctgcgtctatcctttganaccaccaatgactgtgactcaaggaatgcatacatggaaccttgacccaagggttgactccactcatgcatatacctatttacatcat

SEQ ID NO: 129315 - DNA, 367 bp, Glycine max
agtgcattagaaagaatattacgacatagtgaccatagatattagaatacatcgagaacgaacatacgaactaaccctgataccagaaatacagctgtttatttccattggctctgaaggcttcttctatataagcatttgattatctgcacgagatatctgcagaccactaattagttacataatatatgggcttgttgtcggacagacccagacagatctatttattatatgttccactacatatctacaatccttactgagaaaagtgatcgatcatgagaatctacataatacaagagtggagattcacatcttggtatgcaataattcgttttgtgtcttacccgccaatacgaaaacttct

SEQ ID NO: 129316 - DNA, 478 bp, Glycine max
  unsure (1)..(478): unsure at all n locations
ttaagcgacgcggcatgcagcttaagccactaactctgaatagtgttggtttctgtcaacaatggaaagaagctacacagtggttcaagatgtcacagacttctgctttcactcctatttttcatacatggatgaactaagagaaaacttaccccatcatgaaaagccgttagatatccagtaagttatctcctccaattatatgtttgatatgaaacaagaggcttgttgagaaaaaatttagacaaattcaattgttttcttgctagactgtcattattgccatgttgcttgttggtgatcatggttggcgtgccattggatatggctttaatcacatgtattgctatatggaagagtccatacatgctgttcatagggtggaaaaggctattanaagatntgattggaagaaagggaccattcttagaaactgaatgtgtcccatttgctggcctcgccatcattctctggcctt

SEQ ID NO: 129317 - DNA, 446 bp, Glycine max
  unsure (1)..(446): unsure at all n locations
attaatcatcctgcttggatgaatgagaaaactgcggcatgtgaacacggtaacaatgatggagaaacccatgctgtgactgccattcctatacagccaagattcccaccaacccaacaatgtcattactcaaccaataacaaaccttctccttacccaccacctagttatccacaaaggccatccctaaatcaaccacaaagcctgtctaccgcacttccaatgacgaacaccacctntagcacaaaccaaaacaccaaccaagaaatgaattttccagcataaaagcctatagaattctcctcaattccggtgtcctatgctgacttgctcccatatctacctgataattcaatggtagccataaccccagccaaggttcatcaacctttatttcttcgagaattcgactcgaacacaacgtgtgcttgtcatggagaaaccct

SEQ ID NO: 129318 - DNA, 478 bp, Glycine max
  unsure (1)..(478): unsure at all n locations
cagctgcagcttacgaagacctacattgcctattcgtcttttttgtcaaagaatactaagatggggggcgtctatggctttcctttcaaatagatagctgtgctgattaccagaatcagaatccatttgcagatccatctcaatttttccaccatctaatgtacaataattacgaacaccccttgaacatgatgaaaaatctgtctttagaacagaaaacgagtttgataagttaccctcaccacaaagttccatgttgacttcttcctgtttggnttctgaacagcacacttttttctctactaaaacacctttactatgatgcttaccagcaatatgcagcatatgattttcattttcaccagagataacatcaagattcaaatccagagaaccagcccgatccactttatctttgntggctgggatcaactctctttcatattattagcattatgactatctataacttcatatg

SEQ ID NO: 129319 - DNA, 408 bp, Glycine max
  unsure (1)..(408): unsure at all n locations
tagtgtgacagcaggaacatctcacacttgtagcaccacgtgtgtacattagcaatgtcgtacagcctccacaataaagttgtgacatgtccattcctgcacgggcaacatgatattaaaggttcccccagatgtaaccatttagttaaagtccaatacatgttaatgaatacttaatcaagctgaatgcatagtttcttatcagtttatctctgtctccagctctctccacacacacacacacagagtatcttttaaaataatatgccaatgatagctacacacacaatntcttgattgtttttatcttaataaaagcatatagctaacatttctattggattttcatcatcattgatcttcaatctcttgaagaattattataaaagcataatcgtagtcaaacag

SEQ ID NO: 129320 - DNA, 366 bp, Glycine max
  unsure (1)..(366): unsure at all n locations
cacctaccaaccgcaacccaactttataatgtttttcattgccccctcctctgggcccatcatggtccattacccactgaaccaaatccttggccactcacgaccatcaacaatcagctggtgccacagcccctctcgactttggatactatattggatcgcacaacagacccacccattcacttggtgcttgttcaatggatggggcacgccctacaggacacatcttgcgagacatgggaggacgtccgtgatacttaaccaccttgagacaagatggattncggcgaacggggtattgttagcaattcacccgaggaccacattaggacgcccaaaagagatacaacatgccttgcatatctg

SEQ ID NO: 129321 - DNA, 397 bp, Glycine max
  unsure (1)..(397): unsure at all n locations
ctactcatagcncctatcacatgaagcatgcttatagggtctcttacatgaaatgatgcatcatacccgtggaatctcgccagaaataaagctatgcaataataatttgactcactgaccactaaaacaattatcagttgtgtatattggactccatgtgatgcacgaatattatatacaatatatcagaacgtcatactttggcaaaaaaaccaatacttgtgtcaaccattaccttaaaccacccaactttcattcttccccattgtgatgttcatccttctatccatttgttgtgttctacattgtcaacacaatggcacatgctcaaccctgcaccaatgagggctccttgttgcgcttaccaaacaaccatatttcaaatcatgtgtgggaa

SEQ ID NO: 129322 - DNA, 412 bp, Glycine max
  unsure (1)..(412): unsure at all n locations
atagnatcattttgataggcactgatataactggagaggtcacagaggttggtcaaggtgtccaaaagttcacacctggtgacaaagtggtagccattgttaacccatttgtaaattatcatgagtattatatttttcttcctcctgtccacttgaaatagtagtatctaatctcttctataaataaataatttctttgaagactttcctctgaaagagaattcttaggaaattttagatcttccatttcatgatgaaatcttccttgttttacttcggtacttgtgtacttacgtacatgatgaaggtatttgcaaaaaattgtctatcaccataatgtgttagttgaattctggcattttgtggcaaaacaaaaagactattacagaagctatcctaattaaaattatac

SEQ ID NO: 129323 - DNA, 494 bp, Glycine max
  unsure (1)..(494): unsure at all n locations
ctaagcttgcggattggcttcctagtaaaggatcaagtggatcttaattatgcanatttaatcatcctgcttggacgaatgagaaaactggggcaaataaagagggtgaggatgagggagaaacccatgctgtgactgccatccctgtacggccaagtttcccaccaacccaacaatgtcattactcagccaataacaaaccttctccttacctaccgcccatttatccacaaaggccatccctaaatccaccacagagtctgtctactgcacttccaatgacgaataccacctttagcacaaaccaaaaacaccaaccaagaaatgaattttcatcgagagagcctgtataattcaccccaattccagtgttctatgctgacttgctcccatatctacttgataattcaatggtagccataaccctagccaaggttcatcaacctccatttcttcgagaataccactcgaacgcaacgtgtgtttgtcacgga

SEQ ID NO: 129324 - DNA, 515 bp, Glycine max
  unsure (1)..(515): unsure at all n locations
ggatcttaagcgactgcggctgcagcttcagaatacnatggtctaactnttttcactgagctccgattcaggtttacaatatattgagtcgctcgaaattaaacatcggaagctctcgagaaattcaaatggtcataacttttcacacggatgtccgattcgagcgcataatatatcgagatgctcgacattgaacatcgaaagctctcgagaaattcaaatgggtcataactttcacactgaggtccgattctggcttacaatatattgagacgctcgaaattaaacatcggaagctctcgagaaattcaaatggtcataacttttcacacgaaggtcagattcgggcacataatatgtcgagatactcggaattgaaccacggaagctctcgagaaactcaaatggtcataacttttcacacggatgtccgattcgagcgcataatatatcgagatgctcgacattgaacatcgaaagctcttgagaaaatcaaatggtcataacttttcaca

SEQ ID NO: 129325 - DNA, 359 bp, Glycine max
  unsure (1)..(359): unsure at all n locations
gacggcatgggcatctccctccttcctttntgcccctgttgccccgattcttttggcattcgcgtttgtgaaggaaacgtaatcaaactttcctcttttcaatccaacctcgattctttccccggcaaacaccagatccgcagagctggacggcatgtaacctactagcttctcatagtagaacactggcagagtgtccaccatcatggtgatcatctctctctcaaccatgggaggagctacttgtgccgccaaatccttccatcgctgtgcatattctttaaaggtttcaccctcttttttgaacatattctgcagttgagtacggtcaggagccatatcagaaatgtactgatact

SEQ ID NO: 129326 - DNA, 366 bp, Glycine max
  unsure (1)..(366): unsure at all n locations
agcttcgagcacactccagagancnnctcaaagtancccaacggccagaagaagnacaagngtctcgtgaagttgcaaaccaaatctcgagaagaaccaacggctaacgagggctgggaagcgtttttaccgaggcagctntatgtagctccctctagaagctccattaagaggctccctccagaagcttcctcgtggcttctttgagaagctttctcaagaggcttctttgagaagctagatccttatctatccacacccctctattaactaaattaacctccttaaaaataattacgaatgagaataacgcaacanataatcatacatcaaacataattactaataatatatagatatatatat

SEQ ID NO: 129327 - DNA, 438 bp, Glycine max
  unsure (1)..(438): unsure at all n locations
ttcctttggttgctctgctagggtttccaagcttttcgttattgataagagatnggagccttattttcactattattgtgtgaggggacatttctctctctacagttattattttgtaaattccaatggttggaatgtaagggattgaattccacagctggtgtccaaatttcaggatgatccaacggttaatgagtccaggattatagttttaccaggacaaatttgggtgtatgcagaaaaaattaaagggttttggaagaggaagaagggataacaaatttatgaggaagaagaaacatataaacgcatcgtaaatgtaaaaactaacctaatatgtctctatttatagctgggatactctgagtctattatttactcaatctttctttattctattattntagaagaaggaactctatttanntttctatacta

SEQ ID NO: 129328 - DNA, 384 bp, Glycine max
  unsure (1)..(384): unsure at all n locations
accttagagcaccgcggctgcagcttgaatcattacaactggagaatnttantctctacatgaaaaaccaaatnncaaaaccgaagagtcacaactcttcatcaactaactgtgtaaacgattacaacagttatgtaatcgattaccagtaaggaattttctaaaataattctcaagagtcagaattgttcaagaagttnttgaatgaccatcaaaggcctattaataggtgacttgggatacaaaattccttagagttttcctgaacaaattgtcttatcctctcaataccaaattgtcttataacactcaatacaattccttggtcaaaactctttgaaattaatagggaaactgagagatccttaaatgaatatctttctc

SEQ ID NO: 129329 - DNA, 488 bp, Glycine max
ggtaccctaagggacccacacaacaactcgaatttataactcagttattcgccaaacgttgtgatcatagtggataagatcacatacgtgattaactcaatcacagtggagagtatcatataggtgagcaaatcactcatcatcatgtttataaagagagagagagagagcattataatgaagaggtaagcatccatccattttatatcaataagaacatatggcgtttatcgtgggactaggcaaaatatttttctttgaccttaggagtttatggtagagatgaggagcttgatgaatcaatcagtagcaatggaagaaagatccatgatgcacgggttgaatgtgcaacttgaagcattacaaaagaataatgtcagtgatttgaaagcaattagaccaaaccatgaagcacatgtgcaagcactacaataagaaattgacaccatttgagcacaactgcaagaatcgtatgcacatacctaaat

SEQ ID NO: 129330 - DNA, 310 bp, Glycine max
ctataaaatctataagtcacctctacttcttattaccacacttatatgataataacttactttggattttatggcgtacgaaaaatctgaaaacaaatgattatcctctcaaattcctatcatttggcagagatggatgacaccaccatccatgacactgctttgactgaagttggacgtcaatggaaaaaaaaggaggcgactgattggaaacatatatgctatccctaaggcatgagagagttagccatctctttgactgtataacaaactcataaaagttgccaaactcactagacctgatgccttt

SEQ ID NO: 129331 - DNA, 428 bp, Glycine max
  unsure (1)..(428): unsure at all n locations
cttcttgccaccctctaaacctccctatcactatccacacccatgacctcaaaacccaattgatttctcaaaaaggtcatcanagccccacctccaaccccaaggcacaaagccttcggcctaaaccccatccgaatccgcccctccacatattcactattcaacacaagaccagccaccataggccccaagtaagggtgcaccaaaaccttaagatcaggcacaaaccccacatcaccaccaatgcacacaccatcacaatctctctcaagaataatacaaatttcagtttgaatcanattaggcattctcttaaacctcaacctcctcctaaactccctcccatgatcactctcattntcaatntcaacatcctcaaccaacatttcaccaacatgacacccaacacattcatgaaccaccacact

SEQ ID NO: 129332 - DNA, 398 bp, Glycine max
  unsure (1)..(398): unsure at all n locations
tgttgccatcatctctctgttcttaatgaagatagtttgagttctcccaataatagtctcaagctctgaggctatgcggttggccagaattttagacacaatcttgtataacaaattacaacaagatatgggtctaaaatggttaacctgcgaggcctgatcatgcttaggaataagcgcaataatagcatggttgatctgctntaaaattattccagttgtaaagaattcattaaccgtcgcanagatatcatcaccaatgatattccaagccttcttgaagaataaagcattgaaaccatctggcctaagagctcttattgtatccatcacaaaaataaccgtccaaacctcttgcttagaagtaggacaaagtaatgccacatagcattcggtgg

SEQ ID NO: 129333 - DNA, 457 bp, Glycine max
  unsure (1)..(457): unsure at all n locations
gtctcacgatggtcacgtgctcatgcattatttgttagccgnggctatacgagatatcttgccaaacaaagtcaggttagcgataactcgcctgtgctttttcttccatgctatatgtagcaaagtcattgatccagtcaagtttgatgagttggaaaatgaggccgcaattatactgtgtcagttggagatgtattttccccctgctttctttgacatcatgatatcacttgatgtgcatctggtaagagaaatcaaatgtcgtggtcctgtttatctacggtggatgtacccgattgagcgatacatgaagatcttataagggtatacacagaatctatattgtccagaagcatctattgttgagaggtacattgcagaagaagccattgaatattgttcaaaatacttacaaaacgctaaacctgttgggctctctgagtgatggcatgatgac

SEQ ID NO: 129334 - DNA, 483 bp, Glycine max
  unsure (1)..(483): unsure at all n locations
ctgcagctancacagttagggattgatcttatttgtagtcatgagctgagcctggctaaagacaaccatcacgcttagcgagcggatcttgcgcttagcgcgcgaccttgatatttatgctctcccaaattcttgtcacgctaagcacgctgagcgcaactgccattgtagcacttcaagacttagcctcttttaacctgaaattgaatagatttcatcattaaatcaaatggaaaatattctagagacagctataacaataaaacaagatttatttacaaatctgatcgctccccattctagttactcttttgatcatttatatctcaaggaaatttcaatgggggtttaccagaaagtgcaccaaatcgttaagtatttataattaaaatggatgaatccgagtatcgaacacaaggaactaatgttagactgaattaagttcagaatcgaagcattgttgagagaacatgtataagtgat

SEQ ID NO: 129335 - DNA, 281 bp, Glycine max
  unsure (1)..(281): unsure at all n locations
tctagccanatggacttaccttgaattaattcctttgattgtccttatgagccttgtttcccttttccttgttatgaagctcactacaagccttaagtgaaaaaccatgatattaccatatccttaaggaattttggagcttttgaattgttttgggaataagtgtggggggtttttgtttcattggacaacttgttttgatggctatgcttcatgatgtattttgggccatacttgatgtacaatgtacattgtatattgcgtaaatgttggacatgctg

SEQ ID NO: 129336 - DNA, 388 bp, Glycine max
  unsure (1)..(388): unsure at all n locations
ttccattactccttccactctcactcttttacttaattatcgactagttagcactctcctttgagaagaaattacaaatatcgcattatttactatttaatgagataaaataacatgtatgagtagttaaactcattctttgtatgacaattgtcaaactcattaactaacattaatatatatgcaacacgtacagcattgcatatacagcttaaaaatcgtatgcaatgaaaaaacattgtttcaacccactctgaatcaacctgcataggtttttgacaatatataatatgcttgagatgatggtacgatgagtcacattcaatcatgaaattatcacgagtgtgaatcaatatatacttgttcntgacaaaaatacggtaatatt

SEQ ID NO: 129337 - DNA, 244 bp, Glycine max
ggagaagaaggccatatttaaagtcacaggacagaatcagataaggaacaaaaagattgcaataacaagaagaacgaaaaaacaaacgatgaataaagaaaacaaaccaaggggagaaaaagacaaaggaaaaaaaagaataaggaaggggagaacaggaaaaagaagaaaaaggaaaaaaaaatgaaacaagaaaaaaaggaggagaaaagataaaaaggaaaaaagaaaaaagaaagcaagg

SEQ ID NO: 129338 - DNA, 429 bp, Glycine max
  unsure (1)..(429): unsure at all n locations
agcttctanggacannattttctctcaacatccttgatgctagttttggaccctttatcattgacttcgaaactttataaaggaagacatgaggattgcagagaatcaatttatgttaggaaggtttacaacgtaagtcatttatctttaatgaggttttgatggaaatgtacctaattaaaaaagagacttacagaagtgttaagagaagttttgtgaaagactntggggtaaaaaaagtgtctaaatgggtgaatgtaacattgactatttacatgtcaatataatcataattcataatatttggataatcaatatatgtatatataatcataattcatactaatcaatcaatactatttatctatctatatgtcaacatgtctttatttacaaccaaattgtgactaaggtcaaaacaaattgtaa

SEQ ID NO: 129339 - DNA, 428 bp, Glycine max
  unsure (1)..(428): unsure at all n locations
gaatggaggattgccttgagggtccgcacttangcaatcatgaaacatagctccaaactcgaaggtggaggaaacatgaacagcgctaggcaataacattcatggggctccgaaaaagggggagaatggtggattgcctatagggtctgcacttacgcaatcatgaaacatagctccaaactctaaggtggaggacacatgaaaagctctaggcaataacattcataggtctccgataaaagggggagaatcgagtattgccttgagggtccgcacttaggtaatcatgaaacataactccaaactcgaaggtggaggacacatgaacagcgctaggcaataacattcatggggctctgaanaaagggggagaatcgagtattgccttgagggtccgcacttatgtaattatgaaacataactccaac

SEQ ID NO: 129340 - DNA, 451 bp, Glycine max
  unsure (1)..(451): unsure at all n locations
agcttcattaagaggcttcctccagaagcttcattatttgtcttctatcacactccagacatcttctcaaagatcccaacggtcagatcatggaagcgtgttttgtgaagttgcagaccaaatttcgagacgatccaacggttaatgaaggctaggaagcgtttttaccgaagcagcttcatgtagctttctctagaagcttcattaagaggcttcctctagaagcttcctcgtggcttctttgagaagttttctcaagaggcttctntgagaagctacatccttatctatccacccctctattaactaaattaacttccttaaaaataattacggatgaaaataacgcaacaaataatcaaacatcaaacataattactaataatatatagatatatatatcagggtgttacacatcatatattgagacgctcgaaattgaacaatggaa

SEQ ID NO: 129341 - DNA, 446 bp, Glycine max
tttcgagcgtctcgatatatgatccgcctatttcttacctccgtatgacaagttataacaatttgaatttctcgagatcttccgtggttcaatttcgggcgtctccatatgtgatgtgcctcaatcggacctccctgtgaaaagttatgacgatttgaatttctcgagagcttccgttgtttaatttcgagttcctcaatatctgatgtgcctgaatcgaacatccgagtgtaaagttatgacaatttcaatttctcgagagctttctgttttcaacttcgagcgtctcgatatgtgatgttcctgaatctaacctccgtgtgaaaagtcatgaccatttggatttcttgagagaattcgttgttcaatttcgagcggcttgatatatgaagcgcctgaatccgacattccggtgataatctatgatccttaaaatactctagagc

SEQ ID NO: 129342 - DNA, 363 bp, Glycine max
aactcgtagaattcatatatatatatatgagtagtagcataatatgcactgaatttaactttctatttgatggcaatggtcatttaatctcgattgtacatgtacattatctattttcattttcaaaagcatgcttgttgtgccttcgggaaaagaaaatccaacaccacttaagaatatcaagcacagtgcctaataaaagttactatgaagaagcatatatgaaaatattgcagcaaagcatagaacaataaattaaaatgggtcagctgagagtaagctataatctgagtagtaagactagatcaagaacatatattatcatatgaagtaaatactgagcccacatcatagtaatacttc

SEQ ID NO: 129343 - DNA, 443 bp, Glycine max
agctggtttcttcttcactaacaatctctagtccaaaacacttatgtctaagacatctgatttctctgagaacagtccttgcattgcatattcaggggacatatagccactgcattcaaatgtaaaaattgattctccgaagtattttaattttacattggacaagagaagcatacttactaggttcccacaaccctgagagtattggcctgatcttcagtccctccaaagattctagccataccaaagtctgatatttttggattcagctcttcatctaacaagatattacttgccttcaaatctctgtgtatgattcttagtctggagtctctgtgaagataaagcaatcctcgagctataccttctattatgctaatgcgttttctccaatctaggagattactttctgatggatctataaagcaagggtagcattatac

SEQ ID NO: 129344 - DNA, 325 bp, Glycine max
  unsure (1)..(325): unsure at all n locations
agcttgtagataattcacacaggaatattcttttagttctgatgccncattatgacccggaatatatcgagatgcttganattgaaaacggaagctcgtagcaaatgcgaaacacaataactctctactcggatgtccgattgtgagccgtagtatatcgagacggtcgctattaaaaacataatctcgtagcaaattccaaagacaattactatttactacaatgcctgagtgtgtcccatagaatatctacacgacccgtcttgaaatacgagctcttataaatatcaccgacataacttatacacggagttctattgggtcc

SEQ ID NO: 129345 - DNA, 398 bp, Glycine max
tctgagttcaattatgaatgtctcgagatattatctgtatttttctgacatctgagtaaaaggttattgtcgttttaatttggttagagcttctattatgaatttctaacatctcgatatattacaggactcaatcagacattcgagttaaaagtaattgtcgcttcaatatgctcagagcttttgttttcaatttcgagtgtctcgatatattacaggattcattcgaacatctgagtaaaaagcttttgtcgtttgaatatgctcagagattccgttttcaattatgagtgtctcgatatattacgggattcattctgacatccgcgtaaaaagatattgtcgttttattctgcgcagagcttactgtctgaattttgagcgtctcaatatactac

SEQ ID NO: 129346 - DNA, 326 bp, Glycine max
  unsure (1)..(326): unsure at all n locations
atccttaagcgactgcggctgcagcttgtgattggcttaccgacgaaatttctttgttgtctaaaaagaggcaaatctgatcattatgctttgatacatgccaaanaaaacaagggcaaatgaagagggtcagaatgagggagaagcccatgctgtgactgccattcctatacaaccaagtttcccaccaacccaacaatgtcattactcagccaataacaaaccttctccttacccaccccccagttatccataaaggcaatccctaaatcaaccacaaagtctgtctaccgcactttcaatgacgaacaccacctttagcataa

SEQ ID NO: 129347 - DNA, 469 bp, Glycine max
gctgatttcctttagtagggaatctttccttcctattatggttctcaacccagtccccctcattaagaactagctcctttcttcctctattgcccttagatgaatacacctttgtttggttctctatttggatcttaaccctctcatgcaacttctttacaaactctgacctagattccccttctttatgtataaaagaagtgtcaagtgggaggggaatgaggtctaagggtgttaagggattgaacccatagacaatctcaaaaggggattgcttggtggttctatgaacccccctattgtaggcaaattctacatgaggaagatactcatcccaagacttatggttgccttttagaagagcccttataagagtggataaagacctattcactacctctgtttgcccatcagattgtggatgacaagtggtagagaaaagaagcttagttcctagcttagcccataa

SEQ ID NO: 129348 - DNA, 437 bp, Glycine max
  unsure (1)..(437): unsure at all n locations
atgtacctttgaatgaatgatcgttttgaatttgaatctaacattagagttatctgtctttgtttatttggtatgttaacatacaaattattagttaattgttgctttttcgaaaaaaataattggtgcaactaaaataaagtgcgcatgtatgataaatcgttgtatgagttgacattacattgggaaatgcaaacatgttaacataaagcgtgacaagacactataagacttgactacacattggaaaatgcaagcgtgttaatataaaacataacaggacattgtaagacttgactacacattgngaaatgcaagcgtgttagcatgtcacgtcattggtgtggttgacaacacagacagaaatcatgtgcacgtgtantgtattatttngaaaaattgaatcaatgatactgaaacttatctatatatatatc

SEQ ID NO: 129349 - DNA, 462 bp, Glycine max
catttacccattattttaccttttttgcccttacatttcttgcaccaacaacttcgtcactttcatatttggaaggggtgctacatggaagttgagggcaggagaggaaaaaagatggatataattatgtatcgagtggactgaagggattggtgtggattcttccatcgtggtcttcacatatttttggttttgcatacaatacattgttggattacgaacacctaaatcggacgaccttgttagctcttcacatatttttggttttgcatatcaaatataatttttggttttgcataccaattccttcttgttggatacctcctagtcgagttccctctctaaacgacaaacaattatatttgttggatatctccaattatatttgtttctaagtataaaaaatatttatgtattgaccatgttacactatatttaatcataacatatggtgtaaattac

SEQ ID NO: 129350 - DNA, 256 bp, Glycine max
  unsure (1)..(256): unsure at all n locations
tctgcacttatgcagaagtttgctgtcaaataagtgcagcataattctggctttgtgcagaacaatgcttgtgtgtggttggctgtggaaagagtagtacacaatgagttctggatgttcgctagtatatcccaatggtcaaaatctatacttatgtactatagacttccagtataatattctagtcgatccaacagttaacgaattggaacgaagganatgttactggagtctttaagtgagacaaagctatgat

SEQ ID NO: 129351 - DNA, 502 bp, Glycine max
ctcagcttctgaggaagcctcttaatgaagcttctagagaaagctacttgtatctgcctcggtaaaaaggctgcccagccttcattaaccgttggatcttcacgaaatttggtctgcaacttcacaaaaaacttttccatgatctgacagttgggatctttgagaagatgtctggactgtgctagaagcctcttaatgaagcttctggaggaagcctcttaatgaagcttctagagaaaactacatgaagctgcctcggtagaaacgcttcccagccttcgttaacagttggatcttctcgaactttggtttgcaacttcacaagacactttaccatggtttaaccgttgggatctttgagaaaatatctggagtgtgctagaagcttccgttcccgagagcatctcttatttaagcatttcagcctttgctttcttgtagcttaggaaaaatgccatttcttcttctttctttcttccaaatccatttctaaagttccaag

SEQ ID NO: 129352 - DNA, 459 bp, Glycine max
  unsure (1)..(459): unsure at all n locations
gctngcatgannnacancnccctctttcttttttatncnncnnganatcatcacaaacttcatgatttacattctccccttttttgatgatgacaaccacctataggttaggagcaacaacaaagaaaatatctatttgcatatagtttactcccccttggttttacattgattgcttatatgagacaattgaagatttcatatttttcatatataaaaagttatctcatanaacaatagatattgtgcaataaactctcttcaagagaagaatattacaatagagatcatgtaggaatccttatagattttgcaagtgtttggccaaggatttcttttgagagagcatttgacaatgaagttcttttggaatctctctcattgtctttagagaggataagaacactttgtcaagcacaactctctctcttaaattcgtgcccaagtcacctatttata

SEQ ID NO: 129353 - DNA, 377 bp, Glycine max
actaagctgctataacctgaattggagaaatgtttttaactttcaaatgaaaatactaagtatttattacctatacttaatagaaaatacttataacactacaaaataaccataaatggcgagagtttgattcaatttatacaagttgtatacacaaaagttagtcattttcaccgactaacaactcccccatatttatagttttgcttgtcacttgtcctcaagtgacaatgacatgcagtgaactatgtacaaaggtgtatgctacaaagttattgattgcatgatgagaaagatgaagcaatgtgtacctataacttgtcttcacaaaatatgcggatattcaaagagaagaataaaatgtgaactgaacaaat

SEQ ID NO: 129354 - DNA, 407 bp, Glycine max
  unsure (1)..(407): unsure at all n locations
agctagcttctacataaattgagtttttattctctcttcccttancacatnnattgaattacaatcaattttttcttatatgctcaaagaacattattaaattgatggttgcttcttcttctgcattctgagcctattcattataaggggcgtaaaagtttgtattgggacataattcaccctctctacgttattgggccacttgctaacattaccaaattcatttgggaaagacattaagaatacatttatatcttttaagtacgattaagtagcactaatacccctaaagtttgaaccatgagattctgctccattatatgaaaccttatagaataatcccatagatcctattaccattatcgagtatattttgctacaactctaccgatttagacgctaatatg

SEQ ID NO: 129355 - DNA, 462 bp, Glycine max
  unsure (1)..(462): unsure at all n locations
tcatggtcactatgaatgacaaattccttgggataaaggtagtgttgccatgttttcaaagctcgtactaaggcatacaacttcttatcataagttgaatagttaagggtaggaccacttaacttttcactaaaataagcaattggatggccttcttgcaacaacacagccccaatcccaacatttgaagcatcacactcaatttcaaaagatttttgatagtttggcaatgcaagtatgggggcattagttaccttttgcttaagaacattgaaagcttcttcttgtttctctccccatatgaaaccaacatttttcttgagcacttcattgagaggtgatgccaatgtgctaaaatccttcacaaatcatctataataacttgctaagccatgagaattcctcaccttagtcacgaacttatgtgtangccattcttgaatagccctaaccttctcctca

SEQ ID NO: 129356 - DNA, 350 bp, Glycine max
  unsure (1)..(350): unsure at all n locations
acctattacccaacccgaacctttcacgaatctccatgaacttcaccatacttactatgccattcccatttcagcccaaacccattccgggcaagggcagctgaatattaagctgatctttgaacttcttcttcttcttccttagccaaaagctttctgatttttctggtttccaaactttgttctttcacaaaaaacaaaagngngctattcatctttttcattcttttctccctttgccaaaaagaattcgaccaggactaaccgnctgaattctttntgngtctctctctctcctcttccaaaggaacgaaggactaactgcctgaattcttttgggtctctcttct

SEQ ID NO: 129357 - DNA, 345 bp, Glycine max
  unsure (1)..(345): unsure at all n locations
cttggagtttccaagtgccaattcgncttcttctttagtccttcttcttctggcttcaattcatcagtgggctctccttctgtgtccagcatcttgggatgttcccagcctttgatgacagctttccaggttctgctatccagtgatntgaggaaggccaccattcttgctttccatattcatagtggttccatcaaaattggggtggttactgtcctctttttctcatgtcatcaaatattcctaactactctggatcgaggtgcttaaccatgaattgaacgggacaagcgccgagtcactacctcaacatcgaattttcgtacaataacatatccaaatgta

SEQ ID NO: 129358 - DNA, 276 bp, Glycine max
agcgaatctattatgaactaatgatttggtaagtgattccttccttgttcaatctgtagccgagtaagggtgttaaaatgtggatgttgttctgttacgtatttatcagtatcaacgaatagcaccactgctgcaattatacacaataaacccactatctcgtgcactttaaaagaccaacttaatttagaaaaactttttgcatctagctcattcaactttctaagttttgcttccacatattttgaataagagcattatatacttatctatcaa

SEQ ID NO: 129359 - DNA, 357 bp, Glycine max
cagacatggttcaagaaggtgctaatgctacctcctcacatcaaggcaactcaattgcttgcaaaacatctctcaaagccaacccatacttaaagctttaaagccacttaatgttaagaatgaggcggtaggtcttagtaatagagtttatgtgccactagatacaactaatcaacttggtggtatgtcaagcttactcaagaattatatctgtcaaaaatcgaacttgggaactactcaaaccatttaatcttatctctaacacatcaaacacttgtactcaatcacctggttattagaaacttaagacaccaatcaaagaagcggtctcaagaaccaagagaggttctctcacac

SEQ ID NO: 129360 - DNA, 285 bp, Glycine max
  unsure (1)..(285): unsure at all n locations
tcccgacccaacccgggcatagtcagtcagtgagaacctgtgatgtacctaagcaggcgagctcctgacagtcaacagataaaaggaattaagaccacaaagcaaggaggcttgtgtggtggctggccagctgtgaactttgattaatatatgggatatggcctctggtaatcgattaccaagggtgggtaatcgattacaaggcttaaaaatgaagacaggaggctaagatggtctctgngtaatcgataccaagggagtgtaatcgattaccaggcttgaaaa

SEQ ID NO: 129361 - DNA, 473 bp, Glycine max
  unsure (1)..(473): unsure at all n locations
gccacctgcngcatgcaagcttgaagcacttcgattgtactattcatttcttgatgcttctatttgtgatgataagannaataacataaaagagaagatgtacaagctctttgatgaatatgtgagtataaagtcaagttcatctactacatcaagttctcaacaacctactattgaagatttcagtatagaagaaaatcaagagatggatgatccatgtaatgttagtcttttgtttaattatttaatagttttatgatccaattcattttatttaatttttctcttatattggcataggaatatatgttcgaatccgacaagtgcaccggatcgcgcaagtagtataatatggtaagaaccgagtatcgaactctcggcgaacatctgttacttggtaaagctatattcagtgaataggtgtctagtattaaaatatatgtgtggactgtaaacaagtatgtaaactaact

SEQ ID NO: 129362 - DNA, 403 bp, Glycine max
atctctagtttcccattcccctcttagctgatggattaccaaattttgttcgccgtataccttgagtagtttgacattggagtcaatcgctgcctagacggctagggcacatgcttcatattctgccatgttgttggtgcagtcgaatcctagcctggctgtgaagggtacacattgattgtccggagagaccaatactgccccaacgccatggcctagaatgtttgacgctccgtcaaaccatacgatccatttgtcccgatcttcgtgcaattgttcctcaaacaaagccatgatgtcctcatccgggaattcaggatgcatgggctgataatcgttaagaggctgttgagccaaataatccgctaaggcgctgtcttttatcgccttttgagtgacgtag

SEQ ID NO: 129363 - DNA, 452 bp, Glycine max
  unsure (1)..(452): unsure at all n locations
agcaccgcagctgcaactgagacaatgttgcaattcaacttctaagtgntttttttganngangatactactgggattcaactatatctattaaattatatctactagtgtatctacatacatcaccaacacacaatctcagttttgtcattagcttatcccaaaataatgtctactcgaaagcaaatcgttcaggctattatccatcacaatgggaaaatgggtgattcggctaatgaggtggagttcaattccagaaaaacgtgtaatattacatgtgaacttgatgtcacatgttatttaataagcaacaatttgatggattgcccaaaagaatntgtctatgaaccgagaatgctctttcaaagaatgcgggtgtccaacaaagttgatgtcaaatatgtagtaaatatttattgtataaaaataatggattttcaaggtcataaagt

SEQ ID NO: 129364 - DNA, 211 bp, Glycine max
atccaacaagcatatcatcgacttttggcattaagcatgctgggcattgctttgaaaccatggaaataaggacatggctattggaaatacaaggacgtttagtgattgcacaaaggcctaacaacaatttcatggcatttcatgcaagggagacaacaaggagaccttttttttgtaaactgaaaacatggaacccacaggatatgctaat

SEQ ID NO: 129365 - DNA, 445 bp, Glycine max
  unsure (1)..(445): unsure at all n locations
agcttgcttctacatatgagcccacttatctttgtacatattaaatttatgtttcattattntntgggccttggatttagggctccataatgtaggtaaggtattctagaaatgtaggatttttaatcccttgcattttagggcacctanaatagtttttgtattaggggtagttttgtaatttcacatgtattaagtgaatatttgatatatcttggtaaataaatttaattgaatcgggagaagcccaatccaattaaattttagagggggaggtgagcatattattgctacaccccattgccagatcatatagtcacactttgtgcatgttcttcatgctttacatgcctcatgccacctaagcatacttagtggataatcttggacttgatcttgaattagtgtgatgaaccatagctaaaattcactaatcataattagt

SEQ ID NO: 129366 - DNA, 451 bp, Glycine max
  unsure (1)..(451): unsure at all n locations
atctgacacctctaatngcaagttcttattcttgttctttctntggctaacatacacacttgctcaaactcatgataagaaacacaaattccatcacaatcatgcactcaatccaaaatacagcatacaaccattntcacaaaataagatataagtgtttcactggcatgtcattcaaaattaagttaaactgttcaggatgcttcaggctaagcaactaactatttataaatagaacttaacaaaaaggacttactgtaataagactataattaaaataataattgtcgcaacctaccctnttgcgggcgagcgaggccaggctcacgggtgcgtcttccatgggaggaaaatgcgcggagttgccaccaacgtttatcgaaaggaaaacgttagatnaaccaaaggaaactggtcataaagaatattccagaatcgggaagttatgtta

SEQ ID NO: 129367 - DNA, 369 bp, Glycine max
  unsure (1)..(369): unsure at all n locations
acaacaagctatactcattcacaatgcgcgcataaacccaccatcctctggtgcccaccttcaactgagctcacgtactcccacgttacccatattctcgtttctctaacaccgggtccgcatcaatcctctcaagcgttcacaacatccaagaaaaacaacattcaaacagcacaagctatcacagccaagcaaaacagagcaaaggctgagaactctgctcaacacatcaaccaaaatcacaggttttctcacttaaagaccacaganacaattccttggattcaattcgttaacccgttgatcgacttcaacattctactggaagtctatagtgcataagcctacattttgaccgttttgatctac

SEQ ID NO: 129368 - DNA, 314 bp, Glycine max
  unsure (1)..(314): unsure at all n locations
ccacagagtctggcgacagatgcagnattttgattcatggccaattgggttaccaggttaaccaaggcatctaagttaccttcaagcttcttagtctctcctgatgaggatgaatttgtagctacttcatgcactcctctaatgacaataacatcacttctggcactaaattgctgggagttggaagccatcttctcaattaaatntctggcttcagcaggggtcatgtctncaagggctccaccactaacagcatctatcatacttctctccatgttacagagtccttcatannaaaaccttttatagaattg

SEQ ID NO: 129369 - DNA, 336 bp, Glycine max
  unsure (1)..(336): unsure at all n locations
ccaacaatggcagccacctatgcccaagttagtcccacaaacaaaactcaccaaaatatgctcacatgccattgaggcatttcaccgagcacttggtgggcacacctttatgcacaaaaagtggtgaatggtggcaatgtgacatgcccaatcacttcagactatgccattggcctacggccatcccatacaacccctcaattccaacaaacaatcatgaattcgagcacacattgtctcatgaattntgccaaatataagcaattagagcacaaaaatgaatcaatggaaagctagagaaccaaagcatgacgtacttacttngtggagtgagta

SEQ ID NO: 129370 - DNA, 437 bp, Glycine max
  unsure (1)..(437): unsure at all n locations
ntagtggcccttaatttgattcaatattngacattcccattatgtattccctgacatttccttttccttgataagttntgaagtagagtacttgtttccgccttatcactttttgcaaagcgcttttcaatttcagcaaagaaatctttggcactagttctatcatctaacacagtgtccctaaagatctcaggaatgccacgcttaatgatcataagactcatgcaatttgagtgatcccacttcttatgaagtttcctctattcaaaggtactggaatccgtaggagaatggggtttctcaatccttaatgtaaggtctagatccatgcaaccaagaacaatttgcatgttctctttccagtccttaatattcgcaccattaagaacttgaaccgaattcagattatcagatataaaaacaacaactggaaagat

SEQ ID NO: 129371 - DNA, 425 bp, Glycine max
  unsure (1)..(425): unsure at all n locations
agctngcttctacaatctccnnccttttgattatgacaacttctgaaatcaagaaacacacacacacaatttttcctagtcaatcactctcatagatntccattctccccctttgttttgtattaatgcttctcttaaaattaagttgattactcatgtgagttcatgatttaatccttatttctctcccccttaggcatcaacaaaaagccaaagtgcgtaacaaatttgaagcatgtaaatataactaagcatccacacaacattcatgaaaaatataaaccaaatcatgaagcaagaaccacgaatagatcaaatataaaatccacatagtcaaatagcataactaatatttggttaaacatagcatgcanataaagaaataataaatntatcaaatattatcataatatagccaaatacat

SEQ ID NO: 129372 - DNA, 431 bp, Glycine max
tcatgccatgagatgattattgtcgaaaaggtggtggaatgtctgtagaggacgatggggagtgaccagatgattcagcggtagcaagtttgtgaatgagttcgtccagcttaagggtcatggtgtgaagggtctccctaagggataattgatgggttatgagcttggtgatggagtcctcaagtctgtcggagttcaccttggattgagtcggttcctccattgaagacgaacaacgagagcaccaaattgttattgcacgaggatgataacaagcaagaacctggcttcgagggccaatgacctccagaataaagagaaggagaatattaaggtattttcattgcctctgctttattacaagaattctatatttatagtggtattacaaataacagaatttgtaatttagtgctaacagaattagtgga

SEQ ID NO: 129373 - DNA, 443 bp, Glycine max
  unsure (1)..(443): unsure at all n locations
ggaccttaagcacctgcggctgcagctgagaggattttaatgangatatattgagggatagaaagagagaggggggaacacgaaattgaaggaagaaaaagggagagaagttgaactttgagttgtgtctcacaagactctcattcatcaaagttacaacaagtgttacacatgcttctatntatagactaggtagcttccttgagaagctttcttaagaaaacttccttgagaagcttctttgaaaaaacttccttgagaagctagagcttagctatacacacccatctaaaaactaagctcacctccttgagaggcttccttgaaaagctagagcttagctacacacccatctaanaactaagctcacctccttgaaaaaatgcatganaatacaaaaaaaagtccctactacaaagactactcaaaatgccctaaaatac

SEQ ID NO: 129374 - DNA, 251 bp, Glycine max
  unsure (1)..(251): unsure at all n locations
gagggcccatctcaaccnggagcgnctcgaataagacgggacgcaaccggacatccgngtataaagaaattgtggtcacaatatgctcagagcttctaatctcatttttgagcgtctcgatatattacgggacacactctgacatacgagtgaaacagcattgaagggtgaatttgatacgagcttacggggtcaatttggagcgtctcgatatattacaggactnactcggacatcattgtgtaaagata

SEQ ID NO: 129375 - DNA, 238 bp, Glycine max
  unsure (1)..(238): unsure at all n locations
atacggaacgctccactgccttgcctgagaataacaattgcttgaccacaacaacgctggaggcggtaagggacaatggtctttcatataaacctcgtgtacatgaacaaagattatatcatgcggtgaccgtgtcatacgaaccagcgaagtcattgtataattgttatactaactatattcaatgtacctgaacaaaatgattntcaaacacgtgaccaacacatatcatgcggtg

SEQ ID NO: 129376 - DNA, 441 bp, Glycine max
  unsure (1)..(441): unsure at all n locations
agcttgtagggaattcaaacgacaataactttttactcggatgtctgattgaatcgggtaatatatcgagacgctcaaaattgagactagaagctctgagcaaatntaaatgacaataactttatacacggatgtccggttgagtcccgttatatatcgagacgctccaaattgaaaacggaaactcttagaaaattcaaacgacaataactttttactcggatgcgcgacagagtgtcgtaatttatcgagggatgctccaaattgaaaacggaagctcgtatcaaatccaaacgacaataaacttttactgcgatatctgattgagtcccgtaatatatcgagacgctcaaaatttagatccaaagctcagagaaaattgatatgaccataactctatacacggatgtccggttgagtcctgtaatatatcgaggcgct

SEQ ID NO: 129377 - DNA, 345 bp, Glycine max
  unsure (1)..(345): unsure at all n locations
gagcgncttgatctattacaggactcaaccggacatccgtgtataaagttattgtcaattcaattttctcagagcttcggatctaaatgttgagcgtctcgatatattacgggactctatcagacatccgagtaaaaagttaatgtcttttgaatttgatacgagcttctcgtttcaatttggagcatctcttcataaattaagacactctgtcnngcntncgagtaaaaagatattgtcgttagaatattctaagagttttcgttctcaatttggagcatctcgatatattacgggactcaaccgaacattcgtgtataaagatatttgtcattcaatttgctc

SEQ ID NO: 129378 - DNA, 395 bp, Glycine max
tcttcactactagaaagtaagggtttaacatcggttattaaggactttcaaaattgtttattaatcgatgttaaaagtaccgatgttgatagtaataatgttaacatcagttttgtattaagccgagtaaatattcgcgcaagtagtataaaacggtaagaaccgagtatctaactctcggggaacttgtgttacttggtaaagctatattcagtgaataggtgtctagtgtgaaaagagatgtgtggactgtgcacaagtatgtaaactaactattaaaaggaaaatcacgtgagtaatgatgtgtaaagaaaagtaaacaacacattggtcttcctaataggtgcctgatgttaaaggatattctctacttaacaatgttcatgtgttctatg

SEQ ID NO: 129379 - DNA, 355 bp, Glycine max
  unsure (1)..(355): unsure at all n locations
tatttctttctagacctatactgaccactcctttcacaaccaattaacacaaatgaagtccttcctctcataccagtgtttgtgtttgacctcataatcaccgcgacaaatccaatttcataagcaaatgatcgagcccactgcaaaacatcatcttcagtagcaaacacctacaatgcaatccacacaagtttagtcttcaaagggacattcattntattaatttaataacaataaatcacattattacctgagaagtattaaacgtatcagaacaatcaacatgcttcgtcttcattttcatcattcctaataaacgttttcaaacattatattatcatacattcattgatct

SEQ ID NO: 129380 - DNA, 426 bp, Glycine max
  unsure (1)..(426): unsure at all n locations
agctntgtgtattaatttatcatggaaatttatgtttatctatgatggtaatgtttaagtttaaccagtactctcaggttcaagtcaactgctttaaatgtttgaaaagagtatngtcacctacagtggtccggtctgggtcaaatagaatgacctctatgtggtctagactatagacaaaaaaattaggtaaaaatttgttagagaaaatcttgaagagcatgaagcccctagtttagttttggtttagtaattttagaatgcctaacacattntgataaatgaaatatttttattggttggttttagtctaggcatgtgcgtgctttagtttatttttttaatctttaaatgcttagtgtttgatcagttgtgaagtagatgcatatttccttgtctctaagtttcttaagaactcacttctac

SEQ ID NO: 129381 - DNA, 395 bp, Glycine max
  unsure (1)..(395): unsure at all n locations
tattacanaatgtaaattctctaacaggaaatatacttcataataaatgagattgaacctcgttgatagcaagcacttggtcgttgctcttctttaaaaaaggatattgtgaaaaaagacagaaactaataaagaaggttgtgcacaaaacatgagaagatatatacaaataaccttaccaagtgaagtgagcttcttcaaccaacacaagtgacaacctctgtacacccggagaatgaatcttagatgcattnttaaagtgtttctatgttattttccaatctaaattgaagttttaccagagtaatctatgttgatccaatgcanagctttataatacatattatcaagaannaaaacttaaagttttatttaagagcagtactaaactaagc

SEQ ID NO: 129382 - DNA, 446 bp, Glycine max
  unsure (1)..(446): unsure at all n locations
agctttggagaatgttttctatacaaaagttagttgtatatagcgactaacacactcccccaaatttacagtgatgcatgtcctcaagcaaagaatgaataggtcacttgtcctcaagtgacatagatagtggccaatcaaaattaaatggtgtctgattcatcaaggacattaaccatatgaactgaatatcatggaatgcttaaatcaattacttctcacaagcatgcagtttttcaaagataagagcacaagtattagagtcacagctgacataagctagtaagcataagagaaatcaaggaaggatcatcaaccaaaaccttacagtcattgttgcgttcaagctcaagtggttagggttattccatcataaacaaccaacacaagttccaaccttggcattttatctnctatcatacagtaatgaacacacaaaaatgaat

SEQ ID NO: 129383 - DNA, 455 bp, Glycine max
  unsure (1)..(455): unsure at all n locations
acttgatctagctagaccaactgttcttaatgcaggacatgttttggctaggaatccaatatttggttgtaggattagaaaagcatgaaaatagggacttgtttgtaagaatttgggctgccccatgattggcactatgcacctaagtaacgtgggagatgcttttcaatggtgtgtagatatatgtgtaaatatatatggcataaaaatatgttgcaaagtgcgtgaatatatggcataaaaataccttgcaaagtgaatgaatagtaaataatgcatttcanaatatgtgtatttgtggataggtggcataagatgcctttcaaaaaaaatgtgcccgtgccaaaaatggcacaagaatgcttcccaaatgaatatatgatgtggaatcgccactcaagtgtagatagatggcatgaaagtctcttttcaaatgcaagtgtgtgcgtgacgtg

SEQ ID NO: 129384 - DNA, 415 bp, Glycine max
  unsure (1)..(415): unsure at all n locations
agctnncnccttgtatatttatgctannnattttcagtaaggcgganacgntataacatcgcaatttctaatgactgaattttctgtctgcagaaaantttagagctttgtgtacaggtacctgtagactcttcatttcgattattaatttgatccccatcggtccttgcactgattaggagtgttccacgtgtacgggagaaaggcaagagtcgaaatggcataaagcttcattacaaaggaacaccatttcatcggataatatctggttttgtgattcagggtggagacattgctcatcatgatggtaaagggcctgaatctatttatggtggcacctttcctgatgctaattcaagataaacattctacgctggtgagtaacattcgctggtgaaagccattcctttattat

SEQ ID NO: 129385 - DNA, 377 bp, Glycine max
  unsure (1)..(377): unsure at all n locations
ttacataccaangaaattctctctatcagaaannngaacccaagacctctttcgtcaatgatggttgatcataccaattaagccaactctctttagtctttagcatatatgccacgttatccttctattttcctgtttaatacttgcttatggcctaccaagtgctttattaaaaaatgtgatagtctaacagtcaacagaattcaatcatggaaacaaaacaaaacatccttaaccttggcagtcagcacatgatgaatccacatttggtggacaccttatatcttcatctaaatctgccactaaataacccatagttaagtgaanagtagagaaaaatacatatatgtgtcctctttagcatgaaccttacgaat

SEQ ID NO: 129386 - DNA, 351 bp, Glycine max
tctatcaaatactatgctagacggcacaccatgtaacctgaaatcctacttatatataaggtggccaccttctccaaggacaatatgatactaatgggaatgaagtgaacatacttagtcaatctgtcaacaataacccagatagaatctaaacctctaagggttctaggtagtcctaccacaaaatgcatggaaatactatcccacttccattgggggatctctaacggatgaactcccctgaaagactctgatgttctatcttaaccttctgacagactaggcatgcatacacaaactcactgaccttctcttaatgagggccaccaaacatcgctttaaacctgatac

SEQ ID NO: 129387 - DNA, 445 bp, Glycine max
  unsure (1)..(445): unsure at all n locations
gatcttaagcacctgcggctgcagcttttagccaggctcatcttggtggttaagctccttcttccatggcttattccctagtggatagcgcctcctctcacctcttctcctttgtcttccgttgcatctccatggtgaaaaatcaccactgaaggacctcattgaagctcaaagatccagcctccatagaagccccacaagcaagcttccatcaagtgctcgcttcaaagtgaatcaacttgtcgggttcccacggtggatgccatcataatactaatcgcgcaaaaactcgtcacccttagaggttcttacaattgtgtgattgtacagttcatagcttgcaacttaatgtcatcactttacacttcacaataacatgtataatcacattaaggaacgtttaattccacacttgntcataacatatgtctcatcataccctctc

SEQ ID NO: 129388 - DNA, 389 bp, Glycine max
  unsure (1)..(389): unsure at all n locations
tgactntggtttagacatgatngatacatganttgggtcttgtatgactngatttgggcaagattggatgagggaaagtgtgattttcgaaatctgcacttatgcagaattttgctgtcaaataggtgcaacaggaatttggcttgtgcagaanaatgcttgtgtgtggttggctgtggaaagagtagtgcagaatgagttctggatgttttctagtagatcccaacggtcacaatgtaggcttatgcactgtagacttccagtaaaattttggagtcgatccaacggttagtgaattggatcgaaggaattattactggggtctttaagtgagaaaagctgtngatttggttggtgtgttgagcagaagtttctgcctttggctctgt

SEQ ID NO: 129389 - DNA, 437 bp, Glycine max
agcaccgcagctgcaacttggaagaaaaaattatgctgagaatgaagctaacaagtggtttctcattggtgaatacttctacagaaagctcactaaatgggagcctcatgtcacaacctacctcatgacgggacgacaacagcaaaatagataagccaaagtgttcgtctcctagggagaaaacgcgtggagtcgccaccaatgtttattcgaggaaaatgttagaaaaacgaaaaagaggtctgcaaatttcgaaaagaagggttcatgagttttttacgcatgaggaaggtattatcacccacgcacccgtcacaagggacggcagcctttaatcaagtgtgcacaacgtgactccaaaattatttattcttcccttttatatttctctatatttttgggctcgacaagggggtgcccttgctcctacatatcct

SEQ ID NO: 129390 - DNA, 416 bp, Glycine max
  unsure (1)..(416): unsure at all n locations
atatcgagactttttaacgggtcatagcngttttttcaacacctgcatggattttttttttggaaatcatatatgacttgaacggtgtacatatacatatataattgtcaccatttgatacttaagatctcataatctatacattcggaagctcaaaaaatatctccaaaattgagattaatgaactcacgttgtttacgaatatgtcattatatttttgttaatatcagtttttataaaaatcgatgttaacaaccattctttttactagtgtaaatttaattacactactagattaaacttaaggtaatgttatttattatcatttattaaagctcaccggcgacagtagaatcatcatgtcttccgccatttctctgaataaatatataaatattcacaccttcatctttgac

SEQ ID NO: 129391 - DNA, 347 bp, Glycine max
  unsure (1)..(347): unsure at all n locations
gcttctaaggaagttntctcaagaaagcttctcaaggaagctttctantctatttatagaagcatgtgtaacacttgttgtaactttgatgaatgagagtcttgtgagacatacttcaaagttccaattatctacctctnttattccttcaatttcgtgctcccccctctctctttctctccctctttcttttcctccattgaagcattctctccaagcttcttatccaaggctcatcttgatggtgaagctccttcttccatggcttattccctagtggatggcgcctcctctcaccttttctcctttgtcttccgctgcatctccatggtgaaaaatcaccattg

SEQ ID NO: 129392 - DNA, 345 bp, Glycine max
  unsure (1)..(345): unsure at all n locations
gcttctttaacgtcattagctggacgccttatgacttgtcggtcactgacctagtactttgcttaccttaggctttggacttggtagcccgctggtcggccatgtgttgtatgcaacgctctaacctttgtgcggatgagctgatgtgaactctatatgtggcggcggtgtgtctattgcccgttaccgcgcatcccaatgctgctgtggtgtttcgccctgcgcctgcctgggggcgcagtacttcttgatgaaagctcgaatggtatggggggtctgatgactttgctgggggcgatagacacntctgagaactgacagagacccgtattagaacttgacaac

SEQ ID NO: 129393 - DNA, 267 bp, Glycine max
cattctttctttggcgaagccgaatagtgggttgtcacatgaaagagctctaactccaatatacccaactgcttaaaagtgttctacgataggatgttagttgaactcccttagtcaataagtgtctttctcactatacaattggtgatctctaagcttatcacaattgggtgtattgctttgaagtcagccaaactaaaggtgggtgtggaaaatcatgtttactaaccaaacctaccatagtcgcctattcagtccgaggtcatt

SEQ ID NO: 129394 - DNA, 348 bp, Glycine max
  unsure (1)..(348): unsure at all n locations
tcttatccaaggctcatcttggtggtgaagctccttctttcatggcttattccttagnggatggcgcctcctctcacctcttctcctttgtcttccgctgcatcttcatggtggaaaatcaccattaaaggacctcattgaagctcaaagatccagcctccatagaagccccacaagcaagcttccattagtggggcaggcacttcacaccttccttgcttggtcgacacatctggtcaagtctttatcacaacatatacttatggcccttactatatgtttcttctttttaaattaattcattaagtgtgcctagacttacgctatttaactttgttccatgaatat

SEQ ID NO: 129395 - DNA, 443 bp, Glycine max
  unsure (1)..(443): unsure at all n locations
agcttttgagtgatacaatgtgactctncattttttaaattgaatntcaacgttcaaggacactggtaatcgattaccaaaacattgtaatcgattacagcctttcgaaaatatttggaacgttgtaaattcagtttgaaaacattttcaaactcattttgctactggtaatcgattacaacaatatggtaatcgattaccagagagtaaaaactctttggtaaaggttttgtcaaaaactcatgtgctattcaaagttttgaaaaaactttttaatacttatcttgattgagtcttttcttcattcttgaatcttgagtcttgaatcttgatcttaattcttgagatcttgaatcttgaatcttgattcttggttgtaggctntcttcttgattcttgaactcttgacttgttcttgattctcttgagaatggatgtctttg

SEQ ID NO: 129396 - DNA, 453 bp, Glycine max
  unsure (1)..(453): unsure at all n locations
tcanagaagattcactctattgggtgttataaagnngtttaattcccttaaacaccttatcatggtttgcnaattatatgtatcccaaattaaccatgtgggtcaagtttggttgtgagagaaatgatagcttatagagagtctctaagatggcaaactgaagaggctagagtgaaataatacttgggtagccaagagaggttaaataaatacttatattgtctctcccatgaccaagtgggtgttgtggttgagtgggatttgcttcacaagaatgagaagaatcattttgtgggttaaacctacttgaagaggtgaagaatacttggattttctctctcatggtgttgtggttaagatagattatctccaagccaagaccatgtgtgattggttagtgagggagatgttgtgaagtccaacaaatggttggaagttgtaaaatccagcata

SEQ ID NO: 129397 - DNA, 433 bp, Glycine max
  unsure (1)..(433): unsure at all n locations
agcttgaagaagtgttgaagatgctntgacttttcatgcctaactcccttgagtggcatttgtattggttgttatcttgtatctcgcatctgagtacatatgatatatgtattgcatcattcatcatcatggttaacatgaagacaagtttctaagttagaaaagtttcttccagaggcaataactctattgtttaatcgcgtacaggtccatcgtaatcaattatgacatgttgtctgaagcttgaagagctgagtctcatatcgatctaatcgatcacagctanttcataatcgattacattcttgttcgagacaatgactcgattattcaagagtatntgtgttaatcgattaccaagtggactatctattacttttctttctctaggtgttcaaaagtaacaagaacactctaatcgattactttgagt

SEQ ID NO: 129398 - DNA, 394 bp, Glycine max
  unsure (1)..(394): unsure at all n locations
gtgtgtaacccaccattntttcatagtagaacttctgtcacgtgtctactatcattgtgataatctctttctctgttattgggggtgctacttgagttgccaagcctctccatctttgggcgtgttctttgaaagatctgtccccccttttgcacatgttctgtagttgcatcctatccgaagacattatactgacactgcctaacgaaggccaccactaggtccttccaagaatggactcgggaaggttccaagttagtgtaccaggtaacagctacccagtaagactttcttggaatgaatgtatcagtaattccttatcttttgcgcatgcccccatcttccgataatacatctttagatgggtcttggggcaagtagtccccttgtactt

SEQ ID NO: 129399 - DNA, 415 bp, Glycine max
  unsure (1)..(415): unsure at all n locations
agcttgactaggcgagttgatnntagccnttttttcaccttagttattagtcaattcggttaagaatgagaaatcccaaagagaaaatgtccggttgattttccactttattttactaaaaggtatatttttgttattatattattattttatctctttttgatttccaatgtggttacggcacgaccgaacggtcggaatttattttaaagtttacggatcatacaattcaaacgttcggtggaaatttattttatttttaagttaagcgagaaatgactctagtaaaatggcttacgcacgtcaacaggtggtataaaaagtaaatgaaatgagaataaanatacacgatacacaatgtggaccaccactggtacatagaatgactcgaaaagcttggttcaaggtacttacc

SEQ ID NO: 129400 - DNA, 441 bp, Glycine max
  unsure (1)..(441): unsure at all n locations
tagactaagttcatcctaccatcctcagactgatggtcatactgaactgaccattcaatccctggaggaccttttgaggtcatgtgtcttatagcaaaaggggagagctntctttcattgatagagttcacttacaacaacagttttcactctaccattggcatggctccctatgaagctttgtatggtagaaggtgtaggacacctctatgttggctaaagccctgagaagacctcaccttaggacttgaagtggtacaacaaaccaccgagaaggtcaangtgatccaagaaaggatgaggactgctcagagtacgtagaacagttatcaggataagaggaggaaagacttggaactcgacgttggtgatcatgtattcttgagagtcactctgtggactggnngtggtcgagcattgaaatcccaaaaactaacacct

SEQ ID NO: 129401 - DNA, 100 bp, Glycine max
atgagttatcattttcaatattatctgctttatgaaaggttatctaaacaaatttttcctatgtgtgtttagtaaaggatgatatggattttattgaact

SEQ ID NO: 129402 - DNA, 242 bp, Glycine max
  unsure (1)..(242): unsure at all n locations
tgtcttatcatcatcatgcattcatattttatacaaancanactccanatttcacaaaaagataaaagtgattcactgccatatcatcaaagacaagtcaaactgttctaaatgcttcagaatgagcaaaccaactaaccataaacaatactagcagtgcatattaaatataagaaatattgggcctgaaactataatcattaataataattactccaaacatgcaaaaaaacatcataagg

SEQ ID NO: 129403 - DNA, 466 bp, Glycine max
  unsure (1)..(466): unsure at all n locations
ctgcggcatgcaagcttcaacatcagaccacttccaggtgctggaactacttcattttgtttgatggggcctatgcaagtngaaaggcttggaggaaagaggtatgcctatgttgttgcggatgatttctccagatttacctgggtcaactttatcagagaaaaatcagacacctttgaagtattcaaggagttgagtctaagacttcaaagagaaaaagactgtgtgatcaagagaatcacgagtgaccatggcagagagtttgaaaacagcaagtttactgaatactgcacatctgaaggcatcactcatgagttctctgcagccattacaccacagcaaaatggcatagttgaaaggaaaaacaggactctgcaagaggctgctagggtcatgcttcatgccanagaacttccctataatctctgggctgaagccatgaacacagcatgctatattcacaaca

SEQ ID NO: 129404 - DNA, 432 bp, Glycine max
  unsure (1)..(432): unsure at all n locations
cactgggtcatctaggtttgataagagacatttacaatgaaagacattcgaagcaaactctcacctcacacaagtccataacatcaatctaaacttgctcaaactgaatatacaccaaaaattccaccgaatcataatgtgacccctcaacacccaattgtgccctacaaatggctcttgcattcactttggacattagtacttctctctagcacagtccaagctttctcataagtcctaaatgacattataagctaggattaactcactttaagctccatttaccacagaattcagacttaaccttccaactctcaaagcctcactctatatccactcataacatcacattctcactgtctaaccctaattagntctacccttcatctctaacagagttncatcagcaatttcagcatataaacatcacaa

SEQ ID NO: 129405 - DNA, 461 bp, Glycine max
  unsure (1)..(461): unsure at all n locations
agcttganagactgagcaaaaacagatgtctctctatgcatatatccataaaattaataatctcacaagatagactgttacaacttacatgaataccaattgttcaataggtttctggttcaaatctattctctgtatataaacaattgattntttatccttccattcatttctttttttgataccaagaactttcaacacaaagaatntgccttaaaacatgtattgcctactttttatggccaacaactagaaaaagaaataaaaaatcactctcaactctttttccattttaaaaccttaaatgttattcttattaagaccatcttagaggtctcccttaagctaatattctgaataattatcagaataagtagacccagagcacagaaaacttacattgcgagtcttcatacgtagagaaattctattcttgttaaattttccacttattgctcttc

SEQ ID NO: 129406 - DNA, 478 bp, Glycine max
  unsure (1)..(478): unsure at all n locations
cttgtaattattactaaccttggagcccctctttcttgttctgaagcattcattacatgaaatccggaacaactccaaggagacttatacagtctagttaatcctttatctaaataatcttggatttctttnttacaatattctaagtattgttgattcatttctaattggtcttgcttttgttgggatatccttctcattaaattcttcttcataaggtaatgaaacttcatattttttccaactccaaaaggctatgggatttgtttcacaaatttctttttctattttttcttcaaattcttttactatnttntgaatattagaagagtttncgtggtcttctattctcttatattgtatntatttatttagaatatttatgtgtttttggttcctttggattaaatntactttagttatagaagcttcttgtaacactattactatctaatacaaattctttctcatttactaa

SEQ ID NO: 129407 - DNA, 448 bp, Glycine max
  unsure (1)..(448): unsure at all n locations
agcttgtcccattctctaacaggagcacatttgtgttccatggaggtacgcccctganaagccaaacgaaaagaaggacgaggcagtcgagggtggcctatgttatgctaaagttactaacatcaccggcgtaagcgatgtgacccgtagtgggcgtgtcttcgtggcacctgacccgtgtggcgtccctaaattaatgactggtttaatagtaataatttaaataacaaaaacccatggtaaatttttttcttctttttctttttcatttctttctcttttcaccataactaggtttagaaggaaaatcctcactacagagtcctgaatggccagttcacaactctattcggagtcatttctttcttaccgctcataatctctaaactattttgctgttcaaaaggaagaatgtaccagccattactttaggtcgtcacatgaaaat

SEQ ID NO: 129408 - DNA, 443 bp, Glycine max
  unsure (1)..(443): unsure at all n locations
ntcataggtganatcatgtgcagccatttcccttagagttttctacgangtggaggttgngccatgttctcagaatgtgcaaaatcagaatgctcagaatcaaaatgctcaaaattataatgctcaagattaggatgttcaaaatcaccaataacagaatgcacagattcaccagttatacaatgctcagaatgatcaanaggtataaaatgatgcctaactgaaattctgatactgaggacagatgtcgtacaggatgtcacgacatcgcgcttcagaacatgcagattgtatatgacagtatgaacagattaaacaagtaaataacacaagagaattgtaacccagttcggtgcaacgtcacctacatctgggggctaccaagccagggaggaaatccactaaaatagtattagttcgaagatctaacagccactgtatac

SEQ ID NO: 129409 - DNA, 335 bp, Glycine max
  unsure (1)..(335): unsure at all n locations
accctgaaacttgcttnatacgcgtggcttgacctcccaaagctatttttgccaaaatcatcaaatccttttctttgcctacaatgaaacctataaatctaaagtccctaataaattaaaaacactaaatatatatctaattattagcgaaatctaaccaaaaaaagttctaagctaggaaaatgtaagataaataaatatactcggcatatatcaaagcttctacttctttttcctcttctaacattaggttggcaaactccttacgaggaccttgggaatatactcgtaagatatcgaccatcacactagaatgaggatngaatagtgtgtta

SEQ ID NO: 129410 - DNA, 378 bp, Glycine max
  unsure (1)..(378): unsure at all n locations
atcaatataactcagtccttatctgtgatattcttgatctagatggttgacttgaaacaatgcgtgctatcatcaagtaaattcttttggcatcatcatagcctgcatgattcacaattgacactacagagttaaggatgattttgcaaaaccatcatggttgtttgattaaaaacttaaaattattcgttctcaattgtgcctcactaaagcccctcactctggctcacaagccttgctaccctaaaacctattatgcctcggcttgaaaccactcactatcgtgccaccatgctntgacctttgtgccaccacaatgtgccactactcttgtgctcttgtgtcatcattgacgttgaatgtgtgaaccgctcaatc

SEQ ID NO: 129411 - DNA, 437 bp, Glycine max
  unsure (1)..(437): unsure at all n locations
agcttgagcattatgtggcttaagcaatngatgtctattagcaaccttggattcactaaagcccaatcctcaaagggcttgagtgaggtgaatagagcaaaggaagaacacgaagacctcacttaagtgtgacattctgtttgcttaagccacgagagtcaaaagatgccttgatagagattagaaagcctcacttgagcaagatgttactcacacttaagtgaggtagtcgcattaggcccaagcccatatcaaaatacaaaagacctgngggcgataaagagtcatttagtgttggttttacgacaaacatttgaaagatagaagctactatttttagggctttagctttgattcattgcatggtttttgtgtctgatcatttgaatggaaatcaagctaagagcagctaaccacctaatttgtcgggcttggat

SEQ ID NO: 129412 - DNA, 444 bp, Glycine max
tacatcaatgaatcgatggatactcttgatgacacatcatttcatctcatccctagagaggaaaaccgaatggctgacgctcttgccactctatcatccatgttcaaagtaagccttcacggagatttgccatgcatcgacatcaaatgtcgcgttgagcctgcgcattgttgtttgatagaagaagaggaggatggtgaaccttggtagttcgatatcatacgatacattaaggacaaggaatacccgtctgaggcctctgacaatgacaagagaacattacagaggttgacagctagtttcctcctgagtggaaacatcttatattaaagaaaccatgatatggtgttgcttcgatgtgtgaatgaaaatgagggtcaacaaatattattggaggtgcacgagggatcctttggaacccatgccaatggacacaccatggct

SEQ ID NO: 129413 - DNA, 403 bp, Glycine max
agcttctacttatgtgtgcagggcgggctctttcatcttcttgtctccaacgcgaactttgaccattgttcttccttcccgcaatgcttcttttcatgtctgcctgagtgggcttatagcctaaaccatacttcccacgatttccttgagtatttatcaagctagttatgccgccgttgttttttcctaaacccatcccgggttcaaaaccgttccccaacataactcgggccatcattaccgctgcatcggacagacaaggttgcccaaagagggagtccacgaaggaaatgctgaccacctcaaaagactggaaagcagtttctaacgattcttctgcggcttccacataaggcatggaggatgggcagcttaccaagatatcttcctcgcctgacacgat

SEQ ID NO: 129414 - DNA, 451 bp, Glycine max
  unsure (1)..(451): unsure at all n locations
ggaggaggatgtgagttatgttcgttagtgcttcgaccttctcttctccatcctcatagatttagtttattattatattttaatcttaagccttgtatttggctatgtttttatgacattattctctgaacatttgggattgtttttagtatttgctacttagttaattatgacttaacatggtgattatatttattttctcttagatgtttatgattatgtgttagttattttgatgatatatgtctagttgtatgtacttacatttggtattaggctttgtgtatgttttaaaattatttatgtatgattttattttatgcactttggctntntgatgttgccaaagggggagataaaatgggtattttagaaatcaagatattatactttcaaagctttaaaattaagcataaattaaaaaagaaagggagagaaagagatgagtgaa

SEQ ID NO: 129415 - DNA, 409 bp, Glycine max
  unsure (1)..(409): unsure at all n locations
agcttcaattaaggatttgctanagtaaaagttgatatgcgtgctngnngacgaaaacatcttgaaagtgtaggtacatcgacctatatggccaaatcattgtcaatatctcatgttcaatatagtatctttcaccatacttcataaacaatntctcccaaactatcatgtcccataaaacagcatatttcaagagaaggaattaaacaatgaactaatcacctgaaccaaagacactagcagttgcagtcacataagattcccaatcacactttaaccaaatttagatctattaaagttattgttgaagattctcattaaactgcagatctagtcctagtcatccatttccatggtgcattaatactaaatatctgaacagaacactcttacacaaattttttttagc

SEQ ID NO: 129416 - DNA, 352 bp, Glycine max
  unsure (1)..(352): unsure at all n locations
tgagctctcaagcttttgcttgcgtgcagtaggaagatttcacttagagccacagagcgtttatcatcggntagtctacgaatctgggccaaccgaggcttgagaggatctgttttcatagctaggacggatctcctaatcgactcaaatccatgtgctacaccaccgtcagaaccctagttcaccaccacaacaacagattagtaacctaacatcatcaaatctttttttcttctcagaaaatgaaaacagtttgaagaatataacaaacttttccactttctagcaagaacatttccttttgaaaattccacaccacaagcacaaatcaaattaaaacaaaacacaccct

SEQ ID NO: 129417 - DNA, 337 bp, Glycine max
  unsure (1)..(337): unsure at all n locations
agcttctccagcttctcttgccatcancatattcatcctctactttgtagatatacactaccaagaaagctagcatctctctctacaataattgagagaatcggcaacaaaatatggatgtatactntttttttatattttaccaacagtacatgaagatgttgaagttgaacaacaatctattttctatgcaagcgaggcagacttaaattgaagactaccagagcacaaaagtgaaaaatatttgtgccatatgttatgctgatcgaacctaatgcaatccgtttgcccaacatcataagctactgttttcgtatgttaacattatcttacgtta

SEQ ID NO: 129418 - DNA, 293 bp, Glycine max
atccctatattataaacaccgatctaataccttgtctctctatggacatatactattcgacacgcttaaaatagataaatcaatgtgatagatgatataatttgatttgggggagagagctcgtaagagagaccatatgtcaaataggtgcgtatgatatatgagtgtcatgtattataactgcttaaaagcaatgctccatcgaccgtggcctaatctttgcgtttggtatgggatggtccaaggtgctgaagaatattatgttggccacttgtgattcttgcgtgtcactt

SEQ ID NO: 129419 - DNA, 450 bp, Glycine max
  unsure (1)..(450): unsure at all n locations
cacgcatgcnagctctcaagntcatctgtaatgactctatctaatcttgggagatttctcagcattntgaccgcttccaacattcatgatagtgcatgctgaccagccaatgacactgcagtttctgccattgctaatgttaatcatttgncaccgtatccatatcatatcacgctacccaatttttaaataacgaccaacactaattatcttagaaaaaactaattattccactcaaatgatgtttgtcggttttattttctaaagacacatatttattttatttaccttgcaaacactatgttaattcataaaattattcctccttatttatttaatcacaaaaatctcataatttttctaaaaatctatttattcttacagaaaattctctttacattattttacgaaaaaatgaatagtacattactcatngcatgccacctatga

SEQ ID NO: 129420 - DNA, 448 bp, Glycine max
  unsure (1)..(448): unsure at all n locations
attgcaacatgaaataaacagtttatatagcagcatacntttgtatacttcaataattgtgtcctcagttttgctatntttgccttgagctacccgagatgatactctgcacaataataataataataataataataataataataataataataataataataacaacaacaacaacaacaacaataaaattaaatagaatcctaattcgacttcctgcaacaacaataaaatttatgatttaaaagaaaaagaaaaagaaagaaggaaatacctgaataggtttatcgttatcaaaacaagcatgatgaaattctaggcattattctgaaagtcattattctattatgtgcattcacacagatatcataataaacatttccaacanaatatacaattaanaattaaaagtatataacagcttactcctncaatattaagaactcct

SEQ ID NO: 129421 - DNA, 461 bp, Glycine max
  unsure (1)..(461): unsure at all n locations
ctgagctgcagcttgacacttgtcttcctttaaatttgatgtttatgaattaattatctaatttcaaataaggtattttataaatgaaataaacttaattgttttattcaaatataaaatttaaaaatgaataaattttgttattttatcaaaataagaaattttaaaaataaaaataatattcaatcaagaaattaaaaaaaattgaaggaatttcaattgaaattcttaaagtttaactttttttgtaattctaaaatttttcatccaaataccacgtaaaaggaattcggttcaataaaaaaaattcctaagcgtagctggcattgataacccagtcatcattatcatttgttgtgcaaacagtagagaataatcatttcttataaaaaataaaagttgagaacaatccaaaccaaatttaatcaatattcataaggtttngtgagccaaatactaat

SEQ ID NO: 129422 - DNA, 464 bp, Glycine max
  unsure (1)..(464): unsure at all n locations
aacggcgganaacgatagagagagagagtcatgtcactgtcctcatttgatagttcaattgaattttctctgttgagcttntggaatttctttacgagacgaagcttgtagagttaggaacggcgaaaaaggaaagagagagagcgagaggcgaaagcgtacacgtggcacctcttcacgctgacacctcttcccctatgtggctctattccaacctcaacctccctcactgcccggtaataataacttactttattctaaaagccgcgtgacttgagccttcgcccttagcctagaacacaggaccaaacttggaatgggcaccaggcccaaccaagtaagcccaattctcttcaaacattctcgttccccgccaaccttttattaagcaattattaaattaaactgttntgaatcatanaanaaaaattaanagctatttttaaaatagcttataatatata

SEQ ID NO: 129423 - DNA, 366 bp, Glycine max
  unsure (1)..(366): unsure at all n locations
tcatacaaagctccagtgctacaaatccacattgaattcaacgattttcccactgtcttagatatgatatttgtttcttccctcttcaactgatcgatgctatggcttcacgaattatgattatgaagaatcgaataacttagtatatatagcctcttgtgtaccaatttatatctaggttcattgtctgcatctcaactaaataaatcatgagataaataatgatttttcataaaaagtataaatttaactattaaaggaaacgactaacatcatttaatcatattataaaaataataaattcttaatttgattcngttcagttcgtaactttgaatggtcacgtttcttttttttcttttataa

SEQ ID NO: 129424 - DNA, 462 bp, Glycine max
  unsure (1)..(462): unsure at all n locations
ttacataaaattggtaatggggatgattctgtttcttattatctgatcgagatcttcagaagcacctaatgggcatgctgntatgcatgttaaggatatactgcctcgaggccttatcaactctgggaatctatgttttcttaatgcaaccatgcaggctctcttgtcatgctcacctttcgttcatcttttacagcaattaagaactcgcaaccttcctaaggttagtttttctgctgctgcatgtcaactattaaccaattaactaatactgccatgtacaggttttagcttaacttatagatgagataataacattaaaggaataaagacctaaaagatgtattatgcattcagatttcccttatgctagacaattattgaactgatattatttcttgcttattattctatcatatattacgctgggtatcccacattgacggcatttgctgagttcat

SEQ ID NO: 129425 - DNA, 442 bp, Glycine max
  unsure (1)..(442): unsure at all n locations
agctcgatgtgagaaaacgtggaagagcagtcttcctacntttgtttgttgaccacagagnggtacctggagatatgtcgcaggggtcaggagaccttggggatgtcaggtggggtgctattgcccaaaaccaagcttgaccaatcccgacccaactcgggcatagtcagtcagtgagaacctgtgacgtacctaaacaggcgagctcctagcagtcaaccaataaaagaacaaagaccacaaaacaaggaggcttgtgtggtggctggccagctatgaatcttgagtggtatctggaatttggcctctggtaatcgattaccaatgatgtgtaattgattacagggcttaaaaatggagacaggaaagtaaaatggcctctgggtaatcgataccaagggtgtgtaatcgattacaggggcttaaaatggagataggatat

SEQ ID NO: 129426 - DNA, 468 bp, Glycine max
  unsure (1)..(468): unsure at all n locations
ctgacaatagtataacttggaagtgacctttttcacttaattgagattggtcctttattcacaaaggatttcatatccattccaaaacgtgtttcaagtcacatatttttatttagacgaacaaataattaaacttgaaatttccgataaaaccgggtgagatttctctgtatttcttgctagtacacataacaactttttatttttcatagatagggtgaaccaacaaaattctctctcttaaacctaatcaagtagttctatttcaactaagctcattaaaaagtaaccaaactaacttaactacatgtacttgctaagtacacatttactttacctatttcgtatgtattgtacttaagcttagcctaagtcaaatcatgccctttnttccctaattgttggctgaaatatctcatcgggagagacactaaaattcaaattttacaacaatttcttcattaagtc

SEQ ID NO: 129427 - DNA, 434 bp, Glycine max
  unsure (1)..(434): unsure at all n locations
ccttaagtcacctgaggctgcagctaacatattttcttcaggggtgttttcttccaggcttgggggctttcagtgaaccttggagaagagtatcctatgtgttgggatatttctcctattacctgggtccactttatcagagagaaatcaaacacccttgaagtattcaaggagttgagtctaagacttcaaagagaaaaagactgtgtcatcaagagaatcaggagtgaccatggcagagagtttgaaaacaacaagtttactgaattctgcacatctgaaggcatcactcatgagttctctgcagccattacaccacagcaaaatggcatagtttgaaaggaaaacaggactntgcaagaagctgcttgggtcatgcttcatgccacagaaccttcctataatctctgggctgaagccatgacacagcatgc

SEQ ID NO: 129428 - DNA, 443 bp, Glycine max
  unsure (1)..(443): unsure at all n locations
tatgtaaatgagcttcattcttcatcctagactntanttctcttcattcttttgttctagtatctctaataactgtgaactatcattcttgtgtactcatgaagggaaactttgaaaaactgaacattcttcattctccttcaagatattgtgagttcatcaagaggtaaggcgggtctctccaactcttgaaccctatgctcgttgataaacttccttgaacatgttacttggaaagttttgaacttcctatcatgtcctaaatctgtttgctaagctattttccttgagactttgatggaaaaaaatgaggtctttacatgtgaaagcatagttagccagaaagtttgcctaaactggagtttcctaccaaagtacaaataaacaagttaaggccttggtaataaaaatcttcacgaatttgatgacagtccatatatgac

SEQ ID NO: 129429 - DNA, 411 bp, Glycine max
  unsure (1)..(411): unsure at all n locations
agcttccatcaagtgttatatagagcacnaatagcttcaatgtgngtgctccttaaacctccattaattatttctctttaccttctcttccattgttgnttcttcatttttctccatgtatctcctcacatgtcttgttctaaatgttgttaacatgattctttagagtttccaccgattaatcttgctatagaagttagatttgattttctatggttcaaatttcttgttcttgaaccatgaattgtgttaagtttaggttcctttgagtcttgccttgttattttttgcggctgaatcctaaaccataaaattcttacaaaaatattanagtagaagaaaaactcacaaatctagagtgacttgttcacctatngtaattttcgcatagaagccatgtctagtcatgaa

SEQ ID NO: 129430 - DNA, 234 bp, Glycine max
tcgggcgcttagcgcttaagactcaatgtttattgtatgaacacagatccgcttatcacgacgtttgcgcttagcgaaaggattgtttttcaaaaagatatactaagctattttatagctctttttccaagacactgaatcccttatgttacccattccacgattggctgatctactcctatgtaccgattacaaagcaagttccttatgatttatatgcattaataaaacaaa

SEQ ID NO: 129431 - DNA, 409 bp, Glycine max
  unsure (1)..(409): unsure at all n locations
agcntgatgagtactggtatagatncaattatttgngngcaagctngcctcaccaccacatttntgagcaactccttcttcaatatttctatgacggacttagcaacatggagaggagtatgattgatgctgccagtggtggagctcttggtgatatgacccttggtgaggctaggaatttgattgagaagatgacttccaactcctaacaattcagcgcaataaatgatgctatttttcttagaggagtccgtgaggtggccacagattcatcttcatctactgaaaataaaaagcttgaaggaaaacttgatgccttggtcaacctactaactcagtttgccatgaatcacaaatctacacctgtcgcaagagtctgtgatctatgttcttctgcagatcaccatac

SEQ ID NO: 129432 - DNA, 427 bp, Glycine max
gttccaaagtggacttcttcattacatttaaactcgatttattgtcgataagtacctttgggacaacgtggtccatacatctcaccggcacatgtagagccttgttgtgtcctctcccctcaacgggaatctcttcttccgcaaatgcgatataactgttggtgtgtatatgattaacgatgccttcgaaaccctccactgagatatcatgtgctacatgggcatcgttaatgaccttcatcaatagcgcacgatgaggctcggagtttatgagtagttcaagcaaagagatccttgctggagtattattcagttgctcgactaccttaaacttgctttgctggatgacgcggatgaactcatgtgcctcttccaaagtcactgtattttcttgaagtccttctttctttcaggcgctctaccactg

SEQ ID NO: 129433 - DNA, 446 bp, Glycine max
  unsure (1)..(446): unsure at all n locations
agctngtnggagttatcatcacaagatgctttgttggcccaaaataagtngctctctaagaaacttgagatattaacagaaacacttggtaagttgccaactaaattgtctactggtcaaccttcccattcttctgttttgcaggttacaggttgtaccatttgtggtgaggctcatgaatcaggtcattgcattcccattgaagaacacactcaagaagtttattacatggaaaatcaacagaggcaaggatacaaccaaggaggattttcagggttccagcaaggtccctacaatcagcaagggcaatggagatcacacattggcaatcaattcaatanggaccatggtggaccttccaacaggccacctcaacaagggccaaatatntttcagaggaccaccaaattgtaggagacattaactcaatttatgcaagtgaccat

SEQ ID NO: 129434 - DNA, 414 bp, Glycine max
  unsure (1)..(414): unsure at all n locations
ctgctgatntagttttcaccgacgaaatgatcaaagtagttatgatcagaggaaaatntaatcatcttgcttggacgaatgagaaaactagggcaaatgaagagggtgagaatgagggagaaacccatgctgtgactgccattcctatacagccaagtttcccaccaacccgacaatgtcattactcagccaataacaaaccttctacttacccaccacccaattatccacaaaggccatccctaaatcaaccacaaagtctgtctaccgcacttccaatgacgaacaccacctttagcacaaaccaaaacaccaaccaagaaatgaattttgcagcgaataagcctgtagaattcaccccaattccagtatcctatgctgactngctcccatatctacttgataattcaatgg

SEQ ID NO: 129435 - DNA, 402 bp, Glycine max
  unsure (1)..(402): unsure at all n locations
agcttgtagaatggctagacataatacatgtcngtggttggtttggctcaagggataaagggatgccccacattatttccatgacacaaatgcaaaaatgatgatttggaaattttacgcaaaactggtcatgcatgcacctatgcgaacactcaagtgtcaaatttttatggtcatgtgatgctagggctcgggattcatttcctctatttttagtcaacccaatgtttccaaaatatgttcttttatccatttgtgcattcatccgagtccattttgggcgtccgggaaaattttcacagcattcaccctttaggtgtatacacatttttttaanaactagttatgatcagtgaatttttctttaaagaaaangtggaagtcatctcttttcacaagcat

SEQ ID NO: 129436 - DNA, 338 bp, Glycine max
atcatttcaatttcttactaagtaaaatggatcattctcaaggtccaacaccttagaatgatcaccttttaaaaaaaaaagaatcacttgataagaaagaactacgtatgtatgattttctcatcccaattgaggaatacgtatgagcaaagggaaacacccttgtcgaccactaaaagagaaaaaaatataaaaagagtataaaggatataaagacataaaaagggaacataaaaatcaaggtcatgtttgcacattcgattaaaggttgcccgcccttgtgacggacgtgtggggtctaataccttcccgtgcgaaatacaactccgaacctttac

SEQ ID NO: 129437 - DNA, 334 bp, Glycine max
attgattactgccttcattagacaatactaatacaatattgacatggatcccgatagaacccaactgcagaatatgagcaagtgggagcacaagtcatttaaggaatatgcctaatggtggagggacttggaaccgcaagtggcaccctcccatggtagaaagagagatgatcacaatgataatggacatgctgtcggtgttctactatgaaaagttggtgggctacatgccttctagcttcatggatttagtattcgcggttaaaggattgaagtacgcctgaaaagaaagaagttcgatcatgctgctccatccgatatgagcaattgaaga

SEQ ID NO: 129438 - DNA, 400 bp, Glycine max
  unsure (1)..(400): unsure at all n locations
ttattctcgttttgtttactttntataccctctgttgacgtgcttaagccattttacttaagtcatttctcgcttaacttaaaaataaaataaatttccaccgaacgttngaattgtattatccgttaacttcggttaaaataaattccgaccgttcggtcgtgccgtaaccacgttggaaatcaaaaagaggtaaaaaaataataatataataatcaaaaaacatcttttagcaaaataaagcggaaaaatcaatcggacgtgttctctttgggatttctcagtcttaatcgaattgaataataactaaagggaaactaaagctaaaatcaactcgcctagtcaagctcggccataacagataggttattgaaggttgcatttcaattctcactaagaa

SEQ ID NO: 129439 - DNA, 362 bp, Glycine max
  unsure (1)..(362): unsure at all n locations
tcatatagcctttcaccccatcaccataacccatgaacagaccctttcttgatctaggtaccatctttccttcattgacatgataataagcattgcagcaaatactcttaggtntgagtagtttgttgttttgtcattccagatttcaataggagttttaagtcctatagtcgtagagggtgttttattgatcagaaaacaaagtgtattgataccttctccctaaaaacttctgttgagaccagcattagacaatagacatcttgttcttctcaagagtagtttgttcattcgttcacgaactctattttgctgaggagtggtcctaacagtaagatgcctagcaattccttcatctctgc

SEQ ID NO: 129440 - DNA, 441 bp, Glycine max
  unsure (1)..(441): unsure at all n locations
cacattttttactgtgagttaaggttngtttttggctcttaaccatcatttattttggctcattccaatgaatgtaactgggatgattttacaaatttctgtagtttgtgtgtggaggattatctggatctaccgctgctttattcacaaccccttttgatgtgatcaagactagattacagacacaggtatgtaataaacatgcccttcaattgtataaattctcattgctactactgaagaataatctggtgcagccatctaattagatgtctaagacaacctttcttaacactaggtttctgagactttcttttattcaactatgttcaatatcatttatcttggtatcctcaatactattattatctcaggatgttattctacagaattcaatacatattttagccacttttttttgctaatgtatgtcattttact

SEQ ID NO: 129441 - DNA, 387 bp, Glycine max
  unsure (1)..(387): unsure at all n locations
agaagctctctggggtcatcaaaaagtgcctaaggaagtgcatgaacaaattttgtgtntctcatgatcatcatgccgtcaaacacatgccatgcctcatggtgaatgtgtcagtgccgccaccactaccaccaccaccacatgagattaattggtaccatcaagggaaattaaaagggtcacttgtgaggaagcaacaacaagggagtgaggaacttaatgaagaaaaaaaagagaagcctttccctgtgcctcctatatatagaagcagaaccatagcactttcaggacctttggatatggtggtagatgcatcatgagaaaatggccacagcgggccttaagctattggaccactgatggagaatgctgagaaatgatgatgat

SEQ ID NO: 129442 - DNA, 442 bp, Glycine max
  unsure (1)..(442): unsure at all n locations
tggcccaggnngattatgattgagctggaaccatgcattttcttttcaacaggagtatagnnttcatgacaagaaagatagaaggataagaactacctgaaccatgatatggttaggaccatttggggatataaaaactgcaggcccaccattaactacagcttcagactgcacaggatgttagttagtagcacaaatataacaattaacaagatgccaatggagggaaaccaagcctaccgatgtttgacccaaacgcagtgtcatggttgtgcgaccaagctcaagcatataggcaccaaggttataaaacaaaactccagttctcaaagccctatactgaatgcttgaccgcaacaagggaatccgtacatttgcttgattctccaacttgcctgatagttgctgtgacagtatataataaacactggcaatttatatg

SEQ ID NO: 129443 - DNA, 437 bp, Glycine max
  unsure (1)..(437): unsure at all n locations
agcnngngcaaatcttttcatctcccgcaattatctctgtcatgcaanggaagncggncnacgcctttgacacgggaagccggaaggtccatatcaccttcttaatcgtacacatggggcactgcgcccccaaatgcgcaagtaagaatagattaatttccgggctctcgtgtccgtaaaatgcattcatatcatgcattcgcataagcatctcttcataacatcataatggacatatcctgcatttgtccgttatcatattccggcctcacattttgcatgagtcatggcatcatcatgcatatgcgttcaacaaacattttgatctgacaaatagcataccattttgtttcatgtttgctcatccctgtggtttcctctacaaaacaaaaacaagaagggggaagcgtgaacctccactacattttagttcatgt

SEQ ID NO: 129444 - DNA, 433 bp, Glycine max
  unsure (1)..(433): unsure at all n locations
catgtggcactaggttgcgtgtcggcgatggngcacaataagncttccacatccacaatgcgcgcataaacccaccatcccctgttgcccacctccaactgagctcacgtactcccacgtagctcatatcctccgttctctcaacaccaggtccgcatcaatcctaccaagcttccccaacatcaaagtaatacaacattcacacagcacaagctatcacagctaatcataacagggcaaaggcagaatactctgcccaaaacaccaaccaaaatcacagctgttcacatacaaataccccagaaacatttccttcgttccaaattcgtaaccgttggatcgactcgataattttactggaagtctctattacttaagcctacattgtgaccgctgggatctactagcaaacatncagaactcattctgcact

SEQ ID NO: 129445 - DNA, 448 bp, Glycine max
  unsure (1)..(448): unsure at all n locations
agcttcgattcgatgttatgacattacaatttatacatgcataatctaacgaatgatgaagttgaacatttggattttttggattgggagatggcttggtattctcgacttattgggttttctgtacgcaaaagccatgctgtgaggtcccaatttggtgagatagtgcaacaaacatttctatgctcacgtggactgagggaggatacaggtttgacttanaaagcaagcatcaaaaaattatgcaagcagtgagcatgggcgaggtgggcaaccgcccaagtccccatttttagaggggcacccaaaattttatgtagtttgatgaatagtaaaataaaaatttacataattaanattaacataatataaaaaatttattatataaaataaaaaaataataaaaataaaaaataaaaaatttattatataaaataaaataataaag

SEQ ID NO: 129446 - DNA, 444 bp, Glycine max
  unsure (1)..(444): unsure at all n locations
actcaccttcataatattgctttgtgcacggcagtcaccttctttctttttattangtaagcatactcgaatgcatatntagcaattcgctctgaacagaacttcgttattacctagtaaaatatgaggatcaacagaaaacataaacccacactgcatcaggacagtatcaagttgataacttcatgacatatatgcatcanagatcacatggaaaagaaaagaaaaaaaaatctagatagaaacttcaagcaaaaaaaacttcccattaaatttcaactgttagtgcatatattattttctttagtttactccgccgcgtggaaatggactagcctaattttctggcaaaaattagtcattgacaaagtccatgaatacttcacacaaataatatgattaaaaagaaataataataggaaaaccaactcggttccatcaagc

SEQ ID NO: 129447 - DNA, 432 bp, Glycine max
agcttctaaactttatataagaatgaagctttgataccacttgttaaacaagtggcctcagatatctttaagaagggggggttgaattaagatatcaaaaactattccccaattaaaattttaactctcttcttgaattaataatttacccttaatatgaattactcaaaagataattcaaaataaacttctttaaaataaatgataattgacaataaataaaagaagtttaagggaagggagaattcaaactcagtttttatactggttcggccatgccatgtgcctacgttcagtccccaagcaacccgcttgagatttctactatcttgtaaaatgccttttacaaagtctaaaccacaaagggacaacccttcccttgtgttcagaattccttacaactcaagaaaccctcggtcccttaatcaatct

SEQ ID NO: 129448 - DNA, 390 bp, Glycine max
  unsure (1)..(390): unsure at all n locations
tctataaatagaattatgtgtaatacttgttgtaactctgatgaatgagagtattgtgagacacaactcanagttcaacttctctccctcttttattccttcaatttcgtgctccccccttctctctttcttttccttcattaaagcatcctcttcaagcttcttatccaaggcaattcttggtggtgaagctccttcttccttggcttattccctagtggatggtgcctcccctatcctcttctcctttgccttatgctgcatctccatggtgtaaaatcaccattgaaggacctcattgaagctcacagatccagcctccattaaagctccacaagcaagctttcatcagatgccatgaaccacatccaaaagatcgaagaacttgat

SEQ ID NO: 129449 - DNA, 432 bp, Glycine max
  unsure (1)..(432): unsure at all n locations
agcttagcaatagcttcctcaatgctatcttgattatattttgaacgggttgattctaccatagcaactctcaatgaaagcaccaaattgttatgagctaatagagaatattcgtangtagcagttttttgaatgtttcaatgttagttcctagagttgtgcatgctatcatttacatgccatatttgtaggggtagtttctcatacggttacgtcttgcactatctatatatattgtattggaaactcacacttgaatatagaagagtttcatttctttatggtatcagagccacaatttttttcacgttcatcttcatccatggccaactcaagctcttctctcttgacacttgctaataacaacaccttcaacctaagccttcaactttcacccattaccattaaattagatagagacaactatcactg

SEQ ID NO: 129450 - DNA, 319 bp, Glycine max
  unsure (1)..(319): unsure at all n locations
tgaattgaggngatcacataaggcttgagctcggctcattacgctcaactttgttttacataaaagtctatcttgacgagtctaattaaaagcttgcttaaagacgttcttgatcaattaattattgtaaaacctagtgaaatattaactatacaaagatacttataaaatttattatgagtaatgtacaaatccaaaaataattgatgaacaaaatcatatttaattcaagtcattaatacacacagtatataataaaaatgaaaaaaagagagcatactattaaaacatacatactaagacaaggaatgacttctac

SEQ ID NO: 129451 - DNA, 428 bp, Glycine max
  unsure (1)..(428): unsure at all n locations
gctttgttccatnanattattttaactttctactcggatggcggattgaggcccgtcatatatcgagacgctcgaaattgaatgctgaagcnttgagccaattcaaacgacaataactctttactcggatgtctgattgaggcccgtaatatatcgagacgctcgaaattgaatgtggaagctctgagcccattcaaacgacaataactntttactcggatgtctaattgacgcccgcaatatatcgacacgctcgaaattgaatgttgaagctctgagcaaattcaaacgacaataactttttactcggatgtctgattgagtcctgtcatatatcgagacgctcgaaattgaatgttgaagctctgagccaattcaaacgacaataactctttacacggatgtctgattgagtcccatcatatatc

SEQ ID NO: 129452 - DNA, 341 bp, Glycine max
  unsure (1)..(341): unsure at all n locations
taaacattcaactncgtgtgtctcgatatattacgagtctcaatcaaacatccgagaaaaaagctattgtcattagaatctgctcagagggtcaacattcaatttcgagcgtctcgctatattacaggactcaatcagacattcgagtaaaaagttattgtcgtttgaattagctcagagcttccacattcaatttcgagcgcctcgatatattacgggcctcaatcagacatccgagtaaaacgttattgtcgcttggatgggctcacagaatcaacattcaatttcgagccgctcgattaatgacgggactcatctaacattcctgcaaaaagatattg

SEQ ID NO: 129453 - DNA, 426 bp, Glycine max
agctttgtgctaatatgttttattgacactctttgtttctgaacttcttctttcatggcaaagtacttcaattccatatgcttagcacctgtagagtacttgtcgttcttagaaaaaaaaatactgctgcggagttatcacaatacattttcagtggcctagcaatactgtcaacaattccaagccctgaaataaagttccgcagccaattagcctgaattatagcctcaaagcatgctacaaattcagctttcatggtggatgcagcaacaactgaatgttttgcactcttccacgatattgctcctccggctaagagaaatacaaagccaagagtggattttcttgtatccacacatccagcaaagtctgagtctgaatatccaatcacctctaagtgatcagacctcttatatgtaagcatgt

SEQ ID NO: 129454 - DNA, 405 bp, Glycine max
  unsure (1)..(405): unsure at all n locations
tgtaacaatttgcaagtttataaatgtaatttgcaagttttaaaatgtaattntattccaataggtctcanaaatcaaaatggngagggaagagtaaaatatatatacttttctaataaatccagctaacacctgcattgtgtcttgtcaactactaccaangatgcatgagtaataatctacttatctaattatttgctatctccatctgtatttactggaggtatatatgtggggcgctgatgcaatttcgggtttgctggggttatgctttggtacgaagatcatatccattaaccttaggctttacctttgatttgtattgaaacatgattctgatttaggtaccactgatttatgtaccagttatattaataacccttttgctgataaaaaaattataat

SEQ ID NO: 129455 - DNA, 389 bp, Glycine max
  unsure (1)..(389): unsure at all n locations
cagaggccctgacttgcgaggcnctcaatccagccattaatttggcatacattaagaagaactgctggaacctggacgatctcacgatcgaatttttagggatctgcaacgcacgggctaaaggatctgagggtccatcttcggctactcctcctgctcctgcttcctctgaacctgctccttctctgactccagccccttttactttagcaccaccatttcctcctgctcattctccagcaccagcttcctctgcttcatcatcattattcgagtgccgatgctccaaggcaatattcctatgttgcaaagcatccactgtggcttatgactggtgatgcagaatatgcatgactcgactcagcatcgaccttttatcatcatggatg

SEQ ID NO: 129456 - DNA, 183 bp, Glycine max
taaccaccatttgtagccctggattacagcttgaacgttggacatcacacttgcagagagagggacacaacgatcacattctcttgcgcctcacttgacgtatgaacttcgaagcgcaatccgcaaatgatcaaaggtgaaacaaggcacacactcgacctctatttatagtctaaatgtcac

SEQ ID NO: 129457 - DNA, 443 bp, Glycine max
  unsure (1)..(443): unsure at all n locations
gcttctccttccatggctgatccnctagtttatggcgcgncctctctcctcttatcctgtancnnncgctgcaactccatggccgaaaatcaccattgaaggaccttattgaagctcaaagacccaacctccatagaagcttcacaagaaagcttccatcaatattatacttagactatcctaaaaaatgatagctctttcaattggaaacccaagattgctaaccagacctttaagtcagatcccatcctttattgcttctattagagcatgcactctacctttgtagtggataaaaccacaatgggctaaagagtttccttccaactatcaagagagttgcccatcatgaatgcgtacctcgtcatagttctccttgcatccaaatctacagcatagtcgaaatctaaataaccaacaagagcactagacgtgtcttcatg

SEQ ID NO: 129458 - DNA, 471 bp, Glycine max
  unsure (1)..(471): unsure at all n locations
agcaccgcagctgcaactgtatntaaaatgtnnaaaaatacttttaattaatanttttatnttttattcccttattaatatatatgtgaggggtagagggtgtcacataaaacatgccaaaaaatatagtgttggtttgtggggtcaattattagtcttggaagcagacaaagctgatttttgaggtctcaaaaagtgatacctatggagggttttgaccaacaaggatgttgagtaaagtgtcactgtgtgaagtgccacagtgtgagagtcattgagaagttggaaatcaaggatgttacaaatggtattagagcctactagagacactccaacaccatatactccataccatgtgcgacanacaagcatatctaattggcatcacacattgaagagagagagagagagggtcatggttttaacacatgtcatcatctaattggctaatcttccaacttatgtgtctcg

SEQ ID NO: 129459 - DNA, 466 bp, Glycine max
  unsure (1)..(466): unsure at all n locations
cccgtcatatgtggtactaggtggcgatcgggcgatggtgcaaattttctcnttcacatccacaaatcaaacatgaacccaccatccccagttgcccaccatcaactgagctcacgtacccccatgtatcccttatcctcgttcctctcagtaccgggtccccatcaacccctccaagcttccacaatatccaagcaattcaatattcaaacatcatgaactaccctaaaccaagaaaacagggcagaggcagaaaactctgcccaaaacacattccaataccacaactttccctactcaaataccccagtaacattctcttcgtttcgatgtgctaaccgttggatcgactcgaaaattttactggaggttcctagtacataagtctacattttgaccgtttgggattgctagaatatgtccagaacctaatatgtactacctttcccatacccagcaatgcaca

SEQ ID NO: 129460 - DNA, 441 bp, Glycine max
  unsure (1)..(441): unsure at all n locations
agcttaagnctagtatatctatngcataattctgtgtttgactgtcattgagttaacgagtaataatttggtgttattttctggagtgtgaacttgaataaatgtgaataatgtgtgtgattttgtgaagtgatgttgttatgtaattcaactcttagtattatatgtttcacatgctcgngtgtgtgtgtgtttgtatttgagctgaatgtcattttgtttcaggtgaaccaacaaatgatcagttccatgctagagatggagaaacttagtctctgccaagaaaatactctgataaatgtgacatccagtcatgaggtcttatttcttatgttacaactccatgaataatataactggtatatactttttgctattagtttgacttcttttcatgaacgacctttgtttgagtatattatgtattcagatcaagtctat

SEQ ID NO: 129461 - DNA, 427 bp, Glycine max
tccactacttttttaacaaatgaatcatatctatgctgcacaatgtttctacaaaaggattcaatgtgtatgttagtataatttttttacactattaactgaaaaaccatcttaaaaataatattaaaataattattatacaaatcaataaattgtatttaaaatttctgatacaatataaaaaatttattatattgtatatcattttttctttattaaatggtcaggtatttatggtataaagggtgataattagttgtgtttaaacttctttaactccattgctatcttttttgttaaaaaatgtgttctctcttataatgagatgactatctatttggtgaaaagtgtctatttaataaataataataataataatagcatgaaataattagtatatcacagcatccaacaaaactaaacattg

SEQ ID NO: 129462 - DNA, 367 bp, Glycine max
  unsure (1)..(367): unsure at all n locations
agcttctcaaccatttagtcgccataggtatcataatatgttctctcgngagtcataccaatgattaagatcgcatcaacaaaataaacgaattaaattgcgtatatatttaatatggttagtatgcatataaaaaaagtaatattcaatcaatgcatatcatanaaagaagtgttcaatcaattattgaagtgttgtaatgttcaatcaataaaatgacaccaaatgtatattatatatattttttcaattaaaaaaatggtataatgaaatcacgaatttgttgttaatttttttgtcaccccaaatagtctaaaattcggtgtgttggaaaaaaataacaatggaatcacaattctgttgtata

SEQ ID NO: 129463 - DNA, 435 bp, Glycine max
  unsure (1)..(435): unsure at all n locations
acacaatatgcttgtttataatcaagnngaaatgactttttaactcaatttgaaataaatgtacattcattntcaaaacaaaaaaaaaacatgttttccaagattgatttaattgtaaaaaacactctcactaccaccactacaaccactaccatcattgtcgtcgtcattaccattacctttgtcacatccaccatcaccaaaattctatcattgttgacaccatcaccatcattccacctccattgtcgatgctatcaccaccaacatcggaatcgtccctgtcaccaacactatcaccgtcatcaccacctccttcaccgccattgcaatcatcggctaccactaccgctacaagtgtaattattcttatgtgtcaatatctttaatctgcattcttttcattatagaatggctgactcatcttatccctct

SEQ ID NO: 129464 - DNA, 325 bp, Glycine max
ggatccttaacactgcagctgcagcttggacctttcttgactattttcaactactgaacaggcttaattctcttttaaacatgtggatattatgtaaatactggagttgccatgattatattcataattttgcagtacttatcatatttgtggtactaaataactagtacacttgattgggtgggctacttgatggactgatggtatgaaatgatggcaggctgataaagtggcatattgctgctgcttttggtctggcttttcagatcattttattttgatttatctattagatgaatgatgctgatgtgactgagcatgtgag

SEQ ID NO: 129465 - DNA, 424 bp, Glycine max
  unsure (1)..(424): unsure at all n locations
ntctagcntttcattggtgccatttgatcttcttttggttctctagattgtggngatgtgctcagatatgtggngcaattntggtttgttttcttgcttgattgggttagattgagggtttgtatgagatggccctaggcctgtaatgcattttggagcaatggggcatgccacattgtcctcattctcttgctattaatccctaaacatgcgcccaccaagtgttcagtgaaatgcctcaatggcatttgcgcatgattttgtagggaaacaacctattgtgacaattggtttgcacatgtttgctgtctttggagcgtgtattcagtttcataagggctagaaagaatgccccacatacacccttggcctatgaaccgaagcttgttttggatgcaacagaacacgagaatgggtgcatatt

SEQ ID NO: 129466 - DNA, 439 bp, Glycine max
  unsure (1)..(439): unsure at all n locations
agctngaatagccttttgcactnnngcgatgtgctgngtctaactcctcaaggaacatganaagcanattgcataggaagagttttctagctggtcttggttgcaaatgctattgttctgacaagaattatgttgatattagtcaccatgcaggtgaaatcagtttcagcaaaaattctagtcatggaaaaacaacttcaagaaatatgttcaatgctgatccagaggctaatcattcagttaaagttactaggcctcacgcagccgaaatctcgattaacaaagatgtttacttccaaagcccagagaagttaggggtgggattgagcaaagaaaatagtctagcactctcaggtttgaattctagcttaggaaataatctggcgaaaatgaacttctacaagtagagatgtcaggaattcattggaagtgttggctc

SEQ ID NO: 129467 - DNA, 424 bp, Glycine max
  unsure (1)..(424): unsure at all n locations
ctaagctctaattatngtcataccctaatttcgtccggggaccttttctttatgacatgcgacctttctttggtccttgtgaggtgcttggcacccatcattatgcaatntgtgaaattccaggacatgccggaaaaccaaaaaatattgatgcacaatccgtaagtttccgtgacacaccgaaaatcaaatggaagcatcgttgcataattaagtgagattctgtaacattccgtaagtcaaaaagggggtgattatgtaatccgcaaggttccgtaacattacggaaagaaaacaagtatcgttacgagactcgtaagtttccgtaactgtacgaaaaaagaatcaccacaaaaggtaaggtgggtgaacttatcaagataggggtgtanatagcaattcaaatctaggcccttccagaaca

SEQ ID NO: 129468 - DNA, 274 bp, Glycine max
  unsure (1)..(274): unsure at all n locations
agcttattgcagncgcgcaatcantttcgtttangaaagttcgaaacattctgtcactagctcactcaaatcatgactggcagcgaacaagagaaacctcaccatgtcttgctttttctcatctatatgcggtagtggcggagtactacttgcatccacgttgaagccaatgatagtttgaagccatgagatactctgaatgccaccgtaccagcggcagagctatcatcaaaaaagcggtaatatcgaatgagttccgacccaatatctcatg

SEQ ID NO: 129469 - DNA, 240 bp, Glycine max
  unsure (1)..(240): unsure at all n locations
tccatggnagggccctctgcattcagcacacatcccctgttcatgatacatagtcgggctgccagctcctgagggtctgggcgtagtntgcaaaacctagaatatgtgcctacatagcagtcccaagcaacttcagatgtaaatctagttggaacataattagcctaatgtctagaagatgtggcctctcgttcctacaagccatctgcatcaaaagaatcatagacacaagattagata

SEQ ID NO: 129470 - DNA, 429 bp, Glycine max
  unsure (1)..(429): unsure at all n locations
agcttatatatgcatgaatgtaaacttagtttatatgctatcncaagnatggtaccttggttatcccttcttgggcgtggatttcccaacataaattgtccctgtggtcttatctaatttgaacctttcttaccttgtagatgcgtgatatggccaannggaaaacgtgagattagggatgataacaattcgggttggacatggatattatccgtccatttcccattggtatttgtttgaaaagttttcatgaatntgtgaatacaaatttttttcgtcatttctacacaaatccaaagcatcttctaaaacaaccacacatctccctaaaagaattacacttatgttgaatgtttctttcaagagagtcacaagtaaaaacatctttctgagttccttgacttaattctaaatctgattggtattctt

SEQ ID NO: 129471 - DNA, 309 bp, Glycine max
  unsure (1)..(309): unsure at all n locations
ctataccatgcannaatttctttttccaaaaggtacttgtgatgctattgatacgacggttagtgtttttgtgtgggattataatacctctcattgggttagggaaccattactataaaaacttcgtaccccattgcccagaggctctttgctatgcgaaagtatgggggagggatgttgtacgcagccttacccttgcatatgcaaagaggctgtttccggattcgaacccatgaccaacaagtcaccaatgcacaactttaccgttgcaccagagctcgttctcgggaaccattactatttaagccc

SEQ ID NO: 129472 - DNA, 433 bp, Glycine max
  unsure (1)..(433): unsure at all n locations
agcttcacctttnggnccttttcatagtngttgcatgagaaaacatgctntattttcatctcccactctaaataggcctccggatcattctttcctttaaagggaggaatgttgagtttaataccatcaatttagttttgtctaggaacaccatcattccctcttctccattatgatctctattctccatttgatccaacctctcatggagggcatcatctcgttgtttcattaaactctccaaatgctgcatcaaagcttgcatttggaattgtgaaagccccactccatcattagaatttgttcctgccgtctcagacgaacaaatcaaacataacaagacaattatagttgctgtntgaatacctcactcactcaagtgtatcacacaattatggcttntctctaatgaaaacactctttcttttaccac

SEQ ID NO: 129473 - DNA, 297 bp, Glycine max
  unsure (1)..(297): unsure at all n locations
cttctanacctttgcacaagtatgaagctctgataccactngttattctagcggcctcagatatcttaagaaggcggggggttgaattaagatattccaaactttttcttctaattaacaaactatcttacttcttacttaagatatgaattcccttaatgacaatcttcttaaatattaattcaaatgaagcaacttgaatttgaatataaagcaataattaataaaggagatttacggaagagaaaatgccaactcagttntatactggttcggccacacacttgtgcctacgtc

SEQ ID NO: 129474 - DNA, 386 bp, Glycine max
  unsure (1)..(386): unsure at all n locations
tcgaatacacattatataatttgaattcaaatttctagtgactgttataaatattttcagctgctggtaatcgattaccatagagtaaatctcaatttaaaatgatttagatagaattctttggccaaaccttttgctttttcaatttggaaacttcttcctaagattctagagatcaacttgatcatatatcttgattttcttggattcttggattcttgtcttgaataaaacttagaagcacttgatcctttggcatcaccaaaacatcaaaatatcttgcttctacatangagtcatttgacttaatccatcaactgaaaaaatccttcaactatttctcgtccttggacaattctttttgcaagactcaactgcttctttca

SEQ ID NO: 129475 - DNA, 348 bp, Glycine max
  unsure (1)..(348): unsure at all n locations
atagggaatgaatggaaacctataatgaaggacagtgaataactaaaatatgaaggcttatttcaacgacggttttaaaaaaattatctctgaacaaacgcttcaaagatggttttcacaaaatcgtctttgaaaaattgattatttgcaaaaatgtcactgtatattttgagacctcacttttatagcatcgtcttagatcccgtgtcctagaagaacatatttgctggagtgacatatgctaaagactattatgcatgttcaatatcctntaaatcccacttcaaatttcaaaatgaatctcaagagaatcatctaactcttttgcttgctcttgngttcctatgc

SEQ ID NO: 129476 - DNA, 335 bp, Glycine max
  unsure (1)..(335): unsure at all n locations
gctgcagcttgaaatgaacacggagccncgtttattaaaggtttatactttttacggacgcccgactcaggcttataatatctcgatacgctccaaattaaacatcgaaaactctcgtgaaaatcaaatggtcataaattctcatacggaagtccgattcgggcgcatcatatgtcgagaagcttgaaattgaacaacggaagccctcgagaaattcagatggtcataacttttcacacggaagtccgattcctgctaatcacatatcacgaccctcgaaactgaacaatggaagctcttgagaatctcaaatggtcataactcttcacacggat

SEQ ID NO: 129477 - DNA, 342 bp, Glycine max
tcacatttgagacgctcgaaaatgagcatcggaagctctcgagagaggtcagaggtcataaatgttcacacagatgtccgaatcgggcgcgtaatatgtcgagacgctcgaaattgaacaatggaagctctggagaaattcaaatggtcataacttttcaaacggatgtccgattaaggtgcatcacaggtagaggcgctctaaaatgaacaacggaagctctccagaaattggaatggtcataacttttcgcacggaggtccgattaaggcacatcatatttcgagatgcttcgaattgaccacagaagctctcgagaaattaaatggtcataactttcca

SEQ ID NO: 129478 - DNA, 211 bp, Glycine max
ctaatatataacgcggcttacttctaaatgtaacagtaacttagttggtagtggtacaaatatattaatagtgaacgccatttcatcattagctcatgcagaaatgcggatcatacccaatgaccataacatattcaatgcaggctgtcacgttttaatcacacaccaccatcataaattgcatgccatctatatgacttatatatcgggc

SEQ ID NO: 129479 - DNA, 422 bp, Glycine max
  unsure (1)..(422): unsure at all n locations
ttgagaagctagangggagctacttctcttctatgtaagaactaagtgtatgctgcttgagaagcttccttgagaggctagagcttatctacacacccctataatagctaagctcacccccatgacaaaaaaacatgaaaatacgaaaaaaatcctactacgaagactactcaaaatgccctgaaatacaaggcgtaaaccctatactactagaatggccaaaatacaaggcccaaaagaagaaaacaacctattctactatttacaaagaagagtggacccaaccttggcccatgggctcaaaaaactaccctaaggttgatgagaaccctaaggcctttgttatcaactctagcccaatcctctaggagcctcatgctcatggctctgagaactgggtccttcctacggaggattgcatc

SEQ ID NO: 129480 - DNA, 444 bp, Glycine max
  unsure (1)..(444): unsure at all n locations
agcttcttcatcattgtttccagattctgtatcctcttttcatgtaaccaataactcacagaatatccagcaaacctctccctttgagggtccagatcagatctttattggtaatggacaaggtctaaatatctcagcctctcgtcactccaattntgtttctcctttcagtcctaatgtcaaacttattcttaaaaacatgcttcttgtttctcaatccccaagaacatgatcagtgtatgtaaatttgcaaaggatacccatgttttctttgaatttcatgctaatcgttgctttgttaaatctcaagattccaataggatccttctacaaggagatattggacctgatggattatatcagtttccaaaacttcaattctgctctgctgtgtcttccccagcttgtgttaataactgttcttctgctgcttgtaataacaat

SEQ ID NO: 129481 - DNA, 404 bp, Glycine max
  unsure (1)..(404): unsure at all n locations
tagacgaccttgtttaatctgagatgactntattatntatctggacaagtttgaatataatgtagaagaaagtgaatgtgagccttttacccctttgaagggcttgtatttaaaaatgtgttaaaaaatacttttaattaatatttgaatttttattcctttattagtatatatgtgaggggtagagggtgtcacaccaggcatgacaaactcaaaaggaatgaaagtttgcaaattaaagaaggctctatatggattaaaaaaatccctaagagcatggtttggaaggtttaccaagtctatgaaggcttttggttntagagcaagtaactctgatcacatcttanttttgaagataggaaaaggaaaaattacagctttgattagatatgtcggtgacatga

SEQ ID NO: 129482 - DNA, 406 bp, Glycine max
agcttccattataagggggcacattacttttcattgccccaccaagaaaaccatgattatgaggggccaagacatttatagtagccaagatgaggctactacttcaccttcctctagtgaaagtgaagaagcaaaagggaaagaatctagtgaagaaatctacccccaagaagaaggacaacctttaatggttacggaggagtgtaaggaggtaagtgtctcctccaagaggttagctaagaagaaaagtcattttgaaataaagacaaatattaaagaaacttcccctcttagacaacctccacatcttcttctttgtaaaaagacacttgttagcactgccacacctcttgtgcttgaggttattcctcgagtaaaggagttgttggatgagggtttggttcat

SEQ ID NO: 129483 - DNA, 405 bp, Glycine max
  unsure (1)..(405): unsure at all n locations
tcaatggctcaatgagctttgtgaaatgatagtcaatcttcttttaagataccattttctataggagattattgtgatgaagttttatgtgatataattcctatggaagcagggcacatttggttaagtagaccatgtaaatntgacaagaaagcaatccacaatggtctcacaatgaaataaccctcacccatggaagcaaaaggttcaaacttgttcccttgacaccttcacaagtggctggggatccaatacaaataagactcanacgggatgaagaaaagaatataaaaagaaaagaagaacaacctttaatggtttaggagaagtgtaaggaggtaagtgtcttcttcgagaagtagcttagaagcaaagtcattttgcaataaagaaaacaaaaaaact

SEQ ID NO: 129484 - DNA, 361 bp, Glycine max
  unsure (1)..(361): unsure at all n locations
agctntgagcaaattcagacgaacaataactttttactcagatgtctgatagagtcccgtaatacatcgagacgctcaatattgaatgtngaagctctcagcaaattcaaacgacaataacttttttactcagatgtctgatagagtcccgtaaaatatcgagacgatcgaaatngaattctgaagctctgagctaatacaaacagcaataacgttttgctcggatgtctaattgagtcccgtaatctattgaaacgctcgaaatcgaattctgaagctcagagctaattcaaacgaacaataacttttactcgaatgtctgattgagtccccgtatacatcaagacgctcgaaattgaat

SEQ ID NO: 129485 - DNA, 401 bp, Glycine max
  unsure (1)..(401): unsure at all n locations
atttaagcgtctcgattatacaggacttantcgacatccgagtaaaaagttatcgtcggttgaatttggtcagagcttcaacattcaatttacagcgtctcgatatattacgggactcaatcagacatccgagtaaaaagttattctcgtttcaatttgctctgaggttcagaattgaatttcgagcgtctagatatattacgggactcaatcaaacgtcttagtaaaaagttattatcgtttgaattagctcagaacctcaaaattcaatttcgatcgtctcgatatattacgggactcaatcaaacatctgagtaaaaaagttattgtcgtttgaatttgctgaaagcttcaactttcaatttcaagcgtctcgatgtattacaggactcaatcagaca

SEQ ID NO: 129486 - DNA, 394 bp, Glycine max
cgccgatgaaaggatcgaagcgagtctgattatatgcaaatttaatcatcctacttggacgaatgagaaaactggggcaaatgaagagggtgagaatgaaggagaaacccatgctgcgattgccgttcctacatggaaacttcccatttgccaaacaatgtcattactcagccaataaaaacccttctccttacccaccacccgtttatccataaaggccatccttaaatcaaccacaaaacccaccttccacacaaccaatgccaaacaccaccttgagcacaaaccaaaacaccaaccagaaaggggatttgcagcaaaaagcctgtaggattcaccccaaattctggtgtcatatgctaacttgctcccatatctactcgacaattcaatg

SEQ ID NO: 129487 - DNA, 262 bp, Glycine max
acacttctctaatagccaagcacacggcactgagaggagaagctagagctcagctacacacccccaatacagacgaagcgcacccccatggcaaaagacatgagaagacaaaaaaaagctcgacgacaaaagactactcaaaagacctcgaaggacaaggcgaagacccgatactactagaatggcaaaagcaaggcccgacgaaggaaaacgcaggcaaattacgaagaaagcggctcaacttagccaagggccaaagacc

SEQ ID NO: 129488 - DNA, 347 bp, Glycine max
ttcaataagaatgagaaatcccgaagagaaaacgttcgattgatgtttttgcttcattatactaaaaggtattttttattattatattattattttacctctttttttattttcaacgtggttacggcaacgaccaaacagtcggaattcattttaacagaaattaacggatattacaaatcaaatgatcggtggaaatttattttattttttgattaagcgagagattacttaaataaatgactgaagcacgtcaaaagggggttctgatagttaacgaatacgagaataaaagtcatgaaacacatggcgaccaccacgggtacatagaatgaattgaaaagctc

SEQ ID NO: 129489 - DNA, 409 bp, Glycine max
tgatgtgagacagtgtggaagagtcagtctttctacttttgtttgttgaccatagagtgagtcctggagatatgtcgcggtgatcaggataccttggtgacatcaagtggggtgctattgcccaaagccaagcttgaccaatcccgacccaacccgagcatagtcagtcagtgagaacctgtgacgtacctaaacaggcgagctcctggcagtcaaccaataaaagaacaaagtccacgaagcaaggaggcttgtgtggcaactggccagctatgtatcttgggtggtatctgaaatttagcctctggcaatcgattaccaagggtggggaatcgattacagggcttaaaaatggagacaggaggttaaatggcctctggtaatccatttccaatattggttatcgata

SEQ ID NO: 129490 - DNA, 432 bp, Glycine max
  unsure (1)..(432): unsure at all n locations
actccgcttacgtaattttataaatactaggctcttaagtttctatataccttgagagaaagaactaagagtgctaagtattatatccgtctgtaagacgattactgattttagtcagtgtgcaaaatcttgttgatttgtttagagtcaatagtaacttggtaaaataaagaatattactagtcttaagtcaagtttggagtagaacttgcaagcataagaatcactcgtgacaatgaacaatacttataattctgataagttagtgaaaacttgatagttgccaaaaattgaagataatcctgtggttgagataaatcagtgtactttcttggttaattgacataggactctgaatttgtttttagatattctaaagaaaatccaatttctcatcatntgatctcttatattcatcctacaataaaaagt

SEQ ID NO: 129491 - DNA, 407 bp, Glycine max
  unsure (1)..(407): unsure at all n locations
agcttctcaaggaggtgagcttatttattataggggtgtgngnagctaagctctatcttctcaaggaagttttctcaaaaagcttctcaggaagtnttctcaaaaaaacttttcaaggaaactacctagtctgtaaataaaagcatgtgtaacactttgtgtaactttgatgaatgagaatcttgtgagacacaacttaaagttcaacttctctacctttttcttccttcaatttcgtgctcccccctctctctttctctccctttttcttttcctccattgaagcatcctctccaagcttcttattcaaggctcattttggtggtgaagctctttcttccatggcttattccttaatggatggcgcctcctctcacctcttttcctttgcttccgctgcatcttca

SEQ ID NO: 129492 - DNA, 340 bp, Glycine max
tgatgtgagaaagcgtggaagagttagtcttcctacttttgtttgttgaccacagagtggtacctggagatatgtcgcgggggtcaggagaccttggggacgtcaggtggggtgctattgcccaaaaccaagcttgactaatcccgacccaacccgggcatagtcagtcagtgagaacctgtgatgtacctaaaaaggcgagctcatggcagtcaaccaataaaagaacaaagtccacgaagcaaggaggcttgtgtggcggctggccagctatgtatcttgggtggtatctggaaattagcctctggtaatcgattacagggcttataaatggaaatag

SEQ ID NO: 129493 - DNA, 439 bp, Glycine max
ccttaaactcccttattattgaaaaaaagaattaaaagtcatagtatagtctaaattagcaaagtggattaaaattatatattttttaaaagtgtatgataaaatgtcttaattaaaaaataaagagattaaaatcattgatttttaaaaagaggaataaaatatctcgattaaaagattaaaggactaaaatcataaattttaaaaaataggaaaacaaaaattgtattttagtcaaaataaaaatgattaattaactacatgtgggtaaatgtataaatatgaataaataactgctgcaatggggcctaaaaaaatgtataaatatgaagtgagagagtgtgataattgcatgaaaaatattctaagaaaaaccctttataaattctttatatcaaccacaataataatttttagcactatcaagcaataataattt

SEQ ID NO: 129494 - DNA, 248 bp, Glycine max
ttggatgatttgtcctaatggtagccattgatagactcaccaaatatgctcatttgattccattaaaagctgattaatcacagcccgtggttgcagaagcatttatgagtcacatactcaatatacatggcataccaagaactatagcgtcagctcgaaatacggtctttaccgatacttgtttgcaacatttattccagttacaaagtactacattggccatgacatcagcttatcatccacagtta

SEQ ID NO: 129495 - DNA, 252 bp, Glycine max
  unsure (1)..(252): unsure at all n locations
tattctcttcattgngaattaatgtagttcaactttactttcacgtgaaaagatgaagaagaataagaatgttgctgcagctggtgtctcgctaagccaggcatatgcccctttcgaagtatgagaatctgcgagacaatctgttattcatgcacgcgccctgccgcccatctgttcgctcagcaagtcatgtatcacttctcgcggtcagcgtgcccagctcccttaacgaaaatccactatctcgcgctt

SEQ ID NO: 129496 - DNA, 393 bp, Glycine max
  unsure (1)..(393): unsure at all n locations
gttttctcgctcagcagatggactgaagcggtgcgcttatcaggatgacccttcactcagcgagcaagcacagctgatctttcttccagattcttcctcgcgcttagccgaggaatgttgcgctcagcggatggctcgctaagccatcagattggtttagcgagagggtgaaaatcagcacttcacaaacttgcctaattaacctgaaattaagagaaaatgattattaaacacacaaaacagaattactaagtatttattacctatctttaactaaaagaacttataacactacaaaataaccataaattggaggagattgatacaatntacacaaagtttatacacaaaagttagtcgtattcaccgactaacacttgccgatcaagaaac

SEQ ID NO: 129497 - DNA, 305 bp, Glycine max
caggatttcttttacgtttgccaaattcaacggatttgatgctataacaccatcactggtggataggttaagcaactacgggcattttaatggtgaataagcacctatactctgcatgtctattgctgaaatatttgttatgtaaataatcataattgcatagggtgcctatatccattgtcagtgacagtgaccctacttttaaagatgaccataaattatgacccaaaatcaaatggccagacaaaagtgcttaacagaaccttagaaacctacctcaaatgtttttgtcataacaatcagta

SEQ ID NO: 129498 - DNA, 402 bp, Glycine max
acacctctgtagttgtgaacaatggatccttttggaaaaataaaaactaatgtggagttcacaactgtctgactgcttgtctctcccaagaatgccatagttttttttgtaagagttgggttgagacttaaacttgtgatttcttatagtgttagtctgtgtcatatatatagatgagttttaatatcagtaatgcatttttaaaagattaaaaatatgcatgcacatgctttctgtatgtgttgtcaactacaccaatgatgtgacatgctttagcttgcatcagatctgcatgtgtagtcatgttgtgcagggtcctttcacgcgttttatgttaatgcagaccaacaattatcatacacggtttttcacaatgtgttgtcaactcagacaacgatttat

SEQ ID NO: 129499 - DNA, 451 bp, Glycine max
  unsure (1)..(451): unsure at all n locations
cagcttatatagtctatgtaccactctgcggattaaccttattatgcatagtctcaaagaaaatagaagcagctgaaaccttctttccccctaaagtataataaccatgactcaaatgccccccagaaggcgaatcaagacccataatcctatccccgggatgcaaaatcccagtgtacacagcgaaattagcagaagtacaagaataaggttgaacattaacaccccaattgttggggtgaagatcaaaagccaacaacgcacgctggcaacagagaaactcaatctcatcaatgtattgattaccagtgtagtacttagcaccaggcattccctcagagtacttgttgcttagatggcttcccaaagcttccatcactgctctgcacacgaaattntccgaagcaattaacttaattnccttaaactgtctntgtttttccttccccat

SEQ ID NO: 129500 - DNA, 403 bp, Glycine max
  unsure (1)..(403): unsure at all n locations
ttcttacccaagaaaatggatgatttttaaggtccaacgacttaaaatgatcacctttcaagtaaaaagaatcacttgattcacgcataagaaagaactacataggtctgatttcctctttgatggagggtacgtaggagcaaaagccccgcttttgtcgacctcaaaaaataaaaagaaataaagttaaggtaacacaatttccacaattctaaaaaataggctgttgtccttcaagacaaacgtaagaggtgctaataccttcctcaaccgtaaatacaactcccgaacttagaattttcatttttgatcgggttccttcggttttcccgacattttccacanataaaagttggtggcgactccgcgcatctttcctctttggaaagcgcacccgtgagtc

SEQ ID NO: 129501 - DNA, 457 bp, Glycine max
  unsure (1)..(457): unsure at all n locations
gtgacactctcgagctctgacgctgcgtaacccaccatctnttcatagtagagtatcgatattgtgtctaccatcacgattatcgtctccctttccatcattgggggtaccacttgggccgccagatccctccaccttttgggcgtgttctttgaaagatccgtccccctttttgcaaatgttctatagttgcatcctatccggaaccatatcaaaattgtactgatactgcctaacaaaggcaaccattaggtccttccaagaatggactcgggaagattccaagttagtgtaccaggtaacagctaccccagtaagactttcttggaaggaatgtattagcaattcctcatcttttgcgtattcccccatcttctgacaatacatctttagatggttcttgggacaagtagtccccttgtacttgtcaaagtccaacaccttgaactttggaggg

SEQ ID NO: 129502 - DNA, 435 bp, Glycine max
ctcagcttttatccagggtcatcttggtggtgaagctccttcttcatggcttatttcttaatggatggcgcctcctctcacctcttctcctttgtcttccgctgcatctccatggtggaaaatcaccattaaaggacctcattgaagctcaaagatccagcctccatagaagctccacaagaaagcttccatcaagtggtaatcagagcacaagagcttcaagtaggtgctccttaaacctccattattttttttctttaccttctcttccattgatgtttcttcatttttctccatgtatctcctcacatgtcttgttctaaatgttgttaacatgattctttagagtttccaccgattaaacttgctatagaagttagatttgattttctatggctcaaatttcttgttcttgttcttgaaccatgaattgtg

SEQ ID NO: 129503 - DNA, 100 bp, Glycine max
tttggaaactcatccataagccaaaaatcacgtccatgctcccctaaaatatgaaacctttaaccatgaataccttactcgttacagcccatcacgaatg

SEQ ID NO: 129504 - DNA, 120 bp, Glycine max
gtgcaaaacctgcacatcaaacgatcaataactgctgataatctatcaccatatatgtgtaatcgattacatagtgcaaattttgaattcaaattttaatagctggtggaaatcaatttt

SEQ ID NO: 129505 - DNA, 348 bp, Glycine max
  unsure (1)..(348): unsure at all n locations
gaacgtgatgctagtggaggaacacttatattttgatggttgtttaaaaggcattacatttgttcctatggatgtctttacttctggactaggttatagcttggaatcataaagcttttcaccccccttccccaattcaaaatgttgtttagagtattttctagtcttgagtttaatataattatatatacttgaataccacaaacatttctagttgtccttttgtgcctgcatgaatatatatattaacagttacaaatgatgtntaacagagtcccagatggcaactcttagtcttcttggtgtggatagcgtactgaccacggntcactattctaacccaaattg

SEQ ID NO: 129506 - DNA, 424 bp, Glycine max
  unsure (1)..(424): unsure at all n locations
gggactggactcaaatctagtgtttctcattntaggaacttttggatcaatttgctttaagcatgtaccagatcaattgagaaagaagcttgatgataaaggagaacatatgaaacttattggttatcaccctacaggtggttacaagctatatgatccaaggaataagcaagtaatagtgagtagagatgtggtgattgatgagacaagaggatgtgattggaaacttgaagctgggagtggatcaaccaggatgatagttgatactagtaatcctattgaatctgaaatgaacacaagtgcccctacagaactcagaagatcaacaagggtaaggtagcttcctcctaacctgaatgtttatgatattgtaccagattctttagtggattcagaagggtgaatggtgcactatccactgatg

SEQ ID NO: 129507 - DNA, 357 bp, Glycine max
  unsure (1)..(357): unsure at all n locations
cagagatagatatacgtacacatacctgaataatcctgaatctgaaggatagttgatgtaatgcattattcccttctgcaacgtgggtgtttgcgtccatggaaaccaagctcacgtggtgagccagttttaataattccaataaccggattaataaatcagtgtgagaaacttgtcctctcacattcacttgcaactccaccattctctcttctgatgagcttgattcggcgacatgtgaaattatgacanctaatcttttattcggcgataaactaactaccttggtctcttcaaatgtagattcttcggttgacaaaatgacgtcaacccctgattccttttgctcagtatatc

SEQ ID NO: 129508 - DNA, 426 bp, Glycine max
  unsure (1)..(426): unsure at all n locations
tgagacagaaaagcttgaaccataacccggtgagagtgtgatattagattgtgagtaaatgactagcattgagcaatagtctttgtatcagtctctgaatgaaatgcataagtttaaaagtgatgaaggccattgttctatttttaaactactttagtagaaagcttaccttgaattataattgtatcctttgcaccctttgtgagctgaattaaattttcaaattgaaccctgagcttgaatgaatatctccatctaccttgcttaggtgctaagagagcatatggttcaaggcaattntccctataattgggggagttagttgggatgtgaagtgaaaaggtaagacacattagcacacacaacaaataagttatgtgtntaaaaaataaaaattaaaaagagtnatatgccaatatagagagc

SEQ ID NO: 129509 - DNA, 409 bp, Glycine max
cttttagtaaagtaaataaataaatatagagcattttatatgctgagtaccctacgtataaatagttatgttaagtcagctgcctcctttttggcctcattttcgtttttccccttctcctcttaaaaccctttctttttcccgcagcccaccaaaccagtctcagaaaaatgacgatctcgaacccattcaccgttggatcgtcgtgaaatttgagtatcatgttcgcaacttaattccgaacattctcaccgttggtaatttcaaaatcatatctgagtttagaggaaagcccttcgcattgtagcattttaattttccgcagaaacccaaaactgtctcggtaaaactacgatcccgggttctttagccgttggattttcatgaaatttggatatgttgttcgaaa

SEQ ID NO: 129510 - DNA, 438 bp, Glycine max
  unsure (1)..(438): unsure at all n locations
ctcagctttgagcttgaaaagtttgtctnttacatgtctatttctttgagtgacattcgtattgattgttgcatcttagtctctatcttttcatatgtacatcatgcatcatcacatagaggtagaaagattgtttctaaagttagaaacctcttcaatgcataaaaatctttgttttaatcgattacaaggctaatcataatcgattacacaagtttttatagcttgcagaggattctcgctttagtttaatcgattactagttaaccataatcgattacacgattcaattgagaccatgtctggttttttgtgagtctttactctaatcgattactaggtgatcataatgattattttgttcttaaaagtgtttctagaagtgatcaagaacactntaatcgnatacatcaagaatctaaacaattacattgttct

SEQ ID NO: 129511 - DNA, 368 bp, Glycine max
  unsure (1)..(368): unsure at all n locations
tgaaaccaaaagaaaaagaaaaaaagacctcgaaggtcagcatgttatggtcataggaagcataaatcattcgtagaaataatatggaatggatggattcataaactgacgctaaaagtttattttccagaataaccgagatgagaatggatggattcattgaaccgatgaaagaacataatttggaaatattgggtctacttgtgtaaatcccaagccttagtatcacaatgccataaactggatgcttgagtatccacctagctgtagccatgactaattntgcatgttgttcccaaatcaccaatgttacgcgtgcctcgtggaaataatatggaaattcaacccgagaccgacaccttgacaca

SEQ ID NO: 129512 - DNA, 363 bp, Glycine max
gttctagagagagaaaggtccatgttccataagatgttttgagagatcttgctgtgtgaagatctgcagagacgagtgctcaaagcgaaagccattctgagagcttgagatgagtttgtgagtgattttgagatcctagaggtgaaggagacatcctcaccacttgtattattgcaatctttcatcttggtcttctatgtgctgtaaaggaggtttctggactatggaaagctaaatcctttgtatgatctgttctgttggaacctaatgtgaatatatttcaatctatgtaatgatgtttcgtgtgtactctgtgcgatctacttttcatttcattagtcccttaccatgattacctatatg

SEQ ID NO: 129513 - DNA, 246 bp, Glycine max
  unsure (1)..(246): unsure at all n locations
ctcatccctagtcnttaatcaatttactaaagggtttaagaaaatatctttttgaaagaaagaattttaacaaggatattatgtaaatgggggattgatttagtattaattgagtttgattattgaaagtttgtgatacaacccgtacaaaagaagttttggaactctagtttaaaagtcattttgtttgaaaccaattcccccctcttggttggagtccatcatcttttcaggatgccttgaaaa

SEQ ID NO: 129514 - DNA, 420 bp, Glycine max
ttaagctctccctatttcctataatagggggagaagtgaatgtgaaatatgtttagccctcctggtatttcgagagcacttgaaattagtgaaaaaaattgtttctgtgaagaaaatccaagccgaggcgcttctgtaacgtttccgtgggtgattttgcaaagattttcaaccgttcttcgacgttcttcgttcattcttcgtcgctcttcggtcttcaaccggtaagttcccgaaatcaaacttttcaatacattctatgtacccttagtgatcctcatttggtttcacgtgcttatattttcatgttatttactatgcgtacccccttttgacgtgctatagtcatttactatagtgcactttccgcctcaattataaatataataaatttcctttgacatttgaattgaacattca

SEQ ID NO: 129515 - DNA, 410 bp, Glycine max
  unsure (1)..(410): unsure at all n locations
aagggatgccccacattatttccatgacacaaatgcaaaaatgatgatttggaaattttatgcaaaactggtcatgcatgcacctatgtggacgctcaaatgtcaaatttttatggtcatgtgatgctagggctcaggattcatttcctctatttcaacccaatgtttccaaaatatgttcttttatcaatttgtgcattcatccgagtccatttcgggcgtccggggaaatttcacagcattcacccttcaggtgtagccacattttccaaaaattggttatgatcaatgaatttttttcaaagaaaagttggaaatcatttcttttaaaagcatgtcggtttttcagctagacaacttatnnttctttnttctcttttttttttcatcattattcaattctttttctc

SEQ ID NO: 129516 - DNA, 441 bp, Glycine max
  unsure (1)..(441): unsure at all n locations
ctaagcttggctaatttcattggtgcatntatataacccatttttttttttaatattccattactaatgcaataaaaaatgggattttatgtagcccactccggctgacatttagaataccaagtacacgaacaacactaaaagtgttgcggtgatgttacccactggcaaaagaacagaatgaggtttagtttggtgcgaccatcaagtcaaatttggcgtaggctggtatgaatttgtcaagggtgatattgtgaaagtgggtgacaatgtccagtttgaaatatgttagtctagacacaatttatgtggctttagcagatgctgaggtaagtcagtggtaaggtgattcttacccatttaatgtttactcattagaaaattcttacattcgtttgctcatatttgacaggattaatggatgtttgttgntgttggtag

SEQ ID NO: 129517 - DNA, 311 bp, Glycine max
gactccctctccattatggggggtaccacacgggccaccagcatcctgcacctttcgtgcgtggactacgcacagagccgccacctttgtgcatatgttgtatacttgcaatctatccggaaccacatcagaatcgtactgatactgcctaagcaaggcaaccatattgtccctccaagaatggactccggaagatacctgttagtcgtaccaagtgacaccttccctagtatgactttcctggaatgagattattaaccattcctcatcttttgcgtaatcccccatcctctgacaatacatctttagat

SEQ ID NO: 129518 - DNA, 452 bp, Glycine max
  unsure (1)..(452): unsure at all n locations
agctgcaagcttgcggcgttgcatcgangaggatgtctggttattctttccatgagncctgctatcaagcaattggtgatgtggatggattcagcttttgaaatctggaaagatctcacagatcaatcttcgcattcagataagtttcacattgttgatcttcaagatcaaatccaaaattgttagcaagttaactcaagcatttctgagtaatatactcgcctaaagattttgtggaaagaactacaatngtatagatgttttttgttgtgtacatgttctagaccttgctcttgtgggctcattcctcaacttaagaaagaatgtgaagatgactgtgtgatccacttttgcgtggcctcaatgatgtgtatgcacctgtcagatctcagtcatgcttatggaacctatgcctttcttggttacaacattttctctcgtgcttcagcatg

SEQ ID NO: 129519 - DNA, 309 bp, Glycine max
  unsure (1)..(309): unsure at all n locations
ntagacacaggacaacagtggaaatcaaaatcaaaactttattgtctcttttctataattctaccattggaggtaaccctaacgactgcgtgtagatcttaatcataaaatcattgggccctaccaattaacattgatttgggaaagttgcctatggtgtgaaagaaactttanggccctctaatcgaatcatctaagataatggatattacgattcatgccttgacaaactagctctcattaatcagttcaatttattctatntgcactctttggaggagacgagtgcctctcgtaatggacgaatat

SEQ ID NO: 129520 - DNA, 331 bp, Glycine max
  unsure (1)..(331): unsure at all n locations
taatgggataagtatatcatggctaagatcgctgcaaactaggctggaaaagaagcaagttaaagacaccaacatcatccaacaggtcattcatgataaagtaaggagatttttaggtctggctgacccatccctaccttggattntgatgattacaaaggtataaattgttgataactaatgattntttgttaaagtaaacaaaacctactacatagcaagcttttagtccacacctcatatctttcaagctcttataagtaagcatccactcataagtgcaaaatgggcaaactatttttgttaactaagttatatttagtgtccaata

SEQ ID NO: 129521 - DNA, 421 bp, Glycine max
caattgctctttatcagcttcaaaggaaaccagaagagaagctagaaatataaaagtaggcaaaggaaaggaaaccaaaagtttcacataaaggaatgaatggttgatgcatgttaatttaaaatattgtttatgaaagacattattccttttttatatataaggttgtctagatatcaggactaaaaagaacaaattgatagaaaaaattcaattattagaaaattcaaatcatttttttatgaaattaatggaaaagtagaaatgacatacctttgataagagagatggtcttttcaaaattttccttggtcaatttacctttcttaacacagttttgtaggtttcctactcaacagagaaaagttattacatgagaacaggaaagatttatttcttaattaaaagtgcagtgtgagta

SEQ ID NO: 129522 - DNA, 235 bp, Glycine max
accctttttgcaccattttaattactgaatgggcttaattggcaaataatcaagccgttttattatttgggctcatttaactaatttgaaggttttaatccaaattcaagaattaatgaaacattgggcttaatcccgattttggttattgacctgaaaaaggccaaataagcaacgcctaacttagttaattaagaaatttccccattttattttatggtggtcaatggttatt

SEQ ID NO: 129523 - DNA, 431 bp, Glycine max
gcttcatgatgatgaatcaagattgattcaaggtgttttgatgataacaaagatgatgacaaaaagcccatgagaatgatttcatgattgagtcaagaacaagagaaagattcaagaaaagtttcaagtttcaagaatcaagattcaagactcaagattcaagaatcaagaaaaggctcaatcaagatgagtacaaaaaagtttttcaaaacattgagtagcacatgaagttttcacaaaagcgttcaccaaagagtttttactctctggtaatcaattaccagtttactgtaatcgattaccagtggcaagttttgttttcaaaaagctttcaactgaatttacaatgttccaatcaatttcaaaatggtgtaatcgattacaatatattggtaatcgattaccagtgtgtttgaacattgaaattcaaa

SEQ ID NO: 129524 - DNA, 441 bp, Glycine max
gtcacctgcggcatgcaagcttctaatttatttaagtacctacatgtgtttcttatccattatatcataatattctctaattttattaatttcctttatttttttaaatctttaaaaaaattaaaaatcacgttgagaattcgggttgggggacccaaaatctcaacaagctttgcaaaaaaaaattcaaaaacacaatgtaaatttgggtccccccccaacccaaatttacactgagaatagtaaacatgtatgtattggtaaataatgggaggagttgtatgtttttgtaaatttttttcttgtatgtctaggaaaaaaaatcctgttgtggaatggtgtcatgggaaataacaactcatgcaggcacaagaagaagagatatttgcgtcaccatgcaagccaagtaggggtgaaaatataattaaataaaatttaact

SEQ ID NO: 129525 - DNA, 338 bp, Glycine max
  unsure (1)..(338): unsure at all n locations
tacacccctctaataactaagctcacctccttgagaagagaagctagagcttagctacacacccctataatagctaagctcacccncatgacaaaatacatgaaaatacaaaaaaaaagtccctactacaaagactactcaaaatgccctgaaatacaaggctaaaaccctatactactagaatggccataatacaaggcccaaaagaagaaaaaaaacctattataatatttacaaagaagagtggacctaaccttggcccatgggctcaaaaatctatcctaaggttcatgagaaccctaaggccttctntatcagctctagccctatcctcttgg

SEQ ID NO: 129526 - DNA, 419 bp, Glycine max
  unsure (1)..(419): unsure at all n locations
gcactatttgccgacagttgtcaactagtcatggttagtttgaagttctgaacttgcttgaactggatgttaatattctatgaacacaaaccaaattgaatgcacaaattatttcaaattcgatttggtccatgcgaatattgtttccttttctttttaaacaatggatacaagttaacaaatccttttaaaggacttttttccttctctttttcagtttgtatattntgtttacttcagctctgattttctagcaattcctattctcctttggagactggaaaccttagcattacctcagcaaaatttgctattaatgatctatttctctatctatacatggatttagctcctctcatgctttcatctctcacctgatatccttcccataggctaatggaatagtatgaacagtgtat

SEQ ID NO: 129527 - DNA, 362 bp, Glycine max
  unsure (1)..(362): unsure at all n locations
tagcanatggacctgggtgttgcccagtttcatcatattttctgtaatacttatcacctctatcatatctaataattttcacatttatgtctaattgccattttacttcattgtagtaaatttctaaggcatccgttgcctaagaaatctcgggtagtaagcagacataaccgtaacgtgaataatcatcaataatggtgataaagtatcattcctttccaaaagaactaacatcaaaaggtccacaaatatcagtatgcacaatttcaagaagctgagtgcttcttgtagctcttttctttgtacgttttgcttgtttttcccttaatacaacccacacaaatatttagatcccataaatc

SEQ ID NO: 129528 - DNA, 373 bp, Glycine max
agaatgccaatccttaccctcggaagcaaaaaaaaagaagagaaggaaaatttccaatccaaggaaaaaggagaaggaaaatttccaatcaaaggaaaggaaattcccaatccaagagtgggagaaagccaaaagaaaagaaagaaaattcccaatcaaagaatgggagaaagaaaaaaagagaagttaaaaagaagaaagctcctggtcaaagaaaccaaaagaaatgtgccgagaggtccttggactaaacgatatctgaacaatacagaattgtcccaaatgaacaaaaaaagaaaggaaaccatgactaaagtgtcttctcccttgataccaccaaatcttggcgctacacttttcgcccgcctaacaa

SEQ ID NO: 129529 - DNA, 375 bp, Glycine max
  unsure (1)..(375): unsure at all n locations
actcagcttaacattcaatttcgagcgtctcgatgtattacgggtctctatcagaaatctgagtaaaacgttattgtcgtttgatttggcacagagcttcaacattcaagttcgagcgtctcgatatattacgagactcaatcagacatccgagtaaaaagttattgtcgtttgaatttgctcagaggttcaacattcaatntcaagcgtcttcgtatattacgggactcaatcagacatccgaggtaaaaggtattgtcgttttaataggctcgaagcttaaacattcaatttcgagcgtctcgatatattacgggactcaattacacattcgagaaaaagttatcttccgttgaatttgcgccgaggacaaca

SEQ ID NO: 129530 - DNA, 462 bp, Glycine max
  unsure (1)..(462): unsure at all n locations
ccggatccttaagtcacctgcggctgcagctctctcttgaaaaaanttttcatcatctatattccatctngggcctttttnccacaactcttgtaaatgggagagaaattttcatctaaagcatacaagtccctaatgttatcaaatcctaaaatttgagctcctagggagcaaaacaatgtgtgtctcctagagaggacatcagctaccacatttgtttttccctttttgtctttgataacatatggaaattgctctaggtgctctacccattttgcatgccttttttttaactttctttgccctctaatgaacttaagtgattgatgatctctatgaatgacaaattccttggaaacaaggtaatgttcccaagttcggagtggtcttattaaggcataaagctttttatcatatgtaaggtagatttatctaaaatttgcatcttgtataaatatgttc

SEQ ID NO: 129531 - DNA, 420 bp, Glycine max
ctaagctgaccatcccacccacccggcatagtcggtcagttgaacctgtgatgtacctaagcaggcgagctcctggcagtcaacagataaaaggaaaacaagaccacaaagcaaggaggcttgtggtggctggccagctgtgaattttgtgtaatatgtggatggtggcctctggtaatcgattaccaagggtgggtaatcgattacaaggcttaaaattgaggacaggaggctaagatggtctctggtaatcgattaccaaggggtgtaatcgattaccaggcttgaaaacgaagtcaggaaacttatggatcctctggtaatcgattaccagcctgtgtaatcgattacacagaggaatgggtcactggtaatcgattaccacgcatgtgtcatcgattacacagtgtattattgcat

SEQ ID NO: 129532 - DNA, 393 bp, Glycine max
  unsure (1)..(393): unsure at all n locations
aataattatgacctttcaagcaatagataccatccaggttggaggaatcatccaaatctgagatagaccagtcctccacaacaacatcagcctgtccctcctttccaaaatgctactggtccaagcaagccatatgttcctcctccaatgcaacaacaacagtagcagtcacaacaaagacaacaagcaactgaggctcctcctcaaccttccttagagggattagtgaggcaaatgaccatccagaatatgcaatttcagcaagagacaagagcctncattcagagtctgacaaattagatggggcagatggctactcaattgaaccaagctcaatcccaaaattctgacaaattgccttcacanactatgcagaatcccgaaaatatgagt

SEQ ID NO: 129533 - DNA, 369 bp, Glycine max
acttgatctaagctaaacataaccacatgcgaaatgcaacatgtatccctctgacaggatgtatcatatcatctactaattctctccactaacattatataaaacataacgggatcagtcaaataactcacttgtactactcctcggagtctgcctgttgcctccacggccggtggcccctctggttgccttgccattgcgtttgccgttgacccaataccatctcaaatttcctctgctgaactaaatcctcactttgttcaccgaacataatttgtaaagcatacaacaccattgtttttacaaaacacacctaatttgaaatttaagatgaaaatataatgttcttacacgctaacatattataca

SEQ ID NO: 129534 - DNA, 351 bp, Glycine max
acttgtaggatttgatttgagcaagattggatgaggggaagtgtgattttcgaaatctgcacttatgcaagaatttgctgtcaaaataggtgcagcaggattttggctttgtgcagaaaaatgcttgtgtgtggttggttgtggaaagagtagtacagaatgagttctggatgtttgctagtagatcccaacgatcacaatgtaggcttatgcactatagacttccagtaaaattttggagtcgatccaacggttaacgaattggatcgaaggaattgttactgtggtctttaaatgagaaaagctgtgattttggttgatgtgttgagcagagttttctgcctttgctct

SEQ ID NO: 129535 - DNA, 437 bp, Glycine max
actaagcttaggaattatggcctcatcaaactacttgtttcccgatggaaattctataaatagacctcctatctttaatggagtgggttaccactactggaaaacccgcatgcaaatctttatagaggcaatagatttaaatatttgggaagccatagaacaaggaccttatgttccctctatagtggccggaagttcaacaatagaaaaacctagagcatattggactgaggaagaaagaagattagtacaatataatttaaaggccaaaaatattattacatctgccctaggaatagatgaatactttagggtttcaaattctaaaagtgctaatgatatgtgggatacactacaagttacacatgaaggcacaaaatatgttaaaagatctaggataaatactttaactcgtgaatatgaactgtttacgatga

SEQ ID NO: 129536 - DNA, 393 bp, Glycine max
ggttctaacgggttaacgtaggaaccactcaaaccttaaacacatttttatgtatattacgtaataaacaagaatttaaaaatgtttggaagtgttttaacataaaaacaaacatacatttagtttatctatcatcatggagatataaaatagattgaataatttaaaaaatcatagattcaatttctttgttaacaaccttctaataaattaatatttattgataaaaaaaaattcttaccaccatagtttctaaagggggttgattcacaaatgatcataacaattaaggcattcttcaatgcgttcgcgtaattacggttttaaattaaaaccactttaaacacaattaaattagggggtgtaaatgagtattggatagtatatactaat

SEQ ID NO: 129537 - DNA, 429 bp, Glycine max
  unsure (1)..(429): unsure at all n locations
acttcaactaagctaaagttctatttgtgaatcactatatctttatttttatctgatcnnnnttatcacttcaaatttcttttgcatgtgatttttgtcatgcaaacttgcatctttggcacttgaggttgatccaggtggagttgttttctagataccaccgaaagacctgaatttcgttatattcttctcccaatgcttttacccttaacctgtccctgtaaaatttctgcaattctatgccccttttttttgttgatgattaaactttggtggttagctaagtggtgaaaataaggatttttaaaatttattttgtgaatgtgctcaaaatttgagtgtatccagctgattgggaactgattttattaactggttaagataaatcttaagcttatcttttcatgtttccgcaaacgttatgcatct

SEQ ID NO: 129538 - DNA, 492 bp, Glycine max
  unsure (1)..(492): unsure at all n locations
tctaagtcacctgaggcatgcagcttcgtgatgtagcttaggagttgttcttgctatttctttcatccataaaaggaacattgcaggtaaaattatttttttcttctgtaacatttcactaaacatatggtagtatagcatgggtttgttctatacttgcgatatgtagctggctaaactttgtcttatgtgaggcatttacttcaacattccatatttcctttaccttgtagaatctggataactgcatgtcctatagtggcaaaactatgctattttgtcagcatataaacatgtttgcacccctatacaatcaagtattctacatggataccatagaaagtagaaagaatagtagtggttttcacttgattctgtagaaaaatgattacaaagatatagagtagagagaaaatggagaataaaattgtctgaaaaagtatatatgcacatantaagttgatttggattgggatgagttgatttttaaaa

SEQ ID NO: 129539 - DNA, 410 bp, Glycine max
catgccacaccaaccggtggccatatatgtattcacgaagaccttagcaaggttacaagagaacttcacgtgcagctcaattcatcaggatgttcgcagattcatcgaacaatgcctcgattgtcaacataccaattatatcactaggaaaccagttggactacttgcacccttccctctaccaactcgaccatgggaagacttttcactcgatttcattgttggtttaccatcttactgggggtatacaaccatattggtggttgttgatagatttttgaagggcattcatttgggtcttcttcttccacactatactgcgtaccaagtcgcaaacctcttcctggatatagtttctaaactgcacgacatgcctaagagcctatttttcgatagagaccccttgttta

SEQ ID NO: 129540 - DNA, 474 bp, Glycine max
  unsure (1)..(474): unsure at all n locations
ctgcagcttagctttttggaatcttcttatgaagcttctcaggtttgtttcttanntatgagagggctatgtgtagctaagctctagcttctcaaggaagttttctcaaagaagctactcaaggaagttatctcaagaaagcttctaaaggaagctacctagtctataaatagaagcatgtgtaacacttattgtaactttgatgaatgagagtctngtgagacatactttaaagttccacttctctccctctattattccttcaatttcgagctccccccctctttctctccctctttcttttcctacattaaagcatccttccaagcttcttatccaaggctcatcttggtggtgaaactccttcttacatggcttattccctagtggatggcgcctcctctcacctcttctcctttgtcttccgctgcatctccatggagggaaatcaccattaaaggacctcattgaagc

SEQ ID NO: 129541 - DNA, 419 bp, Glycine max
tcttatccaaggctcatcttggtggtgaagctccttcttccatggcttattccctagtggatggcgcctcctctcacctcttctcctttgtcttccgctgcatctccatggtggaaaatcaccattaaaggacctcattgaagctcaaagatccagcctccatagaagccccacaagcaagcttccatcaagtggtaatcagagcacaagagcttcaactaggtgctccgtaaacctccattaattttttttgctttaccttctcttccattgttgtttcttcatttttttctccatgtatctcctcacatgtcttgtgctaaatgtttttaacatgattctttagagttttcaccgattaaacttgctatataagctagatttgatttttatggttcaaatttcttgttttgttcttg

SEQ ID NO: 129542 - DNA, 457 bp, Glycine max
agcttgcatgatttacatctccttctttcttatgcaaattcttcttgatatcatcaaaatcttcatgatttacattctccccctttttgatgatgacaaccacctgtaggttaggagcaacaacaaagaaaatatctatttgcatatagtttactcccccttggttttacaatgattgcttatatgagacaattgaagatttcatatttttcatatataaaaagttgtctcataaaacaatagataatttttcttactattttatcttttatctttctctccccctttgtcaacatcaaaaacaaatcatgaatagagaggagaaagatgttaccacttgttgcaatgtatgagaatcaagtgatatcaaaaggcattaaaacaatcattcaatattaatcaagcaaaaacaagtacaataacacatcaatcaaacacaatcaaacacaatcaatca

SEQ ID NO: 129543 - DNA, 404 bp, Glycine max
tcttatccaaggctcatcttggtgatgaagctccttctttcatggcttattccttaatggatggtgcctcctctcacctcttttcctttgtcttccgctgcatctccatggtggaaaatcaccattaaaggaccccgttgaagctcaaagatccagcctccatagaagccccacaagcaagcttccatcaagtggtatcagagcacaagagcttcaagtaggtgctccttaaacctccattaattttttgctttaccttctcttccattgttgtttcttcattatttttctccatgtatctcctcacatgtcttgtgataaatgtttttaacatgattctttagagtttccaccgatttaacttgctttagaagctatatttgattttctatggttcaaatttc

SEQ ID NO: 129544 - DNA, 453 bp, Glycine max
  unsure (1)..(453): unsure at all n locations
agctntgtttcttaattactcactaatcctactacttctgtctcaccgggaactgcatgcgagtccaccccagatccatcctattgcaaattcgttctccctccccaaaacagcaacatttacgactatggtcgattctccgtctaaaaattactctcccaagcccacaagttcttaaacctagttaataaataactccaagcattgcaccaaggcttaccccaagccagcacttctacaataaatgtaacaatgcataacaaaattctgaaaaacaaggtagaaaaaaacctgacttctaaattggagtgaaaattggaacgatatttgcggtgtggactcacagtggttgtgcaacaacattggtgacaggacgacagtgagtaacggcggcacggaagatgcattgagtgcgactgcagaattgatatcagatcgaaacgtgaatgaaaa

SEQ ID NO: 129545 - DNA, 414 bp, Glycine max
  unsure (1)..(414): unsure at all n locations
ctggttgcacatcgttcgcgtgtatgatatccactccactttgtttgaaatagaggagaccttcaatcctattacacaacgtggcggacaaaagtgggcagttaacttgaatgatcattattatcaatgcggaaggtattctgcgcttcaatatccatgttcacacattattgcagcttgtggttacgtgagcatgaactacaaccaatatatagatgttgtttacataaatgagcacatcttaaaagcttactccacacaatggtggcatcttgggaatgaagcgactattcctccttctaatgatgcatggacacttatccctgacccaactacaattcgtgcgaatggtcngcctatatcaacaaggataaggaatgagatggattgggtcgtgtgacaccctctaccccg

SEQ ID NO: 129546 - DNA, 355 bp, Glycine max
taacttcttgcttttattcgctgaccacagagtggtacctggagatatgtcgcgggggtcaggagaccttggggacgtcaagtggggtgctattgcccaaaaccaagcttgaccaatcccgacccaacccgggcatagtcagtcagtgagaacctgtgatgtacctaagcgggcgagctcctggcagtcaacagataaaaggaactaagaccacaaagcaaggaggcttgtgtggtggctggccaactgtgaactttgattgatatatgggatatggcctctggtaatcgattaccaagggtgggtaatcgattacaaggcttaaaaatgaagacaggagactaagatggtctct

SEQ ID NO: 129547 - DNA, 427 bp, Glycine max
  unsure (1)..(427): unsure at all n locations
tctacttatgtggcagggcgggcttccttcactttcttgtctcaaccgcgagctntgaccaccgctcttccttcccgcgatgcttctctntatatctgcctgagtgggcttatagcctaaaccatacttcccacgatttcctttggcatttatcaggctagttatgccgccattgtctttgcctaaacccattccgggtttgtaaccgttccccaacataactcgagccatcattactgctgcatcggacaggcaagcttgcccagagaaggagtccatggaggaaatgcttaccacctcaaaagactggaaagcggtttctaatgactcctctgcggcttccacataaggcatagaggatgggaagctcaccaagatgtcttcctcgcctgatacgatgaccagatgcccttccactatgaatttc

SEQ ID NO: 129548 - DNA, 460 bp, Glycine max
  unsure (1)..(460): unsure at all n locations
ctgcagcttacgcctcatgtnttggatggtcnttttttttcaacgctgnagtcgagcaagttacgcaataaaatatgggcttaaatattggaacatttatcaaacctgacagcttctaatcttagtccaaaagttcgcaattattcatgtgtttgtaactggttgggaacctanaaaatcaatcttactaacttaacatttattggtttaattgataggaaatttgaacttctttaaaaacatagtcttgattntttttttctttgcttcggttgggagttaagaaaaattattggaagaattgtcccttgagataagtttatatgaatttactcgaattagttaagagtttggtatcacataaaaaaaagaaatatgttcatctaagatgaaatataatgcactccattatntaagttcggtgattatttaaattcaaatagaatatcattagcaacat

SEQ ID NO: 129549 - DNA, 426 bp, Glycine max
  unsure (1)..(426): unsure at all n locations
tatgttagaaaatgattatcatatagtatgcacttatcaatctcgtccttaaagaaaacaaatgangctgatatatatatatatataatattcaaaatgtctaaaaacatactttaaagcatatatggaaaattttttcttttctcctcacattttaatgataaataactttaatagctgagcggcatatcggggtcgcaatttttttataagaaaatattaatagtctattataattaaattttttaatcgataaaaaataattattaatttattagtaaaagaattcaaatccatatatctcttcctctctatttccttctctacaccaagctcatatctcttattataaccacatttgccataactttatagatggacaatgcttatgtgcttcgtgaagctgtcaattacacaaaacaactt

SEQ ID NO: 129550 - DNA, 461 bp, Glycine max
  unsure (1)..(461): unsure at all n locations
agctngccatctgtcctctggccaagccgtgtgtacaatagaataggaagatgggagaagaatgacacaaagtagttagagaactttcaaagttttgtgaaagatgaactaccccctcaaataggttttgtgaaagcctgaattggcaaggaggattgtagcatgatccatagaacttttagagtttgatctatagtacgaaccccacggccccatgaataaacagttcatgacagactttctggtagaattcgctagaaacgaccaaaccacccaggactggtggagcctctacattgattatgcgtccaatgtgaaggggagcagtgcaagaatcatcctcaaaggccctgacaatgtcactctagaacaggccctcaagctcaacttcaaagcctcaaataatcaggctgagcatgagacatttattgtaggtctaaaacttacaaganaagtcaaag

SEQ ID NO: 129551 - DNA, 422 bp, Glycine max
  unsure (1)..(422): unsure at all n locations
tgtaatttctctaacaaaagtgtccacatttctatcatcattgattatgtgctttattgcaacattcagattatttgtcattgtacccttatagaccttacctaaaattgaaatccattaataagatttccttatacatacaaattcaatcaagcttggacaatttaaataaataagtggatgtcttcaattggttaggcaaggcaaagaaccaagatttaagtttttaactccaggaacacttatccaattcctgtagctcttatttcacagtaatatgtatttgtattattccagggcatctaggaaatttagatttaactgtcttattgtattttgcaatntttttctagactcattcatgattagggttaataatttttgtcaccaccatcttttcaacaaggtgagaaaaaagaatc

SEQ ID NO: 129552 - DNA, 358 bp, Glycine max
  unsure (1)..(358): unsure at all n locations
agctttntatgagagtcctcaagtggaggtagttttcgtggnggacctctctttggtcttgccaatcttatgtgatgatgtgccttgaatggcacttgaggagtttccttcccttttcttttatatgttggctctttgtttgcatttcattacatgctcacattgaggacaatatgcatttcaagtgtggggggagggttttgaaaatattggttcctattttctgttctcaaaattatgctttctatttttactatttctgttgatatttttctttttgtattgggttaacttttgtttctggatctattttatgggtctggttaactatattttggtttgccatctttctggaatt

SEQ ID NO: 129553 - DNA, 367 bp, Glycine max
gttcaagtccatagccatcaaagtctgaaaagagtatgatgaactaagggacgtcaatatggccaccgctgaagccttggaatgagaaaccaagaaggcccgaaaggaagaacacgtgccagcaaagttttgaggggctttatagggcagcaatagcaaactcaagctccgaagaggtgaaaggaatcatcacaggtcaaaggcatgatcttgaaggacgagctaaaggcttaccttaggtcgaaaagaaatttgtcccaacagttaagcgagactgaagggaatatgtgggccgtcatcgatgagtgcaaagagaagctaaatctagtggcgactcacgagcaaaggctagaggatgagtacgcca

SEQ ID NO: 129554 - DNA, 463 bp, Glycine max
  unsure (1)..(463): unsure at all n locations
actctcaatagtctggatcactattctagtgtattaatntctctagatggactctcattctgcaaaaataccttaataaatataaggtttaaggcaccatgcattggatttattaatcaaagtgacacttaccaatgactttccttcctggaaaagtcttttaccaagtttcttagcttcttctacacaagctttcaaaataggaacaggtgaaatcctgtcagcaagattaaactcaagaatatacttgacagccggaatatgtttgtccttatctataagttnttgaacaatatctgcaaaccacaaacgccttgtgttagcaagaaaactactttaagtgggtaacactataaattaagcatcatttgtctataatatattatcagagaaacatagaagtgataaaactcttgtatcatcgtaaattaatgaaaattcactcttgttcctataacctaca

SEQ ID NO: 129555 - DNA, 164 bp, Glycine max
  unsure (1)..(164): unsure at all n locations
ctcatactaagccggccaacactctcagagatatccggaattgtttccncgccggactgctgaagccacgctctattttcaatgcattctctcttctacttcgacttcatcatgctctgctctctatggtcactgcacgacgatcgaacagaaccacttggaac

SEQ ID NO: 129556 - DNA, 390 bp, Glycine max
  unsure (1)..(390): unsure at all n locations
atatagactntagagcntcatctattaagagatcccaactagccattggcttaatactttggcacttgaccggagggcgctactgggcaaaccgatagtagggaccacaaataatggcctgaaatttcgcttactaataattggagttaaatgttttatcgggtatttgattatatgattggcttgaatgagttgaggtatggtgtgaaataatcatgtatgatttgcttgatgtggatgttgatttatgaggagttttattgacctaagttgaaattatgagatttcaaattttacctaaacctattttggtaaaactgcaatcctagattntgtaaccgttggaatgtcttcaaatttggaccatatgttccaaacacatgtctgcac

SEQ ID NO: 129557 - DNA, 438 bp, Glycine max
ctaagcttcctggggccattcctgcgaaggcaaacatttggaaagttagttttaccagtgggacattactcttaaagcaaaaatggcatataacctcctcccataaatacaaacaccaatgtaaatttagagcaagcttatgcgcatatttccttacatacgttctcttgcacaagacatttaaccgaaaaagtgcacccatatacaatcaaggcggcttcgttacctagattatttacacgtactgccaaggtgtatttgttacttacatcacacacatctccttggctgaatttacatacatgcatactcaaagtattttggggtaccaaaaattgcacatgtgcacatcttggtatttctaatacctatacatacacaaacttcatgatgaatcttgactatctacacaataaagtgctacatttcatccctttt

SEQ ID NO: 129558 - DNA, 471 bp, Glycine max
  unsure (1)..(471): unsure at all n locations
agcttattaaaatattcatgtnnnttatttctcggtaacaattgttgctactagcttaactttgctagtttctctcctaggcctccaaacatagtgaaaaattattacatagtacccttgaagtatccaataaatagtaaataaataacaaattttattactttgtcatctaatctaataatgaataaattatccaatagacaacttttactggagtataaactaaactaaaatactaatatgtgcagttccacggaaaccaaaacaaattataaaaaaacgaaaacaaaaaaaaagaaaaaaactctttcaaatgaaagtctagaagactggaaaaaaaaaacctactactaaccacacacggcaaggagatatatattaaaaaaaagcgtaccatagaaataacaattccaaaacatttcacacctaaggaaaattagaaaaaaaaaatattaatactagaaagaaata

SEQ ID NO: 129559 - DNA, 437 bp, Glycine max
  unsure (1)..(437): unsure at all n locations
tgttgataagaagacaaacttcaattgcttcttgtttgtgactactntgttttaatccaaatgattttttgcatgagaaataaattttgaaaaaaatatatgatgcacaactaagctggtagaatattgcccagaaattntcccaaattattataaagtgatatgacaatatttagagtttttcttgtgaaaatactgttgcaggacaacaaaggaataaaaattatgaaaatagattcttgtaattttgtttggcttgagaaaaatatattgcatattattaaagttaaggaaactcgctattaaattntataaaattcagagctgtctaaatatatatttntaaatttaaaaatagcatttaagaagaatttcagtgttaaaaattaaattggaaaaaacatttctataatgagttttggggaatcgaaaattct

SEQ ID NO: 129560 - DNA, 423 bp, Glycine max
  unsure (1)..(423): unsure at all n locations
accttagaaaacaaatcattgaaaataaagggaaaaaggatagaaaatagaaaacggcttacatagcttgggaagacaatgcataaacattctccaactcttctagtgaagaagaaagtgcaaatgtatgcttgatggcagactcaatggatgactcatcaatcattgaagaaactgaggtaaattcagaatttgaagaagttttggaaacatttaatgaaattcatgaagaagctcaaaggcttgttgttttaaacaaaaggctaaaaagcgatcttaaattgcatatcactaaattgagttctacacaaagtgagctagatnaattgaagcaagaaaatgaaaaacttgtttcaagctataaagccactggttgtgtttgtacctctacttctctcaatatggatgattacaagtctttgc

SEQ ID NO: 129561 - DNA, 446 bp, Glycine max
  unsure (1)..(446): unsure at all n locations
ctcaagcttcgacctcatcgccaaatctcagcttaggagacatcacatacgatgttggcaaagcggtactacgggccatttgaagtggtggagaaaatgggtaaggtggcgtaccgtctgaaactccccaaccatagtcgtattcatcctgtgtatcatgtttctttactcaaagcttttgtgggagatcctgcaacgacaagcgcagactctntaccagctatgaccagtgatgacctcatagcagctcctgtgataatcttggactccaagatggttccatctgtcgacggtccatgccgtatggtgctggtgcatggggcggagtcttcagctaacgatgcggcatgggaggactggcaacagttaaaggaacgccacaaccttgaggacaaggtttgctggaagaaaggagggatgatacgcgtgtgcacgatgaaaccatg

SEQ ID NO: 129562 - DNA, 445 bp, Glycine max
  unsure (1)..(445): unsure at all n locations
gcttatcggaagtgacctggcgggtatggtgttggtcnatggtgaaggaggatggcaggtcggaccagttgatagggatctcgggtgcaaaattaaagaagaaacgaaaataaattgagataagtttcagcctccttcattcattccacttattacatatttatactgaattttcactagattttgaatacaaatctttcataacagaattggttttggcgcctaaatgaattagttacttagtggagtggctacttagtggaatctatttcacgagctcatgtctcctaactcccttgttgatggctntggtgctttntagatgaagtcttgcaggtaattgggcttncttgcaatcgtctttggcctgttattgtttcctgtgttggtgaagtgctcttctggngtgttattactatcaattgtgcatttgctttatnccctc

SEQ ID NO: 129563 - DNA, 425 bp, Glycine max
  unsure (1)..(425): unsure at all n locations
ctgaatatcttctntcactagcttatcttgatgcactgtgatggaattaataaatagttggtacatgattaggagtctatggattacactaggcggattgtggcttatgtcatgtactatgatttggggtaacttaagcagcatgtgtacggaaatgccgtaatccttaacctttgatggatacccccaacagtaggcaattaatgaaccttttcagttatgaatcaatcggatcaaataataaaaatatatatgaaggctgagtaagatgggcaaaagaaaacactatacctcacaaccaggctccataaaaaatgtttctcgaactccaccaggtactaaaatgcaactgtaaccagcttccaacgaggaaattgaaatttgctntgtcactggcgtaaatcctaaccatgtncatatgtgtc

SEQ ID NO: 129564 - DNA, 387 bp, Glycine max
  unsure (1)..(387): unsure at all n locations
tcaaacgacatataattttaactcggangtcctattgagacccgtaatatatcgagacgctcctaattgaaaactgaagctctgagcaaatttaaaggacaataaattttcactcggatgtccgattgtgtcccgtaggatatcgagacgctcgtaattgaaaacggaagctttgagaaaaatcaaacgacaataactttttacttggatgtccaattgagccgttgaatatatcgatacgcctgaaattgaaaacggaagctctatgaaaagtcaaacgacaataacttttaattcagatgtctgattgagtcccgtaatatatcgagacgctcgtaatttaaaactgaagctctgagcaaaattcaacgaacaataactttgaat

SEQ ID NO: 129565 - DNA, 386 bp, Glycine max
actgagatgcaattaactaataatcaaagtgatcaattccaatatagaagtgaaagtgatagaaagatacaattaactgaataacatcaaagaactttattaaaaagaggaactagagtacatgggtacaactacatcgcaatccgagttctaagggtttagctaatcatggtcatagaataaataaacaacatacaatattgcattagaaataaaagagagcgaaaacccttactaattcaaacctcaattgttcctggagcagttctcctctcaaaagctcttgttgttctttatatgtctaatgaattttgaattcccacgtatagactttagcttcttaatttaagactctctaattagatgccaaaagatatttttttaat

SEQ ID NO: 129566 - DNA, 375 bp, Glycine max
  unsure (1)..(375): unsure at all n locations
aagcntttacacggagttagattatgctctaatatatcgagaaacctcgaaatgaacaagggaagctcttgagcaattcaaatggtcataacttttcactcggaggtccgattcaagcccataatatatcgagacgatcgaaattgaacaatggaaactcatgagcaattcaaatggtcataacttttcacttagaggtccgattctggagcataatatatcgagatgctcgaaattgaacaatgcaagctctcgagaaattcaaatggtcaaaacttttcactcggaggtccgattctggcgcataatatatcgagatgctcgaaattgaacaatggaagctcttgagcaattcaaatggtcataactttacac

SEQ ID NO: 129567 - DNA, 425 bp, Glycine max
  unsure (1)..(425): unsure at all n locations
ctacaacaactntntattcgaatgttcgattgagtcccgtaatatatcgagactctcaaaattgaaaacagaagctctgagcaaattcaaacgacaataactttttactcggatgtccgattatgtcccgtaatatatcgagacgctcgtaattgaaaaaggaagctcttagaaaattcaaacaacaataacttttaactctcatgtccgattgtttcccgtagtatatcaagatgctcaaaattcagaacagaaggtctcagcaaaatcaaacgataataactttttacccggatgtccgattatgtccagtaatatatcgagacgctcgaaattaaaaacagaacctctgagaaaaatcaaacgacaataactttttactcggatgtccggttgtgtccagtagtatatcgagacgctcgaat

SEQ ID NO: 129568 - DNA, 446 bp, Glycine max
  unsure (1)..(446): unsure at all n locations
agcttgctaaacttgacatgtttgatgtgatgtaagttacccattctgttttagggttttatgatgatgctttgtgatatttgtatgcttaaattgttggtagaaaactggtagagatgatggggagagttaacttagggttgaatgtgagaatgacaatgttgtaggtagaaaagtgtgagattttgagggttagagaagccaaatttgggttagtggaaattggagtctaaagtgggttgattctagtttaaaatgtcaattaggacttgtaggaaagcttgggcagagaaaatgagaaaaatgagtgacaaatgtgaaagaggagagccatttctagggtaaattgagtgttgagaggtcaaattttgaatggctggngttttcatcttaaaaccagtttgagcaagtctaaattaatgttatagacttgtttgagatgagag

SEQ ID NO: 129569 - DNA, 443 bp, Glycine max
  unsure (1)..(443): unsure at all n locations
ctaagcttacagcaaatgtaaaatctatcacgacttanagctatcataaaggaattttcagcttcgtcaacaggtattgttatttaattctcgactaagattgtttccaggtaagctgaaatccaagtggtatggaccattaatcatcaaagaagttatgccacatggagcagtgatactagaggatccaaccaccaaaatgacatggactataaatggtagtaggatcaaacactacttaggtgaagatttcaagaggataatcattgttgtccaacaacaagaggcttgaaccacaacaaagacgtccaaatagaaagatgttaaagaagcgctcctaggaggcaatccagtgtttttaaaatttgtcttaatttgtgttactttaaatttatgttttatattttcaaaccttactttntgagtctttattcacgaataat

SEQ ID NO: 129570 - DNA, 491 bp, Glycine max
  unsure (1)..(491): unsure at all n locations
ggatcctcacagtcacctgcggctgaagctatactganacatctcttcagaccccctcttccacagcagcaaaatcagccacaacagaacaattatgacctctccagcaacaggtacaatcccaggtggaggaatcatcccaaccttagattttcgaatccttctcaacagcaataacaacaacagccttattttcataatgcagctggtccaagtagaccatacgttcctccaccaatccagtagcaataacaacaacagccctagaaacagcaaacagttgaggctcctccgcaaccttcccttgaagaacttgtgaggcaaatgactatgcaaaacatgcagtttcaacaagagacaagagcctncattcagagcttaactaatcagatgggacaattggctacacagttaaatcaacaacagtcccataattctgacagagtaccttctcaatctgtccagaatcccaaaaatgtgagtgtcattac

SEQ ID NO: 129571 - DNA, 445 bp, Glycine max
aaatgaatatatatggacaagaatgatatatttagtgaagagtagtacaaaaaaaaaacaaagaatctatttattggaattgttagacataaataatgaacaatggataggttgagaaaaattgtactatcaaagagagaatgcaaacaaattaaagtataatagaagactttgggcctttattttccattattcacattcttctaatattagctattttaatatctataactatatactattagatatttttaatatgtgagtctacatataatattaaattatatattatatgttatctataagatttgattgtccttattaaagtgatttataaggataaatttaatgggatatataacatctcatttggtgtggtcaattatatataatgtgtagataccataagtcttatttctgttattatgatgagggaaatagaaat

SEQ ID NO: 129572 - DNA, 424 bp, Glycine max
  unsure (1)..(424): unsure at all n locations
cggcatcaatttgagtagtctctggagtatgaactnttttgttttttcatgtattttgtcatgggggtgagcttagctattatagggggtgtgtagctaagctctagcttctcatctcaaggaggtgagcttagctattagaaagttgtgtagctaagctctagcttctttaggaatcttctcaaggaggtgagcttagttatgagagtggtgtgtgtagctaagctctagcttcctaaggaagttttctcaaagaagcttctcaaggaagttttctcaaaaaagcttctcaaggaagctacctagtctataaatagaagcatgtgtaacacttgttgtaactttgatgaatgagagtcttgtgagacacaactcacagntcaacttctctccaattttcttccttcaattacgtgctcccccc

SEQ ID NO: 129573 - DNA, 429 bp, Glycine max
  unsure (1)..(429): unsure at all n locations
agcttgtcactttagttgatattgaggtgttatgcattcctcaacattngattttcaagtgcagagagtttgacgaatcaatatcttggtaaatggtgctgtgaaaatgtcatcattcccataaaagatcaccatgaatattttgacataatgttatacttttttctattttcataaagtaatcaactttagtaatgtaaacccccatgtttgacatgataacaaatttataaatgtcatgattttcttaatatttggctggaaggcataggtgggttgaatatgcagagaagactagatataatgcctcccaagttccagcagaatggcatggttggctccacttcataatngatctcacaggaggtgagggaattcttttcttttggatttactttctttggaatgccttatagtatgaaaatctga

SEQ ID NO: 129574 - DNA, 447 bp, Glycine max
gctttacggacctataaaactcagcttgccggaaaaaattggcatttgcttattaaaaatccatacagatcaatactttgtatgggtcatacagatcagtaatccgtatgaatcatacggatcagtgatccatatgggtcatacggattagtgatccatatgggtcatacggaataccaatccgtatgactcatacggatttttatgagttttttttttgtaaaagttaattgatttttttaaaaaaaaccattttattcacctgatccatatggtttttttttaaaaatattttttaaaaaaatttatttttgttcaaatttattttttgtcgcaattttgttgtaaaagctgttatatatttttaaaaaaattattttagttatttataaaaacttaattagcaatactgccatacggatcagtgatctgtatgggtcatacgga

SEQ ID NO: 129575 - DNA, 395 bp, Glycine max
  unsure (1)..(395): unsure at all n locations
agaaagcattgtaaaattgaaattacattaagatatgagttcaaacgtacatgttntcctgataacgggtagccatttttcttatgtggcgtattggtatagaggtttttgtgatcttcataaccaaggaaaaattatcactaatgtgcttatttataatttaattcgactcaacaatcaatttacaagattcgtacaagagtataatttattcaagttaattatctgtgatgttgacgtttgtatcttcacactctttgatgaaaaatcattgataactgtctttgtgtacttgatcgaaataacatacatttgatgatcttttttcttacttttttcgaggagcatataacttcaatagcttgtctcaagagataattttcatattctacttg

SEQ ID NO: 129576 - DNA, 220 bp, Glycine max
  unsure (1)..(220): unsure at all n locations
ctacttcttttccgccatgacttaaggaagtttcttttttttggctccctctttacttttattgcacttgtccaaattttattgattgctttgattgttcttgatcttatgattgtgctacattgaggacaatgtgttgtttaagtgtgagggggggagaagattgttctttaattntgttgggtattatagtttaattctattacgntttctagtttaa

SEQ ID NO: 129577 - DNA, 450 bp, Glycine max
  unsure (1)..(450): unsure at all n locations
ggccttgatctcagctatgagatcagatgattcaagaagtttgatgtttcatatgtgatgacaaaaagctcaaagatcaagaacaattcatgataaaaaaagatgatgatctcaagaatcaaagaataagttcaagatgttcaagattgaatcaagaacacttcaaggttcaagaggaaanttgatttcaagaatcaagaatcaagattcaaggttcaagcttccaagaatcaagatcaagatgcaagactcaagattcaagaatcaagagaagaatgaatcaagataagtatgaaaaagtattttcaaaaactgagtagctcatggatttttctcaaaacatgtttaccaatgagtttttactctatggtaatcaattaccagattattgtaatcgattaccagtagcataatgttgttgaaaaagttttcaattgaatatgctacgtt

SEQ ID NO: 129578 - DNA, 459 bp, Glycine max
  unsure (1)..(459): unsure at all n locations
ctgcagcttacattattcttgacccgggttgtcacattgttttcgngtattntattctncgtntatttactntttatacccccttttgacgtgcttaaaccattntatttaagtcatttctcgcttaaactaaaaataaaataaatttccaccgatcgtttgaattgtattatccgttaacttcggttaaaatgaattccgaccgttcggtcgtgccgtaaccacgttggaaatcaaaaaagggtaaaataataatataataataaaaaaataccttttagtaaaataaagcgaanaatcaattggacattgtctctttgggatttctcattcttaatcgaattgactaataactaaagtgaaactaaggctaaaatcaactcgcctagtcaagctcgtncataaaaataggtttttggaagttgtcattcaattattactaagaaaatggatcatttc

SEQ ID NO: 129579 - DNA, 444 bp, Glycine max
  unsure (1)..(444): unsure at all n locations
tgtaggattatggngtacccatcacatgtggtactaggttgcggtcgggcgatggtgcacaacaagttttccacatccacaatgcgcgcataaacccaccatcccctgttgcccacctccaactgagctcacgtactcccacgtagcccatatcctcgttcctctcaacaccgggtccccatcaatcctcccaagctttcccaacatccaagtaattcaacaatcaaacaacacaaactatcacagccaagaaaacagggcaaaggcagaaaactctgcccaaaacaccaaccaaaatcacagcttttctcacttaaagaccccagtaacaattccttcgttccaattcgttaaccgttggatcgactccaacatttaaatggaagtctctagtacataagcctacantttgaccgttgggatctactatcaaacatccagaac

SEQ ID NO: 129580 - DNA, 406 bp, Glycine max
gagaggggggagcacgaaattgaacgaataaaagagggagagaagtggaactttgaagtatatctcacaagactctcattcatcaaagttacaacaagtgttacacatgcttctatttatagactaggtagcttccttgagaagctttcttgagaaaacttccttgagaagctagagcttagctacacacacccctctaataactaagctcacctccttgagaagcttccttgagaagattcctaaagaagctagagcttagctacacacaccccctataatagctaagctcacccccatgccaaaatacatgagaatataaaaaaaaaagtccctattacaaagactactcaaaatgccctgaaatacaagactaaaatcctatactactagaatgaccaaatac

SEQ ID NO: 129581 - DNA, 409 bp, Glycine max
ctgaagggtaactagatgccttggttaacctttttaccaatctgtccgtgaatcaaaaatctgcacctatcaccagactctgtgggttatgcttctctaccgaccaccacatagacctttgcccttctgtgcagcaatttgaagcaattgaatagcctgaagcttatgctgctaacatctacaacagacctcctcaacctcagcagcaaaatcagccacaatagaacaattatgacctcttcaacaataggtacaatcctgggtggaggaatcatcccaaccctagatggtcaaattctttacaacagcagcaacaacaaccttatttcaaaatgttgctggcccaagcagaccatacgtgtcttccaccattcagcaacaacagcaacaggcccagagacaacaaaca

SEQ ID NO: 129582 - DNA, 382 bp, Glycine max
ttttcaaaaactaagtatcacatggatttttctcaaaacatgtttaccaaagagtttttactctctggtaatcgattaccagattattgtaatcgattaccagtagtaaaatggatttgaaaaagttttcaaatgaatttacaacattccaattgatttcaaaaagctgtaatcaattacaatgttttggtaatcgattaccagtgcctctgaacattgaaattcaaattgaaatgtgaagagtcacatcctttcacataaaagccttgtgtagtcgattacactgattgggtaatcgataccagcgattgtttctgaataaatcaaaagatgtaactcttcaatgatttttgacttttcaaatggtttaagtttttctaaa

SEQ ID NO: 129583 - DNA, 410 bp, Glycine max
  unsure (1)..(410): unsure at all n locations
actaagcttatatnaggtgccaacgagttgccatcaattttgttgctccggactcaatggtggaggatgcatgaacgaaaatcaattcatggggctgcgaataagatggtggaggatgcacaaacaacattatgcaatcaattcgtgggtctctggactcaatggtggaggatgcatacacgacaatcaattcatggggctccgagtaagatttaatgatggaggatgcacgaacagtgctaggcaatcaatttgtggggctctggactcaatggtgtaggatgcataaacgacaatcaattcatggggctacaaataaaatgctggaggatgcacgaacagcactatgcaatcagttcttgtggctccggactcaatggtggacgatgcatgaatgacaatcaattcat

SEQ ID NO: 129584 - DNA, 470 bp, Glycine max
  unsure (1)..(470): unsure at all n locations
agcttaatttcctctcttaagacttgctctttatattgcaagattataagtaaataagaagggaagtatccaagatgcagctatagaaactaataagttgcgaaaaagatagaaattgagtgagcacaacttattattatggcaatatttaatgttttttgtacttaaatcttttggatgccgacttcttggcacacctggtgctttgctggtataccactgcatcaataaaattatttgcttgtaaaaaatgttagtatttagttttccatttgcatgcattctaaaacatgtaaatatatttaatatttttgagtaaatggtatacttagaaaaacaagtacccattcttaattatatggagatggaagaaataatgaaagggtttatttggggtaatagaatactactatacagtatagtaagatgggtggagaaagaaaattgtatganggttttgaatggaaaaa

SEQ ID NO: 129585 - DNA, 430 bp, Glycine max
  unsure (1)..(430): unsure at all n locations
actcagctatgcataggtgggactcataaatgttttatattttttcagatacatccatgtaaatgcaactgattcagagttgaatgaccattatcacgacaaatcaatcatatttgcattgtcacagtctgcatatggagcttgcttatttcttggttattggggctatcttttgctttcccaaaaatataaggtttcttacctttttccattcaggtatagctattttgttgtcataaatatctctacaaggatgttacatgatatttttttatcattttctcttccaaaagaagataaagcaaattaataatattctgattgtctgtgaatctaggacctagatagtcacttatggagaggactctaggaattatatngattttgctctagttaaccacagaaatcaattttctacgttaagatgctc

SEQ ID NO: 129586 - DNA, 422 bp, Glycine max
gagaaggtgggagcacgaaattgaaggaataaaagagggagagaagtggaactttgaagtgtgtctcataagactttcattcatcaaagttacaacaagtattacacatgcttctatttatagattagaaagcttcctttataagctttcttgagaaaacttccttgagaagcttctttgagaaaacttccttgagaagctaaagcttagctacacacacccctctaataactaagctcacctccttgagaagattcctaaagaagctgaagcttagctacacacacctctctaatagctaagctcacctccttgagatgagaagctagagcttagctacacaccccctataatagctaagctcacccccattccaaaaaatacatgaaaatacaaaaaaatgtccctactacaaagactac

SEQ ID NO: 129587 - DNA, 395 bp, Glycine max
  unsure (1)..(395): unsure at all n locations
aaaatagtcaaggtttttctattttctctttgggtaactntgattgccaactcaacttccctttcctgtgaccatctatgatgaggtttgttcttcaattctctctcacctgaaaaatgatgtttccaaaactttttatttccttccttcaactntatacgtgaaattaatgcatccagctcttcatccacctagaagatgaatcacatttaagtttaggcattatatattaaagatctagacggagagaaaacatttttttaaataaaacaaatgaagaatcaacatataaggttgtttcttttccacgtgcatcactcagtgagtcatagtttcgagttcgtgatgaaccctatgggtctgaagctcttcctctttgtcatggcggtggtcgt

SEQ ID NO: 129588 - DNA, 463 bp, Glycine max
atcctctgagtcacctgcggctgcagctgcattggaattgcattcccctcttctcattaggattagtacctgacatctcaaacaaacaaatcaaacgtaataagacaattatagttgttgtttgaatacctcacccactcaagtgtatcacacaattatggcttttctctaatgaaacactcttgccttttaccactctaattccccttgagttcttaggcaattcaagagattatggccacaacaaagaacaattcaccaatatgtgtaaggtaaggctagagagacaaggaaaaggttaaccaagaaaaaggctaacaatgtttttaggcacaaatgaaggaaataaaattcagaatttaggaattcaagtaacaatccttcatgcaaccaatatattaccttaaagagattttttttaaagttcttcaagcatgaaccattcagcccaattttttttttt

SEQ ID NO: 129589 - DNA, 444 bp, Glycine max
tgcaagcttgagccaaaatcctgactcatccatttactcttgacccagggtgagaatgtcaatccttaccctcggaagcaaaaaaggagagaaggaaaatttccaatcaaagtaaaaaagagaggaaaggaaattcccaatcaaagagtgggagaaagcaaaaagaaaagaaagaaaattcccaatcaaagagtgggagaaagaaaaaagagaaggagaagaaggaaagaaagctcctgatcaaggatcgaaagaaaaaaaagaagaaatgtgctgaaaggtctttggaccggacaatatctgaacaatacagaattgtcaccaaatgaacaaaaagaaggaaaggaaaccacgacctaaaatggtcttctccctttaattgccaaccaaaatcttgtgcgctagcgactttttcgccccacactaaacaaaagcagaaaagga

SEQ ID NO: 129590 - DNA, 383 bp, Glycine max
  unsure (1)..(383): unsure at all n locations
cgcatgctccattcggagttctttagtgtcctataggccctgcaaaaggaagataggttaagtaagcacaaaaatccaaaaataagccacaattatcaattaagcttaatcatttgcttaagaccaaaactgagttaaggcgggaaaatacgattcatagagaggtcaaataagctcagaagaatataaaaatactaaactacaaatgctcaatcaagcagcaaaaaaacacctctacacactacccttaactgaaaaaccctattctcttctctcttattatatttcatgagtggccaatttctttcttagctaggagaggaaaggattgaaccctatctgatgtaatnttctcacattattatatnntttgagttcattat

SEQ ID NO: 129591 - DNA, 386 bp, Glycine max
  unsure (1)..(386): unsure at all n locations
aaaaactcaacaacccttcagaaatcgtgattntagcttaaataggcaatccagtcggtggacgcgcggttagcgcacgtaagtgacttctggcttagcgccagtcacacttgctcagcctgaaggtgaagacggtgcgcttagagttggccttcgctcagcgcctctatacaactcatccttcttctagaattgtccatgcgcttagccattagatggggcgcttaacagatgatgtgcttagccagaagataagtggcttagcgagttcatgaaatttgcacttcaccaatcttgcctattttacctgaaatngaagtagaatgatcattaaatacatagcactgggatacaaaatatctgtacctaaataacaaaaagtatta

SEQ ID NO: 129592 - DNA, 441 bp, Glycine max
  unsure (1)..(441): unsure at all n locations
agcttncaaaatcatttttcttgttttttctagntcctcttgcatgggatgtacccagttcttatcttccatagcatcattaatatgcttggtttccacttctaaaatgagagttatgaaaccttgttgtctaagaaatcctcttgtttggactttggttgaggggtctccaatgatttgactctctagatggttcttgcttagaatatgtccaattggttctctttgttcttgaggttgtcctgttacttgatcagacacattcgttcctgtagattgttctaccaatggtccaatgtcttcattcagtcttaaatctgcaaaagattcatcaagctctgacattgttgtattaagctttgtgtattaaatcttacaggaataacttctttcacgactaaggtccttgagntgaaaccttgtatgccttggatattttag

SEQ ID NO: 129593 - DNA, 435 bp, Glycine max
  unsure (1)..(435): unsure at all n locations
actcagcttgatccacatcaaagacttaataaatgaaagctattctttaagctatgcattaacatctgtttagcataatgcaataactatgtgtcaataagtcatcaacatcaaaattattgtcaatactaagaattgagaaactaatgcaaactcaaagcagaattaaatgtttcccccctaccttttacaaacggcaatcccaagacctacaccacagttaggtcgagttggtccactatgagactgggcaaacctggtaaagagatgcaaataattntaattttcatatacttataatttttttttcacttactcttagcttcatagttcagattgtgttgggtgatcgcttcattactcacatgtacgttctattatttaggattagaattctcgctactaataatagagatcactctaagattacgtatg

SEQ ID NO: 129594 - DNA, 299 bp, Glycine max
agcttgaatgatattctctgtcttgaatttaacagaggtagagtgcacctgcgtgtgggtgttgttaataatatttgtgctctattacgaagaaattgacaggcggttcttgttgtttctcctagggaggcaaacaatgtgacaaacacacttgtaagatggggtttctctacatccccaatgattaaatcttggtcttcacctattgggattttagcttctctagtttttgactcataccttagtgtaatttttgcctctcttacttactcttgttaccatatatatatatatagggg

SEQ ID NO: 129595 - DNA, 384 bp, Glycine max
  unsure (1)..(384): unsure at all n locations
atgggttattccgataggtactctatttgtcatcctatatttattgcacctctcctgtccctatataaataaaatatactatctaattatgaagtatttaaatttgatttaattttatttttataattatctttacaaatttaaacaatataaacagattctgaattgattaaattggctcatttttataattatctgatttaatttttattatatatgttccaatcatgtactatgttagattaactttatatattattatgtctctgtttctaaatataatactctntttttcaattttatttgtccttttntataggattgttttcaagttatantttgcattaattatntttaacacaaataccttagttactttacaat

SEQ ID NO: 129596 - DNA, 436 bp, Glycine max
taagcaccgcggctgcagcttttggtggaagaaaaggaacctttttataatttgcagatgctgatgatactgggtttgtgggtgaggctacttgggagaatatatatgttttaaaggctttacttagaggctttgaattggcttctggcctaaagattaattttgctaaaagtcagtttgggatcataggaagtggagttaattgggctctggaagcagctcatatcctgaattgtagacaaatggattatcctttttactatctaggcattcctattggggctaatccttcaagccaactggtgtgggagcctctcatcaataaattcaaatctaaattatccaaatgggcccagagagatatatccatggctgggaagatcacccttataaattctgtcctgaatgctcttccaatttatcttctcttcttttt

SEQ ID NO: 129597 - DNA, 355 bp, Glycine max
actcaccttgaagaaggataggtcaagccctaaaggcggatcttgattgatctctggtagtcgaagagaagttcaagtccatagccatcaaagtctgaaaagagtatgatgaactaaggggcgtcaatatggccaccgcatatgccttggaacgagaaaccaagaatgcccgaaatgattaacaccaccatagcaaagttttgaggggctttatacggcagcaatagtgagctcaagctccgaagaggtgaaaggaatcatcactggtcaatagcatgatcttttatgaccagctaaatgcttacactaggtcgaaaagatatttttccaactgactaccaaacttagggaatat

SEQ ID NO: 129598 - DNA, 366 bp, Glycine max
caaagtctgaaaagagtatgatgaactaagggacgtcaatattgccacagctgaagccttggaacgagaaaccaagaaggcccgaaaggaagaacacgaccaaaacaagttttgaggggctttataaggcagcaatagtgagctcaagctccgaagaggtgaaaggaatcatcacgggtcaaaggcatgatctggaaggacgagctaaaggtttgccttatgtcgaaaagaaatttgtcccaacagttaagcgagacttgaaggaatatgtgggccgtcatcgatgagtgcaaagagaagctaaatctagcggcgactcacgaacaaaggctagaggatgagtacgccaagatatcagcagaaagc

SEQ ID NO: 129599 - DNA, 408 bp, Glycine max
  unsure (1)..(408): unsure at all n locations
gcttctcgcaattgttgaccacctgaagtgattaactttgatttatcttctcttaatattataaaaacatgcaagttcaaagagatttggaattcatttttttttacctgtttccccacctaacatgcagctgtagaatnatgctttcttcttgtggtgttatttgacccttcttgatgtctggcctcacgttattcacttatcttaatctgcagctcttaccatttcttttcagtcctgttaagagaataataaatgatcaatcatttggacaaaaaaaaagatgataaaaacaattatgaagaatgatactcaatagtcaagagttaagaataataaaaacacatgatcccaaaaggcctaaatgaatatctatggtaaacggtagtctattactgagttgaattg

SEQ ID NO: 129600 - DNA, 472 bp, Glycine max
  unsure (1)..(472): unsure at all n locations
gcttctcttctaaataaaagcagctgagtttctctttacactacaggaattgagaagctntcactgttaacatgataattctgtttttgcacagcttttacagcagctactctagctgcattggctgctctattagaagctgctacagctctgttcaccccttcatctaccttggccatatcataggctntctctgcggcttgtcttgcttcctatnttttaaacaaataaacacaattttataatgaaaattgactcataatgctgtaaaatatctaactgtctgcaattcttttcttctcctccattacaaggttgagctaattttatgcacaaaagacaagacatccaaaattctgcatgtagactgtatccttgacttcaataaaattttgttttcttcaagcaatttcaaagataaagagtaaagactcaaattgaaataaatatttaactaatacctattctaagt

SEQ ID NO: 129601 - DNA, 443 bp, Glycine max
  unsure (1)..(443): unsure at all n locations
ggaccttgatctcagctgcttggatgcgtagcccactccattttggtattttcctgacatctcacacaaacatatcaaacgtaacaagacaattatagttgttggatgaatacctcacccactcaagtgtatcacacaattatggcttttctctaatgaaacactcttgccttttaccactctaattccccttgagtgcttaagcaattcaagagattatggccacaacaaagaacaattcaccaatatgtgtaaggtaaggctagagagacaaggaaaaggttaaccaagaaaaaggctaacaatgtttttaggcacaaatgaaggaaataaaattcagaatttaggaatgcaagtaacaatccttcatgcaaccaatatattaccttaaagagatttntttaaagntcttcaagcatgaaccattcagcccaaattttttt

SEQ ID NO: 129602 - DNA, 427 bp, Glycine max
  unsure (1)..(427): unsure at all n locations
catggacttgatggggcctatgcaagttgaaagccttggaggaaaaaggtatgcctatgttgttgtggatgatttctccagatttacctgggtcaactttatcagagagaaatcagacacctttgaagtattcaaggagttgagtctaagacttcaaagagaaaaagactgtgtcatcaagagaatcaggagtgaccatggcagagagtttgaaaacagcaggtttactgaattctgcacatctgaaggcatcactcatgagttctctacagccattacaccacaacaaaatggcatagttgaaaggaaaaacaggactntgcaagaagctgctagggtcatgcttcatgccaaagaacttccctataatctctgggctgaagccatgaacacagcatgctacatccacaacagagtcacacttaga

SEQ ID NO: 129603 - DNA, 419 bp, Glycine max
  unsure (1)..(419): unsure at all n locations
tgtcatttgcccgtggaactagagcacaaggcttattgttccttgaaattcattaactttgattctgcattgttcgatgagaaaaggaaacttcaaatagctgaattagaagatatgcacctcaatgtttatatgtttcttctaaacattataaggataagacaaaagcactcaaaggaggtgaaaccttatgggacaattgaaattttagacccttctactcaaaggagctatatggtgaatggttaaaggcttttaaaccttatctaggtgtagaacttgagagattgaccacaaaaattcacttggaggtttctagaacttnattcttcatgtcgagaatgctatcgctgtagtgaaccctgatggttgatccagattactctctggaagttaattcgctttggcgacacattgat

SEQ ID NO: 129604 - DNA, 304 bp, Glycine max
actaagctttatacaacctaactggttaatgggacttctagaaaatttggttctctttacctgcctctttttccttagagtagtttgtttgtccaactatagctccaatatagctgtaccagttgcaccgcttgatggagcctagaaaatatcttcaagttatgtatttttaatctctagattgtaatgtgagattcttcaagaacttagaagggaattgattgtcgtgttggtaacgataccatacctaacacaatgtatatatgtttgtttaggtaggacgataccgtaaatattcatgtat

SEQ ID NO: 129605 - DNA, 421 bp, Glycine max
tggcacactaactaaactagctaagacagtctcaacactgaaagaagataaaaagcaaaggctacacaaggtaatgcatttaaattgctgtatgttagtttaattgttttttttccttcattcatgcttttttacttatactattgctataatgaatatatgcttccaaagttactagttatggcaaaccagtttttatttttttgtttttttattaatgtttgcatagcattaccataaattctaactttggcacctcaacaatgatgatatcatctgtaaacatggtgtattcaattttgcttgacttttaatttgcagtgtgtataaatacattttactttaacctgtgtatcctttgcagcttcaagaattggcttctcagttgattgatatgtggaatctaatggatacccctata

SEQ ID NO: 129606 - DNA, 413 bp, Glycine max
  unsure (1)..(413): unsure at all n locations
ttggtgctcacttatgtttgatgtattctctgttttctatccattttgttttattttatttaatgtgttctggaatgttaaaaataaaaaaggtagttgatttatgttgatatatatgggttggtagtatcccataaaattttcagaattttttatgactaatttgttggaagaatatggattgaaccctatgttcattctctgcatttccagtgaggatgttcgtgctctggatcgatcattatttttctctgacgatttttggagagataattatttttttgtgttcttaagatcataaggagtatgtccaaatatttntgtgtgaaaatattaatgtcaacaattttaataaaatctagaaaaggatgaatgttctttgatgttctgggtttttctgggtgaatgttgat

SEQ ID NO: 129607 - DNA, 412 bp, Glycine max
  unsure (1)..(412): unsure at all n locations
agctntcagaaagcgnngatgtctagtgtatactatttttcttgcatgnngntcgtagcttgtgtcttcttcatagatagggcatgcatgatggcccttaacactgtatccactcaaattcccatatgttggaaagtcattaatgatacaaaatatcattgcacacaacttgaatgtttcattttgatacggcaaccccctcgtcccacaactttgtcaagtcttcaatcaagggactgagatgaacatcaatgtcatttcttggttgtcttgggcccgatatcatcatacacaacatcatgtattttcgcttcatgcacaactaaggaggcaagctatacattactagcaaaataggccacgaactgtgttgagtgcttaaactgccatacagatccattccatcactggc

SEQ ID NO: 129608 - DNA, 454 bp, Glycine max
  unsure (1)..(454): unsure at all n locations
agcttgaattgagaataaaaatcataagttataaagnttctctnggcctagaagtcagatgcaaattcagtagaacagataaatatatgatgctctaatttacaaaacgaaataaaataaataaattgtctttcatgttgattgtaaaccttttgagtttggaaacttacacatcctggtgaagctgacaaatgcagtatatgtagctgaagacaaggcaggcaaaagaaacattggcaaaactcggattgccctcattttccaattcatatccattgatcttgttgtcataatagcataacctacagcaatgacctgaaagttgaaaccattttaagcaaaatccatttataaaaacaccctcaataatcaataagaatatattaatttgtcagagaagaaatttaaaattcaagtaaacccttcatgtcactcaataaaaggaaacattact

SEQ ID NO: 129609 - DNA, 437 bp, Glycine max
  unsure (1)..(437): unsure at all n locations
ttaagccggaacgtgcttggatcgtctcgctcagccatctatttgtgtatttagcgtccactaagcgcaacactcctgagctaagcgcgaggaagaatccagaagaagatgagctgtacaggttcgctaagcgcacctgtcgcagcctaccctttagcgggtgagcgaggcaaggctcacgggtgcgtcttccataggaggaagatgcgcggagtcgccaccaacgtttattgaaaggaaaatgttataaaaaccaagggagaccggtcatgaagaatattgcagattcgggagttagctttacgtgtgaggaaggtattagcacctctcacgtttgtcccanaggacaacaaccttagattagaattatgtgaaattatgtatctaaacttttatttcttttttaattttgaggtcgacaaaagcggggctcttgc

SEQ ID NO: 129610 - DNA, 430 bp, Glycine max
agcttattctatgtgatttaccatgcacattatgatcacaaaattcaagtttatctagtttatcaccacctagtagattttgtttctcaagttcatgtaattctctttcactaacatgacctaatctcaaatgccaaagttttgttttatcaatcaatgtattactagctatcgatgcatgtccaacaatagtggaaccttcaagaataaacaagccattacttttattcttgttacccttagctatgattaaagatccatttgaaatcttaagaacaccatttaaaattctagttgaatatcctagatcatcaaacatgtttatggaaataagatttcttttgagttctggaatgtaccttacattttttagtagatactctctattatcaaacatcttcaatctcacagttccaatgccttgtacttt

SEQ ID NO: 129611 - DNA, 387 bp, Glycine max
  unsure (1)..(387): unsure at all n locations
agcttctcgacatatgatgcgcctctttcttacttccgngngaaaagnnatgaccatttaaatttcgcgagagttttccatgtttaatttcgagcgtatcgatatattataagcctgagtcgtacatccgcgttaaatgttatgaccacttgaatntctcaagagcttctgttgttcaatttcgagcctctcgacatattatgcgcccgaatcggacatccgtgtgaaaagttatggccatttgaatttctcgagagtttccgatgtttaatttcgagcgtatcgatattttataagcctgaatcggacatccgtgtgaaaagttattaccatttgtatctcacgagagattccgctgttcaattctgagcgtcactatatgtgatg

SEQ ID NO: 129612 - DNA, 393 bp, Glycine max
atatatgtgccgctctgggagaccattggcgagtgatgttgttatcttaaaaagatgttccgagtacttcaggtttggttcgaacctgccctccttattatcagctgggaatagggctactggaggaacgccccggccattacgcttcaagcataacgtccaccgttactgttttagcagctctatatgtgggccgccgctttagagctttcttgttagaaaggctgagcgtcttatgtttttgaaatcataatacagggatctttcagcatctggacctggtatgtgcccattctcgatcatttgcatgaaaacttcttcctctgaaactgcacattagatgacgaggccctattacgggctcatacctgtgacccggctctcaactgccat

SEQ ID NO: 129613 - DNA, 411 bp, Glycine max
  unsure (1)..(411): unsure at all n locations
actatgcacgtgaacccacttagagataagagatgagtttattacaattggggttagaatgaacacatgtagggatccttaaaggatcaaatggggatttattatgagatgtttattgaattgtaattcttcttatatgattatgtgaaattgtttgaggggttttactccccatgttgtaagaaatattttcatataatttgtttgtattttgaacaagattattacattaacgtaataaattgttatattgggatcatgaaattgtgattgaaattgtgtgtaatggataaattgagtatgtgttgatttgtgagatacatgtaaacatgtgatggtggattgtgacgttgtgatatgtaaaattatggacatngaaattggttgtgaacaagtgtgtagttaacactt

SEQ ID NO: 129614 - DNA, 414 bp, Glycine max
  unsure (1)..(414): unsure at all n locations
gggagaggatgcttcaatggaggagaagaaagatggggagaaagagagagggggagcacgaaaatgaaggaagaaaaagggagagaagttaaactttgagttgtgtctcacaagactctcattcatcaaagttacaacaagtgttacatatgcttctatttatagactaggtagcttccttgagaagctntcttgagaaaacttccttgagaagctagagcttagctacacacacccctctcacaactaagctcacctccttgagaagctttcttaagaagattactaaagaagttagagcttagctacacatacctctctaatagctaagctcacctccttgagatgagaagctagagcttagctacacaccccttataatgctaagctcacccgcatgataaaatacatgaa

SEQ ID NO: 129615 - DNA, 328 bp, Glycine max
cgatgaagaacgaatgaagaacgtctaagaacggttgagatctttgcgaaattcctcacggaaaacgttacggaaacgtttcggaagcgcctcggcttagattatcttcacggaaacaatttttccaagcatattctaaagagagagaagtgcctaaggggctgaacccttttcttcttcacttcctcccctatttatagcaaaataggggaggtggttgccgcccatctcgcccaagcgagcagggttgcttccttcaaaagcaaccgccttctggaggaatattccggagggcccaagtgggcctgggtgctatttgtacccccat

SEQ ID NO: 129616 - DNA, 342 bp, Glycine max
  unsure (1)..(342): unsure at all n locations
ctgcttgcccgacccctggtattcgtgggcctttcttacaatcaggcactcagaaatatctttctatatgctggtccccaaacatctcactccctgtataactaaataaatgtcttactctacacctgacccatctctgggtgcacgctacacggtacttacatgagggtaatatagaccatagtgcataatatacctcacaaaggggtctcccagccanaggaggatacgtattatacattcgcctcaactgcattaatgatcattcccttcttaaaattgacgggagaaacaatgattatcctcaaacgggataaccttctgttctaagaaccctaatct

SEQ ID NO: 129617 - DNA, 413 bp, Glycine max
acgctcaacaaagtactttcgacacctactgtacgttgatttgaccaatgctgttatgggaatgttgcgacaatccttcaaaaccttattgatacattctgagaggttggttgtcatgtggccatatcgacatccttctctatcataagccatcatccatttttcctttgaaattcgatcaatccatgtggctatggctggactcagttcacgaaatttttctaaattttgatcaaaaatgtgcttgcaaggagtgtaggctgcataaaattagttatgaataacatggataagtatatatgaaaggtaaataaatgggaccatcaaatatgaaatcttacccaatttcttcaacatgtctttttggtttgcattattgaatatccgattgaaggtgcttgctatgtgacgca

SEQ ID NO: 129618 - DNA, 409 bp, Glycine max
acgacatataatggtgcaaaaacaaaacaaaacatggtattatttaataatacaaaaagaaaaacctttctttgatgagaataaatatactttatatgtattttttaaatatatagataatgattttcaaacttttttctttgtctcttactctcagcttcatagtttcttgatcgtttcattactcacaagtacgttctattatttatgattagaattattgttactactaataatagagatcactgtaagattatgtatgtctttggatgtacgatagatgttatagtgacagaagcagtttaaaagagtcttttgtcgaggaggttgaacagtttatcagcaaaactagtcagcaagattggtatcacaatgatggggaatcagatgtccttgtgttatcaacaag

SEQ ID NO: 129619 - DNA, 467 bp, Glycine max
  unsure (1)..(467): unsure at all n locations
ctgcagcttgtgtatcgatacactgattnggttatcgattactagtcattggttctgagtaaatcaaaagatgtaactcttcaaatgttttttgactttttcaaattggttttaagtttttctaaaagtcataactcttctaaatggttctcttgaccagacataaagagtctataaaagaaaggctttgttttgcatttgaaaatcaatctttctatcaatccaatcaatctattacaatcctttacaagtcttgaatctctttgaacttcttcttcttctttgtgccaaaagctttccaaagttttttggttttctaaaccttgaaaacttgtgctattcattcttttcatctcttttccctttgccaaaaagaattcgccaaggactaaccgcctgaattctttntgtgtctctcttctcccttttccaaaagaacaaaggactaaccgcctgaattatttatg

SEQ ID NO: 129620 - DNA, 371 bp, Glycine max
  unsure (1)..(371): unsure at all n locations
attaanattctaaagtagttacaatttgttttatcttctgataatcgattacataccttgtgtaattgattacaggattttaaattcaaattcaaaatttgcaaattgtttcagaaatcaatctagcgactagtaatcgattacatcctctggtaatcgattaccagaaaggaaatatcatatttttgaaaagataattgttcttcaaaaacttatggaaaatattgtctttagccaaacttgtgcaacatcaattaaggaattctttctaagatcctatcaactaagtgcatcattcgtcctgcacttctgaattcttgacttgaaccgctctcatattttgcatcattaaaacttcatatcatatatgc

SEQ ID NO: 129621 - DNA, 475 bp, Glycine max
gatccttgagtcacctgcggcatgcaagcttcttatccaggcacattcttggtggtgaagctctttctttcatggcttattccctagtggatggtgtctcccctctcctcttctcctttgccttccgctgcatctccatggtgaaaatcaccattgaatgaccttattgaagctcaaagattcagccttcatagaagctccacaagcaagcttccatcatatcatcatcaaggttcatccacgataatcatacgccatatttcatcatcaatgcattcacctaattaaacaatcttcatgtcattatcaagaaatcaaccaacacaacctcaagacattcaccaatcatcataattatctcatcatcaatatgatcatcatttcaatataacaatatttcatcaaattaccatacacaaaaaattattatatcaatgagaattacatgataataatgatgaaccaactccaatca

SEQ ID NO: 129622 - DNA, 424 bp, Glycine max
agcttacttcactgcttcaagtcgtgcacgatctgcttcagatgagaactctttgcctaaaagctactatcaggccaagaagatactgtgtccgatgggtatggagtatcagaagattcatgctttcccgaatgactgcatattgtacaagcatgaattcaaagaaatgtccaaatgccctatgtgtgaggcgtcacggtacaaagtgaaggatgataaggacgatagttcagatgaaaactcaaagaggggccctccagcgaaagtgttgtggtatcttccaatcattccaaggtttaagtgtctctttgctaatgaaggtgacgctaaaaaccttacctggcatgcaaatgggagaaactctgatggaatggtccgtcattcggctgactgctcacagtggaagaagattgatggcttgtat

SEQ ID NO: 129623 - DNA, 427 bp, Glycine max
  unsure (1)..(427): unsure at all n locations
aaactacccctcatatctcccaaaaccccatacccacgaaaatcaagagggaaagaagtccacccaaacctggattttcgaagtcccactcgtagccacgcacttcacgaccccgaaaatgctctcctttcacgatttggggcagaaatgagcaccaaaggttgaagctttgtgtggagcttcaatggtgaatgaggaagaagaaagctacgtgagaaagggagagaaaaggcttctgaatttctgctttggctaagtgaggagagagaaaagctttttggttntaaataaaaggttttcctctttntctattatnttattcaagctctgccacatgtccctatttgattggagcaaaaagggcccactttttctttntgactgtgacccatactcaatcacaaaagtgagaanaatctgacctttg

SEQ ID NO: 129624 - DNA, 425 bp, Glycine max
  unsure (1)..(425): unsure at all n locations
ttagttgaatgcttggacacttaattgtgttggagctatattctggttatcaacaattatgtggtctgttatcttggtagatgtaatgttattgaactctcaatgcatcacctacaagatcctaagtgatatcgtttaagaagtttgagacatgaaaaaagtgaaataatttgtacattatgtggtggtttactatcctatttttggcacaagtataaaactgtaaatgtgagagaggtaggttgtctctaactaattcgttatttgggcaactgatttttgctgaacttgaataattaagtatgcctctattntgctgtctttgtttctatggtgggtccatatgttgtggttatttatagaagttcatgcactggatatgctcaggctttcacaaaatatgcctggcctggctggagacaaat

SEQ ID NO: 129625 - DNA, 457 bp, Glycine max
  unsure (1)..(457): unsure at all n locations
agcttcattaattagaatcgctatccacatttctctcttaantncattntatccgctcatttttcaagaattaaattatgtttttatttatcttttcatttaaaattttaaaataatattaattattattggttcaattatatcttaatttttacataattnttaaattttttacacacttatcataaataagaaagaaatgatattagaggtcaaagtcatttttttaatataaacaaagatattaatgtgttccttaatctttgtgtattttcttgaaaataaaataaaacaaaacaaaaaacattgagtatatttttttaattttactagcgtcaataatattaaaccctcagaatgaggttgtctactcccaagtcctaatatattttctcgtgagtcctgacttaacatgcatcttgatcagaaaggtcattaagtagcttgtttaatatct

SEQ ID NO: 129626 - DNA, 398 bp, Glycine max
cgcagccgcttggtctcttctctattctcctcactccttatgcactagagcaccaccacttcatctccctttatcccccccaccaactctctcctcacccatatctctcccttcggctcccatggcctccaacctccctatcattggcaaaagaccccgctaactcccatactgctcttggcaccgacctccacatagtgtcaaagactttatctctagatatgttgccacattggttgccttgaagatgtagatctagagtttttgtgttccatttatctgtatacatgtatcaccccactcgttaacctgacattcaccaaaatcgaatatatacttgagcggcttcagatgtagaaataacatgttgaattagattgaatgagaatttttgggct

SEQ ID NO: 129627 - DNA, 441 bp, Glycine max
  unsure (1)..(441): unsure at all n locations
agcttgannaatgaaactcaaatttatatatgatatcaagnntattaaaatactgggcaaataataattatctcacagagaaagtaagaatggttttaaagagtgattaaaatgtatggttgaaaaatattgttgacctaaatgaaattttcttttttaacaatattttttgttttgttttgtttttcaatcagttttaagtttgctgtttaacatttgtcatcaaacaataaattaatatttaaaggacaaaaaaatatatatttgaaggagtaagagaaaaaagaataaaacatcaaaccatgccacttttaaagttaatcaatgtatatattatgtgtcaaatacctcagatcagttggatttagaaatgccatggacaccaccttccatcatttatgtcgatgagtccaatcatgtttcacaagataaatagcttac

SEQ ID NO: 129628 - DNA, 393 bp, Glycine max
atctataatgacagacacagttcacctttattcctagctattacttataattaatctatcatattcataactctatacaatctaacatagggataaagagaaaccgatctctctatatatataacttgtgccataactaaaagcagatggtcgaatattaaagagtactatccaaatatatagaggtatcaattataacacttccaaattaggcctagtatgtgacaaattcagatatttaatacaatatcatgaaatgatctaaacatgacagactggccataaagacaccactacagcaacatggtttgaataccctgtcatttattagtgaccacgaagagaaacaccctacccttctggatagaggcacaatgcatcttctgggtatga

SEQ ID NO: 129629 - DNA, 321 bp, Glycine max
aaaataacttaatgccattaacctagggaattaaaacaaactaaatgactgagtgtaactgaaattgttggcaaccaaaagtcacccccaacagccaacaagtcagccaccatttggtctcccaaaaagctgatgcctaggttgccaattgggcccttattacaacttgaactaaagcccttttagttgattaacccaaaacatatttttggtcagccaactttacaaggattgggccattatttagacaaactaaacactctaaaattgaaataaagtggtgtcatttaatcctccatttgggccatgatacaactcaca

SEQ ID NO: 129630 - DNA, 429 bp, Glycine max
tatgacactaagcttctaaacttggacaagaatgaagctctgatactcacttgttgacaagtggcctcagatatcttaagaagggggggggtgaattaagatattcgaaactttttcccctaattaaaaatctatcttactttttacttaagttatgaattcccttaatgacaatcttcttaaatattaattcaaatgaagcaacttgaatatgaatataaagcaattattaataaaggagattaagggaagagaaaatgcaaactcagttttatactggctcggccacacccttgtgcctacgtccagtccccaagcaacccgcttgagagttccactaacttgtgaattcctttacaaggtctaaacacacaatgacaaccctttcttgggtgtagagattctttacacaagagactacaggctctt

SEQ ID NO: 129631 - DNA, 453 bp, Glycine max
  unsure (1)..(453): unsure at all n locations
atttatgtgcaagacccttttgatgaaaggtggttcgtggttgtatatggcaaaacaattggtgttaatgtagaagatgatgatgcatacatggacacctatgttagtcctttgtacacacaaatgactcctaacgttgtcggagaagaagaagttgacggcgttcatgctaaccgtaatgatcacgatgaaggagaattaattaacatcgtctaatgtaattttctatttatatatttttttttgctacattcatttacataagtcatacagntgttttttgtaatgtttaataaattgagtgcactcaaaacaatcatatatgattggttattatatgaatggtttactaattgcattaatgaaaacatgaatatattggatgaaagctttgaaaatggaacttatgccatntcattgttttggattcaatggatctcatcaatattttct

SEQ ID NO: 129632 - DNA, 420 bp, Glycine max
gttaagttattctaaacctagtagggttgtctatattatcctagtccaacaagagggatctaaggatgaagcttggtttgattcagtctaactagggatcgagatttagtaatttaggctacatcatagaatacaaaagcatgattgattagagaaacatctttatatacatcagctggtttgttagaaagatccaacatctttacctactgttgtcaatcttacttgcatttttactgtttttagcttagacttagtttaattctgttctaaatcatcaattatcaatgtttctttcaacaatgccttatttctgaattcaaccctgtctaagactagttccctgagttcgatactcgaattcatccattttaattttaaatacttgacgatccggtgcgctttccgaaaaaccggatt

SEQ ID NO: 129633 - DNA, 494 bp, Glycine max
  unsure (1)..(494): unsure at all n locations
atccttcagtcacctgcggcatgcaagcttgtatgtggtcgggctaacaaaaatttatggtttttcttggattcaaagtttaggttttaggagagcattcctttcctattttcttaacaaaccatagctcatatttcaccaccccaaccttattgttttgctacacttaatagcacacaaaatttatttggcacatagttgcttctagcttttatttatcaatataaataaacacacataattttattttattttgacaattgaaactcccccaaatttggggaaattgttcctgatccatgagtactctcctataaactaagatagagtgcttacacagtatcattcaactcaagtgtcaacatcaaattcattcacattaggctcaataaggtgcaagggattcattcattcactaatggcagggtggctatttggctaagtagccaaaacaaaataacaacagggcctngatcatctctacatcatgtatg

SEQ ID NO: 129634 - DNA, 395 bp, Glycine max
tgattattaaggattagataaaatacatggatccatagttggttcttgatctaagcgttatttgatatttgttgtaagatctttgtagctattcatcatgatcacgaacaatgatattatggttgttcctcaaccgaacctctttattcctcaatagatcttttataattcttcagatggagagaagagaaattatgtgtgacggctcggtatattagtgacgaaagtcttcttatagcgtgtaatctaataggatctcattatctctcatgggtcaacattgacattgtcattaagtcatatatctattagttgctacatgttacttaattacccataaataaactactaatgataatattaattaatgctatatataacccataatattgata

SEQ ID NO: 129635 - DNA, 391 bp, Glycine max
  unsure (1)..(391): unsure at all n locations
gtatatatcggacgctccaattgaaaacggaaactcttagaaaattcaaacgacaataactttttactcggatgcccgacagagtgttgtaatttatcaagagatgcttcaaattgaaaacggaagctcgtatcaaattcaaacgacattaactttttactccgatgtctgatagagtcccgtaatatattgcgacgctcaaaatttagatccgaagctctgagaaaattgaattgacaataactttatacacggatgtccggttgagtcctgtaatatatcaagacgctccaaattgaaaacggaagctcgtacggaattcaaacgacaataaccttttactcncatgtccgattgaatcgggttatatatcgagacgctcacaattgag

SEQ ID NO: 129636 - DNA, 360 bp, Glycine max
  unsure (1)..(360): unsure at all n locations
gtcacctgaggcatgcaagcttgtaggacttgtctaaggtttttgttttgttangggaaaacagaagataactcttacatataatggtaaataaataattgaagtgtaatgacagaggtctgtgctgaccatttggattttggctgggccatataattctccaattttcatgcttgatttgacctgcaagtctgaaaaatcagtcatttcttgacaatctcattccttagtagccactagtcagtagtacagctgaagccaactgtctctggatccttagtaatcttctgaagactcaagactacacagttcatttaggattgaaattatattttactgtaattttaattctttcaaact

SEQ ID NO: 129637 - DNA, 246 bp, Glycine max
ccctcaaactaccccttggtagagagggacctacgcatggcttatgtattttctgaggccattgacggcctcagccaggatgatattcacccagctatgtactacacctttggggacttacaaatcacacctactgtggaatagctcgaatagaatctgtgatgatcgcagggaggattgatacctgatgagaatctgagacgtatatctcttctatagccgaatatctataatggtctatatgta

SEQ ID NO: 129638 - DNA, 55 bp, Glycine max
agcttagttcagcttatcatccttatacatatggtcagactgaacgaaccattca

SEQ ID NO: 129639 - DNA, 394 bp, Glycine max
  unsure (1)..(394): unsure at all n locations
tgtgtaacccaccatttntcatatagaacactggtaatgtgtctactatcattgtttcatttctttctccgtcattgagggaaccacttgggctgccggatccctcaacctttgggcgtattctttgaaagatccatgccccatcttgcatatgctctatagttgcatcctatccagagccatatcagaattgtactgatactgcctaacgaagacaaccattaggtccttccaagaatggactcgggaaggttccaagttagtataccaggtgacagctgccctagtaagactttcttggaagaaatgtatcagcagtttcccatctttgcgtatgcccccatcatccgacaatacatctttagatggttcttggggcaagtagtcccattgt

SEQ ID NO: 129640 - DNA, 406 bp, Glycine max
  unsure (1)..(406): unsure at all n locations
gatcttagtcactgggctgcagctaaaatatggctagcaaattttattttataaggaaattcaatcaatagtcctccaatctttaatggagagggttaccactactggaaaacccgaatgcaaatttttattgaggcaatagacttaaacaattgggaagccatagaaatagggccttatatacccaccacagtagaaagaactacaatagatggaagcacaacaagtggaagcacaacaatagaaaaacctanagatagatggtctgaagaggatagaagacgagtacaatataatttaaaagccaaaaacataattacatctgccctgggaatggatgaatatttcagggtttcaaattgtaagagtgctaaagaaatgtgggacactctacaagtaacacatg

SEQ ID NO: 129641 - DNA, 470 bp, Glycine max
  unsure (1)..(470): unsure at all n locations
acttccttgagaagctgtctgtagaaaactttcttgtgaagcttctntgagaaaacttccttgagaagctagagcttatctacacacacccctctcataactaagctcacctccttgagaagcttccttaagaagattcctaaagaagctagagcttatctacacacacctctctaatatcttagctcacccccatgacaaaaaaaacatgataatacaaaaaaaaagtccttactacaaagactactcataatgccccgaaatacaaggctaaaaccctatactactagaatggccaaaatacaaggcccagacgaagganaaacctattctaatatttacaaagataagcgggctcatacttagcctatgggctggaaatctaccctaaggctcaagagaaccctatggccttcccttggatctctagcccaatctacttggagtcttctacccaatgcccttgaatg

SEQ ID NO: 129642 - DNA, 384 bp, Glycine max
  unsure (1)..(384): unsure at all n locations
ntataagcgcggtttctggagacaaatgtctagcgttcactgattgcgaagatgatattccgagtactttggatttggttcgaccatgccctcctgatttccagctgggaaattggcgagtggaggaacgcccctgcatttactcaacaagcattatgtaaacctttacggttgtaatagctctatagttatgcctaagctttatagttgttccttttgttaatgcttagcgtcttataggtgtgaatctataatacaaggatcttccttcatctgttcctggtctctacccattactattcatttgcatgtttacttctttttctgtaacggcagattcgatgacgatgccaccgaatgtactaatacctgggacccgtctat

SEQ ID NO: 129643 - DNA, 412 bp, Glycine max
  unsure (1)..(412): unsure at all n locations
agcttatcttacctatctatctcccagatgtctntgcttagattgaatagataaaaaacatgaagttctaattcaagatgttttctttgttgcatgggcataatgcaatcactctatgtctagcattgattntattaagatgtccctacctttgagttctactaaaaattatcctctctcaagcgactaatccctaaaactgatgcatataaaaccttcaatgtatttctactaaggattaccctttttcaagcgccaaacccctaaagatgatgcaaggatgaagcatataatacatttgttggcattttatgcctcccaagccctaactaaaggggtttagccttccattgtcatgagagaactttacactttanggggttgatatggatggaagaagatggatggatag

SEQ ID NO: 129644 - DNA, 481 bp, Glycine max
  unsure (1)..(481): unsure at all n locations
gtctcaactaanaaatagcataacagtggtatggctaaagtcacaaaatatcattntaaactgatgacgtaaataaatcatggtactatggtaggtcagcatacatgtcattacatttggaagaaattgctttaagcatgtaaagatagatcaccaacagaaaactgaagttaaattttcagtagaacactgctcaatttcatagcagaaatagtctgtttaatgatatatatggaaaggatataatatactatagaatagaacatttcatatttcttttaattggttgtgcatcctataaacagtaatattcatacccaagtttatgatataatccaatcagctgtaacaattggctatacttattattcattccaaccacatgacatgaccagcaacatctatccgaagccaatcatagcaatagccacttaaccatatcgagggcgcatngngataaaagataatgaattcatgtaac

SEQ ID NO: 129645 - DNA, 341 bp, Glycine max
  unsure (1)..(341): unsure at all n locations
agctntgagcaaaatcaaacgatgacaactttntactctgatgttcgaatgaatcccgtaatatatcaagacgctcgtaattgataatgaaatctctaagcatattcaaatgacaataacttttaactcggatgtccgattcagtcctgtaatatatcgaaatgctagaaatttaaaatacaagctcttagcaaattcaatcgactataactttttgttcggatgtccgattgtgttcaatagtatatcgagacgcttgaaattcaaaacagaagctctgacatatataaaacgataattatctttaactcggatgaccgattgagtnccgtaatataccg

SEQ ID NO: 129646 - DNA, 479 bp, Glycine max
tcagaccaaagcaactcataatctaggtatctaaaaccccgcaatttagtggattttcaaggtttgagaagtgaaaatgagaatggggtaaacttggagcaaactctcatctcaaacaagtctatatcatcaatctaaactcgctccaactggttttatgacaaaaaccctaccgaatcaaaatttgactcctcaatacccaattttaccctataaatggctcttgttttcactttggtcactcatattcctcatttgcacagtctaagctgtctcataagtcctaaatgacatttcaaactaggattaactccctttaacctccaaataccactaaatccagatttggccttccaactctcaaagcctctctctgtgtccactcataacaccacattctcactttctaaccctatgttaactctacccttcatctctagcagtttggcataagcaatttcagcacataaacatcacaa

SEQ ID NO: 129647 - DNA, 246 bp, Glycine max
  unsure (1)..(246): unsure at all n locations
gcatgtctgatacaaatcagctggtcaagcttccaatgatcataagatatgttntngaagcagcaataatacgttattcttaatgggtaacgttgtcttagatatagtaacacgctctngcctcatcaaacttattatcgcatctacacatttaaaatagagagggtaataaagttcaagattacaaaacccagncgattatgccttccttaatccttagtcctgacttctnttactatcataaag

SEQ ID NO: 129648 - DNA, 501 bp, Glycine max
  unsure (1)..(501): unsure at all n locations
tacgcacacataaatactcagcttntatgctctgatggttacttgtaattccctactattgtttgtatattatgcttttagattatgatgatgtaatctggttggtttattcccatgttgcttcctattattaacttttcccttcttagttatttagatgtaatttggaatatgaaagatgtttaatgaaaggaaaatggacccatttggataaaaaatagcaactttctttatacacctttttccccctagattctccacaacctgtctaagtggttcagctgttttccgtgtttgctagttttgctcttctgttggattatttattggtaaatattcctcagcctgacttagcaacatgttgcaaaaagtatttgattatctnnttaagtgattgatcttatgtctaacacaatgtatttgatagtctctatcatcccttctggtatcactatggtagatatgagtgtattggttattattagtggctcctttttctca

SEQ ID NO: 129649 - DNA, 386 bp, Glycine max
aaaaagctctcatctttggacgattcatactctgatacaaagttctattctttgcttaccaaagtcatttgtatttgtgttgtaattgcttatcatcattctatgagttgatttctgtgtaaatcttcaaacattgttgtttgacaaagccataatgttcatgccccttatagaatgcctaagctagaccaaactttttgaaatatacatcaggcacaggctcttataaaaacctatttgattaacaaggatagactctaagccatttgaaaagccttttatgcctaacatggtaaactatgtaattaaatagtataaactataataagttaattaagattattattatattaaaaaatttatgatgtatcaaatgatacatttgt

SEQ ID NO: 129650 - DNA, 461 bp, Glycine max
  unsure (1)..(461): unsure at all n locations
cttctacaatgatggtccatccatcagcacatatctgttgttgcttgattntgccttggttagtttcaacttgaagattatgaatagtgtctccgatggtaagacctggcattttggatgcagagaagttacttgtgtcattgatcagaacgtgtgcaagtgagattataaagaggggagagttgcttgcatgaagagaacgtggcatgttcgtggctacggatgtgattgtgttgttgcttacatgtcattcaactctcacactattctccacctacacactactactattcaccttgtgtacgttctcaccgttttgttttttaaataaatttctaaattttcttctttcctctaaatntagtgatcctgtgatcatatntatganaattactttattaanaaaaataaaattcactaatgatttctatatcaagatattatatatgtaacagtattac

SEQ ID NO: 129651 - DNA, 354 bp, Glycine max
tctagttgctctgctaaggattccaagtgttagagagaaggagaagggattgaagccttaatttcactatcttcgtgtgaggaatatttctttcaccaaagacatcatttcacaaatcccaacggtgggcacgtgcaagaatgagttctacacttggtgctcaaatttcatggtgatttaacatttaacgagtccgggatcatagttttactgggacaggtttgggtgtatacgagaaaaagagagctccgtgtgaagaacatttctctcaccacaaacattatatcacaaattccaatggtggggatgtgagaaaatgtgttctgaatctggtgtcccaaacttcgtgatgat

SEQ ID NO: 129652 - DNA, 473 bp, Glycine max
  unsure (1)..(473): unsure at all n locations
gtgagagtgaagttctgaacctgtgaactaaaaaaanttgtgatatatttttatggttgtcaacaatagatttttttatcaactgaatttgagatcccaaaatgcattaaccatgtattagcaaaaatcggataatataaatgggatagccagataaaaaattactattgattttgtaggcaaatactcatgagctttaatgtaaatagtatgtatatatatatatatatatatatatatatatatatatatatatagtaaaagaattttaatttgttaaaaataactatgaatatatttttagtttacttttaaaagtgtgtgtccaacgataatatatatgggtgggtgtgtttaaatntagttcttgaaatggacccattttggacttataattcattntaaatggacccatcttggacttatatatgaacttgtgtgtgtacgtacagatatggagagtattggagtgg

SEQ ID NO: 129653 - DNA, 373 bp, Glycine max
ggacacttaaatctaagcttaacgctagtctcatgggctcccgcgactcttacttttgttccttcttgagcttctcatttggacttgtgtgccttcttttcaaatgaagtttcatttggagttcatattagggttctcaaaattgtcttgttttacttttttcgttctgatgcttgtgtaacaaggtatgtgaaaataaaaaaaatacgatactattttacctgcatagatctgtggtgaattcgctctcatttcgcaccattatggacatttgattcaattatgcaaagtgggcactatagtatgtaagtggtgaatattgctttgggaagatattgtacaaatgtgtttatgtgtggaaactcactatttg

SEQ ID NO: 129654 - DNA, 332 bp, Glycine max
accatttttagtgcttgaaagaatcaatgacaatgcttacaaagttgagctgcccggtgagtataatgttagctccaccttcaatgtctctgatttatctctttttgatgcagatggagaatccgatttgaggacaaatccttctcaagagggagagaatgatgaggacatgaccaagagcaagtcaaggatcacttgaagacttgatgactatacaagctgagcaggaagcaagaactttacagtgtgctctattatcaccagttagaaatcagtatgtttgcaagaggaaatacattgtattaagtatgtaatgcactaatggcaaattg

SEQ ID NO: 129655 - DNA, 472 bp, Glycine max
  unsure (1)..(472): unsure at all n locations
tgtacattcaatgtcgagcgttccgatatattactttactcaatcggacatccgagtaaaaagttattgttgtttgaatgtgttcagagcttcaacattcaatttcgagattttcgatatattacgggactcaatcagacatccgagtaaaaagttattgtcgtttgaatttgctcagcgcttcggtattcaatttcgagcgtctcgatatattacgggactcaatctgacatccaagtaaaaagttattgtcgtttgaatttgctcatagcttcagtattcaatttcgagcatttcggtatattacgggactcattcgaacatacgagtaataacttattgtcgtttgaatntgctcatagcttcaacattcaatttcgagcgtgtcgatatattacggcactctatcggacatccgagtaaatagttattgtcgttgaatgtgctcacagcttgtcattcaatttcgagc

SEQ ID NO: 129656 - DNA, 119 bp, Glycine max
ccctttttttgggacgttcaatatctgggagctcatgtccagacaatgtgcagcacatggagtccacaatattgttggtctcgtgacttgtaaatatttacctaaagacaccaaaaatc

SEQ ID NO: 129657 - DNA, 308 bp, Glycine max
actggctagcgaatactctgatgggctaactctctattctgtgttctaccatataacgaatgcaaaatgtcgtaatgttatgcagacaccactacactttcaatacatacacagtcaaaccactcaagttctgcattacaatctgctttcaccaaatttgaatgttactcgctattcattatgttaatattgctgatactttgattgctgaatctaatattctatgaatacgccagatgtgctttgtgaccatgttatatataggatgtagagctaacatgtagtctcgaggttgttatctgaattat

SEQ ID NO: 129658 - DNA, 283 bp, Glycine max
aatgtactaaaattatttaattttagtgctagtagaactaacacgtgacttattcttacccatatgaaccttcttcatgggatctccaatcacaaaggttgggttaccatgccaccctataataggctaatatgccatttccagattgacaggagtagattaaccttttcgcgaggagatataaggcctaaattgagacttagacatcgaattttgatgagattttgtgcagacacccttagaaaaatgatatcttggagttcccgaagcctcataatttatt

SEQ ID NO: 129659 - DNA, 463 bp, Glycine max
ataataatcttggcttgagcaagcctcccgccaatggtttttgaagtttcatgatgttgtcacttcatttggctttgaagagaacatcatggatcaatgtatataccaaaaagtcagtgggagtacgatttgttttcttgtgttatacatggatgacattttgcttgcaactaatgataagggtttgctatatgaggtgaaacaatttctctcgaagaactttgatgtgagggatatgggagagacatcttatgtcattgggattaagatccatatggaaagatctcgatgcattttgggtttgtctcaagagacttatattaacaaagtgttagagagaattaacataaaagaatgttcaccaagtatagctcccattgtgaatggtgacaaactcgctttatatcagtgcccgaaaaatgatgttgagtgtgaacacatgaagaatactcaatatgcttaa

SEQ ID NO: 129660 - DNA, 448 bp, Glycine max
  unsure (1)..(448): unsure at all n locations
gtcacctgangcatgcagctttgagccatgcttctaactttctggaactgngtttgcaggctctgccttatttcttgtcctcctgagatgaagaatggtggcatcgatccaaaccacaaatcagattcaaattgnggtttttataataagtgtttattgttgaaatttactattttcatttctgaaatctgaccaatgtttataaaataagtgtcataggagacattacgtttaattatatttaaatattgttattgtcgttcatgaacaaaaaagcaaaaaaataaaaataaaattagtaaatctacatcggttattccaaaaaccgatgtagtatccgaacaattctgcatcggttacaaccacaatcgatgtagaattctttaatcaggggtatccttctacgacgtttgtcgccaaaacccatgtagtatcatgtccattctac

SEQ ID NO: 129661 - DNA, 452 bp, Glycine max
  unsure (1)..(452): unsure at all n locations
atggttatgttggagtagaattatttttttaatcttgtnttatggttaacgctgtctctaaaacatttccattagatttaatgatgaaatctgtgcattttcaggtgaaaaagaggctaagtttgaattgcaaaaagtatcagttgagctaagctcatcagttgggctaatcacatatccaccgctaatggtagcttcagcatgcttagcacatatgagatattggcagagcatcaacatcaaagtcgtgcgctaatcacgatatcagtgcgctaatcgcaacatatgccttcatccacgctaagctcgagactggcgctaatcccaatttcacttactcgcgctaatcgcgagggtggcgcttatcgcatcgtcgagatttatagcctattaaagccttttatcagaattaggtacatgccatgcataaatctcaacaaccacatgttatt

SEQ ID NO: 129662 - DNA, 382 bp, Glycine max
  unsure (1)..(382): unsure at all n locations
gcttggaagaacaaactcgattaaagcttcatctnctaattattgagacacggaatgacgngtattgtcaggggcaaccttaaatctaaatgctaatctttttcgataaacacgatcaagttctttcagtatatctcttgcatcaaatactccatcctatgtaattagatatatagagtcattaatttttaacataccactacaatattatccatgcaaaatgaatacatagacacaggatcaatattctttacctcatcaacattttcagcttaatctctgttgcaatctcctttatcagagcataacattcacaatcccatagtgtaaaaatagcagaatcatgaggtngacccactttgacatccacatgaaacctatg

SEQ ID NO: 129663 - DNA, 413 bp, Glycine max
  unsure (1)..(413): unsure at all n locations
aaaagtccttcggtttcaatttgtgtgtttgtgactgtatggcataagatgaaattcaaaagttgggacttatgttggttgttgattgataaatacgctaaacacttgtgctttattgaaacagtgaccgtgaggctttggcttgatgatccttcgttgatatctgtcttgcttgctagcttatttcacttgtgttgcttaataatcatgttcctatctttgaaaatctgcatatcttatgaaaagctgttggttgaagcattgtatgccactagtgtcatgtgattgaaggcttggaaacaaacacaattatgaataaccactgtgagcttgtcacttgaggacaagtgaactgttctttctttgcttgaggacaagcaaaattggtaatattggggagtntttagtcgtca

SEQ ID NO: 129664 - DNA, 354 bp, Glycine max
ctgcagctacatgatgccaatgcataatcatgtctcatgacttttaaagcaacgtaataacggggacgtttatctgttttacacttttacttgaatacagtcgtggctttcttggaagggatgcgcatttttggttttgtcgcgaccttgtttaacccctgacacttgtttacgttacgctacgcgcatgatcccaattgcagaggagcaaacgtatctaccacctccaaaattgtggcaattcattccaaaattcggatttgtatgcatgtcagcgacgatcaacgaagaacggtttgggtgaataaaaagtgcacgaaagttgtagtttgaagagggagagagaaaagaaaa

SEQ ID NO: 129665 - DNA, 440 bp, Glycine max
  unsure (1)..(440): unsure at all n locations
tctcatttctcttgcatcgtcatggagttttgttccggttagtctttcactccctgcgcttcaagcaccctcacaaccgtttccctctctcctccgcaaggttaaaaacaaaacatacataatttattaccgttatccaaaacgatgacgtttcgttttctctgttctggtgaactcacaaattttatctcatattttatgcggcggatgtgctggtggcgttggaatacctccacatgctgggaatcatctacagagatttaaagcctgagaacgtgttggttagatcagacagtcacatcatgctctctgatttcgatctttctctntactcagaggcaatcccagccgttgaatactgcccagattccttaacatcttcatatgcattaccattaccttacgcttacactcgctcgcattcttttatgagtccattc

SEQ ID NO: 129666 - DNA, 343 bp, Glycine max
  unsure (1)..(343): unsure at all n locations
ctgcagcttaagacttgtgggacctctacatttaaatgtatgaatactntatctcatgagtatgaattatctaggatgaagacaaatgaaagtatacaagacatgcagaaaagattcacacatatagttaatcatcttgcatcattaggaagaacttttccaaacaaggatctcataaataaagtgttaagatgtctaagtagagagtggcaaccaaaggtaacagccatcacagaatctagagatttgtctattatgtcttttgctactctatttggaaaattaaaggaacatgagatggagttgcaaagactaaatcaacttgaagaaaatggtaagaaga

SEQ ID NO: 129667 - DNA, 438 bp, Glycine max
ataccatgactaatatttatcctcttctgcaatatagaaaaacaaaggggatagaggtctctttgctagactccatgaatgcaaggaaaaaaatcattgggtttacattgactaagatggaaagtctggtagatccgaggatgttgtggatccaagtgacgaatatatctgataacccaaatttattgagcaccttggtgagaaaagtttagtcgagggtgtcaaagacttttcttatatatattaagtttctaaatggttattgaattttaatatttattattgggttaattgtttattgattaaaaattggaaattaaattgttatgttttattgatatatgtgaatttaatgtttactaaactaaagtttgtgtcgaattttttattatcatgtatgtgttacttattttaaaaaatactaatgtttattcttat

SEQ ID NO: 129668 - DNA, 379 bp, Glycine max
  unsure (1)..(379): unsure at all n locations
aaaagcttaataatggaataaatagagagaatatttgactttgcaagttactactaagtggttatgcacctatgctctaggtcaattattccttctgccctgcccggactctgaacttttgcggtagcttctattctagacaagggttcaccaaaattcttactcgatagaagttaaatttatcattccgtccaataactgttttaagtgttagtgaaaggagaggataaggaaagaaaatgagttataactaataagtaagacgattttttaagctgggttgatggagaaacaaataaattaaaaataagttntatttctatttttatttacttctggtgaaccctgaaaatattaaatataaaatgatgatatgaat

SEQ ID NO: 129669 - DNA, 475 bp, Glycine max
  unsure (1)..(475): unsure at all n locations
attggttctatatacaaggtagtgattcttctctacaatgcggngtaatgaagaagaagattgcaggtcaaagattagaggtgataaaaaacaattatccacaagtattgcaacacttactcaaaaggattacaaatccttgacttcattgctgcaaacgagcaagcaaaaaaggatggatgaaaatgtatattaattgtgttggctgaatttgttgcaacaagtaatagggagatccaatatttcacatgcatggaacacacctattctagagtagaattccttatactcccatgcatggatcacaccttgatttcaaaaagttaagggtgtttagctntttgtgtttaatttgtgtgaatatgcataaagggaataaattagcaataaggccatgaaatttacttgggtcatangcctataagtaaaagttgggttgcctatgaagaataagcaacaacttctcatatatgga

SEQ ID NO: 129670 - DNA, 344 bp, Glycine max
  unsure (1)..(344): unsure at all n locations
atcttaagcacctgaggctgcagctagatgttgagtagtatatctnattacttgcactngatcaatagtatgatattggccgacaagttctcgactcacttccatgttgcctacctctagtaccttgacaacttaggtgcttgccacaagtatgcatggggagtagctgcactgacatacctctacgaccatctctcatatgcgagtaagtataacagcaagtcatgtggaggttatgtgacattactcatggtaagtaaacatttttagtcttgtaattatnttttattactataattaatatttgtattggtattttttataaggctgggtgctggcgcatc

SEQ ID NO: 129671 - DNA, 486 bp, Glycine max
  unsure (1)..(486): unsure at all n locations
tactcagcttgccaatgctctattggctgatgagttggtccattctctctaagtccaatcgaatcatgagtcatcacataaataaatctagcttcacatagtgcaaaaatccttatggcatctctcatgtagtcagtgaagacaaaaggcatttagattttgctgaaacaaatttcttgtatcatatgcagggctttctggagtgtatgtctgaaagttgaaatttaattagaagggtagtcaatgatccagaaacaaatgattgaagtcaagtgttatttttcttataagtttgaagcctatacatgcatgaagcaaaaagatggatgatgagtgaagatgcaatgtacttaatatgaattntaactgtaattaggaaagtaaatgattataacaaaccatggatatgaatcaccaccattcagtataattggattacacatcattcaactactaatgagatatagctcacaatanatattatga

SEQ ID NO: 129672 - DNA, 336 bp, Glycine max
  unsure (1)..(336): unsure at all n locations
agcttaagaacaccctcctggcgtcggcattgctttctgctatggcattctccgntaacgcagcaacagaactgacaccggagcaagcggcagcggttaaaccttttgaccgtgtagtggttaccggtcgttttaatgctattggcgaagcggtgaaagccgtttctcgtcgcgcagataaagaaggtgccgcctctttttatgttgtcgacacttctgattttggtaacagcggtaactggcgtgtggtcgctgacctctataaagccgatgctgaaaaagcagaagaaacaagtaatcgcgtaattaacggtgttgtcgaactgccgaaagatc

SEQ ID NO: 129673 - DNA, 451 bp, Glycine max
  unsure (1)..(451): unsure at all n locations
taacgcggaataaacgatcaccagataggagacgttggcttttactgcgcacagccagtatccncatgcggaacaaaagccgattatctcgccaaacccttcgcgggcatatgtaaagataccgccgtcaagttcgggacgaatgcgcgtgatgatcagcatggcaaatgccagcaatataatgccagcgccagtaataccccatccgatgagcagtgctgccgggctggcaactgccgccatattttgcggcagactgaaaacacccgcgcccatcattgatcttaataccagcgcggtgagtgcgctcagtcccagtttcttttccatcgatatccagtgattaaaacgtgataagaagaataaatattatggcaaaacgcataataatggagtttgccactgaagcgcgggatttacgaaagatgtgtctgatgcaatggtcgcgggg

SEQ ID NO: 129674 - DNA, 362 bp, Glycine max
gtcacctgaggcatgcaagcttgtcagtgttggtgacattgctaactttatcatcaataatgggcaaagcctgtcagcgttggtggagggaggtcaagcatcacaaacgcgtgtcccgacgttatctcgcaggcctgactttagtcatccacaagtgtgacttcagtcattttgcaagcacctattcttgaagcatactccgcacaccctatccatgtcaacatcatcaagggaagcatgccctcatcatcgatgacattatgaccgtcgattggatcgccaacgaccttagcaccaacaacctcattctatttgtgggttttgcaatatgagtcagcttcttgaaattgaaggaggatgtg

SEQ ID NO: 129675 - DNA, 460 bp, Glycine max
tgatcaatatgcccatatttgctgctgaggattttctcattcatgcataaccaaattgtccaacacctgtttactattatagctaacaatacatctacaacatggctgctccaactagaattcaacaattcaattagggtaaaagatgaatcgagatagatgttgactaaaattagggactgcaaccatctcgaaagttcgagagataatgagcaagacaagaataggtggcgaacactctcttcactcaaattacacaaacaacatctataggcaaaaacccatcctctctctttcagatgatcctctatgggcaatctatccaataaaaacctccaaagaagataagacttagatggtgggacatcaacaaaccatatagtcctaccccaagaaagcgaatgttgttgagaaccatagaatgatgtaacaactgttaaagagagaacaccattagaag

SEQ ID NO: 129676 - DNA, 349 bp, Glycine max
ataatcaagtcatctcgactcaatcaaagcatataagtctcatacaatttatatagaacctatatcctaatgtcacatactatcagagcgtggtgttgccgtgtactataacatgaggttcttcatagtcatccacctattcatctgctcccccgaacacaagttcaagatcatcacaggatccaaacacgacaacacacagggagtgagttatcacattcctaacttatagagaaacaagacaacttaatatacatattatataaatgagataccacttgcttaaacatagctcacgtaacttcaccacttttgcattcaaaattcactttgcaattatcaatcacat

SEQ ID NO: 129677 - DNA, 433 bp, Glycine max
tcttgagtgaagtagtacttaagcagactctttgttggactccctttcaacagactatttgaggatgctgtcttcttccaagaccatctgaactggcaagaaacccaatccatctgccatggcaagcatcatctgctttgtttccttgttgaattcttccagatcaatcgtgccattcaagttgtgatcgaattgtatgaacaaggcttcataaacacgagcaagctcatccgggtctggctccacatcaataccgaagtgggtttccaacaccctcaggctttggagctccttcaacatctctgcatacgagagaaggccatcattgtctgtgtcaaggtgagtgaaccggttaagcaccgagacactaaacgcttcttcatcctcaaggaagtggacaatggtggcaccatccaatatttctacactcatc

SEQ ID NO: 129678 - DNA, 473 bp, Glycine max
  unsure (1)..(473): unsure at all n locations
acttgacttcttttntctttacttacttatgtggatcaattttctaatacgtaggaatagtgaagaaaaggagataagaaattgtcatatacaatccacggaaaatttcatttttaatagtctctgaaacagaaagaaaaaccatagttttccaagttcaatactgagaatatgggacacaacatataatggttacatctcagcaatataagattcacaaactcaacagatatggtagctgagtttcttggtttaaatatcagtatagcacatgtttcaaatttccaatttgtaatagcacatgtcactagtagacattacggatttgatcttatgagcatataatggagattcttttgtatcagcatattgttattataaatacacgtgtgatctgttgtagacactcaattacatagaactgatagttgtgggtacctgatgatattaatacacactacacatgaattatt

SEQ ID NO: 129679 - DNA, 194 bp, Glycine max
  unsure (1)..(194): unsure at all n locations
ctgcaagcttntggnngggacatggttgactcgggtttttattggtttacatgtcaccacatttntctgcgctctctagtatagtggatagttggggaatgcctactaacaccctccctctctcaactgatcagtctncataacctcttaagttgttgatgtccataatctgttgatgccgatatgttagactc

SEQ ID NO: 129680 - DNA, 416 bp, Glycine max
agtctcagatgatgcatctgagtttgtagctaccgcttgctctcctctaatgactatggcatcatttctggcgctaaactgctatgactccgaagccatcttctcaattaaatatttggcctcaacaagagtcatgtctccaatggctccaccactgacagcatctatcatacttctctccatattactgagtccttcataaaaatattggagaagaagctgctccgaaatcttgatggtgagggcaactggcacatagttttttaaatctctcccagtactcatacaggctctctccaatgagttgtctaatacctgagatatccttcctgatggtggtggtcctagatgcaggcgaatttttattatacgaatactctcttatgtcatcccagctcgtgatggaccgtggagca

SEQ ID NO: 129681 - DNA, 256 bp, Glycine max
gcacaacatagttttacacatccacaatgcgcgcataaacccaccatcccctgtagcccacctccaactgagctcacgtactcccacgtggcccatatcctcgtgtctttcaacaccgggtccccatcaatccttccaagctttcccaacattaaaggtattcaatctttctactggacaaactatctcagcccagaaaacaaagcaaagggcgaataccttggctaaacacctaccaaattacggttttttactt

SEQ ID NO: 129682 - DNA, 393 bp, Glycine max
  unsure (1)..(393): unsure at all n locations
ctaagctgacacatgtgatacagactacttaatgcttttgtttggacactntgttcatccatgatgtcaactacttggtagaaattgtccaaaaatttccaatattataagtgatatcatgatttaaaattttcttgtgaaaatactgttgtagggcaataagaacaatatatgaaaaatgattcttataattgttggctgaaaaaaatatgacatattataacgtttggaaactccctgtaatttataaaatcagagctgctaagatttttttaattaaaaatagcattcaaataatttatgtaaaataaatgaaaaatgtctataatagtttgggaccaaaatcttataaaatttcttattattaaacaacaggggaatttgaaataaaaa

SEQ ID NO: 129683 - DNA, 474 bp, Glycine max
  unsure (1)..(474): unsure at all n locations
ctcaagtcaccgggctgcagcttggacctcttccctctcccggtaattcttatttaggaaaagtcatntagggtagaggaaactcgcccaggcaagctggagtttacccaagcgagctacttgcttagggttgaaggcactaactcatccaagcgagtggcttgcttatggctgaagtttcctcttagcccaggcaagctaaatgctagcctaagcgaatttagggtcagaaaagtttatgaaaagatcattttgccccttcctgtggctttgtttctggatctaacaaacaaccctcaaaaccctgagcggccccttggccttgcactgtaatcgatgtcaaacaccgtaattcgattgggaatgataaaagcattatacctagatgataaaagcattattccccagatgaaatagggtctaacaatcatcatatcatcttgggggttcgnagaaataatgatctaagaaatg

SEQ ID NO: 129684 - DNA, 430 bp, Glycine max
tggtcgacctctcgttcattgtgcatatgtagttattagaatttatgaactccctctctctctctctctctctctctttcatttgaatcaatatttacaatttctatttggatctattgtggcgtccctaaattaatgactggtttaattgttacaatttaaataacaaaaaccatggtgattcttctttcttcgttttccttttcatttctttctctgtgcaccataactatgtttagaatgataatcctgactatttagtcctgaatggccagttcacaattctactctgagtcatttctgtcttaccgctcgttaattctctaatgatttcgctgttcaaaaggaagaatgtacctgcctttacttaggtcgttacgtgaaaatttaaggattcatcacagtcgtgttaactcttttacatataatg

SEQ ID NO: 129685 - DNA, 309 bp, Glycine max
  unsure (1)..(309): unsure at all n locations
tccaacgacttacaatgatcacctttcaagtaaaaagaatcacttgattcacgcataagaaagaactacataggtctgatttcctctctgatggagggtacgtacgaacaaaagccccgcttttgtcgacctcaaaaaataaaaagaaataaagtttaggttacacaatttccacaattctaaaaaataggcttgtgtccttcaagacaaacggtagaggtgctaataccttccttaaccgctaatacaacttccgaacttagaatttcattgttgatcggtgttcttcggntttccgactttttcaca

SEQ ID NO: 129686 - DNA, 358 bp, Glycine max
cttgatggtgcgtatcccaccatctcttcatagtagagtatcgattttgcgtctaccatcacgattatcgtctgcctttgcatcattgggggtaccacttgggccgtcatatccctccaccttttgggcgtgttctttgaaagatccgtgcccctctttgctaatgttctatagttgcatcctatcctgaaccatatcaatatcgttctgatactgcctatcatatgcaaccattatgtcctttcaagaatggactccggaatgatccaagtttgtgtaccatgttacagctaccgcagttagactttcttggacagaatgtagttgcaattgctcatcttttgcgtattctcccatc

SEQ ID NO: 129687 - DNA, 178 bp, Glycine max
  unsure (1)..(178): unsure at all n locations
gcagcttaacatcagaccacttccagggtgttggaancttttttcatggacttgatggggcctatgcaagttgaaagcctnggaggaaagaggtattcctatgtgggtgtggatgaattcttcaaatgtacctgggtcaactttatcagagagaaatcagacacctttgcaactgtca

SEQ ID NO: 129688 - DNA, 302 bp, Glycine max
agcttgtgtatggaccaatattgattggttgtagtgatatttggtttgattcttgagtatgtgaatgatgtgaaaatgtgtgacacgtgtagtgttgagatgtgatgccacacgataagtcatggaatgacgtgagatgtgtttcggtaagctgatgtagctccatgtagagcttgtaagccttggatcttcttcatcaatggagtcctttgcttcttgaagatgaatggcagcggaatggagaaagaagatgattggagacgccacttcaaggagatgagtcaagaagaagctcaccacca

SEQ ID NO: 129689 - DNA, 243 bp, Glycine max
  unsure (1)..(243): unsure at all n locations
agctatcataaccaatgcagtatgagccatagctgncaatactttatttagtgacagcgagtctggtcaaattcccttatgtagcacctgagcattgagaccaagagccgaaccatgatcaccatgagcagcatatgccgatgtaattgacgtccaaaatatcaagctcctactctgtgatagatcaaaaacccaccgcgcctcgagaatacacccgaatctctcattaagcattaataatag

SEQ ID NO: 129690 - DNA, 485 bp, Glycine max
  unsure (1)..(485): unsure at all n locations
cattacggacacttagatactaagctcatagtaagaatggataaaagttaaattacatattatggtagtntctggaaagtaatagatcttagacaagcctgatacataataattatcacaaacgtatgtatcccacatgcattggtgtgagattaatcccttctcagcgtggtgattacaagattcagacccctagcattgtagctgaagtgtgcctatggtcaaagctcatcactacagaaaccaatcactattggatttcaaagccccttatgtaatgaatagaatgaacaatttcacataatacagtatcaattgtgaatgttatatacattcttttaaatgaagcttgaagaaacaataacttgcagaaatatgatgcttcgggagtaaaatatatgcattaaacaaaaactacataatatcactgtgcaagaccttctcagcatgaagttgtggagaatcaccatagcttaagtatgtct

SEQ ID NO: 129691 - DNA, 354 bp, Glycine max
  unsure (1)..(354): unsure at all n locations
ggatcctctaagcacctgggctgcagctgctctacatntgatctggtttgattatctcgaagnntactcttgagagttactttgccacacacatcatgttcctcaaatattttagatatggtctcaatctcttccttaatgctgactttggcctcacataaccctttatttgaaaagcaaaatctcctccagaacatatggactgaatccacttggatgctaccagtagtatacctagatagctcacaagcacaaggaagaccgtgtgtgcttctcatcacacaaccacaagaagagggatcgttgccaagataacgtagatgctcaacctcagcaacaatctcatttaaagtg

SEQ ID NO: 129692 - DNA, 451 bp, Glycine max
acactttaatctaagctcaattaaaatatgagaaagatggaggcgtaagttaccttagttaatcacaaatgaaacactcaatgtaggtcatattaagttaatcataaatttttaatgtttttgtaaaaaacacctaaataatttataaaaaaatgcaatttattccttattaatataaaaaaaattacataacaatccgttcaaaataattgttaagtgacctcaataaaatttgaaaatttgaacatcggtccctagtaaattgcaaataaaacatttgtgcatttaccaagaggtccctaatatagttgtgaaaattgcaagtaatacttgtgtgattgctaatatgtcattgacataattattagaattgcaattcattgctaaatgactcctactatttatggtgcaatttacagtacacccttgtgtgtaaaatttgttgtgaaat

SEQ ID NO: 129693 - DNA, 349 bp, Glycine max
  unsure (1)..(349): unsure at all n locations
agacataagttaatgactnttacctatagttggaggttgtagatacacgttaatatttttacctatagttaaaggttgtatatataagttaacttttacctacgcacattatgaatggtacgaatagcatataataacaatcaaatgtaattgttgatgaaagtaaatttataagtaaaatctatattaatagattataatagattataatttgtcattagaagtccccttaaagttgatagtcaaagtgttcgtaagataaagactttaatatatttatctatatatttttatcatctaagaatgggttttgttagtaagcatggttaactttttcttgaagtgtatg

SEQ ID NO: 129694 - DNA, 479 bp, Glycine max
tcgccgagtgtccacattgaataacctttattcaaacctttcaaagttagtgataaggctaaacgaaaaattagggaacttagaaaaactaaatccttaattgaaggcgtatgagacaatcatagcgaattactaaacaagattggtagtttgcttaaggtcattccagacactccccaagcctcggaaaatacttccaaaatggtaacaagaagtacctccaaattaattaatgttattaatgaagatagtgaccaaaactcagataacacaactgagataggatcagtgtcagaaaagaatataaatccaataaactccaaacactggataacatcctccaaattatattatcaacgtccaactgcccctaaccttctattagaagaaagaggtgaaaacaatgttaaaagttgtagtgcaaataacatctatgaatggaacatatacgcacaaacggagtataacatcatgaatat

SEQ ID NO: 129695 - DNA, 232 bp, Glycine max
tctccattggttttcatagtatcaaacatctcttgatctcttcaaatgtgctttgaggcagcaaaatccatcacccattttgttttagcaacctcgtcatttgttgccaaaaacacatcatcttcatcttctaccctttttactacattggctttggaggttgcgccatctttggtcatatctcttaatttcttcaaagcctctttcatttgttgcacctcacttgcacatg

SEQ ID NO: 129696 - DNA, 471 bp, Glycine max
  unsure (1)..(471): unsure at all n locations
tattntattatatagaaaaatatataagaaagcccatgctttatctgactcataacagtcaacatggaacaactggaaggtaggtaggagtatatcaccatattaattcgatccatttcttagtttcacaccatattgttaactgtttgctcattatcagctaattctatcgtttataaatttccacccatatgattgtgtactaaaggatttcttaaaaattgactagtcgtgtttgattaacaacaaaatgagaccccatttttctaacaacatgctccacactggattccatcgtgcatggattggtctaatgcttataagttcacaatttgatgaaagagatgcctgccttatccgaaaaggcaacctttggacgatgcatttattcttatgaataaagacagaatgagaacttcactttaatgtatttccctggcaaacatatgtaccagcacttagtcaataaat

SEQ ID NO: 129697 - DNA, 329 bp, Glycine max
acccggatccttgagtcacctgaggcatgcagcttgttaatccttatccaacccgacatattcagtcagtgagaacctgtgatgtacctaaacaggcgagctcctagcagtcaacagataaaaggaacaaggaccacaaagcaaggagacttgtgtggtggctggccagctgtgaacttaattgatatatgggatatggcctctagtaatcgattaccaagggtgggtaatcgattacaaggcttaaaaatgaagacaggaggctaagatggtctctggtaatcgattaccaacgggtgtaatcgattaccaggcttgaaaacgaagtc

SEQ ID NO: 129698 - DNA, 428 bp, Glycine max
  unsure (1)..(428): unsure at all n locations
cataatcttagaatttntaattatcatacttaggacaataatttatgtggtcttttttacttttttagctaccctaattatataattaattaagatttattatttcctttttaattattgacatgtttcttttttaatctatgtgctactttgtgtataatacgatgtacaatagatatgtacatacaaatagaaaataatcatctattatttcgtccatgtttcttgcattggttcactattttcttcctactaccctcttcttaagaatgtttaacgaaatcgttaaactatttatcaatgtgggtgttttagaaatgtatttaccttcaagagtgatcttggacaactaggatattggaagcgccacttttagtagtgacatatatttgtttaatttgtacataataggatgtgttactttattg

SEQ ID NO: 129699 - DNA, 259 bp, Glycine max
  unsure (1)..(259): unsure at all n locations
actccattggatngaatcgcatgtccacttgtaactccaaagtatcaaacctttcaccaacaaaggtttgaagaccatcgaacctatccaaaatcttttgaagaagagaggaatcttctccaccatgtaaatttcattcttcatcaacgggtcgagcatcctttttcacccaagagccatcatgctctttttgataaccaaaggatgcaatcacaatagtgcctattagaaatgatctcttgattggaacataaagttc

SEQ ID NO: 129700 - DNA, 286 bp, Glycine max
  unsure (1)..(286): unsure at all n locations
agacctatgatcaaggccagaaatcctaatgctctgttggacttttctgggtccactgtgtgtctgggagacgtgatccctgcaaattgataaatggcatctgagatcaactaggccatatgaaaactcacctgngtcaagatggcatagaccagttggcacttcggcaggggaaggtttgaattatgataactggggaggatgttgccgagcagtaatgtcatccagatctgtgtcagggtggttatgctagtgcacatgatccacancctgtctcctgtcacaa

SEQ ID NO: 129701 - DNA, 451 bp, Glycine max
  unsure (1)..(451): unsure at all n locations
tgaagtgaataggatacagattntgtttgctctgttatttttgttatttgtgttctctatttgacttcaatagagagaaacctaataggaaaaaaggatatgatttttgtttgctctagaatagaataggaacataataggaaaattaaaagaaaaaggaaacctaacaggaaaaggaaacgttaacaggaataggaaagccaataaaaataatgaggaatataaaggggcacatgactcacacctaaattaaaggatatgatttttgtttgctttggaataggaacgtaataggaaagttaaaagaaaaaggaaacctaataagataaggaaacgttaacagataatagccaataaaaataatgaagaatataaatgggcacatgactcacacctaaattaaaggatatgatttttgtttgctctggaatatatgaacgtaataagaaag

SEQ ID NO: 129702 - DNA, 431 bp, Glycine max
  unsure (1)..(431): unsure at all n locations
agcttccatctgacatttaagacattgttgttactttgcagtttattggctngtttctcaatattattgcttattaatattctgtatccatatggaatttctatgaattcttttgtacaggttaataacttgatattctgccacccagaagatgaaaccccaataaagaatttgattactaggaaaattccaaggtataatagaactattttgacaggaatttataagccagatttcatatgagctttagcatcaggactggccaccagatatactatctcctttacgtacatattggtgtttgaggttaatgtacataatttaaagaatacttaatggatataaaatatttttgtggccggcttaaatatccttatttaatgtcacaccacttgcgacaaattgttatttttgtagaaattgtaaacaat

SEQ ID NO: 129703 - DNA, 461 bp, Glycine max
tcatccacacaacccttgttctttgcctcgcaccttatcttgtggttggtggaggagaagtgcctccagcaccaaatcaatgccacgatggatgagattacatgcctacatggctgcttggtggagctcgatgactgatgagaatcatttttaggaacaataatggcttgaattcaaagtttatggcctccgcttctaagttttgggctgagaaagcctcgctgtggcaggtttgtgtgaatgtgcttcacttctatctgtttctttgtatgatttaattgtatcttagtttaaattgcaatctttaactctgaccctgtatcaaatagagccctctagtgtattctttgtagttaacatcccttgggttgttagtttcgccaaaacctgcttaaatttaagcatatggcgtattctctactaactagatcaattattattcgtaactattaacatataaa

SEQ ID NO: 129704 - DNA, 391 bp, Glycine max
agctttacgggttggaattatcattataaatgcgatatctgttatttcgttacacatagtgcttctaaagtttccaaacacaatgtaatagattacggaatatggtaatcgattatctttagcttcagagacttccttctgctgaaactgccttatgtaattgattaattcaacaaaacttgccaatatttcaagagaattgagttttaatgtttattctaacactttgtaattgattactaaacttgataatcgattatacagtgttgaactcattgcttctaagaaactttgagatcaatacatatatcttctcatgtttgattaccactaagcatcgataataaaactaagtctaaatactcaacatgcctaatctaaaaacgtacca

SEQ ID NO: 129705 - DNA, 476 bp, Glycine max
  unsure (1)..(476): unsure at all n locations
tgtgtattgctgcattctactaatatatggagttgtccattgctttgcttgagaataacaattgcttgaccacaacaaccctatatgcggtaatggacaatggtctttcaaataaacctgttgtacatgaacaaagattatatcatgcggtgaccgtgtcaaatgaactagcgaagtcattgcataattgttatagtaactatattcaatgtacctgaacaaaatgatttccaaacacgtgaccgacacatcttatgcggtgcccagaagaatcangtggtggttgacttctaagaggaaaaaatgccatgctgtgttgtcgggacaacgatacaatgattacgttataccgtgatgcaatcacatatcccatcttcgttatatccatccacttgtccacactaacctgaatcaaccaaacatacacatgtagtaatgtgaaagttggtattaaaaaaaataacctanaaacatac

SEQ ID NO: 129706 - DNA, 349 bp, Glycine max
  unsure (1)..(349): unsure at all n locations
attantaattatccactaacctagggaattaaaagaacttaatggctgagtgtaactganattgtggcaaccaaaagtcaccccaaggctgatgcctaagctgccaatttggcccttattacaacttgaactaaatcaaactaaagcccctttagttgattaacccaaaacatanttttggtcaaccaactttacatggattgggccattatttagacaaactaaacactcttaaattgagatgaagtggcgccatttagtcctcctccatttgggccatgatacaactcataaccttggacttttctccttcaaacttgggcttgtattcaaatagtatgaacaacac

SEQ ID NO: 129707 - DNA, 478 bp, Glycine max
taatcttcaacacacaactctcagtgaacccaatcacattatcatccttcatacagaagaagaactatgtcaactcccttgaagctattttccaccacctcaataaatccaaactaccaaataaaaaacaccccatgattccattcacagcatatatatgcaaaacacacccccaagatcaaaaacaataaaataaaatgcacacttttatttcaagcattaaccatgaccataaaaagataaaatttgaaaaattaaataaaataatgaaacgaacttacttgtagaaaaattaagtgaagagcaaaacaaggttggcaaatgttgagaatttgttctgagattctactaagaagaagtagttacaattgctggaggagtactttcatgacaactatgacttgcaacatgagcagttgcagaggataaaatagaatcaaatggtaataaactaaataaagagaatgaagaagaatga

SEQ ID NO: 129708 - DNA, 316 bp, Glycine max
tcacactcgaatgaaagagatcccaaggttatggaagtatgaaactataccagtgattatgaatgaaaggaattaattagtactacctataccaacaagatgaatctactttttatagcccatcaattaagaactccacaattaagtgtgctggcttggagcaattatgagatgtgtgaccttatgaaaagtttatcaaaaagtgtgtgagtgaagacaaagcacactaaaacatcttgtgttggtttgcagggacaatcaacaatcctacaagtagtcaagcattgcacctctaaatctcttcttagacactaat

SEQ ID NO: 129709 - DNA, 416 bp, Glycine max
  unsure (1)..(416): unsure at all n locations
ctgcagcttacanatgagataagctataattttgtttatctatttctagtttaaaattattacattgaacattatattatttgaagtaatttttcattgtcactgaattttactaacatgtgatttttcattatatatatgatgtatttttcattgtccatacaaattatgatttcaaaattcaaaagttaacttcagatttacaatttgtcaatttgataacaagtgttagaattcactaacttctctctagctttggtgtgtatatatgcacctcaaacactttattcattgagtcaccatatttcttcgaagaaatatgttgaacttcttantaaattagattcaattaggatgcaaggaattatatatatgctattcttttcatttgattatggggtattgaggaaaaaaaa

SEQ ID NO: 129710 - DNA, 359 bp, Glycine max
  unsure (1)..(359): unsure at all n locations
agctntaccccactattacccacaaccacttaccaatcttatcaatgnnaagaaaatgacatcggcagaaatgcagttgagaagagaaaggggcctatgctttacttgtgatgacaagttttcccctagccatcgttgtccgaataagcaatattttgttccacagtgggaagaagaggatgaacctgcattacaaccagatccaccagacgaggttgagacagctggtgaccctagtttgcaagatcatcatttgtcttataatgctttaaaaggctcatcaagtcttggaacaatgaagtttcaaggatcaataaaatggattgggagtgcagattctactagatagtggaagttca

SEQ ID NO: 129711 - DNA, 409 bp, Glycine max
ctgatactcttagctgctgtatgtgtgatgacaagacccatatcattagtcactttgggagaaatgaaattgtggctcgcaccactatcaatcaacaccaataaatccacattctgtatcttaccttcaaccttcatggtgtgagactcacccatgcttcccaatacccccatcaatttacattccacctccacttcttcttcactttccaccgtcacatcctccatacttagaatttccccttcctctgtcatggtttcatcttctcctatgattagaaccctaagagctcgttctggacatttatgcaacgtatggtggtattttcccccacatttgaaacaaagacccttcgctctcctctcttcgaattcatcattgtggatacttcgtattcccttccacctct

SEQ ID NO: 129712 - DNA, 370 bp, Glycine max
  unsure (1)..(370): unsure at all n locations
agcttgctatccatcttgaaactngaattttctatttaagtaaagaagaatctcatggcaaaaaataaaaaaataaaaaaaatcaatgctattatagaaacaaaatagtatgtgtgtcatgcttaatgttttggagaggcgagtagtgcttatcagatgctacaatttgatgatgcagctcgtgcacatggtcccctcaataccaatatattaattaattaattaaaggatagcttatgttgttccattgaatcttaatttctgccacacaagtctgtaccaattattcttgcccccaagagtcttcttttcttaggacatccaaaactatgagtagataaacatgtgtcagaaaataaaatgaactaat

SEQ ID NO: 129713 - DNA, 471 bp, Glycine max
  unsure (1)..(471): unsure at all n locations
ntatattgtactgtanggcatataacttggtgtactgatctgttttgatggctganaaactaaaagaggccttgtatatcttttgaaaagaagggcaatctggacctggaaagctcttgtaactgtcagaaaaggaaggacagataggagatcacattttgcctacatttgtggagggtttgtagacctaatctgttgtaatctgcaatgccctatcacccttttttgttgccatatgcatatgtacaatttgttaatcaccatccaaccagtaaccaatgggaaagcagtagttaaggaacatatgaaatgggaaccatttgaggtgtttgtttcaagatagaagatttcattcccgtgaataacattcgttacatgcgagtaaattagatntaatattgttcaaaattcaaataatgggatgaagaagtgggagtgggagtaaaagttgatagttgggttacaaaataa

SEQ ID NO: 129714 - DNA, 379 bp, Glycine max
  unsure (1)..(379): unsure at all n locations
ctgcagctctccccaatttctataataggtgtagaagttgtttgaaaagggttcagcccctaatgcacttctctctctttcgaatttgtttggaaaaattgtttccgtgaagaaaattcaagccgaggcgcttccgaaaagtttccgtaacgtttccgtgaggaatttcgcgaaggtttcgaccgttcttcgacgttcttcattcgttcttcatcgttcttcgatcttcaatgggtaagtacctcgaaccaagctttttgattcattctatgtacccgtggtggtccacattgngtttcgtgtattttttctcgtttcatttactttttataccccnctttngacgtgcttaagccattttatttaagtcatttctcgc

SEQ ID NO: 129715 - DNA, 466 bp, Glycine max
acttgcatcagatgccactgtactctaaatttttgaaagatatgttttcattgaagcataaatatattcatcaggaaaacatcatagtggaaggaaattgcagtgttgtgctctataagatccttccacccaagcataaagatcctgggagtgtaactattctttgttcaattgggtaagtcaatgtgggaaaagctcctattgacctgtgagccattatcaacttgatgccactctccatgtgcagaagattgggagagttagaaataatgcccactcgaatgactttacaattagctgatcgctccattaccaggccatatggagtaactgaagatgtttcggtcagagtaaaacattttatcttcccggcagactttgtggtaatggatatctctgaagatactgacatccatgtaatattgtgaaggccattcatgttgaccgcaagctacatagttgatat

SEQ ID NO: 129716 - DNA, 259 bp, Glycine max
ttgaagaaatatgattggtaaggtagtgggataaggaggacgattatatgtttaatattggattaaacgatcagaaagaaaatgttaaaaaaggaaagatttattatgttgcaaaaagataagggatgggtaaatgaaaaaaatattatgaaggtaggaagaacaatttgaagggagaggtttaataataacgcgggtaaaaaggtattatgagagttcttgaagtacattatattatttagagttagatattaaagaa

SEQ ID NO: 129717 - DNA, 479 bp, Glycine max
ctaagcttatatcagatgctatccttatagtgtgatgagctgatttctcttatgtatcttacaatcgaagaatctcaacaactgataaagttacatcagagctggaggactgcaatcgtagataaatcgagcttgaggaaaaaaatttacggctgcaatggaatctaaccatataagatacttcttgtcacaataatgctcatttatagtatgaagctgcacacatgacgagagagaatggcgagctacacatggagaaagattctcttcaacaagagaatgaatagtgcaagaacaaggttaaagatcttgataaaaagctgaaacaaaagatagatgttaagcaagatcaatatgatgggaaagattgttgtacttttaccactgcactgcatgatttgaagttcttacacgtatgttcaagtaatactatatagttaacttatttgttattcagtcaaattggcgcacatatatta

SEQ ID NO: 129718 - DNA, 297 bp, Glycine max
taagcactgcggctgcagctgactgatgtgcatttttgattttgtaaacggttgttgtttcaatcgagagagatttagtaaccatcccacctaagttgagctctctttattgataaatgtctaaatcacattcgtttctctctttatttaaaattatgctctcgcgtctcaagaaattaatatacctgacagcttaatcagttttaacacagacaaaccttcttaagtcaattatttgtttattactctaggcattattgtggtcaaaaaccactctacattatttattactggatt

SEQ ID NO: 129719 - DNA, 314 bp, Glycine max
  unsure (1)..(314): unsure at all n locations
gatgcctggtgtataaagtactcttgtaccgatggctgcatgagagcttgaaaccattgtgaaaacgtatgtatcatgccatctaagtgcgcgttcttttctctctgctcgagcgcgctgataatctcttgcggcgtcaagattgggcaaatataccctgcccactgaagcagatagtgaacatgatgttcttacgccnagcgctcaaatcattaattatctagatcacgatacataatgagattgatgaactcaactgatgcactctgacaattgttactactatctctgttggagatcacacttatgctttc

SEQ ID NO: 129720 - DNA, 346 bp, Glycine max
  unsure (1)..(346): unsure at all n locations
gacgactcatcgacatcggtaaagtattgcgttgaatggtcaacttaactcaattcagggctcataatggcgactaatcagacatccgagtaaaagtattgtcggtgaatggctcgagcttcaacattaatttcagcgtctcgatatatgacgggactaatcagacatccgataaaacgtattgtcgtttgaattgcncagagcttaacattcaatttcgagggtctcgatatattacgggactcaatcagacatccgagtagatagttattgtcgttcgaattgtgctaaaggttcaacattcaatatcaaacgtcctagatttactacgggactcaatcagaca

SEQ ID NO: 129721 - DNA, 453 bp, Glycine max
  unsure (1)..(453): unsure at all n locations
gacacttaaaactcagcttgatccattcaatgacaataattgttctttttgtgngttgagtccaataatataatgagacgctcgatattgaatgttgaagctctaatccaattcaaacgacaataactttttactaagatgtctgattgcgtcccgtaacatatcgagacgctcgaaattgaatgttgaagctctgagacaattgaaacgacaaaaactttatactcggatctctgattgagtcccgtaacatatcaagatgctcgaaattgaatgtggaatctctgagccaattcaaacgacaatgagtctttactcggatgtctgattgagtcccgtaacatattgagacgctcgaaattgaatgtttaagctctgagcaaattcagacgacaatatacttttactcggatgcctgattgagttcctgacatatcgagacactcagaattg

SEQ ID NO: 129722 - DNA, 408 bp, Glycine max
  unsure (1)..(408): unsure at all n locations
agcttgcaatcttnntccacttctggggttgcattaagataactgctgangggacatgggtatgcattttggtttatgaagaggaataagagctcgcacaagaaacagcttgtgctcttctttcagtggcaaagcaaatccattgattatacttcccaaaatttccaagagttctgcaatcccattgtgtttctcagtttcaaaaatgaagcggtagaatatattgttgattgcttttctgatgaatggtcggtgcaccataaatttcccataaacacgatgaagaactgtcttcaagtaatcccgttccctgtgatcctctgaatcaaaaaggtctaacagtctcagaacaaatgaatgatcaatatacccttttgccaactttcgcatcaatctctggtgacatga

SEQ ID NO: 129723 - DNA, 477 bp, Glycine max
gtgagccaatatcctgactcaccatataccttgacccattgtgttttgtcaatccttaccctcggaagcaaaaaaaaaaagaaagaaggaaaatttccaatcaaagagaaagcaaaaagaaaagaaagaaaattcccaatcaaagaatgggagaaagaaagaaaaaaaagaaaaggaagaagaagaatgaaagaaagctcctgatcaaggatcgaaagaaaacagaagaaatgtgcagaaaggtctttggaccatacaatatctgaacaatacataattgtcaccgaatgaacaaaaagaaggaaaggagaccacgacctataatggtcttctccctttaattgccaaccaaaatattgtgcgctatcgactttttctccccgcactatacataatcagaatagaataaatgcctcaataaatctaaatgccataacacactatagccgtataacccatcataagaacccattccca

SEQ ID NO: 129724 - DNA, 302 bp, Glycine max
  unsure (1)..(302): unsure at all n locations
ngatgcagttaaggtaattgattagcaccaagtctttctttgtttctacagagatcgtctaggcgaacagaaacataatatttgcttaagctaatagacctttctgctgcacaaatgatcaaattcaaattatcatctttaaatatacattgttctttaattcattgcagatgtatatggaacaacatcatgatgttaaggtctcatgtcccacccctgaaatggaaacaattctgcatgagttgaaatataattgaactgtaatggctactttntgaaaccatggttcgtttttattctac

SEQ ID NO: 129725 - DNA, 464 bp, Glycine max
tcgacccggatcttaagtcacctgaggctgcaagcttgtttgatggttgatatcaaggatggattatcaaccacaacctcacagtcattgtttcactcaagctcaagtgtttaggctcattccatcataaacaactaacacaagtcccaacctttgcatttcatctcatgtcatacagcaatgaacacacaaaatgaatccgaaggactttctagtcttgtaatggggttaggcttccaacaaattatggtttttctaggattcaaaagcttaggttctaggagagcattcatccatagataaaccttcacttttcattcattcacaccccaatactttccttttacttaggcactcaactttatttcattattttgcagcatacacacttattaatttcatttgtatttacagttttttttaacacaatatatacaaagacattatgtgtatatacaaaaaaa

SEQ ID NO: 129726 - DNA, 462 bp, Glycine max
  unsure (1)..(462): unsure at all n locations
cggacacttagaaactaagcttaatggagcttacaccatgtggtatcaagatcatcttcatctangtgatgttcttttgcttcctctatctttttgttcggtgaattctctttaattccttgttcttcatcttattctccatgtatatcctccattttcttgtggtttggtgctgtttagagtagattcaaaaaaaaaataaaccgattaaatcttagatctatacttgttcttgcatttctatggttcaaattttgtagatctactcttgaatcatgtttttgtgttgattttagttctatcatttttcattcataatattcttgtgctgaaccttagatctaaattttcttccaaaatattgattagaaaaaaaacacaaatctaagtgtaaatcacttaatccatgttgtcttagagtcatgtttagtcatagtaatcgtcacattatgttnctaagtt

SEQ ID NO: 129727 - DNA, 335 bp, Glycine max
  unsure (1)..(335): unsure at all n locations
tgcaagccgtttttcctnttagtatggaanttantccttcctaagaggagccaaacccagtttccctcattaagaactagctcattncttcctctattgcctttagttgaatacacctttgtttggttctctatttggttcttaaccctctcatgcaacttctttacaaactctgacctagattccccttctttatgtataaaagaagtgtcaagtgggaggagaatgaggtctaaaggtgttatgggattgaacccataggcaacctcaaaaggggattgcttggtggttctatgaacacccctgtngtaggcaaattctacataaggaagata

SEQ ID NO: 129728 - DNA, 415 bp, Glycine max
gacacttagatactaagcttatatggacttctcttcataataaaattcacatacttgtttgaactaaaacagatgtatcatgtgattcattaaacaacggtcaatgtatattaagctctcttggatgatacaccaatcatacatacaaactgatgatactaataaaattcttaacattatttacaataaatatacataatagtagtacctatttcttgggatataaataaactaatgatcacataaatcgctacaatatatcattaattataagaacactaataactttgggatccataatgccttataacatgatttaatgtacccataaccatatatatattacatcattatttatgataataaaaatataattgaataactaactataattgacacttgggatacaattata

SEQ ID NO: 129729 - DNA, 264 bp, Glycine max
tacgtgagctcagttggaggtggacaacaggggatggtgggtttatgcgcgctttgtggatgtggaaaacttgttgtgcaccatcacccgaccgccacctagtaccacatgtgatgggtaccccataatcctatatgcttgagatgaggaagtgttgaagggtgaaacttcctgcttttattgttgaccacagagtggtacctggagatatgtcgcgggggtcacgagaccttggggacgtcaggtggggtgctattgcccaaa

SEQ ID NO: 129730 - DNA, 456 bp, Glycine max
ggtagaatggctagacatgatacatgtcggggtttggtttttctcattgataaaaggggtgccccacattatttccatgacacaaatgcaaaaatgatgatttggaaactttatgcaaaactggtcatgcatgcacctatgcggacactcaagtgtcaaatttttatggtcatgtgatgctagggctcatgattcatttcctctattttaatcaacccaatgtttccaaaatatgttcttttatcaatttgtgcattcatccgagtccatttcgggcgtccggtgaaatttcacagcattcacccttcatgtgtagacacattgtccaaaaattggttatgatcaatgaactttgtcaaagaaaagttggaaatcgtctcttttcaaaagcatgctgttttttagctagacaacctaattttttcttttttctacctttttccttacttgcccttc

SEQ ID NO: 129731 - DNA, 421 bp, Glycine max
  unsure (1)..(421): unsure at all n locations
agcaccgaggctgcagctgatgcaccaagactacgtattttctgttccttcgtaaccgtggccgacaagccgcgtgacacgcggagatttacgtcatcttccgcgctcacatgatctgtgatactcacaattgagtcacgttgacgggcggaaatacccgagtggttatccgtataagcattctttnttgttgtctctaagacgaaaagcctgatagcaggcagagactaacatcgtcttctgcgcccttcgtcaatcgcggccgacaagcccgttgacacgcggagatttacgtcatcttccgcgctcacaagatctgtcatactcacattngagtcacgctgatgagcggaaatacccgagtggttatccgtattaacattcttttttgctgtctgtaagactaaaagccttatagcac

SEQ ID NO: 129732 - DNA, 480 bp, Glycine max
  unsure (1)..(480): unsure at all n locations
tctcttttccaccacatgccatcctcaaaccgatggccattctgttttagtaaacagaacattgtcttctcttcttagagttgtgattaaaaataatataaagagttgagaagaatgtctgcttcatgttgactctgcatacactaaggatgtacacaggactacacaacactctccattcgaagtagtgtatgattntaatcccttgactcctcttgatttgttaccattgcctaacattactaattttaagcataaggatgcacaagctaaagttgagtatgtggaaagattgcatgagcaagtgaaggctcaaattgcaaagaagaatgaaagctatgccaagcataccatcatgagcatgaagaaagtgatacttgaaccaagtgattgggtttgggtacacatgaggaaggagaggttccctaaacaaaggaagtccaaacttcaacctagatgaaatagacatttccaaatact

SEQ ID NO: 129733 - DNA, 375 bp, Glycine max
  unsure (1)..(375): unsure at all n locations
ggatctctaagtcacctgcggctgcagctgttaaattcaacagggcaagtctatcttattggttgccatagagaaagagagagagagagagaaggcgagagagttaatagtagggtcatccagtcctacacctcctggatgacgcattcttcgagattagtgggaggttctagcgtgcccatctccttggaattntctgccactggcaatgtttctctgatgtggcggcaccattgtcaacctgagggaaaaaaattagagcaaatcagcgatgccaattgagcgagaaatagggtttctgtgaagaaatagaanaggaaaaagaaaaaaccttttggcgcttaaggggaggagggataagaatgaatgagaatg

SEQ ID NO: 129734 - DNA, 435 bp, Glycine max
  unsure (1)..(435): unsure at all n locations
tgagatatgcccgtcctcccttctccaccgcctatctttatctctgtctctaccaacatcctcaagaacctctcccttttcgaaaccatcataacctaagatggatttatgatttggggttgtgatatgtgatttgggggttcttgattcgtgatttggctttgtgatgtgtgattttgggggttcttgatttgggattgtcatttgtgatttgtgggttttgacttgttatgagttctaaatattctttggattttggatgttctttgttcttgtatttctagaatggaaatgtttagaaaaaaaattatatttagtgacaatttttagccaccaatatttttatattattaacaacattaaatntaccttaatggaaggactaatttgaaccttttaattaagataaattatcaaagtgaacattttataaga

SEQ ID NO: 129735 - DNA, 349 bp, Glycine max
  unsure (1)..(349): unsure at all n locations
agcttgtaatcgattacacacagaccgttttcgaatctcttagagnnnaacagaaaacaatctcaacagtcacatctattttgggtggtatctctgaaaggctatcatacgcctatatatatgtgacttgaaacatgaatttcataagagtttttcaaaaacaaaaggtcttatcctcttataaagcaaaaacgtttatctcttacaatccttgccaattactggatcaatatgaatattgatgctcaattgtcattatcttttcaaaagatctcttttctctcatcgaaagataaagacaggttttgtgaaaatttaccaagaggtgtcttggtaaactcaagattca

SEQ ID NO: 129736 - DNA, 489 bp, Glycine max
  unsure (1)..(489): unsure at all n locations
tactaagcttcccatatcttcaagcatcatatcaatacaatgagctgttctgttagtccaataaatatgtgtccttttctcctccaacaacttacccgctaaaacatatttgctcccattatcggttacaacttgaacaacattctcttctccaacttcctccacaatggcatcaagcaactcaaaaagcttttcacctgtttttacaaaatcagagccatcaacagacttcaaaaacatggtaccagcttgagagttaataaaaaaattaatgatgcatctttgtttccgatcagtccatgcatcggacataatagtacaaccatacttgacccattgctccctatggcctttcatcaaattntcagtatattcaacttccttcttcaagagtggaactctgatgtcatgatagctatgaatgggcaaatgtggcccatattgaccaatggctgcaaccatgttctcatagcttttcaatctaatgag

SEQ ID NO: 129737 - DNA, 291 bp, Glycine max
cggttcgatggcgtcccgattatgacttatgacacatgggaagaaagaaaatccatagaaaatagaaagattttgtttttttttttatgttcaacaaatatttgaaaataaaacaaacactaaaaggattaaaataaaaaaataaaattacaaaacgaaaataaaaaacacaaaattacatagacaaaaaagaagtatttaagtcttaaaatataatttgttttgaaagatgacaaatatataaaaaattgtgatactattaaaacagtgtgacataatcagtagataatc

SEQ ID NO: 129738 - DNA, 403 bp, Glycine max
  unsure (1)..(403): unsure at all n locations
tctnttcgaattcgcatgatccagcaaaaggtgcatcaatgttttatattccaattaaggagttattatcagaagaaaacccagcaatctatatggacactaccatatgagagatcatggcacaccattttgctaatgggcttgatgggaactctgccttgcagcctttcatgttgtgaaatgaacagattaagacctagaaaataacgatgctctcctgattctcatggaggtgcttgtaatgtgttatttctgatgccttttattttcttaattttcttcttcacacaacaagcttcatattaagaaaccttctgggcagacatatgctcatctgtctcatcctatgcttcttatcttgtgttgtaacgaataatttcgtgccattcaagaaaaatatgta

SEQ ID NO: 129739 - DNA, 379 bp, Glycine max
  unsure (1)..(379): unsure at all n locations
atcctctaagcaccgcaggctgcagctagaacaaatacctgttcttatttaattgtctnnggactnggcggccatgatcaacaaagtacttntgacacctactatatgttgatttgaccaacgttgttatcagtatgttgcgacaatccttcaaaaccttatttatacattctgagaggttggttgtcatgtggccatatcaacgtccttctctatcataagtcatcgtccatttttcctttgaaatgcgatcaatccatgttgctatggctggactcagttgacaaaatttttctaaattttgatcaaaaatgtgcttgcaaagagtgtagcctgcataaaattagttagcaacaacaatattaagtatgtatgaaac

SEQ ID NO: 129740 - DNA, 485 bp, Glycine max
  unsure (1)..(485): unsure at all n locations
ggatcaanacaattatctaatcattccagtccactctaattattcagtttctcattcaattcattcgcaaacactcatttcatacaaaacaatccactgcatatcattttcaatcagttcattattcaaacaagctttttatacaagcaatcaactcaaagtactgaaatgtttaaagactggaattaaaacaactaaaatataaagcaagctaaaaagcaactaaataaccggtaaactaaaatgttcatgctttgcataaattaaactaaacacaatttatacaattgaacaaaatttaaacatcctgctcatctcatggctgatcttcattaagatccagtgctggagctgctaatgaatcctgaataggctactctggctccatgactggtgaacatggcaaggtctccttatgaacacgtgcangagatggctctggtatctgatctgtaaaagtctcctcttgagccatgtgtacatct

SEQ ID NO: 129741 - DNA, 390 bp, Glycine max
  unsure (1)..(390): unsure at all n locations
agctntaatatcattatgtttgttcaccatttctagngncgatcactagcacaatgatcctgacaacattgaactttaataatctcacatttgatacacacacacacaaaaggaatcataataaaattcatatcatcatttatcaaagctagtgtaagatgtcatcaatacatcattntccaaaattcaaaataaggatccaacaacatgaaaaaagaaataacatgaatctaaagctcccacgaaccanaaataacaaaagaactcacaaagcccaagttttaacttgtcgtttaaaacaacaagcctaagtcccttggtaacaaataaccaacatttaattgtgtcacatgatcaccactataaaccatcttcacaagactatacagc

SEQ ID NO: 129742 - DNA, 467 bp, Glycine max
tgtcaacatatcggagatctcaccaccaaaattattatgtgttatatctaagtaagtgagatgttgaagaattgatagtgatgatggaatctcaccactaaatttattcccaccaaggtccaagggttatagttgcatgagattagataaacatagagaaataggtccttcgaagtcagatgattcaaaatccaaatagttaagggggtatttggtttggttgttttctgtttttattttcaccggaaatagaaaatggtgatggaaatgtgtttggttggatttctattttcattttcagtgaaaatatattcccaaatgaaccaaaaactggaaacaataaaatcttgtttttagttgatgtcaggaacctcattttgggtaaaatgaatatgcggtggcaaggatgtaattttaagcaaatctaaaaatacatttccttttgaaaacgcattttcaagtgtttt

SEQ ID NO: 129743 - DNA, 397 bp, Glycine max
  unsure (1)..(397): unsure at all n locations
ttaagtcacctgcggcatgcaagctntctcccaagtcctaaatgacatnttaatctagtattaactcactttaacctccatntaccacagaattcagacttaaccttccaactctcaaagcctcactctttttccactcataacaccacattctcactttccaaccctaggttaactctacctttcatctctaacagttttccatgagcaatttcaacatacaaacatcacaaacatcatcacaaaaaccctaaaacagaatgggtatgtctaactcatccaaacatggcaatttcaacaagctttcaacaagtttcttcacaaataattatcatgaagcagaaaactagcaagactacccatcatatctnccaaaaccccatacccacgaaattta

SEQ ID NO: 129744 - DNA, 460 bp, Glycine max
  unsure (1)..(460): unsure at all n locations
ngcttctatgtccttttcattgcttaaattgttgaatatttcttgaaaaattgtcttgttaaaaatccattgctttagctttcaattcattnttttgtctttggttattgcttgtctctttgtttccttgtttgtgagttgccatataaggaattggaaaggacgattggtgccatcccttgaagaatttgagtcaagaagcaaggtgccaaccaccttatgagctattggactaagaagcactccaaattgagtgaatcaccaaagagagaacaaccactaatattgaggacgttttngtaatttttaatttgcaatttacttaccttcattgctttcaagttttgtaacaaaaaggcctttcattggaagtgtgttgggagcctccaataggttaccaaacttccatttngtgtgtaataatttanggcaattttccttaggatagtgagtggtttgt

SEQ ID NO: 129745 - DNA, 263 bp, Glycine max
gattaatttattacgagcgaatgatgattaattcccacctgatctggtcatattatgccagattacgaactgattgtaaaacgacctgcccattcaatttgtgacatatatgtacatatatacatatataacatctctatatatagatccgcaagcaatacatcattctttggaatagagaaataccgcaccgagctttacacatcttacaaagaggaactgttatgcatctgccatgttatgaggcccgatgcagcatacgc

SEQ ID NO: 129746 - DNA, 404 bp, Glycine max
  unsure (1)..(404): unsure at all n locations
ctatggctacatagggttcattattcattacanagacggtggcagtggtggatactgacttagtgctgactgatctcataccacatgagatataatgatacgccatggttgaaatgaaccacgaggaaacaatgattttgaacatggaaaaggcatgatggtgatgggtgaaggtgtgttataactcaacaaagagagcattgtctttttgtctgattgtggaatatcttttgtttntgtaaatttctagcttgttactgcacatgatgtttggtagactaagctttattacacactgtgttacatcttcaagtgtagacatatcaacgacttacattctactacacttatcatgatgacaattcactcaactgtctcgttggtgaatactctccatagatcat

SEQ ID NO: 129747 - DNA, 490 bp, Glycine max
  unsure (1)..(490): unsure at all n locations
cgacccggatcttaagtcacctgaggctgaagcttggttttttatgtgttnttgatatttgtacgcgcagattatgattatgacattcatatagtttttaagtatagtatcttaaaagaaaagtggcaagaaagtagagctcatttcacctttgcctaaacctccagaggagtaaaaagaagaagaaataaccgcagcaagaggagaaaaaggaggaggtaaaccacaacatttaacatcggtgcttacgtcaccaacgatgttaaacaacaacatttaacatcggtgcttacgtcaccaacgatgttaaaatacattntttacatcgttcacgaatacaacaccaacttagaaagtattatttctacatcggtggtcaggataacaccgatgttgaaaacattgtattcctacaacggtcgattgagcaacgatgttcaaacttttaactttcaacaacattatattcaaaaaacggtcccaaaatgat

SEQ ID NO: 129748 - DNA, 429 bp, Glycine max
  unsure (1)..(429): unsure at all n locations
ctttgagcttctctcatctcaggtgggactattgtctgatgagcagtatntgggatactttatgagtggattgaagcaaccaatccgacgcatggtgagaactcttaatccacagaatcggatgcagatgatgaggatggcgaaagatgtggaggaagagctgaaggaagaagatgatgatggggatcgggcctatggcaagaaattactatggcgcagtgaacccagtgggcttggatctaagttccgaagcgggtttatacccggcccataaggaaatgtccagatctacgatttcatgttgggccaacccgagtagaaaaacgggttctgttggttctaattccaaatcgacctcgtctttgagttcgacaggcaagaatggtgaatactaccgccgatctggaggatccgagaagtggataggag

SEQ ID NO: 129749 - DNA, 288 bp, Glycine max
cacctctcaatgagctggtgaagaagaatatggcatctatctgggtgaaaaacaaaacaagcctttgcttttctcaaagaaaagcttactaaggcacttgttctagctcttcttgatttttctaaaacttttgagctagaatgtgatgcctctagagtgagagttggagctgtattgttacaaggtggacaccctattgcttattttagtgaaaaactttatagtgccacccccaactaccccacctatgataaagagctttatgccttaattaagagccctccaaac

SEQ ID NO: 129750 - DNA, 397 bp, Glycine max
tcttatccaatgctcatcttggtggagatgtcttcttttccatggcttattccctagtggatggcgcctcctctcacctcttctcctttgtcttccgctgcatctccatggtggaaaatcaccattaaaggacctcattgaagctcaaagatccagcctccatagaagctccacaagcaagcttgcatcaccaatgctaaagaacaccccctaaattgatcatttcacccccattttgagttttttggctcatttccttctaaaacatcgcataaccttacgaattgcgcgacaatgagtgttaagcaacttaactcggtttgcaagaatctaaatgtttgcgaatgatcgtccccgagcgaaattatggtatgacatgtgcccctctttacttatc

SEQ ID NO: 129751 - DNA, 290 bp, Glycine max
gttgttctaagcacttgagatttaacagaaacactcggtaagttgccaactaaactgtctattggtcaacctacacattcttctgttttgcaggttacaggttgtaccatctgtggtgaggctcatgaaacaggcctatgtattctcattgaagaaaacactcaagaagttcactatatgggaaatcaatagagacaaggatatactcaaggaggattttcaggcttctgcagagtccttataaccaacaaggacagtggagatcacaccctggcaatcaattcaataaa

SEQ ID NO: 129752 - DNA, 481 bp, Glycine max
  unsure (1)..(481): unsure at all n locations
tagctgaaggcgtgtaacccaccattttccataatagaacactgttttatgtctactatcattggtcttatttctttcttcgtcattgagggaaacccttgggctgccaggtccctccacctttgggcgtactctttgaaagatccgtgccccctttttgcacatgttctgtagttgcatcctatccgaagccattatactgacactgcctaacgaaggcaaccattatgtccttccaagaatgggctcgggaaggttccaagttagtgtactagctacccgagtaagactttcttggaaggaatgtatcagcaattcctcatcttttgcgtatgcccccatcttccgacaatacatctttagatggttcttgtggcaagtagtccccttgtacttgtcaaagtccagcaccttgaactngggaggggtgatgatattgngtaccaggaacaactcttctatgttatcaaaggcatgatct

SEQ ID NO: 129753 - DNA, 455 bp, Glycine max
  unsure (1)..(455): unsure at all n locations
agctngttctttgattttccttagttctttttcaagctttgaacaatatacttggccttcatttaactgtctttgcgcttggcggccacgctcaacaaagtattttcgacacctactgtacgttgatttgaccaatgctgttatgggaatgtttcgacaatccttcaaaaccttattgatacattctgaaaggttggttgtcatgtggccatatcgacgtccttctctatcataagccatcgtccatttttcctttgaaattcgatcaacccatgtggctatggctggactcagttcacgaaatttttgtaaattctgatcaaaaatgtgcttgcaaggagtgtaggctgcataaaaatagttatgaataacaattntaagtatataggaaacttaaataaacgtcaccatcaaatangaaatcttacccaatttttcaacatttctttttgttg

SEQ ID NO: 129754 - DNA, 483 bp, Glycine max
  unsure (1)..(483): unsure at all n locations
atactaactgaaagtagcaaatatggaaatgtagtcctggtgttctattgaatggtttctaaacttgtctttttttaccaagttggaatgcaatgattataacaagatgcatgtaagtcaaatcaaaatgcgggggacatggtttcttaacttgtttttttttttatcaagtttgattgtgtgggttagatcgagatgccaataggtcaaaccagaatgttaagtagtacagtttccaacttgtcctttttaatcatgttggaatatgagggtcaaatcgagaggccattatgtcaaatcaaaacgtcaggtaggatggtttcttcacttgtgtttttgggtcaacactactagaaaatatcatttcttgttgttgtagctactgccactgtcatgctcgtcatagttgtggtggtcgtcattgtcatctactgttgccattggtcatcactgcatgtgtntgtgctcgtcactatcgtctat

SEQ ID NO: 129755 - DNA, 343 bp, Glycine max
tccatgagaggttggatcaaatggagaatagagatcataatgaagaagaaaggaggagaagagggaatgatggtgttcctagacaaaaccgaattgatggtattaaactcaacattcctccatttaaaggaaagaatgatccggaggcctacttggagtgggagatgaaaatagagcatgttttctcatgcaacaactatgaggaggaccaaaaggtgaagcttgccgccacggagttttccgactatgctcttgtgtggtggaacaagctacaaaaggagagagcaagaaatgaagagcctatgtgtgatacatggacggagatgaaaaaatcatgatgaag

SEQ ID NO: 129756 - DNA, 477 bp, Glycine max
  unsure (1)..(477): unsure at all n locations
gtgcttcacatacaataagtattacatacacgaatcttggttcttcccgaatttacaaaaaatgaatttgttgcctatgaaaaataaccaaataacagtattttatcccttgacgttaccgaacattttaatccctgaaattacaaaaataagacctataatgtttatttcaatcctgaaactaaaaaataagacctataacaaccaatttatataattttactgtttaaaggactataaagatatttttgtaactgattaaacttaaacatgtgctggtaagttgaatgactatgttggagatcttacattgactactaacatgacccaaatagtgtatataagtaggggcaacttcaccacaatagctaattgttggaaatgagttagacccaaatccaaattctaacagagcatatgcttatcatgccacccaaccaagtagtgattngtctaaactaatatatactatgtaca

SEQ ID NO: 129757 - DNA, 292 bp, Glycine max
taacttaatgccattaacctagggaataaaaaaacttaatggctgagtgtaactgaaattggggcaaccaaaagtcacccccaacagccaacaagtcagccaccatttggtctcccaaaaggctgatgcctaggttgtcaattgggcccttattacaacttgaactaaacctaactaaagcccttttagttgattaacccaaaacatatttttggtcagccaactttacaaggattgggccattatttaaacaaactaaacactctaaaattgagacaaagtggtgtcattt

SEQ ID NO: 129758 - DNA, 472 bp, Glycine max
  unsure (1)..(472): unsure at all n locations
ntaactcggatgtccgattcaggcgcataatatatcgagtctctctatattgaataacagaaactctcgagaaattctaatggacataacttttcacacggatgtccgattcgggcgcataatatgtcgagacgctcgatattgaacaacggaagctctcgagaaattccaatggtcataacttttcactcggaggaccgattcatgcgcataatatatcgagacgctccacattgaaaaacggaagctcccgagaaattcaaatggtcataactgttaactcagaggtccgattcatgcgcattatatatcgagacgctcgaaattgaacatctgaagctctctagaaattcaaatggtcataactgttcacttggaggtccgattcatgcgcataatatatcgagacgctcgatattgacaacagaagctctcgagatatacaatggcataacttttatatcgatgcccg

SEQ ID NO: 129759 - DNA, 345 bp, Glycine max
gcacatgatgaaaatatgggaaaagacccaatacaagaactcccaaccaaaattctctcagaaatgaaatggaaccatagtaccttccaaagaaagttaagaaaagaaagagggcggagaaacaaatttccaagaactcaatttaatagcagaaacccaaaatttaacatccacagccatgctaatgaaaccatatttgctcttgatcaactaccttgccactaggccaatatttatgaacactattcctaaagcctaatcctccgcctatcatatgcttatgcattacacacacaacccaactaattaaataatgccttctactatcctacatagcacagtcaa

SEQ ID NO: 129760 - DNA, 470 bp, Glycine max
  unsure (1)..(470): unsure at all n locations
tactaagctttanagctgtgggatcttcattacctgaatttgatgtttctgtgttacatgatangaacaagaccttaaggaattccgacaatggggaagcagatctcctggacatcctgagaactttgagacccttggagttgaagtgaccacaggttagatgtttcattggtttatgttactgttatcatggtgagcctctttgctgtgttctgatgcttatcctcacgttttgtttatgtcctcttggtcagggcattgccaatgctgttggattatcactagctgataagcacttggctgcacgatttatcaatcctgacaatgagattgttgaccattacacgtaggataattgcatcttngtttgttctcattctctctacattgtgatctacgtctggcaattcctggtgttatacccatgagaattggtttttctttgtntaactctgtgatatgtatattgg

SEQ ID NO: 129761 - DNA, 340 bp, Glycine max
  unsure (1)..(340): unsure at all n locations
tataggcccaggaactgtgtttagcatcccattctgttgctgtgccactccagttaatcgcttcaaataaagtctaaatttctgcaaattaatattacaattcacaattgcaatataaataggtacaaaagataagtccatttatctacatctattgccttagttagaaaaaagataaaatatttacatattaaccgacaatgttactcacccaattatggaattattttctagttagtaaatgatgactgtggtcttaaactcttaattctgaaaccagtnaacttacatagaatgaaatctatcactgaaaaaaggctactattcatttctacttata

SEQ ID NO: 129762 - DNA, 458 bp, Glycine max
  unsure (1)..(458): unsure at all n locations
ngccgcccagctcgcccatgcgagcaatgttgctttctctctattcaacagccttctggaggaatcttctggagggcccaagtgggcctggttgctatttacacccccctttttactaaatgacccctcttttctatttttttgtaattctttttccgtaatgttacgaaactttacgaatttcgtaacgatacttattttccttccgcaaggttacgaatacttacggattatgtatttactcttttttagctttcgaagaagttacggaaacttacggattgcgcaacaacacctcttttcgacttccgccacattacagaatttcacggatcgtgcaagcctacttcctttagaatatgagacatctcgggacttcatttattgtgcaacatatgacgccaagtatctcaaagcggctgaccaaagattgcatgtcatcaagtaataatccccgg

SEQ ID NO: 129763 - DNA, 374 bp, Glycine max
  unsure (1)..(374): unsure at all n locations
gcactnncaggcccggagtgtgggaaattcattgtcaagttgggaattattaacatctattcgccaacttgaggggtatcacaattaagcaattgcagttagttacaataaggtatttgagtagttagttgattatggcagttagttagttactagaagttatttgagtagttaagtagttatggcagttagttagttgctagaagttatttgagtaagttagttagttactcaagttagttattttttgtctttgtataaataagccaactttgtgatactttgataaattaaatctaaaactgtntttcatctatctttcatttctgatacaaccataatgcactacatcgttcctgcaggaacacaatcac

SEQ ID NO: 129764 - DNA, 477 bp, Glycine max
taggaatcttgaagaaggatagcaaataaatgggttatgctgttatgactgaattaatgagggttattctaccccccattgatagatttctttgcttccattttgtaagtttagcctcgcatttgctaataatgggctgccacacagacctatttttatagctgacccctacatgaattccaaggtaagacaatggaatatccatttgactacaattgagagaagatgctgcctccctacaccagtcctctgatttgcccaaacacccaaattttctcttattgtagtttatcttaagaccagagaccaattcaaagcttttcaggatacactctataattgtccccgtatcttctccatatgcaatggccaccttcacgattgaaatcaaataaagaatggttggtggtgctttctcttgtgtccagcaatttctttggaagaaacatgaaaatttagaatttaaaatatataata

SEQ ID NO: 129765 - DNA, 400 bp, Glycine max
  unsure (1)..(400): unsure at all n locations
ggatccttagcacctgaggctgcagcttgaagggcgtaccttcnctcttttatattagnagatcgatgacgggtctaccatcactattatcgactcccttgccatcattgagggtaccacctgggccgccagatccctccaccttttaagcgtgttctttgaaagatctgtccccctttatgcacatgttatgtagttgcatcctatccgaaaccatatcaaaattgtactgatactgcctaacaaatgctaccattacgtccttccaagaatggactcgggaaggttccaagttagtgtaccatgtaacagctaccccagtaagactttcttggaaggaatgtattancaattcctcatcntttgcgtattccccatcttctgacaatacatctttata

SEQ ID NO: 129766 - DNA, 476 bp, Glycine max
ctgtagtgaggtttggctacaaaaattcattgggttttcttttattcaaaggattagattctaagagagcacaactcctaaacttatccaagtggtcattttaatacaattagcttgctcactagcttttcacttccatttgcttttgaccttattacatcagcacacattttctttgattgtttttttaacacaatttatttatcgtgtgtgtgcttatgcttttacctctttctttacatcccaattaactccactcccccaaatttggggtaaatttgccttgaaccatatgctctcctaaattctaaacaaggtatctggagataatcatttatgttcagggtttaattattgacaaatcattcaactcataaagagtgcaaagggtacagttatcattaaaggtaagacttttggtcaaaaggcttgtgtatgcacaatcatggcctccatcatgtcctcatttatacatt

SEQ ID NO: 129767 - DNA, 346 bp, Glycine max
atcctctaagcacctgcagctgcaactgatccgaggacttttgccatttctattaaaactacaacttagatggagatgtttgtttagtggaaactaaaagggataccattggagaaataaaggttaataagcaatctatcattaacttttgatcatcctacattggggaatgacttagcatttgaagcctttatacgtgaaagcccagatatatggtaaaaaattgtccatagtatatgtaaatgggggacccattttgaatatgatgtcattgaccatgttgaagaagttaggtaaaaggcgtgaggagttaattcctacaaatataaaaatgaccaattctatg

SEQ ID NO: 129768 - DNA, 450 bp, Glycine max
taatgttgtaaccaactcttgctgtaagaagttgtgtgttcttcctccatcaatgagaatctgaacacggtggtttccaatgatgcccgtgactcgcaaggtttctggggctccgtgaccagaaagcgtatgaagacttatctgagctggtgatgtctcctatggagctacaagagctgttggagacaactggttggaatcagaatcctgcaggcactcctcatcctctgttacaaacaggaacaatgacggtgtgcacttatggcctcgtgagtatttttcttcacaatttaaacataatagcttctcccttcgaataactaattctgtggaaatgcgtctaaagggaatggtggttgtggcaggtttagctgatgaaggagttaagagcggctcaactggtttagtgataactgaaggtgatgatcgtgaaggaagactgtacgacag

SEQ ID NO: 129769 - DNA, 349 bp, Glycine max
  unsure (1)..(349): unsure at all n locations
acctagaataaaagaacttaataccattaacctagggaattaaaataacttaatggctgagtgtaactgaaattatggcaaccaaaagtcacccccaacagccatcaagtcagccaccatttggtctcccaaaaagctgatgcctatgttgccaattaagcccttattacaagttgaactcaacctaactaaagcccttttagttgattaaccaaaaacatatttttggtcagccaactttaaaggattgggccattatttagacaaactaaacactctaaaattgagacanagtggtgacatttaatcctcctccatttgcaccatgatgacaactacaaccctggac

SEQ ID NO: 129770 - DNA, 469 bp, Glycine max
tcatcagatgctgcatttctgtatcagctctctcttattgtataaagatatgcacttcttgcattgtaaatttgctttatcgtggtgcaactgtcggcattgtgttccttcaacgttatcaagatgttattcactttcaccatcgactttgtcatatcagcaataattttcttttcttccttagtcaatcgcccaacgtatggatgtccaactaaggacttcgccaattcatgattgtgaatcccacagatcaacttcaccatccaaccttcccctccatgcactggttttccacgaatcctgaatggacaaccacatttcctactcccgggttgtttgtgtaacgaattctttatttcaacacttgtacgtaccactcctttcacacccaattaagacaaatgaacttcttcctctgctaccgattctgtgtcatacctcataatcactgcaacaaatccattttcat

SEQ ID NO: 129771 - DNA, 424 bp, Glycine max
tctttatgaagatttcttaatttgcttctctggttgcttatttttgatgcatcgagcagcttttgcagaaatcttgcacattttggattcaaacagaaagtctgaggctgttaagttcgttgaagattcaacaaataacatagtgcccatgtaatgctgtacaacattttaagcatgctgggtttggagaaagaaagatttattattggcacagtgagaagatgggaaagaatattaaatgtcatggacgagccaccctcctgctcaaatattgtgagagggtgacattaaacattctagtcttttgtggatgaagatgaattggtctcttcgtaagtgctaaatggtgtttctgttaaatacagcaccttggtttgtttctaattataatttataagaggtggttgaatgtcttttatttatt

SEQ ID NO: 129772 - DNA, 389 bp, Glycine max
  unsure (1)..(389): unsure at all n locations
tcacattagnagtagtcctaaccaataatagtgtaacatgtagaccaagtaagatgttcactaacagttagtatgtaagatagcacttgcataaacaaaaatctaaaatttaaaaatcaaattaatcaattcaacctttgacattcattttgacatgcttgttggaatgaagtgagaccttgttgttatactccacatgattgggaagatctccttgagnttgaaaggtgaaatgacatctatttctcaaattccanaaccatagtgggatacttcgtaacatatgggtaatgctttgggagactcatgttgaagcgtgatcatgaattttcccaatcatgtcttggtaatacaaggctgttcttttagcgggagaatttatcatggta

SEQ ID NO: 129773 - DNA, 463 bp, Glycine max
gttcctaccaccagtctctagaaaaagaaattttttctttcttcacacctgatttcttaaactctcctatactccttaattgtgctaattgtcacgtcataataaggactaataaacagtgcgaatatgagagatgctcttttaaaatagaatgtaatgtaaaaaatatatcagaattagtttttatagcagctaaactatctgaagagctagtatactctctttagagaatttataatagaatgatgaagtcctccgttctctcggctatataatgatatatacacataatatcatatacattttttctattaataaaacataataaatgcagatttcatatgtgcattacatactttgcatttttctcaaataaaaagtataaaacctttgctaccaatgtcttaaagcattgattgtgaactaaaagaaacaatattattatgaaatcatatgaaacata

SEQ ID NO: 129774 - DNA, 397 bp, Glycine max
  unsure (1)..(397): unsure at all n locations
agctnttcagcgtacgaataagtttatntttatttnttttcacaagngaattatggtttcttcatcaaaatgggtaaaaaacaagaataattatcacgatggattgatccagaaaatatttattaaaatgagtgatttttatcacatagaaatacatgaaaagtcatcctagattttgtgttttatgtttgtcttacaggaggaggcacctccataacacgtacactacattgtgtaatactggtttgcataaaaatatttcactcaacgcaaaacctgttattaatattttttattgcaattgaatttctgcttttaatattactgaaattatactcttataatatttacatgctattttttaacagtgcatcactataggattaattttatgata

SEQ ID NO: 129775 - DNA, 439 bp, Glycine max
accacgaattgaccaatcatgtcttttgtcccgcttcagctttctccctcttttccgaatcataaccccccaaaaagtactaagaaaaaataaaataaaaaacagagaaacttaaaccaaagattcaattcaaatcccgtcctcttcatttcagatctcataaagaacacgaaacagtgtaaaacacgcgctctctctttctcttgaactttcttcttccttttcgttttctcactctcttgttcttcattcacccccacacattattcttatggtttccaacattttctccatttccctttattttttcatttttataattttcgaattcggtgtttgaattgagaagacggtttagacgattccgatgtcggcttccacggtgtccatcacggcggcgaacccggtgactcgtctgagaccggtgatcgccactgag

SEQ ID NO: 129776 - DNA, 256 bp, Glycine max
  unsure (1)..(256): unsure at all n locations
agctatttctgtttttgtcaaagatggtagatactctaacacagtttatccaggtatctatcacacaacanaatatcactgatgcttctattaaaaatctagaagttcaagttggacaactagctaaacaactatctgaacatggaagtagatctttcttagcaaccacataggtcaacccaaaggaacattgtaatttaattacaacaatatgggggatagtggttggatgaataaagaagagttggaaagaaac

SEQ ID NO: 129777 - DNA, 428 bp, Glycine max
  unsure (1)..(428): unsure at all n locations
tctgttatcgattacacaagtcttgtaatcgattactttattagattntcaaaaaataatttccaagagtcacatctgttcaaatggtttttgaatggccatcaaatgtctatttgtatgtgacttggaacacaaatctgcttagattttttcagaacaaaaaggtcttatcctctcaaaagcaaaattatcttatcctcttaaaaattccttggacaatacacttgcgattcaataaggaattattttgagttctccattgttcaatctatctctttcaagagagatttcttcttctcttcatcttatttctaaaaagggattaagagatcgaggatctcttattgtaaagcaatctgaacacaaatgaatggttgcccttgtgtggtttataacttgttaagggcttttgcaagaatgtggaactc

SEQ ID NO: 129778 - DNA, 324 bp, Glycine max
agcttcttatccaatgcacattcttggtggtgaagctccttcttccatggcttattccctagtggatggtgcctcccctctcctcttctcctgtgccttccactgcttctccatggtggataatcaccattaaaggacctcattgaagctcaaagatccagcctccacagaagctccacaagcaagcttccatcaggattggtgtcctggctctgctggtgctggatgtactgatagaagctcttggtcagctacacctgtcccctgtgattagctgcttgttggctggtcacatgctgcatgtacctgtgcaattggaactct

SEQ ID NO: 129779 - DNA, 408 bp, Glycine max
  unsure (1)..(408): unsure at all n locations
ngcccgcttatagccatcgttcatgcacagataattgatgtgacatatngtgaccgactcttatcatacaaataaagagcgtctgtcaactggttccctcgatggaaagaaggaagaaccggggttcttatttcatgcaaaggatttccgaatgttcccttgatggggacaatgggttgcatcatttacaatcctgttcttgctataatgcaacttggctaccctatgatatgggcaccgctagaggaagagctcgcgcctatcatttcacgatgtttcaataataccaacgtggagacacttcataatgtccgcatggcatgggaggtggtgcaaaagaatgacaaagaactcattggcagttacaatgggcccatctgtggctaccgaatgtggttgaaatcccac

SEQ ID NO: 129780 - DNA, 350 bp, Glycine max
  unsure (1)..(350): unsure at all n locations
agcttcatcattcaattntcagcgtctcgatatattacgggactcaatcagacatgagagtaaaaagttattgtcgtttgaatntgcaacgaccatcaacattcaatttttagcgtgttgatatattacgcgactcaatcagacatccgagtaaaaagttattgtgatttgaattggctgagagcttcaacattcaatttcgagtgtttcgatatattctgggactcaatcggacatccaagtaaatagttattgttgtttgaatttgcttagagctttggtattcaaatttgaacgtctcgatatattacgggactcaatcatacattcgaggttaaagttattggcgt

SEQ ID NO: 129781 - DNA, 402 bp, Glycine max
ttgagaaaattctaacaacaataactgtgtactcggatgtctgattgactcatgcaaaatttcgggacgctcgaaattgaatactgaagctctgagcatattcaaacgacaataactttgtactcggatgtgtgattgagtcccataatatatcgacaagctcgaaatagaatcttgatgctctgagcaacttcaaacgacaattaacttgtactcggatgtctgattgagtcccgtaatatatcgagacgctcgaaattgaatacggaagctctgagcaaattcaaacgacaataactttttactcggatgtgtgaatgagtcccataatatatcgacacgctcgaaatagaatgttgatgctctgagcaaattcaaacgacaataactttttactcggat

SEQ ID NO: 129782 - DNA, 459 bp, Glycine max
  unsure (1)..(459): unsure at all n locations
gcttaaaccacagcaacacaaaatctatgtattcaaacccctcaatttaatgtgatttcaaggtttgaaaagtgaaattgagaatgggataaattngaagcaaactctcacctcacacaaatctataacatcaatttatacttgttcaaactagatttacacctaaaatttcaccgaatcaaaatttgactcctcaacacccaattntaccctagaaatggctcttgccttcactttggtcatttgtttttctctcttgcacagtccaagctttctcataagttctaaatgaaatttcaaactaggatttactcactgtaacctccatttaccactgaatcccgttatagccttccaactctcatagcctcactctttttctactcataacactacattcttactttctaaccctatgttaactctacccattatccctagcaattttccatcagcaat

SEQ ID NO: 129783 - DNA, 409 bp, Glycine max
  unsure (1)..(409): unsure at all n locations
ctgagattgtaagaagtgaacaatatttatagatttattanttttatactcacattttaaaattggaactgaaaatgataagttcatgaaatctaacctattaatataccttaatatactctggctacaggctttatcgttaaggagaagtaataacaaggcctaagggtgaatgccaatggcaggaattaaatccttgtgccacccaaatggaaagttccttcaccacttattatattgttgtgatgccattatggtaaaatctcactattgagggctgcccactacaatttcggtaaatgtgttcctacatttttaaagagaaaaatgtatgtaatctcaatttaaaagtttattcagctatttaatattatgttgggtaggcttttttatattttgggtaaaaaat

SEQ ID NO: 129784 - DNA, 375 bp, Glycine max
tctagagcataaagtgtagtgagtatagtgaagaccaaaatctataatcttttaatgaaatataaatatgagaattaacaaaattgctgctctaccgtaaaactcaattgtagtcatttattatgcctacttacatttgatagtttctaacattgtttttctcttcaatgtttgtatatattcaaatgatattattcttaaaatatataacagtcacgacatgacaactgccgcaatgagaccatgcagagatgcaatttctgccaattcaattccagctttccgtaaaggatttctgaattgcgtttaattattatccatttcgacttcatacttagatcaaatcatattattggttcactaaatgaatttttt

SEQ ID NO: 129785 - DNA, 421 bp, Glycine max
agtgacagtagacatcgcatttatctatgctctatcaagcaaatagactctttggctatgctgattctccatgcgtcattaagcggcggacatgataatggcaagtgggttaatccataaataaaaaatgaagacgtggtattacagtttttagcgacgttttttttgaacaagtttgtgatgaactgattattctcacatattttattctcgaaaaagaattgtgaaaacctcatacttaaaaagagtacaagatattcttgaaaactaacattgctggtaatctttgaatataaaaagagaagccataaatcataaacatataatcatattcagaaagtcatcaatgaatgaactcattcataacaaaaaataaaaatcatacttccttaagatctcctatattacaaaatttttttat

SEQ ID NO: 129786 - DNA, 470 bp, Glycine max
  unsure (1)..(470): unsure at all n locations
actcagcttcatattttgttactatntgtgttcaacccaaaatgttcttttcatgttggtaactggtacaaacagagaatcgtaatacatatcaacaatcctgcaattgctacacctgtaacgcctgttagcagatacagtaggaacatcggtgagcatttgatatattttatttctataaaatgacatgcaagctggacaaaaataattatggtatttccaaagaaatttatttatttcctgactaaaaatgagaatcatgttatgcatttcttaaggttaagcttgtatttcgaagtaggtgatatatagacgttatttccaaattatattgtcttcaatggcggcaaaaaaaaaaaaaaaaacgaaaaataacaagcaccaggcttcatcaaagcttgcttatatatagaactgaggacaatgtttattccttaagatcagaagtattgaagatatgttataaatgt

SEQ ID NO: 129787 - DNA, 447 bp, Glycine max
  unsure (1)..(447): unsure at all n locations
gcttcttgnggccattccctgcgaggacacattctaaagttagttttcatgaaataccaatcatcatttcatttatctcaaacaccactaaaatccaaacaaacttgaatggcgtatatttctttccacccaatgcaagtgtcaatgtgtaattagaaaacaatcatacgttggtgcatgcactattttaggacctacatttttttaaaaagcattttaactacctagatgcaaggtgtctatcctagtgtagccagtccgaatattagtctaaaatccaaacaaacatggtcttatattcatgtaattcatgcctttttagcatccaagacaaaacttagattcctatgcctacgtcatgcttgtggcatgttattctaacaactaaaactgcccacaccttccaaatgacaaccatacatgcaccaattcattctgcaactcaaa

SEQ ID NO: 129788 - DNA, 480 bp, Glycine max
  unsure (1)..(480): unsure at all n locations
tctgggatatattntctatgccattcgtagttagttacaacttatttatatgctcaaggaaccatatctaaccgcangtggttagttgctactaaccctaactaactaatccacttctaactacccttcccgcctaaggatcatatgatcatcttttacccaagcccgttcatcctaactggtagacgtcccagtgcttaggtagctacttcactctccttgagcgtcgttgttgcatggcttcgtgttccatgttcatatcagatacattaaaggcgcttcacatccagtgggcaaactattatctcaaagttagaaatgaaacttatgatgttagacaactctgtaattntagtttacttaattagtttactagctttgctttacatttttacaatngatgtttccttntaacattgaatattctttattcatagttattaataaattctttactgataattatcaattgatttttac

SEQ ID NO: 129789 - DNA, 441 bp, Glycine max
atgtcctaaatctatgtgctgatttgttttccttgagttttttatgccaaaaatgagttctttgcatgttaaaatataaagttagcctaaaatttcatccaaatcaaagtttcttaacaaaagttacaaataaaacaagtttaaggacctttagtaaaatggaaattttgtcataaatttggactgagagttacaatagtatgtactatttttattaaagttttgaactcaaaaatgatttttttaaggtttgaaaatgtaaagtagcatataaaatttgtgaaaatctgactcctagagcaccaagagcactaaaataagtcatgagcaaaactttgaaaaccgaagacagagtgatttagacatagatagcttaactttggaatcatgcctatgttaatcaattagaatatttattttatgactgctgattatttctat

SEQ ID NO: 129790 - DNA, 494 bp, Glycine max
  unsure (1)..(494): unsure at all n locations
actaagctcgtaaagaacttagaaaaaatcaagaacaagcttgttcgcacatcgttcgcgtgtatgacatcctctccacaaggtttgaagtagaggagaccttcaatcctattacgcaacgtggcggacaaaagtgggcagttaacttgaatggtcattattgtcaatgcggaaggtattctgcgtttcactatccatgttcacatattattacagcttgtggttacgtgagcctgaactactaccaatatatagatgttgtttatacaaatgagcacatcttaaaagcttactccgcacaatggtggcctcttgggaatgaagcggctattcctccttctaatgacgcatggacacttatccctcaccctactacaattcgtgcgaaaggtatgacataatcaacaaggataatgaatgagatggattgggtcgaaccatcttgacaccgactaanatgcagtatatgtggacccgaagggcataacacgcgt

SEQ ID NO: 129791 - DNA, 412 bp, Glycine max
  unsure (1)..(412): unsure at all n locations
tgcttcantggaggaaaagaaagagggttattttatagagggcggagcacgaaattgaaggaagaaaaaggagagaagtgaactttgagttgtgtctcacaagactctcattcatcaaagttaccacaagtgttacacatgcttctagtatagacttgtagcttcttgaaagcttcttgagaaacttacttgataagcttctttagaaaacttccttgagaagctagagcttagctacacacacccctctcataactaagctcacctccttgagaagcttctttaagaagattcctaaagaagctagagcttagctacacatacctctctaatagctaagctcacctccttgagatgagaagctagagcttagctacacaccccctataatagcttagctcacctccatgac

SEQ ID NO: 129792 - DNA, 233 bp, Glycine max
atgatgcgatcctatgtatgacatctaacaaatacaaatcatggtggctactgttgtgaaacttagatgaacatgaaatactttatacgtctatactgtgatggaatgatactaagaaattgaaagggattctggagacgatgcgaactgctaatcccgtattgagagcgactcaacagtcaaggttatcttcttgcgcacctgtgcagactctgtcgtcctaaatgtatgca

SEQ ID NO: 129793 - DNA, 321 bp, Glycine max
ttaacagaaatattattttgtctcctttatcacttttaattgcataaactaatttataaaataattaatactattatgcataaataattaaataataaaataattaatattattatgcataaataattaaataattagtgaacggaattatgactaatatttataatctgttttttacgcgcatgtcaaatattaatttaaaccataaaaattaattaattcctaaacgtgattattgttgtataacaaaatgaagaacaaagaattcttattttataataataagtaaaaataaaataatatttaatgcgtatgtaatga

SEQ ID NO: 129794 - DNA, 444 bp, Glycine max
taatcccagaatgcaaaaaaactagttcttgtgagttaagaaccacaagaagatggtcatgaggggaaacatggatggatcttaccaaagacatcaaaagaatacaattcatggtagcttctgttgttataattatgttctaatgagttacttttatgttctagaatatattctttcctcctaatcaataacttcctctcctttatttcatgcttacttttaatcacctaatgagaaagacttaataagcaaaaaatcttccaaaagaaacattgaagccaccaatggcattgaaagcataaaataattaacaacctacatcctccacgagtgaagacataacccttctttcttataaactgcatgtagaataacgaaattcatcttccctttaaaccctacatccacatttttacacctagcaatctacatcacactaattac

SEQ ID NO: 129795 - DNA, 471 bp, Glycine max
  unsure (1)..(471): unsure at all n locations
cttntactcanataagtactcaaagtgtgacgtggtagttatctcaccttgcaagtgtgaatatgttgtttttctcactttattgtgataaataatttatgaatccaagattgagattatgagattcttttaattggtgtgtttaattttttgagaagttgcagaaggtttcttccaaaagaggaaaagctgcaacaaatcctacatcccaacgagaacaaagtactcctgacagtgtagttaattttaaggcatttattntgtcaactttgcctatgacacgaaatttgagaggacgggtattcccattgaccgccatctcagattattcaaaccaccatcaccaccaccatcaggtaattcttaacagcatctaatgaanagtagttaattccgttaggttagttagaatgattagttacagctgacctaacgagtcttcatgtacatatattgcagtacttaccgtat

SEQ ID NO: 129796 - DNA, 360 bp, Glycine max
  unsure (1)..(360): unsure at all n locations
gctagaagtgtgggtgattcttgtcanttttattattacccttctttgtggggtttctctgtagattgatgtccccataggtggaacccagagccatttttcttgaagaattggatccccacaaaggtaaacttgtgctcctcttgaatccctcttngcaaagtgcagtggtggcagattctttacctaagctttcattccctctctgagtagtcatggatctaaacatgcttgagcttgaatcttgttatgtaaaagacaaggttttgattgatttactcggagtgtaagtaaagtggtgagagcaaaagggttggtggggatcgtatatgagagataacttgaagtacacaacatagt

SEQ ID NO: 129797 - DNA, 380 bp, Glycine max
ctacccatcccccacattagggggtcattatgactaaaacctttatgctctcttagaaccctaaaataaggttagagatatcacaattaggctgaggggttttaattagaaaaataactactaatatttgctcaagaagggtgcaaaggataaatatcattacaagtcggctatatggctaagtggctaaaataaaaaagaaacatggtcttgatcatatccaccttatgtaaataatctaacagtctaagaatgatgcaaacatacgaataataaaatagacattctctcataattaagtacacacacgtcacccggacaagataaagtatatgcataccggaccatgataaaactccatcaagctaacactttctctc

SEQ ID NO: 129798 - DNA, 351 bp, Glycine max
agtcacctgcggcatgcaagcttataaccatgacttgcaaatttccttcctcttataccccatatttacagtagagctcaaagaatacaccagcttattgcctaacacccatgactagtcaaattgcttacacccataattacagtggaactcatagaatgaaccagcttatatcaatgccttgcaataaagtggcattcacctttaatcttgaagctacctgcaaaaaaacacaatttattaaacatacatcaaagataaactcattatcagtgtatgtaagagagatctgtgattatggttctcagttctcaccactgaaaacagtgcagaaagcccaacaccaacacc

SEQ ID NO: 129799 - DNA, 402 bp, Glycine max
atagtttggccgagacgcatgaatttctcttctttgtaaaataaaaaagcttacgacatcaactgagtgcttatgagacaacaacataagagatattcttacgcatatgcgagaatatatttgcatacatcgatcacaattatttaactatctggattctactattatagtgagtccacatacggcttaatcaacacaatggaattcatagctgacaaacagatcaaagatgagagaaatgagggctctatataacctcgtcttttaggttcattgaaatcataccaaacttaaccaatgatactgaatttctgaacaagacaattagacaaggaaagcattctttttaactcattattaacaccatatattcatcactcaacaagaaaacaaaaagtgaaa

SEQ ID NO: 129800 - DNA, 415 bp, Glycine max
gcatgccagcatgtaagttgtatataacatattattattattgtgactataaaactaaaatttgtaataatttcaaggaccaaaagcatacttaactccatgttttattatttgtatgcaagttatttaatcaggattatcagtctagtattaattccaaatcacactcatcagcttattctcttttcttcctttactaagtaaatccttgtaatttcaacaattgtttttgtcaatagattttcacaaactcagacaaagtccacacgattaaggcacttgaaagacttgggttggaagacttgctttaaggaataatatgctttgagacccttaatcctatccaagagagcacttgtttttattatgaagatgacagaaagtttgagggttcaaagagcataagtccaacacc

SEQ ID NO: 129801 - DNA, 355 bp, Glycine max
tatcaatcagactaactaatagcataagttaataagtatgggccaatgaatggttattataaatatataaccttaatacccataaaccaaagctacaataaaaactgataatgtacttacacagttacacttgcctagcatgaataatatcctaagtgttctagaatctatttaagttgctccagtgccatgagaccatgccaaaagaaatccaattaatataacaatgttataaactaaatactcatgacaggaatgcttacatgtgactagaataaaattcaacaaaataccaatatatatctttttaattaatggagatcaatatagaacaaacatatagtagtgatgatca

SEQ ID NO: 129802 - DNA, 323 bp, Glycine max
agaccaacacaagaggcacagtgccaaaggtgccgcggccacagccactgaggaatttgagagctgagtaaacccaaacgttggctgagaaagtggcaaggaaagaagagagggacatgatgaggcatgaaaagaagaacatgttctcgcgaccgaatgaggagtcagccagaggggagaatacaagcccaccaacgaagcagcccgcgaagaacatggaggctggaaggcccatgaagaaggagctcgaacactccagcccaaatactgagatgatggatgcatgcgggggcccatcccaggcccatgagtactcgggaagg

SEQ ID NO: 129803 - DNA, 444 bp, Glycine max
gcttctcatttcaagagatagataaagttgagaagtacatataggggagttaacataggaccgtgcatattaataaaataaaaaatgaaaaccatgctttatgctgaatgctgagatggtttaaaagtgcaattaatatactgctagctgctctgttagattctttgataatgtataagtgtagttttgcaataatagattattagcaacctaagtctcaactctcaagagtcaagagggtcttgtatgtaatagcctgcttcagtattaatatagttatattcagtggttctcattgatattacagtaagtatacagtaatttcagtagtattgttccttttataaccttatttttttttgtaaggtacttgatggttggacttggctcgtgtataatattcattcaaattcatgtgcaaggatcgagagtactaataacaaa

SEQ ID NO: 129804 - DNA, 357 bp, Glycine max
  unsure (1)..(357): unsure at all n locations
gagcttcaatggagaatgattgataaattaaaagcaacgtgagggagagggagaaaagagctgtctgaaatttgggctgagtgaggagagagaatacaacttnttggttttaaagaaaaagggttttctcttttcctattattttatttaagctatgccacatgtctccatttgagtggagcaaaaagggcccactttctcttttgattgtgacccatactcagccacaaaaagtgagaaaaatctgacctttgaaatgctaaaatcctgcctcggtttgcgtgccgtttctctggttccagttcctcgtgtttctctgcgtccagcggggccagtattngaaagaggctatatata

SEQ ID NO: 129805 - DNA, 364 bp, Glycine max
  unsure (1)..(364): unsure at all n locations
ctaagcttacagagatttagtaatgacccactaacctagaattattataacttaatgccattaacctagggaattaaaacaaactaaatggctgagtgtaactgaaattgttggcaaccaaaagtcacccccaacagccaacaagtcagccaccatttggtctcccaaaaggctgatgcctangttgccaattgggcccttattacaacttgaactaaagcccttttagttgattaacccaaaacatatttttggtcagccaactntacaaggattgggccattatttagacaaactaaacactctaaaattgaaataaagtggtgtcatttagtcctccatttgggccatgatacaactcaca

SEQ ID NO: 129806 - DNA, 415 bp, Glycine max
  unsure (1)..(415): unsure at all n locations
gatgggaactatagattgcttgtaaggattctatatgcatagtaaaaatataattcgggttttgaattagataattggattagcttctctagtgatagagagtgaactagtataagaaagttgtgtagttcttctattgatcttatctttccttctcatcctagtcttaatcaatttactaaaggtttaagaaaatatctttttgaaagaaagaattttaacaaggatattatgtaaatggtggattgatttagtattaattgagtttgattatgaaagttttgtgatacaacccgtacaaaagaagtttttgtaactctagttntaaaagttcattttgttntgaaaaccaattcacccccctcttggtngtgagtaccatattttttcaggatgccttgaaaaatctacattt

SEQ ID NO: 129807 - DNA, 374 bp, Glycine max
  unsure (1)..(374): unsure at all n locations
tctcctattcttaatagggagagtgaggtttatgtagcctctggattcagacacttgaattaggaaaaatgttctggaaaaaaccaaccgagcctttgtacgtttcgggggatttgcaagatttcaccgtcttcgacgtttcgttcattcttcgcgtcttcngcttcaccggtagttccgaatcaaactttcattattctatgtacccttaggacctatttgtttacgtgctttatttctttattacttgcgtacccctttgcgtgcttagcattacttagtatttctcgctaatcaaaataaaaaattcattgtcattgatgtacatcattatttgtaaatgaaccaccgtcggctgtgtaccatttgaatca

SEQ ID NO: 129808 - DNA, 408 bp, Glycine max
  unsure (1)..(408): unsure at all n locations
atgaagaaaacactttctgtttatntatagagaacacaattataatggcctattatcgattaaatctacaaggtaatcgattaattcaatgaagtaattgattagattatctttntaatcgatcaaagtattcttcccaaaacttggaaaaagctcaagaataatgtaatcgattaaatactcaaagtaattgattaaagtgttcttgttcacttctgaaacacttatagaaagagaagtaatcgattatatcacatgataatcgattaaagtagagattccttaataaatcaatcattgtctcaaaaacaactgtgtaatcgattatgataaggatgtaatcgattaaaccgatacgagacataacttgcaagcttcaaacaacttgttgtatcaattataataaag

SEQ ID NO: 129809 - DNA, 394 bp, Glycine max
  unsure (1)..(394): unsure at all n locations
gttgggagctctggacatcctgttctattngtgctgacggaggagctggagtggatgatgaagggatgtcatctgccgaggccctggctttccttttacttgatgccatctataaataaaaagaactcaaaattcaccttagaccaaatttatttaagttaaaaactgaaataaagggctgaaattaacgatgggtgcttagtgggatacagctcgcttagcgcaccctcagaaatataacgcatcggcttatcgaaacagtgtatgcttaagccaaatctagatcgagaaagatatgatcttagcgaaaccatagatttcagaaatctatctaagttcgtgggattagcgagcgaggcttgcttaacccaatggctgtcgcaatgaaatgagc

SEQ ID NO: 129810 - DNA, 423 bp, Glycine max
  unsure (1)..(423): unsure at all n locations
gcaagcttatgatgaatcaagagtgattcaatgagttttgatgataacaaagatgatgancaaaaacttaaaagtcaagaacacttcatgataacaaagatgatgatttcaagaatcaagaatcaagttccaagattcaagttccaagaatcaagatcaagattcaagactaaagattcaagaatcaagagaagactcaatcaagataagtattaaaaagttttttcaaaaactgagtagcacatgatgttttctcaaaaaccttttttaccaacggatttttactctctgctaatcgattaccagattggtgtaatcgattaccagtagcaaaatggttntcaaaaaagccttcaactgaatttacaacgttccaattgatttaaaatgttgaatcgattacatgatttggaatcgatacca

SEQ ID NO: 129811 - DNA, 451 bp, Glycine max
  unsure (1)..(451): unsure at all n locations
aaaacgggtgttcaccattttagtttgtttgaccttgtcgcaacctaccctttggctggagggcgacgggtgactcgcgggaggcgtgttccatgaaaggaatacgcgcggagtcgccaccaacgtttatttggggaaaacgtcagaaaaaccggaaaagacgtgatctacgaacttttaagtgaaaggctcgggagttgtatttacgcacggcgaaggtattagcaccccacacgtccgtcacaagggacggcagcctttaatcgaatgtgcaaacatgactntgattnttatgttcccttttatgtccttatatcctttataccctctttatatttttcgtggtcgacaagggtgtttccctttgttcttacgtattcctcatttgagatgaggaaatcaaacctacgtagttctttcttatgcgtgaatcaagtgattcttttttcgt

SEQ ID NO: 129812 - DNA, 364 bp, Glycine max
gtatgggtgtccaaatggttaccttcttttatatactcaaccttggaggtgttacttcttgagaaggatccattcttgagaattttgtttcaatggttgtttctctcttttgacttcataagattttcccaaagagttttcaggtgatacttctattgatggacgtacgcactattgtgttccagtagccatccagtgtggttgcatcttaattacattggaaaaatcttatgtgtccattaaggagactcgagatgaactataacatctaaggagagagccttgtaagcttcagatagtgtgtgctcatagtcatatcttgtccattttggagtaaagatgggaatggattttctggggaggg

SEQ ID NO: 129813 - DNA, 379 bp, Glycine max
  unsure (1)..(379): unsure at all n locations
ttttttatcaagtccatgcaaaaatatctaagttcatttggtattaaggaaagtccctcgttgtttccattcttaatgttttccaaaaaaaaatccttttgttgtgttctaatccaaaaaaatccttttatacattaaaaaatattactcatgaatatagactcgaaaataaggtttagaaatataagacattagaattaagtaacacaaatgaagacaaagctttaaaacactaggttgcctcccatgagcgcttcttcaacgtcttttaagttggacgttattgttgtggctgacgtttcactatttcatcatccataattcttntcttcttcataagaaaatccttcatgaatttaacatatgttggcatctactc

SEQ ID NO: 129814 - DNA, 436 bp, Glycine max
  unsure (1)..(436): unsure at all n locations
agctntatcatatggatgcaaaaagttcattcttaaatggctttattcaagaggaagtatatgtagatcaaccccctggatttgaaaactcatacaagcctaatcatgtttttagattaaaaagggctttatacggcttaaagcaagcccctagggcttggtatgagcatctgagtaagttccttttagaaaaagatttctctagaggcaaagtagatactactcttttcataaagagaaaattacgtgacatattattggttcaaatctatgtcgatgatattatttttggatctactaataaattattgtgcaaggaattctttcatgacacgcacagtgagtatgagatgtcaatgatgggagaacttaatttctttcttggattacaaattanacaatccaagactggaattnttctcaatcaatccaagta

SEQ ID NO: 129815 - DNA, 472 bp, Glycine max
  unsure (1)..(472): unsure at all n locations
cttcctcctcttaaatccagctcttaaaatgagtatttccatntgntgtctatattcttcaacactcatactcccttatctaagccgctggagcttgttcataagctccctttcatagtatgagggaatgtgcctcttcctaatggcacttttaagatcattccaatactctactagaggatccacatgaatccttctttccctaacaagggaagtaaaccaacagagggcatacccctgaaagctaggggcagccaatggaacttctctctcttcactaatatgatggcaagcaaagcattattcaaccttcatttcccaatctaggtatgcctcataattatcttnttcatgaaaatatgggaggctaatgttaacctcttgaggccttctatccttntctcttctttaagaatgatgtntagtatgtgacctatgtcgcccttcataatagtcgctaagttcttcactt

SEQ ID NO: 129816 - DNA, 433 bp, Glycine max
  unsure (1)..(433): unsure at all n locations
tttcttccttttccttttaagacctcaggctgtgatattttcaattctatggtaattaacatgaataataaattaacagacattaaacctatgcaatgtcgaacaaataaaacaagtcaaggttgatcactaaatctatcattaaaaataaaataatggcaaatatagtgttcctttatcatttatataatagaatttgtcatccaacagacaagagtgtataatacattgacctcccctgagcattatgattccaatgcaaacatcccaatatacttttaaaaactacattgaaaaataacttttgaataagaaatattcctatttaattnttcaaacatatataccactttgtatcatttttttggtaaactgattagtggtactgaggtaaaactacaaactacttatttttccagtgagtcttgtatac

SEQ ID NO: 129817 - DNA, 462 bp, Glycine max
cccattattgtttgtcattatattgccctttcattctctaatataatagtaaattaatttgatgtaacatatacaacaatacaacatatatgcacactcatattattaatcccttgattctgccatgtggagcagtacattagagccctagtgccggagcacttcgctttcagaaccaacaaggacgacaaaaccgcaggcgaaatcttcaaacaaaaacacaaggacctcgtgaaagaaagctccgagtggctgaaggaaacctccaactcctgctccgtcgtcgccgccctaatagccggcgtctccttcgccacatcgagctccgtcctcggtggcaccgagaagggcaaacccgaacttgaaggccagcccgccttcgacgcattcgccatcgcctcgctcatagggccttgcttctccgtcacggcactcatcatgttcctcgccatactcacatct

SEQ ID NO: 129818 - DNA, 442 bp, Glycine max
agcttgtcaaaataacctgaaattgagagtttatgattattaaacacacaaaatggaagtactaagtatttattacctatacttaatagaaaatacttataacactacaaacgggtgttcactttcgacaagtgcaccggatcgcacaagtagtataaaatggtaagaaccgagtatcaaactctcgaggaacttgtgttatttggtaagctatttcagcaaataggtgtctggtgtgtaaagataagtgtgaatatgaacaggtgtataaactatctatgcaaaaagaaagaaaatcatgcgagagaaatgatgtgtaaaaacaagtagaaaacacgttggccttcctaataagtgcctgatgctaaaacgatattctctatctaacaatgctcatgtgttcctatggtgtctcttgagatgctaaatctcgattccttat

SEQ ID NO: 129819 - DNA, 402 bp, Glycine max
  unsure (1)..(402): unsure at all n locations
tgtgatgaacgcttcaacaagctgctatcggatgggatgtgtgctctatcacgcaagattttgtggtcactagcagccatattctcaattaaaaccatggcttcttcaaaggtcgtctattttattattggccctgcagaagcatctaaaagctggttggattgtggccttaacccatcaatgaaaatattgagctggatcggatctaaaaatccatgagtagacgtctatcttagtgacccacgaaatctttccaaagcctcactcaaggactcgtctggaaattgatgaaacgatgagatggcagctcttccttcagtagacatggactctgggaagtatntcttcaagaattattcaaccacttcatcccaagtgttaagactattacctttaaatgaa

SEQ ID NO: 129820 - DNA, 372 bp, Glycine max
agcttctccgtcttttccctataatatggtattatggaagaacaaaaatgttcaatcctcctggtatctgagaatcacttaatattagtgagaaaaattgtctctgtgaagaaaatccaagccaagacgcttccgtaacgcttccgagacgttttcgtaggtgatttcgtgaagattttccaccgatcttcatcggtcttcgttcattattcgtcgttcttcggtcttcaactggtaagttcccgaaatcgaacttttcaattcattctatgtaccctcagtggtcctcatttggttcgcgtgctgttatttatatttcatatgctttccgtacccccattcgacgtgcttaagtcattatttaggcatttt

SEQ ID NO: 129821 - DNA, 357 bp, Glycine max
atagtagggactgccgaataccataaccaagttcaattatatgcgaatgataccaatatatacagggataaatttcccatctctcgtcataattaagaaaacgcagataaagtcactacaatgcgacttttaatgactagaatgagacactcctgtcaaaacttgcatataaagatgctcatcatatacatgatagctgcatatcagaaaaaaacacagtcgtgacggtggtctgcagatcaatccatggagccaagaatgtgaatgtaatacatatgaaacatgagttaatcatctggccccaaatatacaggacttcacaacccacttgatgacacaacaaggattctgcatgat

SEQ ID NO: 129822 - DNA, 390 bp, Glycine max
agcttcatagatagaaattattatgttaattttcaagttacaattctgttaatatttggtattaagtaaaagcttcacttgcgatttacattcaatttgacagatttcttttccatctagttattgagttagcaataaaatttcttgattgctttgaagggaatctcattcacgacctccaattttcaaagaacaagtctctattcatttcagatcaatttgtacacaaaaggccaagggtttgagtatagagactatggattgctgacaacacttgatctttcatgtaacaacttgtcaagggaaagtcctccacaagttttccctcttgttcaattgcagacctcgaactttgtcagaaatcatttcacaggaaagatatcatggaga

SEQ ID NO: 129823 - DNA, 378 bp, Glycine max
tcttttatctcaactcatgacacagttttttttgttatctaaaacttcatttgcttatcctctgatgggttgaggcttatttccctccgtctttttatgtttcttttttaccctattgtatatgatgcgtttttatgcattttgcattttcactgcatgttcattgttttttctaaagttgtcatttttatcttaaaaagtattgatttttatctccaaactacatgaacacatgttcattgtcttgatttatctatcaaaggttaaatatttttgtgttcctgagccttctccgacattgcttaatcttgatttcttgcattttgggtcagatctgatcattgatatctttggaccacacacaacgaaacaacaata

SEQ ID NO: 129824 - DNA, 407 bp, Glycine max
gcttcggttataaatttcgagcgtcttttatattacgggactcaatcggacttccgagataaatgttattgtcgttagaattagctacgagcttcggttttaaatctcgagcgtctcgatatatttcgggactcaatcggacttccgagagaaaagttattgtcgatagaattagctgcgagcttgtgttttaaattttgagtgtctcgatatattacgggactcaatcggacttcctagtgaaatgttattgtcgatcgaatttgctacgagcttcggttttaaaattcgagcgtctcgatatattacaggactcaatcagacttccgagtgaaatgttattgctgttcgaatttgctacgagctctggtttaaaatctgagcgtcccatatattacgggactcaa

SEQ ID NO: 129825 - DNA, 384 bp, Glycine max
tgtagcaaaatcgaacgacaataacaattcactctgaagtccgattgagtcccgtaatatatcgacatgctcgaaatttaaaaccgaagcccctagcaaattcgaacgacaataacttttcactcagaagtccaattgagtcccgcaatatatcgagacgctcgaaatttaaaaccgaagcttgtagcaaaatcgaacgacaataacaattcactcggaagtccgattgagtcccgtaatatatcgacatgctcgaaatttaaaaccgaagctcctagcaaattcgaacgacaataacttttcactcggaagtccgaatgagtcccgccatatatcgagacgctcgaaatttaaaaccgaagctcgttgaagattaaaagacaa

SEQ ID NO: 129826 - DNA, 333 bp, Glycine max
acgcactatgggagtgatacaaaatttaattttctatttgaattatagctaacattctagacaaagatttttgaatggtatatacaaagtaatcaccacatgtgttaaaaacgataattcttttttcattttccttatttttcgtattagatttaaatgtaactaaaaaatttgactcttttataacatttaatgtcataatctatgattaattttcagaaatgattttcaagactacgcggaactttgttttaaggaatttggagatagggtgaagtattgggttactctaaagctactatattatgattggtggtagaaatagatagttac

SEQ ID NO: 129827 - DNA, 474 bp, Glycine max
  unsure (1)..(474): unsure at all n locations
taccaaaagaattagaataccaaggatacaaatgtaaatttccatttaaaaagtacttgttttccaaggcctgaagttttttaagttctgctacattaacaagtcaaggataaatatgtatatgcaattaggaaaactaaaatcatgatcttcatgacttgaacaaatgtcgaaaatatggggacttaaagaagaggaaggaagagagataaaagacaatgaaacattaaattaatgttaactcattttataatatacagatattataaaaccaatagcattaaccatgatactaatcataatcctaactaaataagaaacaaattattagataaggaaacatggtaactaatcttaagaaataatgaggaaatagggaaattaatcttgaaggtaggataccctangataggataagatangtgagatgcttntcaaatactaacanacacattgtcatacattagctacaca

SEQ ID NO: 129828 - DNA, 454 bp, Glycine max
  unsure (1)..(454): unsure at all n locations
agcttgcttgtgaacctcattaccgtattttatctttattcacacaacatacattgctcacacaaaatttcttgaattatatatgcagaaattgcctcaattcttgcttattcgctgtcacaagctagttagcctcttcataaggtactcacctacacaagttttggcatgttaagttatttaatttgtgcatagtgttgtttgatttattaaatggatgttcatattttttttccttcctgtttatagcaacctaactttgaattgaagtaggcattgctatcttgtaactaagaataatattgagcaatgatctgactagaaccatatgaagcttgattgtgaacctcattaccttatttgaagctttattcacacaacatacactgctcacacaanatntcttgaattatgtatgcagaaaattcttgaattctggcttattaggtgtcac

SEQ ID NO: 129829 - DNA, 413 bp, Glycine max
  unsure (1)..(413): unsure at all n locations
tcgactcatctattcatttatggaaacccctacaaagccaactgagtcaatggcaatgctnggtgtgaccccaaaccaaccaactaggtcaatgaaaatatttggcgtgacccttacccaaccaactgagtctatggcagcgcctaatgtgacccatatccaaccaattgaccaatctatggaaattccttgcgtgacccatattcaaccaattgagcctatggaaatgcctggtttgatcccaatccaaccaactagttctatgaccatgcgtggtgcacccctacccaacaactttgatatggaaatgcctatgaacacctcttctttgagttataagcaaggtggaatgatgcataacatggaattatgaatacacttcctaaagaagccaatgatttgaaaaaattttg

SEQ ID NO: 129830 - DNA, 376 bp, Glycine max
tataggatcttgattcaaccaccatgtgtcgacaagggacgatgatatgtgtacatttgcaacgatgctttcagccgatgatggcaggaggaagaaaacggaaggaaagaagggctctaaacgtattcggtataatcaattctagcggcttacaatcgccatgaatgattatacaacgttaactcacgtaattactaacgattcttagccactagaaacaaatcactacaaaatgattgtaactgttaaaaaaacatattgacacatcacgtattagtagatacatttaatgccaaggactaaaaaccaaacatataaaattgagcaacaaagaccagccatatattaattaaggtactaaaaagaataaacatga

SEQ ID NO: 129831 - DNA, 315 bp, Glycine max
tctctccctacctatgaggcagaaatctttttaggataaccaacgactgatgatgttctttcacccaagtgaatctaatcgaggccacctcttggatgcgtgcgactataatatttggaggcagagaatctaacctaatctcaatatgtgttcgagcttgtctatgtcgaaactacaagaacttggataccaaccacgtgaggatatacacttgtgacgtaggtgtgagtgcctcctagcacggtccagatatatattctgatattgatgtgtactgtagcctacagaccacgtatgtatgcaccaattatgact

SEQ ID NO: 129832 - DNA, 414 bp, Glycine max
ctccctttttcatttctgatttcaggcttaaataggtggccttgttggtgcttgtgcgcttagcgtgaatctggaccgcttagtgcacattagtgaatttcagcttagcgcgtgtcttctcgctcagcggatggactcaagcggtgtgcttagcggcatgacacctcgctcagcgaacatgcacagatcatccttcttccagattcttccttgcgcccagcggatggagtgctgctcaacagataactcgctgagctagcagattggcttatcgagcagatgaaaatcagcacttcagaaacttgcctaattaacctgaaattgagaggaaatgattattaaatacacaaaatgggagtactaagtatttattacctatatttaacaaaaagtaatgaccacacttccaaataa

SEQ ID NO: 129833 - DNA, 462 bp, Glycine max
  unsure (1)..(462): unsure at all n locations
ggcagagatattgaaagtngtattgaaccttatttcagcccaggccaagtggttaggccactgttttggtttggttccagttaaacacctcagatacgcttctaagcatcgattagctacttacgtctacccatctgtttgaggatgataggcagtactcatcttcaattgagcgcctgctttcttgaacaactccttccaaaagaggcacataaaaattttgtctctgccaaatactattgaggcagggaacccatgcagtctcaccacttccttaatgaataactcagctatttccttagctggataaggatgacttaatgcagaaaaatgagcatacttagtcagcctatccactaccactaagataatgtctttccctgcagcgcttggtaaacctccaatgaaatccattgagatatcagtccataccatagttggaatatgtaggggatgcaacaa

SEQ ID NO: 129834 - DNA, 364 bp, Glycine max
gaaaaaagaagaaaaaatggaaggtgcaaaagttgttgtttcgttaagcctggaccgtgcgcttagcgagactcaaccgctaagcgagacatcagccccttagcgagtgagatgaatattgaagagaatctgccatgtcatcacgcgctcagcgtgtcatcagctcgttcagcaagaagattgtctcttctgtgcttagtgcgagaatggcgctaagccaaatttcacttactcgtgctaagcacgaagatgacactaagcgcgccttcatggacaaaaaagccctttttaagcatgaattgtagagaatgaaagggaagtctgaatagactatgtaagcctagtgctgaacgaagaacagagc

SEQ ID NO: 129835 - DNA, 378 bp, Glycine max
  unsure (1)..(378): unsure at all n locations
tttgtgtgggatacccaatgtgagcatagtttccagacctttattgaaagattgatgaccgctccagtgctagttttgcctaacctgagagaaccctctgaggtgtattgtgatgcatcaaagatgggtttaggcggagtgttgatgcaaaatggccaagtggtggtctatgcttctagacaacttaagacttatgagaggaattatcccacccatgatctagagttggctgctgtagttnttgcccttaagatttggagacattatctgtttggctctaagttcgaggtgtttaataatcataagagtcttaaatacttgtttagtcataaggagctgaacatgagacataggagatggttaaagttgcttaatgat

SEQ ID NO: 129836 - DNA, 432 bp, Glycine max
  unsure (1)..(432): unsure at all n locations
ttgcatcacctctagttatcttgtggtgatgggaaaaaacgttttgccagccattggaagggtctcaatagttgagctcttttcttgcgccaaaaccaaatggcagcattgtattggtcgttgcgaatctttcgcgtggcttccttccaatcatacttctccatctcttcacgcgcagcttttcccatggtttctctcaactctntgttgagcaaaaggggccttatgttgctcaagcagtcttcaaaatctcctggattgtacagatagctagttttaccatcttgatccacagggattatatcangaatacctccagcacatgccgncacaacaggtatccctgaagacatggcctccaaaactacaagaccaagtgtctctgactctgaaggcatgacanatacatctccactggcatatgcttgggac

SEQ ID NO: 129837 - DNA, 495 bp, Glycine max
  unsure (1)..(495): unsure at all n locations
ccttgaaactaagcttgtgtgagcttaatggagaatgagggaggaagaaattctacgtgagggagagagaaagctgtctgaaaaaaaatgagggctgagtgaagagagagaaaagctttttggttntaaataaaaaggttttcctctttttctattattttattcaagctctgccacatgtccctatttgattggagcaaaaagggcccactttctctttntgactgtgacccatactcagtcacaaaagtgagaaaaatctgacctttgaaacgctaaaatcctgcctcggtttgcgtgtcgtttctctgattccagtttctcgcgtttctctgcgcccgccggggccagttttcgaaagcaagcaatatatatatcataacgctcagaatanaaccccgagcgtggtctagagggtggtntcgttaaattctaagtcgcacgcaaaacgatgatnttaactaattaatangaataacccatacctccagtatg

SEQ ID NO: 129838 - DNA, 452 bp, Glycine max
  unsure (1)..(452): unsure at all n locations
agcttgattgtgagtagattttagtctttattttcactntggatattagtcaattcattcaaggaaactttcaaagaaaaatgtccaattgatttttttgattattttattcgaagatattttgattattttattattattttgcctttgtttggtttaaacgtggttactgcgtgaacgatcggttgaattttattttaacagtgattaaacaatattacaactcaaatgatcggttgaaattcattttattatttattaggtgagaaaacgacttaaataaatggttaaagcacgtcaaaagggggtacgaaaaacaaataaaatgaaaataaaagtacgcgaaacaagtggggaccactaagggtgcatagaatgaattgaaagattcgatttcgagaacttatcggttgaagaccgaagaacgacgaataacgaacaaagaacgatga

SEQ ID NO: 129839 - DNA, 383 bp, Glycine max
  unsure (1)..(383): unsure at all n locations
gagtgattcaaagagtttttgatgtattctcagatgataacaaaagatgatgacaaaggtgatgacaaaaagctcaaaggtcaatcaaagaatgagttcaacatattcaagatagaatcaagaacacttcaagattcaagaggaaagttgaattcaagaatcaagaatcaagattcaacagatcaagattcacgaatcaagattctagagatcaagattcaagactcaagattaaagaatcaagagaaggcttaatcaagataagtatgaaaaggttttctcaaaaatcgagtagcacatggtttttctcanaacatgtttaccagagagttcttactctctggtnatcgattaccagaatgttgtaatcgagtactagtagc

SEQ ID NO: 129840 - DNA, 389 bp, Glycine max
  unsure (1)..(389): unsure at all n locations
tcgtgacttataaatgcactcttctatttgaaagaaacacacattcatctttttcctcctagctgtgttacgcttgtgttggtggcgagaagctttggctgttctttcatttttagttgtctcaaaacttggtaagttagttaatattttttgtattttatttatttagttgtttttgttctgataattaaattagttnttttagatattataaagtttgtatataatggaatagctttaggtattaatattatttgttttaggcattgtaaattattagttttgtatgctatgcttaattttagttcttagttttatatgggacattaatgtttagtctgaggtttatatgttgacttttgattattttactctatatgctcatccta

SEQ ID NO: 129841 - DNA, 369 bp, Glycine max
  unsure (1)..(369): unsure at all n locations
ctcagcttgagtcctgtgtatgcccatgtctggtaatatatattatcttaacttataaggtgtttggtaggtaagaatttgaaagcttggaagcaatgcctactccatgctgaattttcttataatagggtattaagctctactacttattctccttttgaggtagtttacgggttctagtccactgccctttcttaatttgttacctttgcctaacacttctgctttgatgaatacgaatgggctttctaaagccacatttgtaaagagtttgcatgagaaagggaaaacacaatttgagaataagattgaacaatatgctggatattccaataaggggagaaagaaaatgattatcanactgggtga

SEQ ID NO: 129842 - DNA, 376 bp, Glycine max
  unsure (1)..(376): unsure at all n locations
agcttgtgcgaatcaaatcactcctgcatttcatctctaccatgcatttttctttctttacctactcctcacgtttggtttttttagggaaaaacaccataactaaacgcgccacaaggcatccctatcgcaccagatccaaatctagaacgatgggtgatcaagaggagacacaggaacagatgaaagccgacatgtcggctctgaaagaacaaatggcttccatgatggaagccatgttagggatgaggcagctcatggaaaagaatgtggccaccgctgccgctatcagttcggctgccgaagcagacccaactctcttggcaactgcgcaccattctccctcaaacatagtaggacggngaagggacacact

SEQ ID NO: 129843 - DNA, 455 bp, Glycine max
  unsure (1)..(455): unsure at all n locations
ctcatgcaattccataatttatattcaccttatcctaagactaacacacgtatatatgcatggtctgcaaccgtcacacttaactagtaacttttccgatgaagagatttaagttcctaggaaaatttattgtatgatcagataacatatatcaaataatctccatcagtattctcatggtagatgtatgctctaacaaactactactaataatntatctaatttttcattttatttattatttacagtgcaacttatatattgtctacttgggattatcagcaatggtggccttcatgggtaatccaatttcaaacccaattttgctttacttntttacgacaaaggtgtgaaacgttntaataacaaagaaaccaacattcagctatggcatctatctaactgtagtatgcattactcaacagtgcacctcaaggttatcaaaatcgagagtc

SEQ ID NO: 129844 - DNA, 428 bp, Glycine max
  unsure (1)..(428): unsure at all n locations
atccttaagcaccgagctgcagctggagaatttggggccccgcctattttgtattaggtggcaatcggccgatggtgcaaaacaactctccacatccacaaatcacgcataaacccaccatccccagttgcccaccttcaactgagctcacgtactcccatgtagcccttatcctcattcctctcaacaccgggtccccatcaatctctccaagcttccgcaacatccaagcaatacaacatccaaccatcatgaaccatcaaaaccaagaaaacagcgcanaggaagaaaactctgcccaaaaaacacaaaccaataccgcaactttccttactcaaataccccagtaacattctcttcgttccaatttggtaaccggtggatcgactcgaaaaatttactggaggtccctagtacataaatctaca

SEQ ID NO: 129845 - DNA, 406 bp, Glycine max
  unsure (1)..(406): unsure at all n locations
cttgtatgaaaattnggagaggttaatgaaacaacgatattatgctctccatgagaggttggatcaaatggagaataaatatcctaatggagaagaaaggaggagaagagggaatgatggtgttcctatacaaaagcgaattgatggtattaaactcaacattcctccctttaaaggaaagaatgatccggaggactacttggagtgggagatgaaaatagagcatgttttctcgtgcaacaactatgaggaggaccaaaaggtaaagcttgccgccacggagttttctgactatgctcttgtgtggtggaacaagctacaaaaggagagagcatgaaatgaagagccaatggttgatacatgggcagagatgaaaaggatcatgatgaagcggtatgtgccgtct

SEQ ID NO: 129846 - DNA, 240 bp, Glycine max
  unsure (1)..(240): unsure at all n locations
caaacgacaataactttntactcgggtggccgaatgaggtcagaaatatatcgagacactggaaatagaaaacgaaaacttgtagcaagtgcataccacaatcaattttaacgcgtcgcgaaatatgtggagatgctcgaaatagaaaaagaaattgcatagcaaattcaaacgacaataacttgtacacggatgttcgatggagtcccgcaatatatcgagacgctccaaatggagaac

SEQ ID NO: 129847 - DNA, 436 bp, Glycine max
  unsure (1)..(436): unsure at all n locations
tccattntcaatntcgaccatctcgatatattatttgactcatccggacatccatgtatagagntattgtcaattcaattcactcacggcttcggatcttaattatgagcgtctctatatattacaggactcattcagacatccgagtaaaaagttattgtcgtttgaatttgatacgagcttccgttttaatttggagcatctatcgataaattatgacactctgacgggcatccgagtaaaaagttattgtcgtttgaaatttctaagagtttccgttttaatttggagcatctcgctatattacgggactgaaacgaacatccgtgtataaagatattgtcatttcaatctgctcagagcttctagtctcaattagagcggctcaattattacacgaccaatcggaatccgagaaaaggtatggcgttgtatt

SEQ ID NO: 129848 - DNA, 426 bp, Glycine max
  unsure (1)..(426): unsure at all n locations
ntataatgtaagatccaatcccatgacactgagtccagttttgtagccagaaaagnatcactgatattagaaagctgaatgctccccaccactatgatagagagcaagacccatgcttctgagctcattcgggacttaatcatagaataaatcctggagaccaaccatagtaaaaacattcgaaattccgaataagaaatattggggaaccaaccaccacacactcattggaatggttgcatttggtttatcaactagaccatactcttgcgctgtcttcaatctttgcctcaacaattgcagctgacttaatcatagaaagagatcagtntaaatctctcaaacattaacactctaacaaaactaacaattaatatttgctagaagaacaatatgctcacatgacacaagtcgttctacttaatg

SEQ ID NO: 129849 - DNA, 423 bp, Glycine max
cttctttttgcgtatgctgaatcatttgaaccacatgtctttgaagcattaaatgcatgtcaagtctgagttgataaaacactatgtttatctttcttgagtaacacttttctagtcgatttcattatcaaataatattttgctcaaagcatatttgcgcatacaataatgacacgtctttttatgtgaaaatggagtttaaaactttacttttctttcacttttttcacttggacaaatcttagaaagaataattagacattttatgcacgatggatcacatgaacaaacgattaattatgtcttaaatgctttacaaaaccatcgtatatcgattatggtgttctccatcatacgcaaagataatgcttatgtcgacatttctgaagcaacttcctcatcttagtcatatctattcgcatc

SEQ ID NO: 129850 - DNA, 375 bp, Glycine max
ctttcatagtttctctgaggtaatctttatttatatgcatttctcctagctagtttaagtttctcttagtgtcttttgtgtattgagtaacgtaataagatgtttttacactctccttaaacaatccttgaaaatgagacgttgtaaaagttatatttctataaaattgatgttggttttgtgactttcattgaaacctgatcacattggcatggtcggaattttaaaataacgtctctttgtagtagaacctaaaataccctatgacccctttttgttttgacaagggtaatagaccctaaatgttattattaaccttgtcttgataactatactaactccctcaaatggtatatgacacttatttggactgca

SEQ ID NO: 129851 - DNA, 473 bp, Glycine max
  unsure (1)..(473): unsure at all n locations
cctttgtcaagcaaattcttttttatatcatcaaaacctgcatgatttacattctccccctttttgatgatgacaagcattatccaaggcttgatctttttgacatcatcaaaatcttcatgatttacattctccccctctttgatgatgacaaccacttgtaggttaggagcaacaacaaataaaaaaatatctatttgcatatagtttactcccccttggttntgcaatgtttgcttatatgagacaattgaagatttcatatttttcatatataaaaagctgtctcatataaagaatagataatttttcttactattntatcttttatccttctctccccctctgtcaacatctaatacaaatcatgaatagagaggagaaaaatgttaccacttgtngtaatgtataaataataagtgatatcagaacgcattaanaacaaactatttgcactcacagaaacacaatca

SEQ ID NO: 129852 - DNA, 454 bp, Glycine max
  unsure (1)..(454): unsure at all n locations
ctgcaacttgctctacatctccccttttgatgattatctcttctgaaancaagaaacacacacacacactttntcctagtcgatcactcacataaattttcattctccccctttgtttttgaatttatgcttctcttaaaattaagttgattactcatgtgagttcttgatttaattcctatttctctctccctttggcatcaacaaaaagacaacgtgagtaacaagtagaaaacatacgtaaataactaatcatacaagaggacagaaaacaattaagcaagatattttaaccattcatcaaacttagaaagttaagaaatataaaaaccatacataaatgacatacacaagaatagaaaaacaatcaaacaagatatcttaaccattcatcaatcttagaaagataatacttcatagaatgtcatataatccagaaagtcattcataataa

SEQ ID NO: 129853 - DNA, 475 bp, Glycine max
  unsure (1)..(475): unsure at all n locations
ctaagcttctcttatgtgcannggcggcttacttcactttcttgtcttcaactcgagctctgaccactgttcttccttcccgcgatgcttcttttcatgtccgcctgagtgggcttatagcctaaaccatacttcccacgatttccttgggtttttatcaggctagttatgccgccattgtctttgcctaaacccatcccgggttcataaccgttccccaacataactcgggccatcattaccgccgcatcggacagacaaggttgcccaaagagggagtcgacggaggaaatgctgaccacctcaaaagactggaaagcggtttctaacgattcttctgcggcttccacataaggcatggaggatgggcagcttaccaagatatcttcctcgcctgacacgatgaccaagtgcccctccactacgaatatcagcttntggtggagtgtagaaggcacaactcccactgagtgga

SEQ ID NO: 129854 - DNA, 353 bp, Glycine max
  unsure (1)..(353): unsure at all n locations
accctcgggattccgttcttaacgngactcaattgtgagtatgacagatcatgtgaacgcggaagatgacgtaaatctctgcgtgggaacgggcttgtcggccacgggtgacgaatggcgcacaagacgacgttagtctctgcgtgctgtcaagcttttcgtcttaacagacagcaaaaaagaatgtttatacggataaccacttgggtatttccgcccgtcagcgtgactcatatgtgagtatgacaaatcttgtgatcgcggaagatgacgtaaatctccgcgtgtcaacaggctctgcggccgctatagacgaagggcgcagaatacgacgtttgtctctgcgtgctatt

SEQ ID NO: 129855 - DNA, 443 bp, Glycine max
  unsure (1)..(443): unsure at all n locations
ctataaaactaagcttaagttggagtcaanaaaagtatcactcagtaacatatcactaactngcatttcttagttttgttcatcatgtgcaaccttattaacgatcatctcgtttggaggaccacttactcactgtctatggaggtggcaaggctgcaatgaagaaatgttgagggctcttcaaccctaagtaaagccttctctacccctctcttttactttttttgttaattttgctttattagtttagttatttagtatatgtgtggtagtttaggaatatgtttactattaggaagataagaaaacacaggtgattaagaagaaccaccattttcttgcaacccaccataaaataaaacaaaattntgtgcttaaatcattcattgtgtggttgaactcagatgctacaagtgaaaaccaattgattttgcttgattgag

SEQ ID NO: 129856 - DNA, 377 bp, Glycine max
  unsure (1)..(377): unsure at all n locations
cattgaaacggttgtgctgacccatgcattccaagnnttttattttaatattatttcttaattaatagtattacaaattgttgcattgattcattgaacttgatttacatcatggaggaggataaaagcaatgcatatataaatttaacctacacttctttttaagttgtcaattaattaaaaatccctttntatatagctttcaaaatatttattatttcctattaaaaatatctattattaagattaaaaaattaattntttcataatttatgatttaataataataataaaatatactcccaggatttatacatattattttctattacttttttttaatgcaaagctatataaaaagtcatagatattggatt

SEQ ID NO: 129857 - DNA, 433 bp, Glycine max
  unsure (1)..(433): unsure at all n locations
tgacccactaacctagaattaaaataacttattgccattaacctaggtaattaaaaaaaacttaatggctgagtataactgaaattttggcaaccaaaagtcacccccaacagccaacaagtcagccaccatttggtctcccaaaaggctgatgcctatgttgccaattgggcccttattacaacttgaactaaacctaactaaagccctttaattgattaacccaaaacatatttttggtcagccaactntacaaggattgggccattatttagacaaactaaacactctaaaaattgagacaaagtggtgtcatttagtcctcctccatttgggccatgatacaactcacaaccttggacttttcttcttgaaactngngcttgtattcanatagtatggacagaacttngtgagaagcttcttggtttcc

SEQ ID NO: 129858 - DNA, 395 bp, Glycine max
agcttgatgtttgtgctgaacgcattatatgtaaacagaccaaaagcaagaaattaggtgcatatagagctactaatgtcttggaatagatacatacaaacatttgtgggccatttcatacacctttatggaatggtcaacaatattttatatcattcatagacgattactccatatatgcatacttgtttcgtatacaatgaaaagtcataatctctagatgtgttcaaaacatttaaagttgaagttaaaaatcaactcaacataagaataaagtgtgtcagatctgaccgtggtggtgaatactatggcagatatgacgatctaggtgaacaacggccggtgccttctgccaggtacctagaggaatggggaatctgtccacaatacactat

SEQ ID NO: 129859 - DNA, 481 bp, Glycine max
  unsure (1)..(481): unsure at all n locations
tccatggtgaaccctacaaagtcctccaaaccctgttcttgatggctacccatcatgctaccatctaccttcaatgtcaccgcccttaagaaatttcaacaattatttaaaaaataaattgtactattatgttctatataataaacaatttcaattgattaattgtcataccatcttttttaaatataattcatgaatgtaatgaaatcttttatacaattttttattattatagaagacgtgtattgtatatggtattagcgataattacatattaataaatnttaaaacattataatacttgtacactagattcgtcggtacaacaccaatactctcgagctacacataaccaagatccttatatattntaaaatgctttaaaaagttcaagtgaactctaaaaatatcaagtccaactagttttatcattgtacagagtgaccttaaagaagtctctctattctcatcttgatttctt

SEQ ID NO: 129860 - DNA, 444 bp, Glycine max
  unsure (1)..(444): unsure at all n locations
agcttctaacaaaaatattcatgcaggtgtttcttcttctagtaattatgacttaccggagcctcctatccctcttccattcccacctagagcaattccaaacaaaaagatggaagaagtggaaaaggagatcttggagaccttcaggaaagtagaggtgaacatacctttactagatgccatcaagcagattccaagatatgccaagtttctaaaggacttgtgcacccacaaaaggaagctcaaaggcaatgaacagattagcatgggtagaaatgtgtcaatattgataggtaaagttgttcctcacattccagagaaatgtaaggacctaggtactttctgtataccttgcattattgggaactatnnaattgagaatgtcatgctagatttaggagcatcagttagtggcatgcctctgtccattntcaattttttatc

SEQ ID NO: 129861 - DNA, 307 bp, Glycine max
  unsure (1)..(307): unsure at all n locations
atatggngacccatcacatggtgactatgtggttgtctggcgatggtgcacaacaagttttccacattcacaaattgcgcattaacaccaccataccgtgtttgccaccttcgaatgtacgaacgttctcccacgtatcccatatcctcgttgatctcacacccggtcctcagttatgctctcaagcctccccaacaatctaataaattcaactttctaacagcacaaactatcacagccaagaaacatggcaaaagcaaaaacactgcccaaaacaccaaccaaaataaacagtctttcttacttt

SEQ ID NO: 129862 - DNA, 457 bp, Glycine max
tgggcctctctctctctctttcgctcatacgagctttatttaatcatatacttggtttacttctctcactcatattcttacttgagcgtcaaagacctttggtttgcaggtcccccctcctatgaaaggtacctctccaagccgatgtgtgaagttcgacaccccactcaaccaagtaaaccctgacgtgtcatggttccagaatttggtgaaaagaaatattaaattgtgtgcattggatgggatattaaaatgcattggagcagcattctcttttaattgaagtcaaaggcaatcaaataggcttgagaaccgaacaacctatgcttgggtgctataccaggagagattattatgtaatatgagaatattccacatttatgatccccatcaatatattattggtaccatatgtcttgttttacatgttcccattaatataatgtacatatactca

SEQ ID NO: 129863 - DNA, 414 bp, Glycine max
  unsure (1)..(414): unsure at all n locations
agcttgttgacacgcagagactaacgttgttttctgcaccttttgtcatccagagacggcgagtctgatgacatgcgagggtaccttatggttatccgcaccttttgtcatccagagacggcgtgtccgatgacattcgggggtaccatatggttattcgcacctttcgtcaaccaaggcgaatgagtccgatgatatcgggatgatgttggtcgtccgattctgattatnttttaaaattttttcagcttttactttcatcatccagagacattcaatcccgacgacgcataaaattcttctctgctaggcagggaccaatcgagttcatagcatgttgaaacgtcgtggttatcccgttntatcgctttcaaggcactgaatgtttgctgacacccctgacgcctttttctt

SEQ ID NO: 129864 - DNA, 474 bp, Glycine max
  unsure (1)..(474): unsure at all n locations
tcttcaagctccaatacttagtcttcatgtgtctgcctctatctctaacaaanattaccaaatattgggtacaagaacacatgtnttggatctgcatctttcgtatgatggcttccgatgaagagtagcgacagtgatttgggcttgaaaaggtactgtcaatgagtgtgactgttcactgtgcgaggtggtcatcgatgtcttcattttcaaagaataaaacaaccttttcaaagaaccattcaacccgctcaaactatcggttttcacggttcttcaccaattccaccgattcttcattgatttgataactcaattgttttaagtagctttcggactggacaggcaaccggttcttggttgtattggttgaactagccagtctggtctagtattagaaacctcggtagcgatcgagtagtatcattcgttggcgcgcctatctctaattctgtcgtacaatatgttatgata

SEQ ID NO: 129865 - DNA, 394 bp, Glycine max
gcatgcaagctcgggtatatataggcacatgatgtacctcacaatatatacaataatattattccttctaaatttgagatggtatcagagctcctgatctttgggagcctctggctgtgcaaccctaattcttatcgcaacctttattgttgtgcaccctaatccttatcgcaacctttattgctgcacaccctaatccttattgcagccttcattgctgcgcacttcattctgtaccttgatcgcacctatctgtgatggctgaaatcgtgaaccctattctggaaactggtgacaaatcccaggctgctggtgaattgcagaatgttcattctgcttattgattaattggaaagaattatctcaaatggtctcaactcatttggagcatctt

SEQ ID NO: 129866 - DNA, 433 bp, Glycine max
  unsure (1)..(433): unsure at all n locations
gcgtcaagattctatgtagtgaaatatgagatatatttatcttttatttatagtagattgtgactaattattataatttggataaatttgtaatgattggtacactggtacaatatttattttggatagtttctactgtgacaaacaaattatgggtgataatcaatattatcgttattattatgttttattttaaattatgtttgccaatatattttttctcctgattattgtaattttatgcttgtaacgataataaatggcaaaagtttaacttataattatattntaaccttaaatgaaacaaaatttggggtctaaagaattagttcaatagaaacatactgatatttangtccaataaaaaaattgctaacactttcgttcaataatggtaacttattgacatattggtccaatggaacatactaac

SEQ ID NO: 129867 - DNA, 275 bp, Glycine max
tggccacctcatggactcctccaagaacaatagcttcatttactagcactgaattatagggagtaggaagccatcttatcaatcaaataccgagcttcagcatgggtcatatcaccaagagctccaccattggcagcatcaattatactcctctccatgttgctaagcccctcatagaaatattgaagaaggagtcgctcagaaatctggtggtgagggcagcttgcacacgatttctagaatcctatccaaaactaaacaagccttctccacta

SEQ ID NO: 129868 - DNA, 463 bp, Glycine max
  unsure (1)..(463): unsure at all n locations
ntatcaatgtttcttggttcaacctaagaaacaattgtcatgttgttacacanaaatctaagtttagaatgtgtagaaattaccctttcagatttctccaattatgttgtctaaggagagatatttctgagttctccactctctatgaaattctttaagcattggtgtagagatctctttattgtgttgaaaatcttcaaccctgatgtcatcttcaagagcaaaattcttttcctaaaaaccagcatcttcttctaaagaattgtcttgaacaatagttagtttcatcacaaaccacatgcaacaatagttagtgtcatgaggcatgtaaagcatgaacgacatgcacaaagtgtgactatatgatgtggcaactgggtgtagcagcaaatgctacctcctccccttatattgccaaatttaatggatatgctttctcactcaataaaatatcttcacacac

SEQ ID NO: 129869 - DNA, 390 bp, Glycine max
  unsure (1)..(390): unsure at all n locations
ntgcgagattcctcacggaaaacgttacggaaacgtttcttatgcgcctcggcttagattntcttcacggaaacaatttttccaagcaaattcgaaagagagagaagtgcctaaggggctgaaccccttccttcttgcattcctcccctatttatagcaaaataagggaagtggttgccgcccagctcgcccaggcgagcagggttgcttcctccataagcaaccgccttctggaggaatattccagagggcccaagtgggcctgggtgctatttgcacccccatttttactaagtacacccncctctgctgttgtatggagcatctttcttccgtaagttacggaaacataccaaatttcgaacgatacttgttatctttccgtaatgt

SEQ ID NO: 129870 - DNA, 450 bp, Glycine max
  unsure (1)..(450): unsure at all n locations
agcttaaattaaacacaatgaacaaacatattctgtctacatgnaatatcctccaacaatcaacattcaatttcattatggcacttagtgatgcaattaggtcatgacgtaagagttcctgcacaatgtgggagttcttggttgtctcattttggtagccttgctttatagaaggcttaactaatccttcccttttattttgttacttgtgttgtgattgaggcaacaccatcctagtagagtgtcaaaactaattnttctttataacttgtgcttattgtagttgagaaaacttcatgttgactgtcagtctatataagctttagattgaccgttngaaaaaaataaaataccgaacgcattacaactggaatttgattacttgtatcctcttgaaatccttttatatcgattctgttagagtatcatatcatagtataaataatacac

SEQ ID NO: 129871 - DNA, 433 bp, Glycine max
  unsure (1)..(433): unsure at all n locations
agtttctacaagtaaattttcatcgtcagatcccttagattnttaatcaatggctaaaattcatttattatttctttttttcttcactntcccaagttgaccctcaacctctcctcagtcacgcaaccaaaccttcccttcctctctcagcctcccatgttgtcgtcgtcgtcgccaacaccaactgtagtggtcttcgtcccaatgcgaccaaaccttcactctcttaacgcgccgacactggaaatggcagcgttagctcaaatttatcaacaataagcattctggcaaggcttctctttctctccacgctttgcccctttcttgtcctttgactccgagtcaagaattgggtctacggtcgagtttggttactttctctatatcctcttctgttgttgcgactattactatatctagttctacttcatcg

SEQ ID NO: 129872 - DNA, 457 bp, Glycine max
  unsure (1)..(457): unsure at all n locations
gcttgccactgtagcagttaagtgaacaaatgatgtgtccacagtcattggatggttgcttggtagaggtacatgctaataactaataagatttcctgtgcagggtatcattgtttttgcatgactgatggctaccttggggctggagattttggttgaatctgcctcaagtgttattttgaaggtaattgagataatcttttgttgttgtttgtttattatatacctaaatttgggttgaagactagttattcaacatgtggattatctaccatgataagtgattttatcatttgagcagatgatattatcatctgaccttgcttttgctttgattccgctcctaaagttcagtagcagcaaagtgactagcagcacaagcattgaagaggtgtgtttcctccttgnttgtggattcatgaactattagttaatacatgaaactgataaatgttct

SEQ ID NO: 129873 - DNA, 424 bp, Glycine max
  unsure (1)..(424): unsure at all n locations
ctaagctccacttaatcccagcttgataacaatttcaataaatttttataactatatcatgaaacaatttcaacatttaccagatgttgcagcaaaataacaatttaaagtgaatgatgcaatagcaacaaatgcagtttgaatcctctaaggaatagaaataaaagaagggagaaacaaaagaaaattccatggtttggccatcactatgcaccatgtggataaaaaactaaaaaagtaatgaagggatgttaagatattaacatgccattttttatcanatcatagggttgggaaaaataaccaggccaaacagtgagaaataaatataataatcagaaattttcctaaaacaggaaacagaattccgtgttaaacacactgcaagtcttgcagccataataaaaagtaatcatgtacaatc

SEQ ID NO: 129874 - DNA, 193 bp, Glycine max
acaaaagattagagtgaaacatatcatgatactcatgtcagaatacatgagaactgaactgtatgtctgacaaacagagtatattacacagtcttctaataaaaaaatcttaatctgtgtgcagactacatgagctaatgatgatatatcatgcttaggagtagtaaaacatacggtgcaagttaacattatt

SEQ ID NO: 129875 - DNA, 373 bp, Glycine max
  unsure (1)..(373): unsure at all n locations
gcttctannatagtgtatcagatgaccgctgctttcaccaagctatcttgaaagaaatgcatcaacaacttctcgtccctggaatacgcacccatcttgcgacaatacattttgagatgattcttaggacgagtcgtccctttgtacctatcgaaatcaggtaccttgaatttcggagggatgacgacgttcgacactaagcaaaggtcagtcatgtccgcgaatagataatcgctgaagccttcaacagccctcaatctctcttcgatgagattgagtttccccttttcttctgttgccaggggtggccccctgcagacaaaaatattggttgtgttgggtggttctgaggttctcccgtgagggtgggttg

SEQ ID NO: 129876 - DNA, 465 bp, Glycine max
  unsure (1)..(465): unsure at all n locations
aaattcactggtatttctatgattcaaaggcttagattctaagagagcacaaatcctagacttatcctaatggtctttttaatacaattggcttgctcactagcttttcactttcatttgcttttgaccttgttacatcaacacacttttttttaacagacaacttatgtgttgtgtgtgctgatgcatcctaattagttccactcccccaaatttggggtaaatttgccttgaaccatatgctctcctagaatctaaacaaggtatctagagataattatttaagttcagggttcaaattntttacaatatcattcagctcanaaaggggcaaaggatataattatcattcaatgtaagctttttggtcaaaaggcttgtgtatgtacaatcatgggcttcatcatgtcctcatttatacatttcattctaaaattcagagatngatgcagagattattactca

SEQ ID NO: 129877 - DNA, 378 bp, Glycine max
  unsure (1)..(378): unsure at all n locations
gtcacctgcacgcatgcaagctntaacagngaattgctttgcattggatattatcccttaaaaatttaactgatgaagtactgaaccttgggtctanttgactaatattaatccctccacccctggcccactcacaaaattattttccctttgattttaccgggtcaactttaaaggaaaccgcgggaatatatatttcagtgagctttggttacaaacaatttaaaaatatgaaaatagatgtgttagactatcagctatgacagactcgtgtaatttctagagcatatatatatatatatatataatgcacaaaacatatctacaggcgggttttctttctttattttcatacaatttgcagtaatttgaagtgag

SEQ ID NO: 129878 - DNA, 450 bp, Glycine max
  unsure (1)..(450): unsure at all n locations
agctggcaatgtacaaattaatgtgttttatgtttttcaaaattatctgcaccccctagctattaatctaacatctaagtaaggctagtgaattttctcgaatagtcatgcagtgcattatattccccgtgactattntggctttgactccaacactggccccgtacatccgtccctcattacatgaaaagaaatattgtttatattcttaattaaaaatattggcccttctaaagtttcatatagttaattattatattacttttttctctattctattagttctattttcaaattattatttatgcatatgtaaagtacattatatttttgctatatacttaaatatttctaaattattaanaaaagactgatatgagaaatatattctttttaaagctatatcatattatatataacttgtcttgtctttctcttcattttctattc

SEQ ID NO: 129879 - DNA, 445 bp, Glycine max
agcttatccggcctcccattaataggtcctttatagaaaaatattgcatgccaaggtaggcatagcagctggagaaggaccaccagcagccagccacagatacgccgccgccacctctatggtagccaccatctctggagtccatctctgctcacttgcgaaggatggagctccaaatggatgcatatatgcagcatgtgaccgatcagcaggcgactaatcataggggtcaggtgcagctgaataagagcttctaccagtacaccctgcatcagcagagccaagatcctagccctttcccgtggcctaccctagagcagtttggggccacagttgcatggccgggagataagcccgattttaaggcaagggcatgacccgcacgggcccctgtggatgaagatggagctcacgaatatgatgacatggccgatgtgatggaata

SEQ ID NO: 129880 - DNA, 489 bp, Glycine max
  unsure (1)..(489): unsure at all n locations
ctacttatgtggcagggcgggcttccttcaccttcttgtctccaacgcgaactttgaccattgttcttccttcccgcaatgcttctcttcatgtctgcctgagtgggcttatagcctaaaccatacttcccacgatttccttgagtatttatcaagctagttatgccgccgttgttttttcctaaacccatcccgggttcaaaaccgttccccaacataactcgggccatcattaccgctgcatcggacagacaaggttgcccaaagagggagtccacggaggaaatgctgaccacctcaaaagactggaaagcagtttctaacgattcttctgcggcttccacataaggcatggaggatgggcagcttaccaagatatcttcctcgcctgacacgatgaccaagtgcccctccactacgaatntcaagcttttggtggagcgtagacggcacgactcccactgagtggatccacgggcgccccaacag

SEQ ID NO: 129881 - DNA, 300 bp, Glycine max
  unsure (1)..(300): unsure at all n locations
gatccttaagcaccgcagctgcaactatcttggtctggaattgtttatattgcanagcacccactactgatctgtacatagagggatcagtgagagggtcagagccttctttgatcagcttgcagccactcatattggtgaggagataagcttaacttcagacatatttgttttggtcagaagatccctaatgtatttggcctgtgtgagaatatcacgttgagtttaaacttctattccaagaaaatagtccagacagccaagatccttgagggagaacacattattaaacttggaaat

SEQ ID NO: 129882 - DNA, 450 bp, Glycine max
  unsure (1)..(450): unsure at all n locations
tctncctaagatattatttccttcaaactatcacttgtctgaacataaataatatccaatcccaatataagtttaatatacaacataaagaagtcaagtaattggcacaattgatgaaaacaaatgatatcatattatggtcaaatcactgccaaatgcttcggtacctatacaagtaaagtctttccttgaatggaacactagagtttctccttggatgaatcggtgaagaaacatattctattctggttgcagattttttatgtcgagagacaactgatacaaaagccaaactaaactactcagtgttgctcccattgaccattgactgagctattcaacagatttcccatgcattgtcctcaatgtcgaacatttcaatctcctacagaaaactaaacactataagcacatttctagcattcgcaacaagaaattagtgatcaaaca

SEQ ID NO: 129883 - DNA, 435 bp, Glycine max
  unsure (1)..(435): unsure at all n locations
agctggcacgtccaagtttcttgtgctctttcagtgacttcctttgatggataatagacatgttacattntgatttgatagttcactaagattaatcttataaagattatctttccttttagcagcaaaaagttgggtaccatttttgtgttagacaacacacccatcttcgctagaggaaaaatcaagtccactatcacataattgacttatgctaagtagatcctatttaagccctttaacaaacagtacattatcaatggaaggatagggattagtacttatctttcctatccctactatcttccccttctgatttgctctgagagtgactattccaccatgcatgggagtcaagcattggaacatacacttttatcttattatgttgcatgagcaacctctatccangtaccatgattgggggtttcttgg

SEQ ID NO: 129884 - DNA, 462 bp, Glycine max
  unsure (1)..(462): unsure at all n locations
tatccttatggcctgcctccagactatacccnccgtgcttttcgggaagagttaagtcaagcccctacttttgaggggcaactcccgccttatgaagactatcccgggcaagacgatggggaaggagatacccatcttggccccctgctccacctcaaagatccatccccgcatgaactaccccagccgaacatagtccgccatattccggcctcccccgcacctgtaaaagaatctgttccctatgcggaagataagggaaagaatgaagcgcttgaagagaggttaagagcaatcaagggcctcggtaattacccattctcagaattggcagatttatgtcttgtgcccaacatcgtcatccctcccaaattcagagtaccagactnttgatagtacaaagggacgacatgtccanaagggcatctncggatgtattgccggaagatggnggcgtattct

SEQ ID NO: 129885 - DNA, 398 bp, Glycine max
  unsure (1)..(398): unsure at all n locations
tggttcagcacctcttggataaaggcaagcgaagcagtgcaccggttcgcttatcatatttctttattatcttcactagacctgcacaaacattcatcatcaaacccccccctcataatctcataactctatctctctgtgtgtaaatatatttaaaggaaagaaaacatgacagatgctagtaatacattcacgatattctctttttaactcactctctactattgttggattaaattcatataggttgcattaaatgaaactttaactaagaaatgctaatgacacattttgatacacgctntttgaatacattcttttgtattgggtgaaatntattgaaaatcactacttatttaatttaggacatcggatatgttggaagatgttctacattc

SEQ ID NO: 129886 - DNA, 456 bp, Glycine max
  unsure (1)..(456): unsure at all n locations
ntccaaaatcaaattagagaaatacatatttataaacatacgtaacgaaatttaattaattaataataaacagaccataatattnttcccggtcccttctgaggcacgcgacagaaaactgcctccaccgcttgcttaagttctgcaacagttgctgcatttgcaacttcaacatctgccaacaaagtcatgcatcgataaatgcaatatccagaaacgtttcttgatcacaaaggaaaagaagaaagaaagaaagaaagagaagcaagttataatattacggaaggaagaggcatccaatttgaggatggagaggatgagcgtttcggaatgaaacctatcgttgaaaaaactggtatctacgtagtgcatgctgagagatcgctganggatttcgtgagaaacaatatcaaccttctctcacccataacaacgtagcatcgattctcatcaatc

SEQ ID NO: 129887 - DNA, 356 bp, Glycine max
  unsure (1)..(356): unsure at all n locations
aaggaagaangaaaacaaacatgataaaaaagagccattaaattgagatgcgttagttagttcgcaacagaggaggattcaaaatcgaaaaacattgggatcgagtagatcggattcgagatccctggcctatgatacgaacaaaatgaccagcaaggtttcgtgtaattcaggttacaatacctcaaagtggaaagtttctatgcttcataactcccagaatcatgagtagactcctttagaatttgtcacctgtatctcgaatattggtcaatgaatgatggagacaaagcgcaagttgatagcttacacttatatagtgtgagaacatgccatatactgggattaatggtagg

SEQ ID NO: 129888 - DNA, 479 bp, Glycine max
  unsure (1)..(479): unsure at all n locations
ngtctcanaatccttctctaagttacgaagccaagttcatattaaaaatagtgcatcatccatgattntgttagcattgaatatgtcgttagtcaagataatgttgttccgctgctgccaaatagaccatgtcaacgctagccaccaacactttcacctgttgacctttacagcctcagccaccccaaatatatgttgaaggaaatgatgttttgggttttgcgggagaggacccacgcaattcacccaagacatcgattcccaccacagcggactgattttgctgcaatgaaaaaacgcatgacctgtattctcctccagattactgcaaaacacgcaactcgtatcatntaattccacctgtcgtctgtgaaggtttgcccttgtaggtagtcgatctctaagtaacctccatgcgaaagctaatacttttattggtgccttttgtcttccatagtcttcanaagctgacagctctg

SEQ ID NO: 129889 - DNA, 361 bp, Glycine max
  unsure (1)..(361): unsure at all n locations
tatgtatctatagttgttccatgcttngaagttgttattttcaatttacttcaataataatagcctacatgcatgattgcagagatgtataacattgtcgtacctaactctcacatgcaccgagaaccccattaatgtgtggtgttgcacagtgttcactcacatgcaccgagaaccaaattaatatggttctcaataatccacgtgggctcgacacccgatgcagaacactgcagtctacactcatgatgcaacgaacagtctgtcgcctttaatgtgtgtggttgatactgctcactcacatgcacttaaaactccattaatatgtgttttaataatccacatgggctcatcacgctat

SEQ ID NO: 129890 - DNA, 351 bp, Glycine max
  unsure (1)..(351): unsure at all n locations
aatcactttgggtaattaacatgaaaaatgtatcgatatggtcaaagtgaaaaattacatttntaaagatgcgtttttcactttaaaacgaatgaaccctctctttctttctttctttttggtaaagatgacagattcaacggccgaaacaatagacataaactttaaaacaattatataattatgattgttttggatatatcaagctcaaacaatttgtagtggcttttcttttatagaagacccttccaaaagagaaacaaaggatctacatatgtcaaagttaagttggagaagaagtntactttcccaaatggcggggtaagaattagtatatgtgaccgacactat

SEQ ID NO: 129891 - DNA, 252 bp, Glycine max
ttacactgggattacatactgaataccacccgagtaacctacgatgataacatgctctgtgtgtaatgcaaaaaattcctcaacctcaatagaaagggtgaatgttttactgcggttcttaatgtgttaaacatatatactatattaatcagggctaatgaatcactctccttactttttaagcaaattgagtaacttctaatacctgtaacattgattctgtcaacataatacagacacgaaaccttatga

SEQ ID NO: 129892 - DNA, 309 bp, Glycine max
  unsure (1)..(309): unsure at all n locations
tctctttggaatttggctaggttcgtatntntgaccttgctctgatatttgcgttcttgatcttggttcttgcgtctttcacactttgtgtcaaaaaaacaagttgcagaaattttgaaaaaaatagtgggtgtttgatcttcgaacacaaaattaaggcaggtagattctttcttgaattctgagcggtatgatatatagtgggcctcanacggacaaccatagcaaaagttatgagcatttgaagtttaccttgcatatctattatactatgtggtatcctatctaatatcttatttgttatcatat

SEQ ID NO: 129893 - DNA, 380 bp, Glycine max
  unsure (1)..(380): unsure at all n locations
tctcgantaatatgcaccttaatctgacttccgtttgaatagttatgacaatttgaatttctggagagcttccgttgtgcaatttcgagcgtcttgatatattatgcgcctgaattggacttccgtgtcataagttatgaccatttcatattctcgagagctctcgttgttcaatattcagcttctcgatatattatgcacctgaattggacttccgtgtgacaagttatgaccattttaatatttcgagagcattcggtgttcaatttcgagcgcctcgataatatatccatctgaatcggacttccgtgtgataagtatgaccatttgaattctctagagctttcgttgatcaatttcagctttcgatatatatgcac

SEQ ID NO: 129894 - DNA, 408 bp, Glycine max
  unsure (1)..(408): unsure at all n locations
ttcccacttttagaattttattagttataatccctatttcaggtagttaaaggaaccacttnttgaagtactaaggaaaaatctgaggaactgtccaactcaagctcacaatgcattcaaacacaatcaaaagtacaacttttagggggcggtgaattatagagaaaaaaaagtttctgaaaaatgaataagaacctcatattcatccctcacattntattttaggttattaattagcagctatgtatcattctctaaaaaggtggggaaattcaagagtggtctagatgtttgctacaagtacgccttgctgttggataacaacagctactctttcctatacctcataaaaagaaagaaataaacctgtaaggttccctttctctaatgcattcatttgatatatat

SEQ ID NO: 129895 - DNA, 206 bp, Glycine max
gatctctcactcctgcatgacaaattatgtccatgacaatctgattgacccataaaatcagatgtgagggatcaatcccactatatgcaaagcatatactagaaggaagaagcctcacactgccagcgtggcagttaagtgatgataattctgtcacgagagctggatattacggtaaagaggggggggggggattttatctatat

SEQ ID NO: 129896 - DNA, 377 bp, Glycine max
  unsure (1)..(377): unsure at all n locations
agctgggcctncagttgagctctngtcaatttttattaaacaaaattcctaaaacaatggaagaaggatttaatgtgaacaagcctcccatgttcaagggagccaactatgatgactggaaggaagggatcattgccttctttgaatccactcactttcatatgtgggatgttgtagaaaagggtagtcagattcccctaggtgcttagaagaacaagatccccaaggataaatgaacggatgatcataaatctagatttcttctcaactcacgagcaagaaatgctatgttgtgtgctttatcacaagaggaatattccaaggttgatagctacagaagtgccaaacagatgtgggacacctttgccattacctac

SEQ ID NO: 129897 - DNA, 411 bp, Glycine max
  unsure (1)..(411): unsure at all n locations
gatttgtagatggtaacatttaagtttgttcttttatgggacatgatgnaaatgtgagatctataaaccacggtaactttcttgaaatgataaaactcctcgcttcaataataagaaaataaatgaagttttcttggaaaattcccctcaaaatgcaagatacacttcctcctctattcaaaaacaaattctacatgtctttcctaggaaagtgcaaaatgaaattcgagaaaagaatggtgatgcagaatcttgtttgattgttgatgaaacccgtgatgaatctaaaagagaacaaatggatcttggtcttagattcgttgatgataatgaatgtgtaagaagcattttttggatatgatggatgtgcaatgatgatgcatatgctctaaatacttaactccgtcgagt

SEQ ID NO: 129898 - DNA, 446 bp, Glycine max
gcttggaaacagtaataacatttgttacatggctgcttagcatgtcaaacaataagcctttacatgagaacaaagggaggggaaataatgtagaaaatgaacaagaggaagtagaaaataattttctccttccttgatttgatgccaaacatgaggcgaataaaatgctaagaaaaattaaaatcacatactaatccataaaagaaatttgtcaagatattattttaaaaagaaccatataatttaacattgtgaaaagttcctaaaggtcaagtcccacaagtttaacacccgatcaactgattgtctcaccaagaactaaaataacagactactatgactcccacagtagcactatatgtgtcttcaattcactgtctcaccacattgaatgtcatttcatttattgagaggaggattgatgttgaatgtgcattaacaagtgg

SEQ ID NO: 129899 - DNA, 468 bp, Glycine max
  unsure (1)..(468): unsure at all n locations
cttctacccgagctggtgttattctnttatacttgtgcccacgtcgatgggaaggtaatgtatnttctactattaatggcatagaaatggttatcgatgctgcagattggaaggcagtagtaggattggacatgggtggagtccgcaagtttgaagaatttgctaatggttacaacaagatgcagacttacagaagtattctccttgacccaacaacgaatttgaggaatttcctgttggacaagtggcctcaataacttaagaggagggtgaattaagtttcacaattttcctactaacaagctttaacctcccttttaaatgataggcttanaatgcagaagaagaagaagaagaagaagaagatgatgatgaagaagaagacaaagccatcaatttaacaatattcttttaaatgcataagatagaattgattgcaatataataaatgagatagtggatgagaga

SEQ ID NO: 129900 - DNA, 458 bp, Glycine max
  unsure (1)..(458): unsure at all n locations
agcttgcccagagaaggagtccacggatgatatgctgaccacctcanaagactggaaagcggtttctaacgattcttctgcggcttccacataaggcataaaggatgggcaactcaccaagatgtcttcctcgcctgacacgatgaccaaatgcccctccactacaaatttcaacttttggtggagtgtagagggcacaactcccactgagtggatccacgggcgccccaacagacagctgtagggggggttaatatccattatttggaaggtgacttgacaggtgtgagggcctatttgtactgggagatcgatctctcccctaacctctcggcgagtgccgtcgaaggcacgaaccaccattgaactcggctttaagtgggaagcattgaatggtaatttctcccaagtgctcttaagcatcatcgttaaactggaaccattatcgatgagcactt

SEQ ID NO: 129901 - DNA, 485 bp, Glycine max
  unsure (1)..(485): unsure at all n locations
tactcagcttatgaaagtccttctgattctgtttatgcagtttttctttatggcttgagatgaagttcaaagattggaccttttgctagttgttattgatgaatagcttanacacttgtgcttgagtgaaacagtggccgtgagactatggtttaagctactttccttgatatttgtcttatgcctaacttcatctaattgtataggttacattttattcttctttttgaataactgcatgctttgtgaaaaacaagtgatgggagcattttgcttcattcttttatcattcgatcagtaacttttggtgcatacacctttgtacatagtcactacatgttattgtcacatggngaccagtgagttgttctttattngcttgaggacaagcaaaattgtanatttgggggagatgttagtcgatgaatacgactaactttngtgtataaaacatgtgtaaattgtatcacactccttcaggttat

SEQ ID NO: 129902 - DNA, 142 bp, Glycine max
ccgaccccaaaaagacggggcacgaaaaaaaaaaggtaaaacacggaacgagcaggacggagaacaaacaccgcaaaaaacgaagaaaacgcccacgaggagccgggaggacaaagaggaccccgcccaaaaaggaagaaaa

SEQ ID NO: 129903 - DNA, 393 bp, Glycine max
  unsure (1)..(393): unsure at all n locations
agcttcagcaaatgtgccatgactatccctgagatcaaatctggcagtggcatatttgcattcaacttgacatggaatgatataaaaatcttgacccgtaagtcagatagttctgtagttgttagctattcaataaggtctattgttcttctacatttctgtatttgcatggagttaatccagacttgtcaaagcttaattattatttggctgaattgcaattntggttctcctagtttttcacatccatgattttggtcccctgaaagattattaactaataattatgattattaaagatattaaattaattataaattaaataaaaactattaatcattaaaaaacttaaataaaagactattaatcctaatgtggtgtactgctggtggg

SEQ ID NO: 129904 - DNA, 383 bp, Glycine max
tgaaatgacactggggcctgttcccttccaagaatattatactctcactcaattgatgctcagtctcttacaaaggaataggaatgctctagtgcatcaagtatggaattctgcttgcatcacgtatggtttaatctccatatctcatcactcttcattcctctcctactcctatctattctctctctacctcatctcacttattcaactccatatacctctcctcttaactattatttcctcattctcaacactctttctattccaacatccaacattttcctcttctcaatacctttaacacctcctaacttcaattttcttcttctctactccctataccttaccatctcacccatatttatatcttcctattttctttc

SEQ ID NO: 129905 - DNA, 356 bp, Glycine max
  unsure (1)..(356): unsure at all n locations
agcttctcgaacgtgatcaatacattcattgtcatagatngaaggatgaagttgtggtgcgtgatctattttggtgtcacccagatgcagtaaagttatgcaatgcatgtcatctggtgttttttatagacagtacctacaaaacaaataggtacagacttccactacttgactttgttggggtgacaccaacggcgatgacattctctgctgggtttgcatatctggaggctgagcgtgttaataatattgtatgggctttggaacgatttngaggtctaattttaagaaacgatcgcctccatgttgttattgtcactgacaaagacctagcactgatgaatgcagtgaaaatt

SEQ ID NO: 129906 - DNA, 388 bp, Glycine max
tgtatggttcttgagaaggtggatttgctaatatttgttgttagcaaattgatgttcttggaggatttccagtactcctgtgtaacactattataggaaaacatataatatagtattccaattggtacctgtcattttctataaaagtagttgagatctgctagtgctaatgatattcactttgtattgaattttattaatgatggattgaccagaagttctcaccttgaaactgtcaatgtaatttgcttcagtggttatttatatgttcttttgtgccactgccagcctgttatacttgattaccttgccagcaagactatttgttcagatgatttggtagttgtctcgccagatgttggtggtgttgccagagcacgtgcttttg

SEQ ID NO: 129907 - DNA, 396 bp, Glycine max
  unsure (1)..(396): unsure at all n locations
acattcaccacagattctgccttcttctattttcagattgggaatgcctctaacagtacctttgtcaatgattttcttcatgcctcttaagtgcagatgtccaaatctttgatgccatattctgacttcatcttctttggaagataaacatgtggaggagtagctggtttcttgaggtgtccataagtaacagttgtcctttgatctgctgcccttcattaaaacttcactcttctcattngtcaccaaacattctgactttgtgaagtttacattgaatccttcatcacacaactgactgatgctgatcaagtttgcagtcantcccttcactatcagtactttgttcagactaagaagtccatcatgaactaacttttccattccaatgatctt

SEQ ID NO: 129908 - DNA, 465 bp, Glycine max
  unsure (1)..(465): unsure at all n locations
tgtgtcacaattcattgtgacagtcaaagtgtcattcacttatcaaatcaccaaatgtaccatgagaggacaaagcacatagatgtgaaactacacttcattagagatgcgattgaatctaagaaggtgaaggtggagaaggtttcaacagaagaaaacccggctgatatgttcacaaagtccctctctagtgtcaagttcaagcactgcttggacttgataaattttgaagatgcctaaagcagattggtagaagtgcagctctaaatcacaaggtagacacttgctgatttagagtcaaggtggagatttgtggtgtgtgactcanaatcacatatgacacaagtgaaaagactntaaagtagtgttgtcataactggtttaagttattataactaannatggtttggcaccaaagcataactagagtgtacatatatattctcgatcatgtaatgcagtgag

SEQ ID NO: 129909 - DNA, 408 bp, Glycine max
  unsure (1)..(408): unsure at all n locations
agctagagagganaagaatgacagagagattattctttattggaggaagagaatgacagagagaggggcatgggaattgaaggagattagggagagaagttgaactttgaagtgtgtctcacaagtttctcattcatcaaagttatgacaagtgttacacatgtttctatttacagcctagcacatgggaagcttccttgagaagtgaagaaggtagcttccttgggaagctagaggaagaaagcttccttgagaagctagaggggggctactcatacccctccaatagctaagctcaggcccatgccaaaatacttgaaaatacaatggaaagcttccttgagaagaaaggaaggtagcttccttgggaactaggtagacagcttcttattagctagagggggcttt

SEQ ID NO: 129910 - DNA, 286 bp, Glycine max
  unsure (1)..(286): unsure at all n locations
attttctcgaaattcggtctgcagcattacaagacaattgtccataatctgaccgttgggatctttgagaagttgtctggagtgtgctagaagcttccgctcccgagagcatttcttatttaagcatttcagtctttggtttcgtgtagcttaggaaaaacgtcatttcttctcgtttctttcttccaaagccatttctaacatcccaagcactttctccatcacccacagccaccattagccaccacanaccatcgttgttctccattgaaaccccacaccgaga

SEQ ID NO: 129911 - DNA, 436 bp, Glycine max
  unsure (1)..(436): unsure at all n locations
agctntagaccttgttgaagagacaaaatgatgttatcctaccccgcaagggcattggctagaagactccaagtagattgggctagagatccaaggaaaggccctagggttctcatgagccttagggtagatttcgagcccatgggctaagtatgagcccgcttatctttgtaaatattagaataggttattccttcgtctaggccttgtattttggccattctagtagtatagggttttagccttgtatttcggggcattttgagctgtgtttgtaataaggacttttttttgttattttcatgttttttgtcatgggggtgagcttagctattatagggggtgtgtagctaagctctatcttcttatctcaaggaggctgagctatctattatagatgcatctgttactacgtcttaccttcttatggaatctt

SEQ ID NO: 129912 - DNA, 429 bp, Glycine max
  unsure (1)..(429): unsure at all n locations
tgttccccanatccctgaaaaatataaagatccaggtacattcagcataccttgtattataaggaacaataagntttaaaatgtcatgctagatttaggagcttctgttagtggtatgcctctgtctatttttaattctctatttcttggtcctttgcagtcaactgatgtggtaattcatttagcaaatagaagtgttgcctattcctgtggtttcatagaagatgtcttagttagagttggtgaactgattttccctgttgatttttatattttgaatatagaggagggattttcttaaggatcagttcccatcattctaggcagaccttttatganaactactataactaagatagatgtatatgcaggcacactatctatgcagnttggtgatataaactgtcattttaatattcttgatgctat

SEQ ID NO: 129913 - DNA, 333 bp, Glycine max
  unsure (1)..(333): unsure at all n locations
gaagtgacagttttaaggaatttacttacagcgccaaccggcttgaacattgcaccacaagcaccttgctcaaataagttttgacgctcagactgctctagattccctattatcttgttagccactgcaattctttcaccacgaaccctctcaacttactgctatctgtaagacacacatcctctattccaacgagatcaaagatctgctngcaatacaccatcacccatctttcaagcatttcagtgatggttggttgctcacatctaacataatcttaaacattgatgtcttgttccgacaatctgcaatgagaaggaaattgacccgaca

SEQ ID NO: 129914 - DNA, 333 bp, Glycine max
catgtgaaagaaactcatcatccattgactgtgatatatagttagggtcaattgattcatgcgtaaacacgaacttgtttgtttggtcaatgaaaaatggtggaaatacaagaggatagatttattgttccttatccggtacgatgaccggagaaagtaaattatttaaaaaaacgaagaagttattgaatttatttatcactcatctcatatcgctatcgttctctacatcacttgtatactcttttcaacgtcacactgctattgtaataataattctttactggttatttaattctaatccaaatattaaaggtgtgatactaactaact

SEQ ID NO: 129915 - DNA, 243 bp, Glycine max
taaggttattgtcggttgaatttgctcaaagcttcggtattcaatttcaaagcttctcgatatattacgggactcaatcagacatccgagtaaaaagttattgtcgtttgaatatgctctgaccataaacattcaatttcaagcgtctcgatatattacaggactcaatcagacatcctcagaaaaaggtatcctcgcttgaatttggtcagagcttcacattcaatttggagcggctcgaat

SEQ ID NO: 129916 - DNA, 438 bp, Glycine max
  unsure (1)..(438): unsure at all n locations
tgcattnggaattgcgaaagccccactccatcattaggattattacctgacatctcaaacaaacaaatcaaacgtaacaagacaattatagttgctggttgaatacctcacccactcaagtgtatcacacaattatggcttttctctaatgaaacactcttgccttttaccactctaattccccttgagttcttaggcaattcaagagattatggccacaacaaagaacaattcaccaatatgtgtaaggtaaggctagagagacaaggaaaaggttaaccaagaaaaaggctaacaatgttnttaggcacaaatgaaggaaataaaattcagaatttaggaattcaagtaacaatccttcatgcaaccaatatattaccttatagaggttttttnttttaagttcttcaagcatgaaccattcagcccaattttttt

SEQ ID NO: 129917 - DNA, 386 bp, Glycine max
gcgtgaagactggatgcttttttcattgtctgcgctagcggatagacaatttccaaaaaatgtctaagactaattatgtctatctcttcacacaagcttaaaacccctttgtcattaccaaacaagctgagattaatcataatcacaagcaagatatcctcactatatacaagagataagaatgaaacataggaaaaggaaagaaaagctgggttccctcctagtaagcgctctgttaacgtcactagcttgacacatcgtcctgttatccaggatccaagcgaagaacatgttcaatctttccatagctccaccatgggattgtttcaaccattgtctcgtcactacccatgtcctgtcaagatcttttaaatgaggatcacaaa

SEQ ID NO: 129918 - DNA, 477 bp, Glycine max
  unsure (1)..(477): unsure at all n locations
gcttcccccaatttctataatagggggagaggtgaagtttattatggttcatccccttangcacctctctctctttcgaatatgcttggaaaaattgattccgtgaagaaaatccaagccgaggcgctttcgaaacgtttccgtaacgtatccgtgaagaatttcgcgaaggtttcgaccgttctttgacgttcttcattccgtcttcatcgttcttcgatcttcaacggggaagtacctcaaaccaagcttttcgattcattctatgtacccgtggtggtccacattgcgattctgtatttatattctcgcttcatttacttctatacgccccttttgacgtgcttaagccatgttatttatgttatttcttcgttaacctataaataaaataaatttccaccgatcgcttgaattgattatcccgtaacttccgttaaaagaatctcaccgtcggcgtgcctaaccacttggaat

SEQ ID NO: 129919 - DNA, 141 bp, Glycine max
  unsure (1)..(141): unsure at all n locations
cataagcctaaatgcctaanaaataagcataaatcttaataaaaatcattttttcataaaatataacctaattgantaattttaaaattcaaaaatattctcaacgcttcacgcggatctagttgatatgaagtcttcacg

SEQ ID NO: 129920 - DNA, 472 bp, Glycine max
  unsure (1)..(472): unsure at all n locations
cttctaagagngctcttgagaaatagatccttatctattccacccctctattaactaaattaacttccttaanaataattacggatgaaaataacgcaacaaataatcaaacatcaaacataattactaataatatatagatatatatattagggtgttacaatttgcatattgtaaattggctcctacctttaattctgttgtcgtggtgttcctttaaaactttgatcacaacttttgttaaaatttgaaccttattntgtatccaagtattgtgggattttagttctgttgtttatgcgatctccccttaactattgcactatatttcanaatccttatttgttcaattgttaaaataaatatcgacaaagcatggttatattaatggttataaaggcatgtttcaagaaactccacanattctcaaagttcatacaatacctatgcaaatgttatgaaatcaaatata

SEQ ID NO: 129921 - DNA, 365 bp, Glycine max
caccagacaaactaaatttgaaaaattcagctgattatttatataaaactaatacataaaagtgaaaacaatgaacagtcaaacaggacacaatccattagtagggttgccctgaacagacctgagatagacagtgacctctgacatatttcaacaagtgctgaacagtggataaatgaagttcatagatacagaattgttggagcaatgatcctcaattacacacaaaccaacagaaaaatttaaatttcaaccttttacatagttgaaattcactccaaaaccataacttccctgataagataacccatgtaaacagatcacacacacacacaccaaatgttcaaaccataagtaataatttt

SEQ ID NO: 129922 - DNA, 382 bp, Glycine max
  unsure (1)..(382): unsure at all n locations
gattctaaggacagtgaatattattttcctgaatttgaggtcaggagaatacctccagaaatgtagagaggagatagatgtgctgaatattactttcgtgtcttctcattcattctaacgtgactttataaaggcttacaaaggcttagggaattcaaaatagcagtactgaaaaataacagactcctaacagattcttaacagctctagtcattcactaacagctgactcattaaaaacaaatgctggatcactacaaaacaaataaatgactcatactacttaggggatgtattcgtcctagcnttgaggtctcttggagatcctgttgaacttgtgattatccattgggccttgggttctatcattccttaccccttca

SEQ ID NO: 129923 - DNA, 447 bp, Glycine max
ggatcttaagtcgactgggctgcagctcatcctagatcctctatttttcttgctcgatttatacaaccctcttaggtttagactaacttaaactgagtttcgtctgcagatcccccatttaagactagactcagctcaagtagcttacaaaagtttagcctaagcttcgtccgcagatccctcatttaagactaggcttaaacaaaacagcattattgtaacaacataattaaaaccaaaacttaatccgcacatccctcatttaagactaagtttcgatcttgcttcaatcaagttctaaggcaacagtacatttcccaatgctaaagtcacctaactgtgcacacaaatgggtgatcaggccaaaagcatacaaacattaagcattgaatggaagaatggacacagaaaacacaatcaattagatattatgtgattacattaggt

SEQ ID NO: 129924 - DNA, 401 bp, Glycine max
  unsure (1)..(401): unsure at all n locations
ntgagccaaaatcctgactcaccatagaccttgacttattgtgagaatgccaatccttaccctcggaagcaaaaaaagaatagaggggaaatttccgatcaaagaaaaagagaaggaaaatttccaatgaaagcaaaaaagaaatgaaggaaaattccccaatcaaagagtgggagaaagcaaaaaaaggaaaagaaggataattccccaatcaaagagtgggagaaagcaaaaagaaaagaaaggaaaattcccaatcaaagaatgggagaaagtaaaaaaggaagaagaagaaggaaagaaagctcctgatcaaggatcgaaagataccagaagatatgtgcagagaggtctttggaccagacaatatctgaacagtacagaattgtcaccaaatgaac

SEQ ID NO: 129925 - DNA, 449 bp, Glycine max
  unsure (1)..(449): unsure at all n locations
tcttcttcaactgtgttggtagcagcagaagagcttgtttcctgatcccttgccttcaaggcgtcgtttgatgaataaagggtgccatcatcatcaccctcagatgacttgaaaacttgccttaaggtgaaggaagcacatgaatggtcgctcttttggccggtagacatcaatcgcatgattggtagatttggcttgttaagctcatcaaggttgccttcccaatgctggtttaaccaatcacatatgacagaaattggtatgccaacatgcatggcgtggtctttcttccaagaggatgatgatgatgaagttgaagttgaagaagatttggtattatgtgatgtggctaacttcataggatcgcatatcataacagctagatngccgcgcacatcaaaacctgcagaaccaggactccattgaatttcattcattgacagtcttat

SEQ ID NO: 129926 - DNA, 445 bp, Glycine max
  unsure (1)..(445): unsure at all n locations
agcttaaaccctactacatcaacatgcattgcgccaacgccaagcctcaactcttacgtnagggtaatgtgagattactaactncactgcaaatgccaactttaaacctncctctgacacactcttgaaactaaagcttaaaccctactacatacattgcgccaacgccaaacctcaactctcacgatagattatttttaaaactaacatcatattgtttctcacagttcgttttgtttcttagggtctatttagtgttgtgatattcacttataattttttaaagagtgtatcaaaatcaagtgatatttaattaagatttttaataacttcaaaaatacttttgatatttaaaaatacaaatcttttttttctctcattactcantaattttacttatcaacatccagcataagaatccccgggtattgaatacacattaatc

SEQ ID NO: 129927 - DNA, 444 bp, Glycine max
atactgcagactggttgagcaaatgttctcttttcttcttttacataccgagcacccaatacttgatggttcaaaaccgaaatacttagtagtatcagcaatagacaccccacttgagaccttgaaattgacatcacttcactacaattgtcaatgattattactaatcctcttctggtttctatatttgaaccaaacaggaatttaaaagaaagataatcaaagagaagggaaaaggagatatggcttatgcgttatggcttgtgactcatttagtatgcagagtttgaaatcgagatatagttattacctcccatgtgtaaaacatagcattattcaatagtaaagaaagggaccagcgaactgtatggaacaaatggtcaagctcgtgtttcagttaattagtaatattagttccactatcgatcaagtcatattaataat

SEQ ID NO: 129928 - DNA, 428 bp, Glycine max
  unsure (1)..(428): unsure at all n locations
agctntattgataggtaataattaaccgtatgtctttagcaaatctttcctcctaaccaagtgtttaagaaaaatgtaaaatgtgttttaattttcttaatattcaatcattattagtcttattttttatattttagaagcaatgactttaattctcacatttgttgttataattaatgaattttttcatccaccctaaaatcttaattcttataaaaagaagacaaaagtcattaattataagaaaaaaaataccatgaccaaaatcattatttttaaaatacaataaataaaattagttttgatggaaaactgtgggaactaaaacacatttatactccttaaaaaaatagactagtacgtagttaaaagtccatctcttcaaaccttaataacttgaattcgaacttttgtatttttacgaaaat

SEQ ID NO: 129929 - DNA, 389 bp, Glycine max
  unsure (1)..(389): unsure at all n locations
ntaanagtgtntacatactaaatatacatagtctattgttatacaaatttcctgtggatacgatactcggtcataccattttatatactacttttgcgaatcagtacatttgtcgaccacccgaacaactacctctagctttgttatggtctaggaattgtcatcctcaggaaaagcagtggtaaactccacatattagttgaatgcaacagtacaaaaatttgatgatgttcaaaaaagactatgttgatttaagcggacaatgaacgttcacataccgatgacattgtaatgtactacattaatatataattgtttcgctgcatattcacgtaattatgtattataccttatgttaaacttaactggttagggatactccttaactt

SEQ ID NO: 129930 - DNA, 366 bp, Glycine max
  unsure (1)..(366): unsure at all n locations
gcacgtggaggacgaacatatattgtatacccatcatcaacatcattatgaggtatagacatcctattcctagacttatgatatgttggatgaactccatgggtcttgtgttttctccaacatagatttgaaaagtgattaccatcaaattacaatgagagaaggtgatgaatggatatctgttttctaaactaagtctggactttatgaatggttggtcatgcctattggcttaaccaatgcaccaagtactttcatgctactcatgaaccatgatttgaggcacttnatcggcaaaattgacggtggntactttgatgatatctttatttatagcttaaccaatggatgaccacttataccatg

SEQ ID NO: 129931 - DNA, 353 bp, Glycine max
  unsure (1)..(353): unsure at all n locations
atccgtgatggaaattccaatgtttctgcaaggatggacctcattctgcttcatgcaaaggtatatatgcttgctagctttttcatttctcaaacgtctcttttcatttctagtttagttagcaaacttggcttcttttttgttgaagaagccgtattagtatattataacaacaaanaacgagcgttttgctaattaacaaaggcatgagtaaaaggtggaatatccgggttttttttttatctacaaagacagaaagacaaaggtttataataattcacattggtcaaccaacttaattatacccctttaaaaatctcatatctttaacttccttatgaacacttaatctt

SEQ ID NO: 129932 - DNA, 427 bp, Glycine max
tccttatatgccgaacttatttactcttcacccttcctctctagcaactgccaaacattagtcaaagcagcactttccctaatcacacagcaaacaaggttttaaaaaaaaaatcactaacctttcatttcatgactaaaactaatacagacatacttcaatcaatcatcaattcacataattgaagaaataaagcacacaaactaatacacacatacttcaatcactcataaaaaattagtaactaccacacgttgataaaaaaaacacagacacacatgtctttgtaagtaacataccggttgggtatccaagcgggtgggtcgggaccgtaatccttgtagcaaccatagtacagcatctgatgaaaggagaagggaagtcagggttgaggatgctgttgctgacgtgctgccacgtggcgggg

SEQ ID NO: 129933 - DNA, 397 bp, Glycine max
  unsure (1)..(397): unsure at all n locations
acatttatgactagatgaaggagaaagcgaaaacagtgactgaaggtccacatactggcccagaaactctaggcccaaattcatcgacccttaacttaacttctccacagctaccaccaccaccacaaagactggttccttctctaactctctggtacttttcttgcctctctcttctaagcagatactacagcgaaggagcatctttcattgtcaaaccttatgttttacattctagctacaagggcaggnggaatttttttattttttttttcacaggcataatacctttgggcaaatattagtattgcaagtatgcatggtaagttaaactttatacaagtaccaagttaaaatgataatataataaaccaagtttgatttatgaatatttatg

SEQ ID NO: 129934 - DNA, 370 bp, Glycine max
  unsure (1)..(370): unsure at all n locations
tgcctctacatgaaccgaanatcttaggtcgaatgcaaaaatcatcatagcgagggtggtggaatgatgcatatcggtgctccttgtcacaatatgatccaaaaacctcaccatctttggntagtgcttttgnngaatatcnattanaaatatggataaaataagccttaatccaagatgaccacactntataatccttcatcacccatatctcagacatttcatggtttcaaaccgagcaactcacactgagacaccctcccattattcttagactatagagtgcatattttcgcacagcacaatgatcaacaagaggatttctcttaaagttcttgtgtgagatcataggcataatcacatattcctc

SEQ ID NO: 129935 - DNA, 312 bp, Glycine max
  unsure (1)..(312): unsure at all n locations
ccaatctttttacaaattctaattcagtacctaactttgctccttagaagaaagataatgtgaaatcaatttcgcanaaccagtgattaaacaaggcctcagaagagctccagaccaaaacgacgacgtttacagtatttcaccagttcaatcaaacaaagcatcatccaacaaaggagacaacgaaggtgagagagttgttaactaacatcatattcggcgaactgactctgcgtttcggagaacccggcaaagtcgtcgatgtcgtcgccgccgtcttcctcgacatccggaacctcttcgaataaattg

SEQ ID NO: 129936 - DNA, 478 bp, Glycine max
  unsure (1)..(478): unsure at all n locations
tcttagtctcacctgatgaattcgtggctacttcatgcactcctctaatgacaatagcatcacttctggtactgaattgctgggagttggaagccatcttctcaattaaatatctggcttcagcaggggtcatgtctccaagggctccaccactggcagcatctatcatacttctctccatattgttgagtcctttataaaaatattggaggagaagctgctctgaaatctggtggtgagggcaactagcacataattttttaaatctctcccagtattcatataagctctctccactgagttgtttaatgcctganatatctttttctgatggtcgtggtcctggaagcagggaaattnttttctaagaatactctcttgaggtcatcccaactcgtgatggacctcggagcaaggtaatatagccagtcctttgccactccctcttaagaatgangaaaggccttcagaaatatgt

SEQ ID NO: 129937 - DNA, 374 bp, Glycine max
agcttgacaacatccaagcagaacaacattttaacagcacaagctatcacagccaagcaaaacagaacaaaggccgaaaactctggtcaaacaccaaccaaaatcacagctttttctcgcttaaagaccccacgtacaattccttcgatccaattcgttaaccgatggatcgactcgaaaattttaatggaaggctctagtacataagcctacattgtgaccgttgggatctactatccaacatgcagaactcattctgcactagactttccacaggcaaccacacacaagcatttttctgcacttgtgcaaaattctgctgcacaatttcacagcaaaaattctgcataagtgcagattgtcgaaatcacact

SEQ ID NO: 129938 - DNA, 383 bp, Glycine max
  unsure (1)..(383): unsure at all n locations
agctaacaaacttagaaatcaagtgatcatgtattccgaaatatagggggagaaaacggatgcacattntatctatatacagntgtttgttgtttgcttgaatcttgatttcaagtattgtattgtcatcatcaaaaagggggagattgtagatgcaattggctttgatgttttgatgatgatcatgatgatgtgttgcaattgatgcaaatgggcttttcaagattaaaattcaagacaatacttcaagattacaagtcacaacatcaagatgatcactataatattatgaagggaattcctaattgaattagcaaaggtttggccaagtgatttaaaataaaaagtgtttttcaaaggttttactctctggtaatcgatta

SEQ ID NO: 129939 - DNA, 354 bp, Glycine max
ctctgcatgcacgagagtttggccttggcttgtagcttttgcctgtctaggaagttctatagagagaactgtccgacctccagagagttctgatagattctgctgtgtgaagatctgctcagacgagagctcgaagcggaagcctgtctgcgagctcactatgagtgagcgagtgattgtgatatcctacatgcgaaggatacatcctcaccacttgtatttctgccatctttcatcatgctcttctctgtgctggagaggaagtctgctgactatggaaacctaaatcctcttgtggatctgtccatgtcgaacctgcagttacctattcctatctttgccagatgaattctg

SEQ ID NO: 129940 - DNA, 438 bp, Glycine max
gtatacttgatacccttctaaacctttcatcatttctatttcatgctctcaatacctttcttctcctccttctcgtgcttccaaactttttcaacctaattggcaaacctcccaaacaccttcaccactgctgcttttcttctctggcaactccattgttgttattgtttggtgtggttgcatcacaaaccactcctcacctaacaatttttcttcttctttggtgatgactattgtgacaccatagttggctatgaggtaccttcatccttgcacctactacaagaaaaagcaatattgccaacggccaaattccatcggtaacaaaaaaaatccatccgtaattaagactttctgacaaacaaatgttcattagaaaaaataatcctcagtaattttaaatttgtcagtaatttctaacgaaacacccgtcagtaa

SEQ ID NO: 129941 - DNA, 419 bp, Glycine max
  unsure (1)..(419): unsure at all n locations
agctttgaggatcccttattatcattttgttgttgagtctcccatctactttgctaattcaacgtacctacaagaaaggttagataaagcgacttgtagattggtgatttgtgaatgtttagtacatttcaaatattttttagaagcattttgagtgattgtgagattccaaccacttgagagcntttcccgctataggatactgagatgggttcgagaagaggaagagcgagtaaaagcaaacaatgagagtactttgaagtgcatatatttggacatgacaggtatgtatttcatctgacttaaagttttgttatccaagtattgagatgctcttgactgaaaaaaatagtttctctttttttttcccagctgttactgccatagacacaagtggaattgatactctatgtgaactc

SEQ ID NO: 129942 - DNA, 473 bp, Glycine max
  unsure (1)..(473): unsure at all n locations
ccttagaatctcagcttgtntggatgtagntaatttgaaatgctattttttttactttgtaatagcagacagttgaacttaatttgaaatcagtctaatttactgtgtttacagatgcactcgcatgtacctaatatagttatgtctcaagaactttgaggacatttacgatgtcgatgtgttcatgaaaagcatggaaggagtggtcagagtgttaaaggatcttccttctcatgtatcaacacataaaattgccgccgtgaagggtcctaatcgggttacagaagactacatagctcaacatgttgaacctatttatagatcaaaggggagtgtcaggcttgctacttatttcccttcaataaacatgagaaaagcaggggaaaaatgtgatgctgaatctgttgcatgcttagcaatgtatggaagcttatatgtgcagcaagaacacatgaccttgttgactaatggtg

SEQ ID NO: 129943 - DNA, 416 bp, Glycine max
gtgggttaacatttttttttttaatcacccaaattaaacttatggagtcaaatttcaggtatctctaaaagttttggtcttttggacagagattaactcttgaggatctaatcacaatttaaactgttcaccctattttaacatgcttaagttaatattgcaaacaaaacatttgacttatttaaatgccaatgaaaatgctatttgttgacatttacacactacaaacattgtacccgaaaaagctaaaagtccaacattcagtgtgtatttgtggctgtgaagtgcctacggtggccaacatttgaacttgaaacgtggactcaactttaagcttagtgctctggttggtccaaaattgcataacgtatgtcaatgcctattaaaaaatattccacaaaaatatcgaaacatgg

SEQ ID NO: 129944 - DNA, 469 bp, Glycine max
gcttaaattgaattaaacttcagaactgcggttattttaccaatatggaatcgattacatagtgcaattttgaattcagatctaatagctgttattaatcagttatggccactggtaatcgattacattctctggtaatcgattaccagagagtataattcttgaaatagactttttaacttaaatatcttggccaaaccttttgctacttcaattggaatacccttcctattaaatataccctttctaagactctagagactatcctgatcatccatcttgaatatctttaattcctttgtcttgaataaagctttgagacgcatgtgaacctttggcatcatcaaaacattcagcttgatcctttgtctacatatatggtagccatgaatctctaaccttgcttccctagcatggatagaataaatgcatgcaaatttctgaaccctattcttcatatccttttcat

SEQ ID NO: 129945 - DNA, 401 bp, Glycine max
agcttatacaatgaattaccttgtatcctttttcctactttccttaatgaagcgttatcaattatctatgatctttatcttattcttggtgataatttcattcctaatctttgaatgatcttaatacttttattactaaagataaacttttcaaccttcattgtttatgtatatatctcttatatcatttcaatttatacaaaagtttgcagcaaagactattttttcttatatacacagtttgcatcaacgaccctgtatgtaagtggttgatttggctctccttcgatttttgtttggagaactcattttgtaaagcaatcatgactaactctttgtgaacaactttttaaaacactcgtatcacaattacaaaaaattctaacataaataatctttat

SEQ ID NO: 129946 - DNA, 351 bp, Glycine max
taagaattccatctatggatagagacaggctctttctctttgctatataaaaattcatgaggtcatttcttcatttagctttgaagagaatgacatggatcactgtatataccagaaggtcagtgggagtaagatatgtttccttgtgttatacgtagatgatattttgcttgcgactaatgattagggtatgctatattatgtgaaacaatctctcttcaagaacttgatttgacgatatgggagaggcatcttatgtcttacgcataaagatccatatagaaagatctcgaggccatttatgcttgtctcatgtaacctatttcaaccagttttagagagatttaatat

SEQ ID NO: 129947 - DNA, 274 bp, Glycine max
  unsure (1)..(274): unsure at all n locations
agtgaagttgattcgagagaaaataaaacatcttatgatatgcagaaaagctattatgattgaaggaggaagccactagattttcaggaaagagaacatgtgtttttgaaggtttctcccgtaaccggagtcggaagagctcttaaggctaggaagttgacacccaagtatctaggtccgtatcagattntgaagaagattgggcctgtagcttatcatatcgccttacctccgaagttatcgaaattgcaccctgtgttcatgtctctaactg

SEQ ID NO: 129948 - DNA, 481 bp, Glycine max
  unsure (1)..(481): unsure at all n locations
tatgcgcatatntccttacgaacgntctcttgcacaagacattctattaactaagaaaaatgcacccatatacaatcaaagcagctttgttacctagattatttacacgtatttccaaggtgtatttgttacttacatcacacacatctccttggctaaatttacatacatgcatactcaaagcattttggggtaccaaaaattgcacacgcgcacatcttggtatttctaatacctatacatacacaaacttcatgatgaatcttgactatcttcacaaaaaggtgctacactntatccctttttcaagtttttgctacctaaagccgcatgcaaattcaagcatattttcctttgctgactaanatngtattcaaattaaaagggatattttttggtatatgttttcttcacataacatgcaacatatttatatatatnttttgtgagacagtttgactaccaaaaattatatatacat

SEQ ID NO: 129949 - DNA, 432 bp, Glycine max
  unsure (1)..(432): unsure at all n locations
ntgaaganacaacatatataaacaatntacgcgaatcattctttcattctttcttgtaaaaagctttctgtaaattcttgtaaagaaacaaatctctcaaaacaccttgtatatcttgagagaaaagattctaaatcatgcaggtttcaggttntaatgatgccaaaaagaaatttcttgataattattctcatcatcaaaaaggaggagaatgtgaataatgcacgttttaatgatgttgattattcacttgataatgattgtcatcatcaaaaagggggagattgttaatgtatgaatacatgattttgattatgtcaaagaataataaaacaaggttgctttcaagatgacttcaacaaacattcaaaggttaagcattgcttcaagaataagaacaggttgcttcaagaatcattcaagatcaacttt

SEQ ID NO: 129950 - DNA, 337 bp, Glycine max
ttaagcactgagcatgcaagcaggggcagactggaatcaatgttttttcaatcctactctcttctggcaagaatgactttatctcccatatgcataattatgtatatcgaacatcattatgttcgatatgacatgcctacattcctaatagcctcgtcgtgatatcactatttcactggtttcataataccattactactgtttactcaaaaattttcgctcaagactgctccaccacttctacaagtttaaatcttctgaacttctccaattttgtttcgagtacttctaccaagtaacttatctaagatctaactcccttcttataatctctttt

SEQ ID NO: 129951 - DNA, 380 bp, Glycine max
  unsure (1)..(380): unsure at all n locations
attttctacatcgtcctcctctgttagtgtctcactctcctccctcggtatgggatactgggattaaagaatgtgatttgtttattttcttcactgtcttctttctctggtgaacaatcatcaatttcgagtactgtttgtgtgcctgaacacatgaatttgaacatcctaattaaaacgaattttctcttctagtaaaatcaattcagagtatatattttgtaacagattaatcatggtatgcttggaaaatngttagaaaatgctaaacgtggatacgctacgctattaaatagttgctttggcatcactcttgatgtgactttgctctaaacatggatctcatatgtggaaccaaacacgcactcagttattccata

SEQ ID NO: 129952 - DNA, 381 bp, Glycine max
  unsure (1)..(381): unsure at all n locations
ttctgtgcctgtatgtngatgatctgctaatcacaagaagcaatccactggctaaagagaaatttaaggagagattgaagcttgaattcaaaatgacagatctgggattgttgtcatantttctaggaatggaattcaagaaagcaaaggagttgatgatcatgcaccatcaaaagtatacaactgatctgctcaaaagattccaaatgatgagctgcaatccagcatccactccagttgaaccacgcttgaagttagtgaaggatgagtcagaaaaatcagtggatagcaccctattcaagccagttgtanggtcattgagatatctctgtaatacaagaccagatatctcatttgcagtgggtctattagcatattttc

SEQ ID NO: 129953 - DNA, 450 bp, Glycine max
  unsure (1)..(450): unsure at all n locations
ataactcttgcttngaaaaataacatatcttcttctaattaatttatgatatcatcaagttcaacgacactttttatgacatatgcaatgctcagtcaacatatatgatttgtgcttgatgagctagcagctaatgataaacaataagatcaataggatacacctcttgccagcatatgaaaacctcactgggaggttccaagacacacatggtaagtgtgtttatgactacattgatgatagagtattggacatccaaaatagactccactgttcatttcttgttagtgagagatgaangccaaaagggaaagctaaccttacctttgaatatagttcattgcttataattctttctcccattttgttcattactttctgcaagttcttaatgctctcttttacttatcattaattttgtactattgtttagtatcacttttcaacaac

SEQ ID NO: 129954 - DNA, 290 bp, Glycine max
  unsure (1)..(290): unsure at all n locations
gatccttaagcacctgcggcatgcaagctngttgagcatgaaagtacttggcattatagaaataatatactggagaacataaaaatttccagtctaaaatttttaactgtttgatgtagagtcttctgatatataggtcactccgtggttctgcagaactgaaatgattagtaactgcctctatgtacctaaatgtctttttttacactntaatggtgcctctcccataaggctatgttttgatatctagaagcgaatagaatgcattaatattaggctaaaatatgttt

SEQ ID NO: 129955 - DNA, 463 bp, Glycine max
tatcatagtctatgtaaccactctgcggattaaccttattatgcttagtctcaaagaaaatagaagcagctgaaaccttctttccccctaaagtataataaccatgactcaaatgccccccagaaggcgaatcaagacccataatcctatccccgggatgcaaaatcccagtgtacacagcgaaattagcagaagtacaagaataaggttgaacattaacaccccaattgttggggtgaagatcaaaagccaacaacgcacgctggcaacagagaaactcaatctcatcaatgtattgattaccagtgtagtacttatcaccaggcattccctcagagtacttgttgcttatatggcttcccaaagcttccatcactgctctgcacacgaaatgttccgaagcaattaactcaattcccttaaactgtctttgtttttccttccacatgatataaaaaatctc

SEQ ID NO: 129956 - DNA, 393 bp, Glycine max
gaattacttagggctgagtacctgggttggagcttggctgaaggagtaattggaaatagctctaggagctagagctaagcttgggtattgaaagcctatactaaagagtacaaatttaaggtttttgtttcagaggtgctaagctaagtgtgggacctacataatgggatttgaagctatttgaaaggttgcgtagagcttatgtatgtctactatgttacttatgtatgacatttgaattattgttggaatgttaaatatggacataattataaggttgtgattattctattgactttacctatagatgagaacattatatcatagcggtattgagacgattatactttgaaatattattattataagggtggctaacggctgaggaatatt

SEQ ID NO: 129957 - DNA, 467 bp, Glycine max
  unsure (1)..(467): unsure at all n locations
tcaattctctagttccagtatcacattcaaaggtacgattgacttttatntgnggaaaatagtagcataatctcttacactttttttctacacactttctcccataaggtgaaattcaagtgagtccaactaaatatgtaactctaattcttcatttatattttattttatttggataaacttctctaaatgcacttataggagaagataccaaaagggaaaaatgaaataagtttctcccataagttgaaattagcttatgtataagctaatttgtatgaagtttatccaaacaaagtcttagtgggtctcatctccaaattatagactcgcatgaattgtaactaacaaaagtgagtgtgtttgaaagaaagtgttagtgagtgtgttatatgataaataattcagggtaacataatgtctattataatggaagggtctaccaacaatgtgttatatcttgagga

SEQ ID NO: 129958 - DNA, 388 bp, Glycine max
tttattcgttgaccacaaagtggtacctggagatatgtcgcgggggtcaggagaccttggggacgtcaagtggggtgctattgcctaaaaccaagcttgaccaatcccgacccaacccgggcatagtcagtcagtgagaacctgtgatgtacctaaacaggcgagctcctggcagtcaacagataaaaggaacaaagaccacaaagcaaggaggcttgtgtggtggctggccaactgtgaatcttgtgtgatatatgggttatggcctctggtaatcgattaccaagggtgggtaatagattacaaggcttaaaaatgaagacaggagactaagatggtctctggtaatcaattaccaaaggagtgtaatcgattaccaggcttgaaa

SEQ ID NO: 129959 - DNA, 414 bp, Glycine max
  unsure (1)..(414): unsure at all n locations
cttacgctgttgaatggcttcagattgttgcacaaaaggtcttatgtctgtgtggtggtaggcanangaccataaaccattgagtctgtcgacaggtgcatatttttgattcacggccagttgggttaccatgttaaccaaggcatttagtttaccttcaagtttcttagtctcggctgatgaagatgaatatgtggttacttcatgcactcctctaatgacaataacatcacttttggcactaaattgctgggagttggaagccatcttctgaattaaatttctggcttcagcaagagtggtgtatcctaaggcttcaccactggcatcatttgtgatacttctctccatgttactgagtcctttataaaaatattggagaagaagcttgtcgcaacctacccttcggcggga

SEQ ID NO: 129960 - DNA, 307 bp, Glycine max
tctgactattggtttcaatgtccggtctgagccaattacattgattacaatacgaacgaacgagtgttgcaaccacattctatcgacatgacacggtattgcaatcatatgtaacatgctccataactctgctgaacggcttttggaaatcaaaccaacgcatcgcacaactatccattccgcgacgactgctattcagcccactatccggtctgctgtgtattcaacactataccacgctgctccaccagtctaggatggctatgtaaaccctgaaacaaattactctgcttgtatcaattcttac

SEQ ID NO: 129961 - DNA, 305 bp, Glycine max
aaatgatgggaggaaaggaattcatttattgtttacccatttcagagacacggttacgagtgagtgagtgatattaaactatcaagtgagagaggacagtgttataacgcaagcacccttttgtcatttgggtttggcactggctaaaagttaggtgcttggttcggaggaaagtggtagctactactattgagaaggagaagaatgaacttgtttttctttttaatttttgaaaaaaaaaattccaaagtgtaattctacttccctccaatattaccaaacgaacaccacacatcaacatggtc

SEQ ID NO: 129962 - DNA, 465 bp, Glycine max
ttatgggtatattgcagtgatttttgtaaataaatcttgatttatagttaatactatctctagaacatgttgttggatcaagtggcctcagaataattaagaagggggggttgaattaattattaattttccttgactaattaaaagacttaaccttcttaaagttactagatttaattaggcttttactactaagttaataaagtaggaaacaaaaatagaaacttaaccaaaagtaaaagtgggaattaaaagtacacggcggatattaaagagtgtagggaagaagaagacaaacacaagatttatactatttcggccacaatccgtgcctacgttcagtccccaagcaaccaatcggttcttgagatttctttcaaccttgtaaaatcctttacatgccaaagatccacactgtatgtaccctcccttgttctctttgataaccaagtggatgtaccctca

SEQ ID NO: 129963 - DNA, 279 bp, Glycine max
atatgagttaacagattgatattattaataagggataaactcataaattcacaccctaaaattttacatcaaagtggaatgctaaagctatttatatgatttggtgattacttgtcacgtcaatatgtctattgtctgctaatatcttgctcttatataattgtggtttttcttgacatatatttgtatttctaaaaatgacaaccgtttaatgtataccaacagttttcctataattttttcttctgtaagaaaaaaacttgttgatatcccatcgtt

SEQ ID NO: 129964 - DNA, 474 bp, Glycine max
ctggtcaagagtggaagattaaaaagtatgataagttgtttgtttaatcttaaaacattgacttacaatgtgtttggacacctttctttcttatgtaagtccttcaacaaaatcatgtgtttgatatatctttgataaacatactaaaggattgtgcaaatagtataaaacaaaaaatttaagtatcttattcatgaaacttgctcatatcaagctatctatgtaaattcaagttctagataaaggatattttattttaaatgtaaaagaacataaagcaaagttggtgctaaactaaaagcaaagcatattacatggaagaaaaaacacaaacaattgataggtgagagcaaaaataaataaaatgttggagatgtgactatattaagctaacaatatcagcagttataaaggttttctttatataatgtttactctaatgctaccttaatccactatggtgctgtaatcata

SEQ ID NO: 129965 - DNA, 446 bp, Glycine max
  unsure (1)..(446): unsure at all n locations
agcttgaagcatttgtattggttgttcttttgaatgttgcaactcagtccatatcatatcttttgtgcatcgtgcatcatcatgtgtgagtgagaagaaaatttcaaaagttagaaaacttattcagaaggcaaaactctctgtgttaatcgattacaaccttacaataatcaattacacaagttggtttaaacttatagagttatgtttcatataggtttagtcgattacaaacttgttgtaattgattacatagatgtttttgggacaatgactgatatattcaggagtctctgctntaatcgattaccatgtgatataatcaattacttctctttctataagtgtttcagaagtgagcaagaacactctaatcgattagcttgagtatctaatcgattacattgttcttgacctgttccacgttttgggaagaacactttaat

SEQ ID NO: 129966 - DNA, 456 bp, Glycine max
tcacatgtttgtcatcatatttaatgtggagaatgtgaatgtatgtatacatgattttgatgatgtcaaaagaagaatcaaacaaggatcattttgcttcaagattaatacaagattgtttcaacaaacaaagccttgattcaagatttcttcaagatcaggtcttgtctcacaatgaaaggtttcaagtcattcaaggcacatgtaatcgattaccaatacatgttatcgattaccaattgtttgaaagtgtgtaatcgattacacatcatatgtaatcaattaccagagactctgaacgttgggaattcacattttaaatgaagggtcacaactgttcaagataaacaactgtgtaatcgattaccagagaggattgtcaaggaatatcgtcaacagtcacatcttatcattttgaatttgaatggccatcaaaggcctatatatatgtgtgac

SEQ ID NO: 129967 - DNA, 456 bp, Glycine max
  unsure (1)..(456): unsure at all n locations
agcttacatgtgtcaattcgagtttctaatctttccatgcaatctcaaaatataattgttaaaaagtttaactgtttcaagtatgacttctcaacaattatttttgttgcatgcgataacaaagaagaatatcaaccagtcaagtggattttgatattgtccaagggacttgttggaactcataggggtagaattcccttgactagtaccaccaagatgaaccatttattggtaccaacaataattatggggagggggtcttgaaagaaataatgggtactctaacaatggtggtctctntgtaaagtattaaatgatatgaagaaattggtgatacattttgtacattgtaaaaaatcgattcttatttacctaccatatattatctaactaaatctaattgtctctagactcgttcctcaaaaaaattgatttgtatgggttcttcccttaact

SEQ ID NO: 129968 - DNA, 422 bp, Glycine max
  unsure (1)..(422): unsure at all n locations
cattagtgaaatcatgtgcatccatctccctattagtcctctcacgaggtggaggttgatccatgttctcagtatgaaaattagtactggaatgcttaaaatcagaatattcagactcacccttaacagaatgctcaaaatgctcaaaatgaccaggatgcacactatgcctaactaatctatgagaggttctatctatttcaggattaaagggttgtaaatcacctggattgcccctagtcatgcactatatgcagcaaataatgtgtttctcaacaagcacctaacaagggggtaaaactacagctatactcaaacaatatcaaaatgagctaacattttgtgaggaacaccctataatcatgaaaagatagcacanaaaatttaaaacaaaaattcagagtctaactatgaaaactaac

SEQ ID NO: 129969 - DNA, 329 bp, Glycine max
tgatcccgataatcgagacgctaagcgttgttgagcttgagccattatacgaaataagtgggtgggatgttgatgagtcctgattatacaacgctcgaattgaatgttgaagctttgagccaattgaacgacatacttttactcggtgtccattgatctcgttatatgagacgctcgggttgaatgtgaactctagcctattcaacgaaattcgtatactcgagccgattatgcgtatatatggacgccgaatggatgtgaacttgaccaactaacaataactttactcgatgttgttggcccgatatttggacgtaaatgatgttact

SEQ ID NO: 129970 - DNA, 363 bp, Glycine max
  unsure (1)..(363): unsure at all n locations
atcctctaagtgcacttccgcatgcagctcgatgtgacgtgtttattctattatntcctcttacgaacatcttcatgtacatttaacatcaacgcattacattattggtaattcatgcttttgtaaacataaaaaactaaagtgtgatagcttggccagtttagtggatcattctcacctaacaaccttctgcttttttatgatgacaaaccgtatagattttgttaaaatacctcataatcaacatgattagcacctatagagactctttatgagatttgtatatgtaacgcatttatactctacctgaggttcacagcttttaagcatgagtgatgatttgagaaagataattatcatgcg

SEQ ID NO: 129971 - DNA, 382 bp, Glycine max
cgcttatgcaagtcaattctcaggaggcatcttggagttgatcttttccgtgcatatttgcgcaaaatctcttgaactaaaaagatgttgtccatcatctttctgttcttaatgaaggcagtttgagtctccccaataatagtctcatacattgtggctatgcggttggccagaattttatacacaatcttgtataacaaattacagcaagatatgggtctaaaatggttaacctgggaggcctgatcatacttatgaataagcgcaataatagcatggttgatttgctttaaaaattttcaagttgtaaagaattcattaaccgcctcaaagatatcatcaccaatgatattccacgccttcttgaagaataaagcattgg

SEQ ID NO: 129972 - DNA, 468 bp, Glycine max
  unsure (1)..(468): unsure at all n locations
agcaccgcggctgcagctaaacttgaatattgataagtttttttattttatgtcacgcggttctattaagaaaatggtatcgggagactttcattatatgaaacagtgaataaatacatgattttctttataatttttctatgattattgaggacaaaatatctaaatagattcacaaatataaaaggggaaatatagagggatttggatcaattataatttaaattcaagtcataactaatctctatcattaatggattctaacaccccctttcaagttggtgcatgaatgtcacatatttccaacttgtcaagagaattactaaagatcttggatactattgtcttggttagcatatcaacaagttgttgttttgattttgctaaaggaaagacaataatactatcatattccatcttctctttgatgaaatggctgtcaatttccacactngatctaacaactac

SEQ ID NO: 129973 - DNA, 439 bp, Glycine max
  unsure (1)..(439): unsure at all n locations
tatgctatccacggatagaaagttgagtgtggaccctttttcttcatctacagtttcataagggttgattccattttaatttccattataattatatacctcatgaaaatcacattaaagcacaaatcctcaaaatgacatatgagtaaaaattatttatctataccaaattttctttaaaaacactcatattctgtgtctcattacaaaataaaccctaaatgataaaagtctttctcgtgcagacttatttttttaacttaattagcagcaaccaatatgtatatcgctttaattatatcaaacgaactactaaattccaaagaaaattcacaacaatcatgcatttggtactagcccggcaatccaattagtaggatttatgagcatcanatacataaactcacagtgagtaatgacaaataatctaacacaacac

SEQ ID NO: 129974 - DNA, 424 bp, Glycine max
  unsure (1)..(424): unsure at all n locations
acacangtactggctgggatggagagattttaatttattgtagttagagatgaatggtgggaaatcaaaattcaggtgtgtattattcaacgaaaatagatgttttgtgcacgccactctcttcttttgctttttatgtgtgaatcttgactttgcggccaaaattgcagctgcagactatattttataagcttgcgtctaaaattgtagttgataattacgttggttattactttgttacatgttacaagtgaggtagtttatatgcaaagaaatgaatgtgttgatatagagatgtttcttttaaaacctaatgaaatggaaatttattggatagtgttgtgttcaagaagagattgtaatgtggtgaagtagctgacatcaaattgaatggacattgtctactgcatgtgtatctgcatcg

SEQ ID NO: 129975 - DNA, 347 bp, Glycine max
tcgacaacattattggtgatatctcaaaaggggtaacaactagacattctcttaaagaattatgcaataatatggcttttgtatctatgattgaacctaaaaatataaaagaagccatagtagatgataactggatcattgccatgcaagaagaactaaaccaatttgaaagaaataatgtgtggaaattagtagaaaaacctgaaaattatcctatcataggaacaaaatgggtttttagaaataaattagatgaacatggtataattattagaaataaagccaggttagtagcacaaggatataatcaagaagaaggaatagactatgaagaaacatatgctcct

SEQ ID NO: 129976 - DNA, 443 bp, Glycine max
  unsure (1)..(443): unsure at all n locations
tctanactctatacaagaatgaagctctgatactacttgttatacaagtggcctcagatatcttaagaagggggggggggttgaattaagatattccaaactacttcccctaatttaaaattctatttcactttttattcaagttatgaattcccttaatgacaatcttcttatatattaattcaaataaaacaatctgaatatgaatataaagcaataatgaataaaggagattaatggaagagagaatgcaaactcagttttatactggttcggccacacccttgtgcctacgtccattccccaatcaacccgcttgagagttccactatcttgtaaattccttttacaagttctaaacacacaatgacaacccttcctttgtgtttataattcctttacaacaagagactcatggtctcttattcccttatagaatgaga

SEQ ID NO: 129977 - DNA, 269 bp, Glycine max
tggaaacctcccatatccatttttggaaggatttgatggcttgcttcatcaagcagtaccaatacaacaccgacatggctcctgacagaacccaattgctaaatatgaacaagagggagcatgagtcctttaaagagtatgcccagaggtggagggaccttgcaacacaagtggcgcccacatgatggaaagagaaatgataaccatgatagtggacacactgccagtgttctactatgagaagatggtgggtcacatgcccttgagtt

SEQ ID NO: 129978 - DNA, 446 bp, Glycine max
  unsure (1)..(446): unsure at all n locations
tacagtaagaggtgctgattcctttcaagtcataaatatgccacccaatagctgctntatgtttcttcaaaatttccaccatttgatcttcctcttccttctttaaagatttaatgataatcaccagtttagttttagtttctcctaagaatacatactttaaatgctcaggaagggtcttcaattacacttttgtttcctttgctggcttgtctttctttaactcctcataattcatttctgcaggggaactctcttgctcaccttctaattctttcaaacaactctgtacttctttttcctcttctgtcgtcaaacactccaaggtattagtcagcactttgtcaagtggagtttgcaaaaccatatctttagctaccatatcaacctcttgttccacctatctatcttataacatgccttatggtcactcgaatgcttcatag

SEQ ID NO: 129979 - DNA, 445 bp, Glycine max
  unsure (1)..(445): unsure at all n locations
acctgaggctgcaagcttgcttccacgaatctctctaccttcacagattatgttttacttattgatgggcttaagcataatttattaagtatttatcaatcatgaaaaatgccttctggcatcatctgatgctcatatattccaacaagcggtgtatcattttcttttgggctaaaaaatgatactttgaacgggatgacatgctctactctnttaattcattataaatttctgaatgcttttattctctctgctcctgacttgttttaatgttgataaaggcggagagatagataaaagataagattgtaggcgattatttattcttatgagacacttttatattatgaaatgatgaatcttactgttcatataacatcatgctatcacgggagtaacacccaatatcttttatccaacctacggggggcatatcaaataaaga

SEQ ID NO: 129980 - DNA, 361 bp, Glycine max
  unsure (1)..(361): unsure at all n locations
tcatgttttctccaaaaaaatctcttcttagagtaatgaattggnttcccttacgtcttaccccccccccctcattatatcaagaagaaattaacctctctaataagataaatttgctacatataaataatataaaatcgactattgccaattggagatgaaagaagccaagtgaactttaaacctacgctatggaaatggaaatggattgtggttcttaaatcgcaatgttcagtgaatttggttgcacaacagataggaattgttagaaacttataggaaatgaattgagacgcacacagagaaaaggaaccgaatgcagagaacagtgtgtgatggagaacaaacagaaatgggtgtg

SEQ ID NO: 129981 - DNA, 414 bp, Glycine max
ttcttttatatatcaaacctgatgattacaactttcctttcgaaatctccaagaaacgaaacctgaagtttatgaattgtaaagttcgttccaaaacacgtttttcaattgcttgaaagtgagaacacaaggtgagtatatatagagaaaacaattataaccgcctgtaattgattagattagcaatataattgattatctcgagaaggtaatcgattagatttcccatttaatcgaataaagtgttcttccccacatctggaaaacattcaagaataatgtaatcaattatagtgttcttgatcactttatggaaacactttcaagaatgatgtaatcaattactaaatcattataatcgattaaactagagacccaagaaaacaaacatggtttctaaagaactatgtaatc

SEQ ID NO: 129982 - DNA, 438 bp, Glycine max
  unsure (1)..(438): unsure at all n locations
cttggaatagaccgtattcaccttctcgctaagcctatcttctgccttagcgagcatcttctaagcgcaacattcctgtgctaagcgcgaggaagaatccagaagaagatgagttgtacaggttttctaagcgcaccgcttcatctctctaactacaccgcttcagttcatctgctaagcgagaaaggcacgctaagccaaaaatcactaatgtgcgctaagcggtccacacgagcacgaacaaggccacctatttaagcctgaaatcagattctgtgaagggagcttggatagggattcagagctttgcatgtctagggtttctagagagagaaaggtccaagttccagagagttntgagagaatttgctgtgtgaagatctgcagagaccagagctcgaagcanggaaccggttgagagactgagaatgagttatg

SEQ ID NO: 129983 - DNA, 414 bp, Glycine max
ttgggtgcaaaaataggcagacactggttcattaaagccatcaacccaagttctaaccctgagttaatgtcaataggcgatggtgtccatcttggggatttcagcaagataatcaccggttttcactattccaatggatatgcttgtggaaaaggaaaggttcacgataatccaggtgtggggagtcaaagcctaatcctcccaggttctgttgtagaaaagaatggcattctaggtgcactttcagttgctccaatgaatactatcctccatgaaggtagcgtgtatatcggatctcaaacccgagttgcaaccagaaactcttccgatcattctattaaaggatagaggagatggacatggagtaccaaaaagtagttgcaaacattgctgcaaatttagccgtcactacta

SEQ ID NO: 129984 - DNA, 479 bp, Glycine max
  unsure (1)..(479): unsure at all n locations
tgtagcatcatccattgngaatattatgaatgggtcatctttcatcagnggaaatgaacctgtcgttgctaccagtgtggatgtttcagtcaattcagtagagtctaaaattatctctgctcaacctttagttgcttcaggttcagacgagagtgatgaggcgaatcccattgatggtccaaaacgatgcatcaactgcaataagcgggttggtttgacaggatttaattgtcgatgcggtaaccttttctgttctgaacatcgctactcagacaagcataattgcccatttgattatcgcactgctgcatgggatgccatatctaaagcaaatccaactgtcaaggctgagaaacttgttaagatctagatttgttgtctttaagtntcatgctctangtgctgttatgctcattgttgtcctcatgagatgatccgagtttcctgcattttaatggtnattatatatcttatatgtg

SEQ ID NO: 129985 - DNA, 458 bp, Glycine max
  unsure (1)..(458): unsure at all n locations
ggatccttgagtcacctgcagcatgcaagcttcttatctaagacactctcttggtgtttaagcttctccttccaagccttattctctagtggatgacacctcctctcacctcttctcctttatcttccgctgcaactccatgggtgaaaatcaccattgaaggaccttattgaagctcaaagatctagagttcatagaagcttctcaagcaagcttccattaagtggtaatcagatcacaagagcttcaagtaggtgctacttaaaccttcattaattttcagctttaccttctcctccattggngtttcttcattattctctatgtatctcctcacatgtcttgtgctgaatgttgttaacatgattttttagaatttccaccaattaaacttgctatagaagctagattngaatttcaatggttcaaatatcttggtcttgttcttgaaccatgaa

SEQ ID NO: 129986 - DNA, 424 bp, Glycine max
ctctcgactgttcttaattcttcttcctcttttcacttctgttttcctttctcttgcataaatttcatggcttttccattggtgatgatcatggaaagctaaagacttaatcaatccaaggatccactccaagcaaggctgaatttgagttttggtctaatatttctaatctttgtgaatgttcatctttttcttcaatcctattttcaatttttatgattatgattatacttagtattggaaatggattaagttatggattcatttcctaatttcaaaatttaatcacagattttttggatgaatttccaacctaatgtgcgattgcaaacaagttatggattgattcgattgaactatctctaatgcatttgaatgaactttcacactctgaacatcattcatagtatccatgaataattga

SEQ ID NO: 129987 - DNA, 465 bp, Glycine max
  unsure (1)..(465): unsure at all n locations
agcttaatgctgatgggcagcctttgaagtatttgatgaagaacatgaccattctagctcagacatggagcgttctctccttttctaacctcattcctacctcccacacatctgatgtcaccttggacagagccaagttgatttatggtattattatgaagatggatatgaacttggggtacctcatctcccaccagatctctctgattgcacagcatgacacatccagacttggattgcctgccttgatcacaactctatgcaaggctagaaaagtccagtcagattctagatccctggagaacttgagccctgccattaactnggcatatattaagaagaactgttagaatcttgatgatccaacaatgacatttagagggccaatgaatgccagtggtaagagatcagaggtccccactacttcagcaccacctgagacaccatctacttcttcttccacag

SEQ ID NO: 129988 - DNA, 440 bp, Glycine max
tctcagagttcagtgaggacgtcagtcaatagattttattatgtatcccgttgcggtggtggagatggtgtatgctcactgggaatgggaggtggtatgtcttgcttgtgcacccactgaccatccatatattttttataaccaaaagatgtatcagcaccaacaccaatagcataagagcgtttaactttgacaaaaggttcatcatctaaggggacattgaaatgttggagaaataaagtaactagatggggatacggaagaggtgcattggcccgtaatgccttatgcattcagtgccgaacaagatgggcccagtcaatctgacgaccagtttgaagagcccacaacaagattaaatcctcctcagatgcttgtgcaaaaataatggacctatgaagcaaaattcgacatataatacagtgcatgatgtgacactc

SEQ ID NO: 129989 - DNA, 471 bp, Glycine max
agcttaatgctgatgggcagcctttgaagtatttgatgaagaacatgaccattctagctcagacatggagcgttctctccttttctaacctcattcctacctcccacacatctgatgtcaccttggacagagccaagttgatttatggtattattatgaagatggatatgaacttggggtacctcatctcccaccagatctctctgattgcacagcatgacacatccagacttggattgcctgccttgatcacaactctatgcaaggctagaaaagtccagtcagattctagatccctggagaacttgagccctgccattaacttggcatatattaagaagaactgttagaatcttgatgatccaacaatgacatttagagggccaaggaaggccaggggtaagagatcagaggtccccactacttcagcaccacctgagacaccatctacttcttcttcacagctctagt

SEQ ID NO: 129990 - DNA, 446 bp, Glycine max
  unsure (1)..(446): unsure at all n locations
ntaagatctcanagttcagtgaggacgtcagtctttagtttataaatgtatcccgttgcggtggtggagatggtgtatgctcactgggaatgggaggtggtaagtcttgcttgtgcacccactgaccatccatatattttttattaccaatagatgtgacatcaccaacaccaatagcaaaagagcgtttaactttgacaaaaggttcatcatctaaggggacattgaaatgttggagaaataaagtaactagatggggatacggaagatgtgcattggcccgtaatgccttatgcattcattgccgaacaagatgggcccagtcaatctgacgaccagttttgagagcccacaacaagattaaatcctcctcagaggcgtgggcaagattaatggacctatgaagcataattcgacaaagaatacgtgcatgatgtgacactcaa

SEQ ID NO: 129991 - DNA, 392 bp, Glycine max
  unsure (1)..(392): unsure at all n locations
gatccttgagtcacctgcngcatgcagctaaagatcaggattattttttgtgtttgacagctcaagcacatcattgatgcacttatgataaatctcacttagtaacttaatatagggatggaatattcggctgaactgataacagattaactcttcgtacctatgataatagatttgcttgtaaatcaacgggagagcacgtgttttaagtctgatatcttcttattcacatctatccgccgctgaatcaacaaaaacgaacaaccccgcccacccacatgcgatactattttccttttatctgctatgaacgccagtgtgaccattgctcgttgggagacgatctacgatcacttctctgatactgcacttttcatgatcatttattctgg

SEQ ID NO: 129992 - DNA, 409 bp, Glycine max
acaacattctgtcctttcttgctatcacagcacaacggttcagagcttgtgctgtatactgtgccgaacacatcaaccaagatcacaacttctctcacttaaagaccacagtatcaattccttcgatccatttcgttgaccgttggatcgactacaaaattttactggaagtctatagggcatatgcctacattgtgaccgttgggatctactatcaaacacccagaactcattctgtactactctttgcacagacaaccacacaagcattattctgcacttgtgcaaaatgttgctgcacaatttcacagcacaaattctgcataagtgcagatttcgaaaatcacactttctctcatccaatcttgccgcaaataattcctacatgtccacatcatgttcaatcatg

SEQ ID NO: 129993 - DNA, 312 bp, Glycine max
cattttatctatgaacacaaggtgaggtctattcacaacatgagaggtcatctcttttatcttactgagagagactctcctaaaatctcgagtgacccaagaacaccctggctggatcaaaggactttcacatcctatgtgtgttgacctcgctggaaagagtgatgatttcctttctatcgatcgcacccttgatgctttcaaccacaggtccggaaaattcatctctgccaaaagtatggcgtgaccataactcccatattacacactcctattaagcgatctccgagcgctaattgaattaagaacgag

SEQ ID NO: 129994 - DNA, 439 bp, Glycine max
  unsure (1)..(439): unsure at all n locations
tgaaccacgaatgctctcgagatattatttgtttgtaactagncacacggaagttcgatttaggcgcatactatatctanacgctcgaaattgaacaacgaaagctctcgagaaattcatatggtcataactggtcacacggaagtccgattcatgcgcataatacatcgagacgctcgaaattgaaaaatgaatgctctcgagaaattctaatggtcataactatcgacaaacacaaatggtcacaaattgtcacacagaagtacgattaatgcgcataatacatcgacacgctcgaaattgaacagccaatgctctcgagatattcatatggtcataactcttgatacggtagtacgatttaggcgcataatatatcaagaacgttgaaatggaaacacgaatgctctcgaaaaattcaaatggtataacttgtcac

SEQ ID NO: 129995 - DNA, 416 bp, Glycine max
tactaagcttctaacagtggagctgtgcaagggatgaatgtgtgaatatatgtgtgggctgcatacaatgtcactaagccatgctttgtgatgttcttgtacaacgcaatgtttgaaaagcaaaggcatatgttgtggaaaaagtcagtattattaacttgtatggaacaaaccttgaagatggaagagagtttgagtcttattatcacacagatcataagttgtaagatgatgttccaatgaatcaagggtgttgcataccctatgttgtaagaaattctcgctggcaagtggacatattatgctttattattactacgcattgtgacctttccaaataatcaaccatcgaacgctacttatgtgcatctattgtagtgtgcctagaaagcatgggtacaatgcatattaatgac

SEQ ID NO: 129996 - DNA, 284 bp, Glycine max
tgattttcgaaatttgcacctatgcaaaattatgctgtctaaatatgtgcagcaagattctggctttgtgcagaaaaatgcttgagtgtggatggttgtggaaagagtactcataatgagttctggatgtttgctgctatatcccaacgatcacaggtgttagcttgtgcactatcagacttccatgttaaatgttggagtcaatccaacggttaacgaattgcatcgatagaattgactctgcggactgttaatgagatacgctgagattttggttgatgtgt

SEQ ID NO: 129997 - DNA, 483 bp, Glycine max
ctaagcttaggaattatggcctcatcatactacttgtttaccgagtgaatttctatatatagacctcctatctttaatggagtgggttaccactactggaaaacccgcatgcaaatctttatagaggcaatagatgtaaatatttgggaagccatagaacaaggaccttatgttccctctatagtggccggaagttcaacaatagaaaaacctagagcatattggactgaggaagaaagaagattagtacaatataatttaaaggccaaaaatattattacatctgccctaggaatagatgaatactttatggtttcaaattctaaaagtgctaaggatatgtgggatacactacatgtaacacatgaaggcacataatatgttaaaagatctaggataaatactctaactcgcgaatatgaactgtgtaggatgaatgtaaatgaaagtatacaagacatgcaaaagatgttcacacacata

SEQ ID NO: 129998 - DNA, 303 bp, Glycine max
  unsure (1)..(303): unsure at all n locations
ctatgctctaacttatcaatcttatctttaagataaactctactaaatctctatttcatgccattntttagggtgatcttcataagtacctcaaggacaaaggtgcacttagtccttcaacagccatcaattttggcttggatattgctaggtatggtgtgtcataccttaagtttcctttatttttctttttaaaattttttataaagaagaaacaaacagaaaaccaccaaaacaaagaagaatctattaaccccatatgattctcttcaacccctctccattaaaatctgggtatataaa

SEQ ID NO: 129999 - DNA, 421 bp, Glycine max
  unsure (1)..(421): unsure at all n locations
tcccgggtagataagcttgttgtccctgccattgtanggctattcacattctccaaaagctcgctatcatattgaggccgatgatgacaatgtcagaaactagtggtcgtcaaactccaaagataatgaaaagttatgtatcaaacttgcaagatgattagattatggtggctgtggaagcatttatagaacaacaatatatgagagtattcaagaatagcttaacgggtccactgccatggaaggtacaagtctaattaataggagtatgccttgctgcatagtttccttgctttgggtggacacttcttaaatactctcacatcttgttgttccaaatgcttccactatcatcatcatatcatattcttgcgagcttgacacgtgatctcttattattatcttttgagtcctactacta

SEQ ID NO: 130000 - DNA, 475 bp, Glycine max
  unsure (1)..(475): unsure at all n locations
agcttcctttccaagactcgtaagggaaatcgctcttgtacttaagaccaatctctacttccacagcagcgccgtctccactctccaagaagccgtagaggcctacctcgttgtgctcttcgaggacaccaacctctgcaccattcacccaaaagagttaccattatgccaaaggactgaggcctaccttgttgggctcttgtttattttcattgaatattgaaattttaatttttaaataaatatttaaaaatgaaaatttgaattttattgaaattgaatcactttgtccaaataagaaaattaaaatacaagaatttgaattacctcatccaaacaaaatatttacaaaaggaaaggaattaaaatcaaggcaatcaaaatgttatgaatttaaatttcttagaaattnttaaattcctcatccaaacacatggttagggtcatttttgtagagggaaaagaaatataatga

SEQ ID NO: 130001 - DNA, 466 bp, Glycine max
acggaccttaatctatgcttaagatgatgaccgttgtgggactagagccatggcaaatatattcattcactcagagcttgttctattgcaacctgttagcttggagttgatagagaaagcgattatagtactgtccattttttaccagctatcatgttatatctactagttgtatgaaaatgattttgcagataatatgctcattctctatcttgttttagtacacacttgaaattcaaatgatttggtaaattcataaggacgagggaacaaaggtacataaaaacttttgagcataaatcatcttcttttagatcacatgtgtattatatgatcattggatgaaagaaaacttggatagaaattattgtgtaagtgttcttagcaacaattggacgttcaaagatgcttagcatggttggaagtagttttacatactcttggtacaattctatatagcacattg

SEQ ID NO: 130002 - DNA, 476 bp, Glycine max
  unsure (1)..(476): unsure at all n locations
agcttagggctgcagaatatataatacatgttatgttatagtgactaattcccttcttgagattgccacttagactgacttgcttgcatgatgccatttacatgcagggaatatatttcagacttatgaccattcgtacttgtcatatgttgaatcatgtttcactactagatgaatttaccaaattagtatcatattgaagtgtatgcttgggattatcaattgtccacattagtatctatagacattgcgtactacatgaatttaatccacatggtattagtacaaccgcccattactaattatagctttagaaggaaaatccttcattgcctcatgacttgaatatccagtggaggttttgtagaccatgtgcaaatctaaagaaattgtatcctttctatataaaagatgatatgccctgatcattcctttgcaatgttgntttaacaagtttgctttattcgtaatgaata

SEQ ID NO: 130003 - DNA, 399 bp, Glycine max
gagcctaatcctgactgaccataaaccttgtcgcattgtgttattgtctatccttaccctcggaagcaaaaatgatgagattgtttatttccaatctaagagtaagcacaaagaatagattgaatatttccaatcgatgagaatgcataacgagtagattgatatttttccatcgaagagaaagcaaaaagaatagattgtatattcccaatcaaagaatgggagaaagtaaattggaagaagaagaaggaaagaaagctcctgatcaaggatcgaaataaaatataagaaatgtgcacacaggtcttttgaccgtgccatatctgaacaatactgaattgtcaccaaatgaacgaatagaaggaaatgaaaccatgacctatagtggtcttcttcctt

SEQ ID NO: 130004 - DNA, 401 bp, Glycine max
cccaaacccaatcacctggttcaagcacgactttctttctgcttttgttggcttgccttgcatagctcgcatttttcttttcaatttgaaccttcacttgctcatgcaacttcttcacatactcagctatagcctgtgcatccttatgcttaaacataacaatgttaggcataggcaacaaatcaagaggagtcaaaggattaaatccatacactatctcaaatggtgaacaattagttgtgctatggacagcccgattataagcaaactcaacatgaggcaaacaggcttcccaagatttaagaattttctttaaaacagtcctaagcagtgtgcctaaagtcctattgactacctcagtttgacccatcagttgtgggtgacaagtagtagaaaacaac

SEQ ID NO: 130005 - DNA, 388 bp, Glycine max
  unsure (1)..(388): unsure at all n locations
caagtgcttgttagtttcaatgacaatgcttacaaagttgagctgcccggtgagtataatgttagttcaaccttcaatgtctttgacttatctctttttgatgcagatggagaatccgatttgaggacgaatcattctcaagagggagagaatgatgaggacatgaccaatagcaatggcaaggatccactcggaggacctatgacaagggttagagcatggaaagccaaggaagctcttcaacaagtgttgcccatattatttgaatacaatcccaagtttcaaggagaaaagtccaaggttgtgagttgtatcatggcccaaatggaggaggactatatggcaccacttngtctcaactttagagtggttagtttgtctaaataat

SEQ ID NO: 130006 - DNA, 289 bp, Glycine max
  unsure (1)..(289): unsure at all n locations
agcttggactcatgagtgggaagttgaggtctaaatgtattggnccttttgttgttactaatgtgtttccttattgtacagctgaaatcaaaagcgactccacaaacaagagctttaggtcaatggacaccgaattagccttcctcacaaccctttttatggacgtagggggaaaacttcttatcaccctctttctcacagactaggagtctctacattctcttcttatacttgcgacattaggtaatgttatcttatgctctgagacagggtatgggggggcttgttg

SEQ ID NO: 130007 - DNA, 471 bp, Glycine max
cctttgcagccttgattcggataatgcgcttcctgttgtgctaagcggaagtgttatacttctgaatgcgtgctaagcgagatgtatcctgctaatcgcccaacgtcaatttcagcaacttgaataaatgtaatctaaggtggaatttgagttcttttcattacagatggcatcaagaaaaaagaaaaccagggctagcacatatgacatcccttcaccatctactccatcacctccgactgcatcatcatgaccagatgcccagagctcccaaatcacaaccactatgctgcatagcttatttcagggataggttattattatgcaaagcctacatatggtagctccttcaaggtccattctgtcaataaagcagttccttgagcatgtggcctggcctggagctcaaccctcaattgtgagaactggtggatggtttgagctcatgcacctcaacatgatggatctgac

SEQ ID NO: 130008 - DNA, 490 bp, Glycine max
acccggatcttgagtcacctgcggcatgcaagcttgctgcaccattgacagatttacttatataagaagcattcaagtggacaccagaggcagagacaacatttgttcaattgcagaaagtcatgacttcagctccagtgttagctcttgctaatttccagctgcccttcattctggaaactaatgcttccgacactggtattggagcagtattacatcagaatggccatccaatagcatttttttccaagaaacttgcacctagagtgcaaaagaaatctgactaatttagagagatgttagcaattgttgaagctatagctaagttcagacactacttgctgggacacaaatttattatcaaaactgatcaaaaaagcttgagatcattgatggaacaacccctacagacacctgaacaacagcagtggttacacaggtttttgggatatgattgtgtgattgaatacaaggccagaaatgagaatct

SEQ ID NO: 130009 - DNA, 460 bp, Glycine max
actggtgattggttcaacatagttgcctttttttttgttaatctcgtatgattgtgaaataaacaatactaatcatgtggaaataataattaatgtacaattgtctgaaaaggtttgagttaaaacacaaatgaaaaaattttgattgattaagtctagtgaaattttgtttacgaactaaaaatgtaaattctgataaagtgattgacattttcataatttttttatgaaaccgtaaaaaaaattcaaaaactagataaataacacttgggcatgtggttgccaagtaggactaataactcacatgaatgttaatatagatatcacatcatcatttaattgttctacttaattgtatggtctaaaaacatggacaaaataattatgagaaattaagatcaatcatagcttttgtgagaactaatattgaaattgaataaaaaataagtcattatatact

SEQ ID NO: 130010 - DNA, 486 bp, Glycine max
  unsure (1)..(486): unsure at all n locations
ggatcttaagtcacctgcggcatgcagcttctatccaaggctcatcttggtggtgttctccttcttccatggcttattccctagtggatggcgcctcctctcaccttttctcctttgtcttccgctgcatctccatggtgtaaaattaccattaaaggacctcattgaagctcaaagatcctgcctccatagaagccccacaagcaagcttccatcaagtggtaatcagagcacaagagcttcaagtaggtgctccttaaacctccattaattttttgatttaccttctcttccattgttgtttcttcattnttttctccatgtatctcctcacatgtcttgtgctaaattttgttaacatgattctttagagtttccaccaattaaacttgctatagaagctagaattgattntctatggttcaaatttcttgttcttgttcttgaaccatgaattgtgttgangttaggttcctttgagttttg

SEQ ID NO: 130011 - DNA, 398 bp, Glycine max
  unsure (1)..(398): unsure at all n locations
tctacttatgtggcatggcgggcttccttcactttctngctcctatgcaagctctgaccaatgttcttacttcccgcgatgcttcttttcatgtccgcctgaatgggcttataacctataccatacttgccacgatttcctagggtttttatcaagctagttatgccgccattgtctttgcctaaacccatgccgggttcataaccgttccccaacatatctcgggccatcattaccgctgcatcggacagacaaggctgtccaaagagggaatccacggatgaaatgctgaccacctcaaaagactggaaagcagtttctaacgattcttctgcggctttcacataatgcatggaggatgggcagattaacaagatatcttcctctgctgacacgat

SEQ ID NO: 130012 - DNA, 467 bp, Glycine max
  unsure (1)..(467): unsure at all n locations
agctntataagttctatntaagctatatctctatacaatgtgagactaaacaccaccgttgaggcttcacttaaggcttcccccaaagagttagaatagagaattagaaagatacaatacaaacaactccatccttgttaacgttaaatactgttgatttcatgtacatcttttttcaattccttgaataagaagaagttttctttacaaaaccttgtggaaatccaaaactccctctaagaacaagtcttttatttggacttcaatactttaaaaaaagaattaatggaaatgccatgttgcagtgtaggctgcataacactttttaccctgatatgtgtgtaatgtgttgagcttgctagattatctgttcctcacctgttcttaagagcctgacagtgaagagagtcaacaagcctcaaaagtttttaaagcatgtgcatgcaactggctaaaatttctcactt

SEQ ID NO: 130013 - DNA, 387 bp, Glycine max
  unsure (1)..(387): unsure at all n locations
gtgatgggcattactttcttgtgagagtacattcaaaatgtctcattggtgacatttttggggcaacatgtcaatgtggaaaccaactataacttgcattgtatcaaattgaaacatcacgtatgggtgtcttagtgtatctccgacgaaatgaaggcagagccgtatatgtattggcttatgccacattgtccgtgcttgcccattggaagatgacaagcaagaagaattgcagttacctgctgattctaaggagtacggtattggagcacatgtactgtttggttngcaattaaccaattaactatacacattgaaaaggttccttcacaattactgttggctaagaaaattaatcatccttttagaaaatataagttatactac

SEQ ID NO: 130014 - DNA, 298 bp, Glycine max
  unsure (1)..(298): unsure at all n locations
aaacaaaatggtgaagatatgctgcattggtgctggatatgtggggggtcctactatggcagccattggacttaagtgcccatccattgaaatcgctgctgttgatatctctaaatcccgcattgcaacctggaacagcgaccagcttcctatctatgaacccggccctgatggtgttgtgaaacaatgcccgggcaaaaacctcttcttcatcactgatgttgaaaagcatgtctttgaggctgacatagtgtttgtctctgtcaacacccccaccaaaactcanggtcttggagct

SEQ ID NO: 130015 - DNA, 400 bp, Glycine max
acaattgcttaaaagttatatggctgttttcattctttcaattatggcatagcctgtaacaatgttatccacataatgacacatattttgattaccagtacatcagtgagatttgatcaagttatccaaaaaagaattattgaactttaggaaatgtgtttactaacctttagcattatggcatcaccctgtggaacaccttcagacatattcccccaatatgctcaacccctaaatgaaatttttgattttatgaaaattaaattttgtttatagaactggtcactctatcattatacttctaggagatgtggttgaatgactcctctagaaacaagtagttgtggctagagagatggattgattacctggaatgggtggtgaattttcaatcacatgt

SEQ ID NO: 130016 - DNA, 425 bp, Glycine max
  unsure (1)..(425): unsure at all n locations
atgcgacaccaaaantaggaaggaataacaatttacggatcgagaattaatgagctagacttgcatttatgtgctgcttgtgatcactcttgatcaacatcagaggctctaacaatatgaacagcatttaacatagcagcctttaaacacttaatggcatccaccaaattatgtgcggtcagagatggcagtaatctgttcagtgacagccaacaagattttgatcagaacgtgacagagtgctcttgcattcaccatcaccgttaccaacacgatcatgctagaacctaagcacatccatctgagtcagcattttgtagcttcaagctgactctacaaagttcaccccaactgcagtcacgttctctgcctgccatcaaaccggaccatagcacgatgcacaccttntgttaacactttcatac

SEQ ID NO: 130017 - DNA, 476 bp, Glycine max
ttctctgatcccacaccccattccccatttactgatctatttcccacaaatggtggacggtaccagacataacatcccccatgattatcaagtataccaccataacaccagcattgttgacaatgatacaaatttcagacaaaatcctggcaggccttcccatatcatgttgaacaacctcaccatatgaggatgccttacacataacagaaaacctcaccaacaattcgacgctaatttcagacaaaattcccataagaacgatcaaaacaatccccaaaaccacacctataactttcatagtggcagggagggccataatccctgccccgataacagtggttgttaaattgaaaacatgcccaggtatcccataaccgtgattgggccccataacaataaggtgataattatcgatgtcgatttccaaatcgtcatcgtcgtcgtcatcgaccttggatcccaaatacacctct

SEQ ID NO: 130018 - DNA, 432 bp, Glycine max
  unsure (1)..(432): unsure at all n locations
atgattgcttttctattgttacagcatanttgttgaaatttgggaattctatttctacccataagcaatggaatttcctttcaggaagacatatgctctgaacacatttgctaaatcttctttacttttatatntttattgtatatttgtattgaagttgaaggcaccatctatttatccctatttcttaacattaaatggaatgattgataataagtggttgaacttgtgatttgtaatgctcacgctgtagcaactgaaggccagaaaacaaattttttcacagattatattctaagggtaaaaattgctgcactcacagttaattatttttctttctaatcagcgattggtaaagtttgtatatttggcaccaataaaatggttacctataaataagttataagcatttcattatttaatattattatt

SEQ ID NO: 130019 - DNA, 472 bp, Glycine max
  unsure (1)..(472): unsure at all n locations
tattacggcagttattatggagctgacanaatgagatggtcactgttttcccttcctgtaatgtttttttttttccttcatattataggtaattcgatgatattagggaatctggagtataggtgtagtgtaaactttcaagttatactactgaagatagaaaatcattttgactaattcgcaattgtattttagctattttgatgtacattatttttttgttattttcttttcaccggttagtgcacgtctttttttaatgtggaactaagtaatagtttgtttttcaaaattacctttgcataatcgcatattcaaagtgttcgtattttttttggtgaatattcaaagagttcatatttcactcggtctctagtttttatacgagtctatgcatngaaacatttttattaaatnattctctagttttggttntccgtacgattgtctgatattatgatattnttgtctg

SEQ ID NO: 130020 - DNA, 385 bp, Glycine max
  unsure (1)..(385): unsure at all n locations
agaaaaagggagagaagttgaactttgagttatgtctcacaagactctcattcatcaaagttacaacaaatgttacacatgcttctatttatagactacgtagcttccttgagaagctttcttgagaaaacttccttgagaagcttctttgaaaaaacttccttgagaagctagaccttagctacacatacccctctcataactaagctcacctccttgagaagattccttaagaagattcctaaagaagctagagcttagctacacatacctttctaatagctnaactcacctccttgagatgagaagctagagcttagctacacaccccctataatagctaaagctccccccctgacaaaattcttgagaatacaaaaaaaat

SEQ ID NO: 130021 - DNA, 419 bp, Glycine max
  unsure (1)..(419): unsure at all n locations
acttgagggtgcgtagcccaccatcttttcatagtagagttctcgataatgtgtctaccatcacgattatcatcttcctttntgcacatgttctgtagttgcatcctatctggaaccatatcagaatagtactgatactgcctaacgaatgcaaccattatgtccttccaagtatggactcgggaaggttccaagttagtgtaccatgttacagctaccccagtaagactttcttggaagaaatgtattagcaattcctcatgtttgcgtatgcccttatcttccgacaatacatctttggatggttcttggggcaagtagtccccttgtacttgtcaaagtctagcaccttgaacttgtgaggggtgatgatattgggtactangaacaactcttctatgttagcaaaggaataatct

SEQ ID NO: 130022 - DNA, 446 bp, Glycine max
  unsure (1)..(446): unsure at all n locations
ggatccttaagtcacctgcngcatgcaagctttgagccanaatcctgactcaccatataccttgttccatggtgagaatgtcaatccttaccctcggaagcaaaaatgaatataagggaaatttccaatcaaagaaaaagagaaggaaaatttccaatgaaagcataacagaaaagaaggaaaattccccactcaaagagtgggagaaagcaaaaagaaaagaaaggaaattccctatcaaagaatgggagaaagtaaaaatgggaaggaaagaatgttcttgaatgaaatacacaaagaatatgcagagaggtctttggaccggacaatatctgaacaatacagaattgtcaccaaatgaacgaaaaaagaaggagatggaaccacgacctataatagtcttctccctttattaccaaccaaatcccgtgcctactacttttttt

SEQ ID NO: 130023 - DNA, 451 bp, Glycine max
  unsure (1)..(451): unsure at all n locations
ttgaatcccttcttacatgcatgaatgcacaaatacattctttctttctgtggccggaaaattaagggttccaacaaagcatcctcattcatgcatttgttgtgcaatgaagtaacgagatgtggccttaccttacaagatggtctctctcatcttcaatgcacacggatatattgtgttcaaacaaaaaccactaatgctttgccaccatttgacgctgcgtcatcaccattggccactaataatgtaaatggcgggaagaagaacagtcaagaacacaggggttgtaggttcttctctctctgtgtggatgaggtgactntgacatgtaaaaacaaaaagagttaattgaaaaattggtccatagttgcttggctcaacgcatgctattcactgtcacacatgtggatgtgccacattgatcttcacatgccacattaccctaatcttt

SEQ ID NO: 130024 - DNA, 491 bp, Glycine max
  unsure (1)..(491): unsure at all n locations
ggatccttaagcacctgggctgcagcttcgcttattagtgcacagctccttctgaattagcatatcttggaatttgctttattgcatccagcagaggtatgtttacctctacttttctaaatgtttccaagatctttttctctgcctcttccatttttttgttggaaactgctcttggagggaatggaagaggagggatgtgctgcgtctgcaaatcagaattaccagtggaagattcacctgcacataaattgttaggtaaatttttgtcatcaccttttttctggagtagagtgaagtttagcaggttcaattgcagatgacgaaggtgctacgggttgaggtccttgacactgctttctcgacctcaatgaaatggcactgacatttttgggaatttggacagattgagaaggcagcttgtcagaattctgggacttttgttganttaattgtgtagccaattgtcccatctgattggttaagctctg

SEQ ID NO: 130025 - DNA, 442 bp, Glycine max
cctgtccgatgcagcagtaatgatggcccgagttatgttggtgtacggttacgaacccgggatgggtttatgcaaagacaactgtggcatatctagcctgataaatgccaaaggaaatcgagggaagtatgggttaggctataagcccactcatgcagatataaagagaagcatcatgggaaggaagagtggtagtcaaaactcgcggttaagacaagaaggtgaaggaagcccaccctgccacataagtaggagctttataagtgcgggtctggggacgaaggtcaagtggtcgcgatatatgaagatggtgttccgagtacattggatttggtacgaccatgccctcctgatttccagctgggaaattggcgagtggaagaacgctccggcatttacgcgacatgcataatgtaaacctttacgggtttaatagctctat

SEQ ID NO: 130026 - DNA, 460 bp, Glycine max
  unsure (1)..(460): unsure at all n locations
agcttctggtgggacatcttgacttgctttccaatctgacattcaccacaaattctgccttcttctattttcagattgggaatgcctctaacagcacctttgtcaatgattttcttcatgcctcttaaatgcagatgtccaaatctttgatgccatattctgacttcatcttctttggaggatagacatgtggaggagtaactggtttcttgaggtgtccataggtaacagttgtcctttgatctgctgcccttcattagaacttcactcttctcatttgtcaccaagcattctgactntgtgaagtttacattgaatccttcatcacacagctgactgatgctgatcaagtttgagtcagtcccttcaccagcagtactttgttcagactaggaagtccatcatgaactagctntcccattccaatgatctttctttagagccatctcccaatgtacat

SEQ ID NO: 130027 - DNA, 385 bp, Glycine max
ttgaaaacttttgctatgaaaagactggcggagaactgatacataagaagaagccctcctgagagcatgagatgagtctgtgtgcgattgtgagattctatatgtgggggagacattcccactacttggttttcgtcaatccttcatttatctactcttgttgtaaggaagcttcccagatatggagagctaaatcctctgttggctcttccttataaggatttgatgtaaatacttggatatctattcaatgatgttttatgtgttctctgtgctatcagtacgtcatttcaatgtgcttttgccttgatcatgtagatgcatgctttgttaggatcattcaacacgtggaaactggcctaattcttacaaattgatgggaccg

SEQ ID NO: 130028 - DNA, 401 bp, Glycine max
atattcaagatacacaattcttcgagtatcatgcaactccagatcatgaaagactcaccataacatctttttacatggaaggctcagcattagcctggtttcaatggatgcacaagaatggtcaattatcttcgtggtccacctttttacacgctattcacgcaagattctcatcttcaacctatgaagatccaacaggtttgctctgtaaatagacgcagcgatcaacggtctccacttacctctcggaatttgaagctcttgccaactgtataattggtctgccgacaccgtttgtgctaagttgctttgtgtcaggactgaatctagcgattcgttgggaggtgtaagttatgcagcctcactcattggttcaagcagactcctttgtagactacatg

SEQ ID NO: 130029 - DNA, 391 bp, Glycine max
ttgaagttcactacaagccttatgtgaaataccatgatatcaccatatctttaaggaattttggagctttggaatcgttttgggaataagtgtggaggtttctgtttcattggataacatgtattgttggccatgcttcatgatatattttgagccatacttgatgtacattgcatattggttaaatgttggacatgctgaatatgatgttgtttctcaaaggctacagagtaaaaaaaatatatatatatatatattaaacaaaatcgataaagaaaaagaaaagcagtaaagttgagtgaataagatcttaaatgacaaaagaatgatgagactcttgtgtctactctctatgtttacaattttacattacttactttaatttcttatg

SEQ ID NO: 130030 - DNA, 495 bp, Glycine max
  unsure (1)..(495): unsure at all n locations
atcctcttagtcacctgcagcatgcaagcttgttgtgaggcgatcattacactgattggatggaataccatgcagattggattaatatctggaaaaacaaacacaacgatgttttagctgggcaatgggttgaaggaatagtgacacatacaccagcgtacatggaatggtataggaaaaacactactttgttcttgtctgttgcacaacaactacatgatccacgcacaacaattacccaaaatgttgcagggtcaggtgttgaacaaacacattttgaaattccacatccccagtcaatgtattctactccttcacatgttcatcaaacttttggccacactggcgagtcagtcaccgcaaccacccatgaatggatgatcgatttanttggcatcgatttcaatacaccanattcagcgacatcatatttagctactttacaacaattcgatgcaccacattcgtttggagaacaatgtcaaagttcttcac

SEQ ID NO: 130031 - DNA, 416 bp, Glycine max
ctgaaagaacagtcaaagcatcccgaatctcgtgtctatttgaccatacttctcaatcacattcttcttggctgcaaatgtgtttgttctgttgttaacaaggtatttttttcactactatatcccatcataaacactcgactaggtagggaaaaccatgttaatatgttatgttgtcatgttttgacattttcttctcagaacatattttcatgaccactttttattggtaggcgggattggcaaaactcctatgctggagagaccaatgttaaagtgagttctttatttctgatttcagaaatattcattgatatgactaaaatagtggttatgagtagggccaattatgactgttgtctaaactgagttatgtccaaactcaaatgttaatatgatatcaaaggctattctta

SEQ ID NO: 130032 - DNA, 418 bp, Glycine max
  unsure (1)..(418): unsure at all n locations
ctgcgagaatacgcgagggaaagatntaatttactagcatacaaagacggtcgttataaaacccgtcattgggtaatccagttcaacgacaatgcctattaaacatgttgttgtaattggaagacgacatcattttcggtaaaaacgtcgttgagataaagcgcatattttctaaaatgtcaccgcctgttaaacaacgacatttttcggaccaccatccttgaaagcgggtcctagaatcaagagtttgtagtagtgaatattttatattgcattctataactattttcttttacattctacgtatcattcaattttttcatattagtaatttctaaattctaatatattttttgctctataaatatttcacatcaacaaagttcatgatctaaaattatttttccaactaatctat

SEQ ID NO: 130033 - DNA, 342 bp, Glycine max
cctttctcaaagttcctataccaggtcgcaagaatgaatattgcatcatcctcactgtccctgcaaaattggcatgacgtgtcatcaacctgcacttgcctccgctgcaaactctgtcttgtcagaagtctatgtctaattagtctccgtgcaaagattgctatttttcttggaacctgtttgctccataatttgacgaaacattcctcctgtgttattgttgttgctcctcccattattaccttatatgcattgcttgctatatactgacctgtttggtcagcatgtcattcccacacatcttgtccatgttgatgaatggccatatcctgaacctcattg

SEQ ID NO: 130034 - DNA, 473 bp, Glycine max
  unsure (1)..(473): unsure at all n locations
agcttgtgcttttctcacatataggacatgtatgatttcctttcacactgtatccacttaaatttccatatgctggaaaatcattaatagtacaaaacaccattgcgtgtaacatgaacgtttgctgcacatttgcatcccacacatctatcccttcttcccacaattttttcaagtcttcgatcaacggcgtaaaatacaaatcaatatcattccctggctgccttggacccgtgatcatcatacacaggataatgtatntacgcaaaatgcanaaccaggggggaaggttgtaaatcatcagtaaaactggccacgaactgtggttgctgcttaagttaccataaggattcattccatcagaagcaagagcaacccttatgttcctttgctcgtccccaaactctggatataaacgatcaattggcttccactatggagaatcagcacgatgtcgcaataagccatcactt

SEQ ID NO: 130035 - DNA, 462 bp, Glycine max
gttttattttgagtgtgggatgtggtttattatcatccacaccactcaatattcaagtgaaaagaccaagagaaaagaataatgaggcgaaagaacatttgagcctcttaaaattcttcaaattagttagaacatattgattattgtttgaaggaaaaagttgagaattatgtcagcatcaacatatgttgaatgcctcctgatactgcatcaaggatacttgacaacagacttataaccataccacttaagcttcaactgtttgcataacatgagttaataatcaagaaggtaaattaagttgagtggtgaaatgatgaaatagatagatacctctactctatcaaacatgtcatcaagtatcaaagggtctgcactgtaatatgcatcacgtgcctatttaataagcaaatttagagcagctgaagaaataatgaatggtatgggtaaacattcaatgat

SEQ ID NO: 130036 - DNA, 405 bp, Glycine max
  unsure (1)..(405): unsure at all n locations
agcttggcatgtcccgttgntngtacaatgttgagcggntgatgagcttgaacttctctgcgaatctccggtgtgagaccggagatgaaacaactcataaggaatggggatggcaatccgataaccctattcgcgaggtcttcaaattccgaaaggtactgactcacggtccctttctgtgtctatttaaataaaatgccggttgggtcttcgtattgtgacggagcaaatctcgtctgcatggcttgtaagaatccaggccacgaggtgaactgggcattgcttgacatccattggaaccaagcaagtgcccttccctccatataaaacgaagctatggtaagacgctctcgcttaggagttccatgatattcgaaatactgagtgattttgaatatccatcct

SEQ ID NO: 130037 - DNA, 420 bp, Glycine max
actgtggaggatctcagctatcatgaaaaccatattgtagatcttgtctctaagatggcgaagatcaaggggaaatttatttcctatttcattgtgaatgtactatattagaaaaataatatgagaaaatattttaccaaaaataatatataattctgttttgggacttgtccaatcaattcagaaaacaaatataaccgcacagataaccaatcttaatttttcaggacaaaataataataatcttactttgttttaagaataagtaatcttaattaaaatatagccaaatagtaaatgtgaatatctcccatgcacagtgagaattgaaaccataataatcttttttataggaactaattcgctgtactatcctgtcttataaaaaatcgtatactatagactagtacagtagttctt

SEQ ID NO: 130038 - DNA, 423 bp, Glycine max
ctgcagcttgactatatactcctaacttacctttcaccaaagaaactaaattaactaattatggaggttcaagaattaagcttttgaaaaatgaacatggagaaggaagagaaatataccaacaaaccacagggagaaagaattgagtaggaaaaatgcataattaatcttgcctttagagcttagagaaaatgaaaaacatgaagaggaatggtgaatccttacactatgacacttaatttcttatttgaaaggaagaatttgaaacacatatatggagtttttgggtggggtattgttaactcattgacaagtgcataaaattatcccaagtagtaaaataaaatggaaattctagtgtcgagcccacagaaactttgtttgtacttagattgatgtaatcccaattttcaagcaattaat

SEQ ID NO: 130039 - DNA, 449 bp, Glycine max
  unsure (1)..(449): unsure at all n locations
gatcataacttatgtatcttcaatttgaaaacttctttctaagactctagagattaacttcatcatttatcttgaatntcttggagtcttgtgttggatcaaacttgaaaagcgcatttctttatcatcatcaaaacatcatgatatctttgcttgtacatatatatctataacttgattgcctaattatttcaatatatatattaagtagcataagcaggtttagacgtttagttgcaagaatgctttcatgtactcaagactcaacccttcttcttttcagcactttcagtccttctcacatcttcagttttggttttattattttaccatttcaactgtacttttctgcgaattaattcctccatgcattataaactttcaacaactgaaccaatggcaattaattaacatataagaagcatattgtctacatgctattctttctc

SEQ ID NO: 130040 - DNA, 481 bp, Glycine max
  unsure (1)..(481): unsure at all n locations
ttaagtcacctgcggcatgcaagctngtagttgtgtgggctccactccaacatatcttcttggagctataagaggttattcaaagagcattataaagttaagttgaatcattccaagtaagagaaactcaagccaagacatttgtgtgagaaatctacattattgcatcaaccgtctctgctaagagtggtccacttctataaaagcttgtaatttgtaatagatcaaagataaaagtgagaaattgcactttccagagtgaaaatccttttatgaggagagatctatatttgtgcaatccaaaaacacaaaaacctctttattgtttaaaggccagcaatggctagcaaaggttgtaactagtggtgttgttgatctagttgaggctaggtgtgaagtccattgcgagtgttgtcaggttattgaaatctagtaatttttggtccaactatgacgggctatgttngtgaaatctcatctt

SEQ ID NO: 130041 - DNA, 478 bp, Glycine max
ggttattaattaaccatatatgttatacccaatgtggtattgaaaatgtagaaactcaacccctccaaaaaacagggatcttaagtcaaaatatcaataaaactaaaaaatcatccgaagaaaaagggaaatactaaaaaatatacaagaagaaagagcatgacgctacctgctttaaacaattcaaaacatctgcacaaatagatttatgcatacactgaatctgcaataaagttccacactgtggggcaatcaaaggtgatctgtgaaaatttaaaaatagagaacaaattgtagacttacaggaaacacattaacattctgattattcaaacttgaaaggatacatgaacatatcatatggcaacaatttaaaacaaaaatcaattaccataataacatgttccaaactgctcaatggtaaaattaaaccatctaacctataaaatccctaactagtagttactctcaatctaaa

SEQ ID NO: 130042 - DNA, 480 bp, Glycine max
  unsure (1)..(480): unsure at all n locations
cttgctttctagaactaactttcagctatatagcctgtttgtctntgagggattgttagtttagcaactttgttgtatcaaacattgtgcctttgggcttttgtctgttgaaaaggcaatagattatacaatttctagagtgattcaataatcaaataactaaaaagaagttaattttaagataatattcaatttccttattataagaagtgtttgatagggtgaaaataggccaaacagttcgtcagggggtcatgccctgcctaaatttgacctttntgatagggctcttgttaaacaaaccttgttgtttgctaagttaaccccctttcttgttattaaatttattagtacaaattataccttttaaccttgtttaaacacccacaacaaaagtgtgtttctctagcttgcaaactgatttgggaggagaatttctcccattaacacactttttgggtgattgtggtattaatcaca

SEQ ID NO: 130043 - DNA, 431 bp, Glycine max
ggcgtgagtgaaaatgttagcttgcatgacaatgaaatagtgaaggtgaaactaattgttgtacccgatgagttgtgtgaaccttaattgtaagagaacgactaacatcaagtactaatttttgcatgaatctttgaatactgaatggatgcatgatttggaaatgatgaaggccacattgaatttattttagccacttagccaaatagctaccctacgttaatgaatgattgaatcccttgcaccccttttgagcctaaatgtgaatgaatgtgtcattgaaccttgagctaaatgcaaatgctatctttgtacaccctatcttatgctataagagagcattgttatgggtcaagacaaattagctccatatttaggggagtggtttgggtaaattatgttccagggacattagtaacagattcacaaag

SEQ ID NO: 130044 - DNA, 444 bp, Glycine max
gaactatatcacgtcaggttgatttcttttatcatatatgttatttgagtcctgatgctcaatgattattgtagatatatatcaacaattcgtattgaactattttgaaaataacatgaaatttatatcaataaaagttaatcttttactgttccagatatttcaaatgttgtttatttgtaaaggactatatgttgtttgattgacaaataaatgaaacttcattaactgaaataaaatcattctcagactacaaaataaattcttgtaacaactaattatctatttaagcgataccttattaaacgaaaggtcaaatacacaatatatataaaaaaatgttgtgcaaagtgtcaaagcgcgtaaaaaattccaacgaaacttatcatttatcgtccttagccaatttacaattataagtacaatatctattctctatgaaaa

SEQ ID NO: 130045 - DNA, 407 bp, Glycine max
  unsure (1)..(407): unsure at all n locations
tatatatgtagtccccaattatgcagataagggaatttatctcatagtttagtgtgaccaagctaagaagtgataacagaataagacttaatttaaaattaagtactagtcacatgcactactagaaaaagcccaatttacgacgtgcattctacatcggtcgtgtgagcccgtagtagtttcttgcacggtggcatttttgtaatattagcttattcatcaacgacggtgctacaaaagcacgtcattgaatagtcctttcccatttttccactgcatttttgggaagcaccatcgttgactatcccatcatttagtcgtgtgaaaataagctnttcctccctgaacttggtgtgctcactcagntctgaacttcgcgtgcgcatcacagacttccctttctgagc

SEQ ID NO: 130046 - DNA, 445 bp, Glycine max
ttaatctaagctgttcaatacattagtagtttttatagaaccttactttgatgtgactaatcaaaaactcacttttgaactattatgcttaccccatttcttatgtctttgactgttgctgcttctgctacgacagaggatgtggaaaaaagactaaggtgtgtgagttcggctgtataagaagtcactgtgactcaccttgctgctcccatagtctatagttctacaactgagaactgcttctctctggtccttctccttgcttctaaggtatgaccatccggtttgattcactttcctgactaagggccctttcttcaagctttcactcataaattctgactctgatctttaggcgaaaccaaactccttttgtccatgagactatactatctttcatcactccactcaatcaacatatgggatggggtcttagtgagtaaac

SEQ ID NO: 130047 - DNA, 446 bp, Glycine max
  unsure (1)..(446): unsure at all n locations
tgcacatctttcttatttctggtgaatctttattcctaaagctgttgaggtttatacccatacatagtgtagcatgtttatgtttgaaacaatgagaatctgccttctatggaatcttaagaatgtttagattgatctttataaatttcatttattgtagattgtagatgctgccttatttttttgttcctgtgtttagtgcttccactgccttgtgtccttgtatttatttcaatgggttttgtaggattctcaattgaaatcaagggagaggcangcactctttgaaggtctgacatggttatgtttggaattttttttctatttgtattggcttgcgtatatcaatgaagtatccatgttacagctgaaataaatgttntgctgtattacagatgaaccatctcaaaatggaaggtcagtacatgctcctcaaatggggtaca

SEQ ID NO: 130048 - DNA, 362 bp, Glycine max
tctgttgaaactgtgtctgcaatagctgcatacgtggatgttttagccattttttaaaatttaaaattgtctgttacttatgatctattctttaggagttctgattctggtgttttatcaaattagaaattggtttagtcatgcctaaaaataagagattttttattttgtatatttaatttgactctaactctatttaaagagcaaatgaataacaactatgcatccttcgaaaatatatctgctcttggttgtttttgatctaatcttcaacatcatctaattcaatttaaatgaatctgacgaggaagctataaaaagaagttttacatcgaaaagatattaaaatatatgaattatca

SEQ ID NO: 130049 - DNA, 451 bp, Glycine max
atcctcatagtcacctgcagcatgcagctttttctttaaaacttattgttgctattagtccctactgctgcaatatgtttttcgaagagaatgatacctctagacactatgaaaagagatatgactaccttgggggttattactaaaagcctagttagctctctcccttataggtcccttaaataggggcacggagcaaacacgctgcgtgccatttttcacactgccatgcataagtgtcatatacccttttacttatattcagtgagtattgtcatactatgtacattcccgtgttgcgcctttcgcatatgcatcgcacatgggttctttcttgatcccctctgtaaacaaacccacgaaaggtccgtgtcaccgttttaaatacatacgttggggcactatgctacctctagacgttgtatctaagaaagagacagtttctctggct

SEQ ID NO: 130050 - DNA, 498 bp, Glycine max
  unsure (1)..(498): unsure at all n locations
cccggatcttaagtcacctgcggcatgcaagcttaacatcagaccacttccttggtgttttaactacttcacatggacttgatggggcctatgcaagttgaaagccttggaggaaaaaggtatgcctatgttgttgtggatgatttctccagatttacctgngtcaactttatcagagaaaaatcagacacctttgaagtattcaaggagttgagcctaagacttcaaagagaaaaagactgtgtcatcaagagaatcaggagtgaccatggcagagagtttgaaaacagcaggtttactgaattctgcacatctgaaggcatcactcatgagttctctgcagccattacaccacaacaaaatggcatagttgaaaggaaaaacaggaccttgcaagaggctgctatggtcatgcttcatgccaaagaacttccctataatctctgggctgaagccatgaacacagcatgctacatccacaacagagtcacactgaga

SEQ ID NO: 130051 - DNA, 474 bp, Glycine max
  unsure (1)..(474): unsure at all n locations
tgtcttgcactctnttgtctgtgtgccccatactgtccctttccattggacattgcaatttacgcatgatacttccctccctcatgatgccccacccacacaatttttttattgcctttttttttgttgattgattttattcaaattcgaatgttgagctaattcataacatgattagttactgcaaaattaatgaaaaatgattaaatgtggaaggcactgtgtcgcaagtgcattcaaaattcctgatttcttactaatattcctaccgtctaatctctgtgttgtaatattcctaccgtcctaccttaccttccaacaccttgaacttaagtgaagaaataaaataaatacttgtggagattttgtcagggcgatttattttattttaaagaaaacaataattttttaatggttttaaaacaactttaaaattaaacagttatatcttttttactacaacagatatttctt

SEQ ID NO: 130052 - DNA, 482 bp, Glycine max
tccggatctctaagcacctgcggctgcagcttctatccaaagcaattcttggtggtgtagcttcttcttccttggcttattccctagtggatggtgcctcccctctcctcttctcctttaccttccgctgcatctccatggtgtaaaatcaccattaaagaacctcattgaagctcatagatctagcctccatagaagctccacaagcaagcttccatcatggaccttggagcaaggtaatatagctagtcctttgccactccctctaaagaatgaggaaaggccttcagaaatatgtgatcctcctggacatctggtggtttcatggtggagtaaacaatatggaattctttcaggtgtttgtgtgggtcttcacctgcaaggccatgaaactttggaagcaaatggatcagtccagttttaagaacatatgggacatcctcatcagggtattggatgcacaagctttcataggtgaaatc

SEQ ID NO: 130053 - DNA, 333 bp, Glycine max
tttttccttcaccaattaacccacattcattaatattaatctgtgcatgctctgtgttccaatatattgcctcttagcctaacttgcgttcatgctttatggacgaagaggtaaattggtgtatgtgttgcctaatcacgtattgacaacacctaagggggtttcgctgagtaaattaaaacaagggtggattaagtggtaaactgtaaaggaacaattctccataacctatgacaagagagtggcttctggatcacaggaaacaacccgggtttaataccattaatttcgaaatctagatcgctcgtgcgttattcacaaacaaacaaaccc

SEQ ID NO: 130054 - DNA, 457 bp, Glycine max
ggatccttaagcacgcagctgcagctttacatcatgtcagcttttcttatatttctggactcaatcggacatccgagtaaaaagttattgtagtttgaatttgctcagggcttcggtattccatttcgagcgtctcgatatattacgggactcaatcggacatccgagtaaaaagttattgttgtttgaatttgctcagagcttcggtattccatctaaagcctctcgatatattacgggactcaatcagacatccgagtaaaaagttattgtagtttgaatttgctcagggcttcggtattccatttcgagcgtctcgatgaattacgggactcaatcagacatccgagtaaaaagttattgtcgtttgaatatgctcaaagcttctacattccatttcgagcttttcgatatattacgggactcaatcatacattcgagtaaaaagttattgtcg

SEQ ID NO: 130055 - DNA, 349 bp, Glycine max
ctaagctttgagcaattcaacgacatactctgtctcggtgttgattgattctgtatatatcgagacgctcgattggaataccaagctctgacaaattaaacgacataaccttttactcggatgtctgaggagtcccgtaatatatcgagatgctagaaattgaagttgaagcttgacaaattcaacgaaatacttttactcggatgccgatgatctcgaatatatgagacgctcgaaatgaatatgaagctctgagcaatcaaacaataatacttttactcggtgtcgaggatcccgtattatcgaacctagaattgatgtaaactctggaaattaaacacataatttt

SEQ ID NO: 130056 - DNA, 480 bp, Glycine max
  unsure (1)..(480): unsure at all n locations
ctcgtacccggatccttaagtcacctgcggcatgcagcttggagaaaactcgtagatgttttgtctttacatgcccaactcccactactaaaatttattgatttaacatcacaaggttaacattggttnttgacaaaaccaatgttaacaaaaacacagtggcattgtcataaatatcatgatgttattaacatcggtttttataaaattgatgttaacaatctcatgttagcatcggctttaccaaaaaccgatgttaacattagttaattaacatcggtttctaaaaaaccgatgttaagtgaaggtagttaacatcggtttttgaaaaactaatgttaacatgagattgttaacatcattcttttaaaaaaattgatgttatatttgtacttatattaaaaaccccaaacctgcttttctcccgcactcatcaaaaccttttctctctcgaacttctctccccggctcatacatatt

SEQ ID NO: 130057 - DNA, 441 bp, Glycine max
tgtataccttagaagagaatgagcatgctaatggtattatgactgaaaatgttagttagtttgtcagattgattgtgaaggaatgcattgactgtatcccgatgagagtgtgatccttaaattttgagagaaacgactatcatttagtactgatttttgcatgaatctttgaagtatggactgaatgcatgaaattgaggatgatgaaggccatgtctgattgtgataaccacttatccaaaaaagctgaccacgtgcttgaatgatgtatcctttgcacctagtttgagctgaatgaattattgattgattgaaccctgatcctatgcagtgttatctccagctaccttgacttatgttgtatgagaacatcatccacaataagcgtggttcaaagcaaatttgtcccaaatctgggggagtaattatcaaggtaaatct

SEQ ID NO: 130058 - DNA, 431 bp, Glycine max
  unsure (1)..(431): unsure at all n locations
accggatcttaatgactgggctgcagctgaaaatatacttctccccacttttccggaatcattntcacctccttcacttatctcacttttccctctgatactcctacaagccattatagtttgaatccgggctaagaaaacccagaggttctaacctgttagtttcatcactaaataatgcactaaacacacaagaatcagttgcctatagtaaaacaaacaaacacgtcgaagcatggatcacactaatcaagttgtcatgtcattctccttcagccataattcaattgtcataaagacgaggagcaagaactaaaaattgttgaaaatgttttacctaaaccaaatcttgaaagcaaatggaagtgtttcacatttcttctttcaccaatgacatgccattatatataaaataaaataatatataataa

SEQ ID NO: 130059 - DNA, 339 bp, Glycine max
tgcattcggaacttaatactcagctttaaaagatatgtagcaacccactcttttgctgaaaacaagagcttccattccttcgcgtgttgacctgtctttataatactttgggaatgtcgggccttatgcctggtcgattctgaactaacatgtctccttggactctcttcgcgactgagcttcagcatatagtctctgtcgcaactcaagttatttgtggcctcagactgaaagtcatgcccagcaactctgtttttcctacctaatatatggcaattaatccaattgttcctgatgtacaaacatgttattaatcaattccttttgactgtacttatt

SEQ ID NO: 130060 - DNA, 325 bp, Glycine max
aagcttgaccgatgaataactggtgtcactttctgccatgcagaatccccgtgcaatgcttttgcaactgctgcatttttcaagtttgtggttctctcaatatttgagatgagatatctccttgccatctggaaggcaagtatgccttagacaatgggaagttggagacatgagactgaatgcagttatcaccgtctgaaggtaaaaacaaagtatgcattgattgactatactggaatcctaagaggtcagacaacagttgttatgaagacttaaatcaatgagccaaatttttctcatgacgaaatcgtttgtatctacgcaa

SEQ ID NO: 130061 - DNA, 473 bp, Glycine max
tgtgtaagaatgtggaaacctctggaatattctggagatgtgctgaaccttctgcaaccttatggaagagtatggaaggatattgaagagagtataagagtgtatagactcctagaatatgtggagcattctatagaattaatctccaccctatgatacaagtaatctccactatctattgtggaggtggagtaatataaataacgataggagccttcattcctaaccatccaagacaaaagtgattccacttcttagaatgaaaaagcttgaaagttaaagagcctctttgagagagaagataaatagctagggaagtccctatcctcaagcatgagtgagccaccgtatagtgagtcaattttgtaacacatccttgtaaccctcctatgttttgtatagtggacgaatctcatattggagaattataatcgtgtgctcccattactacactttattactaagtgtctatc

SEQ ID NO: 130062 - DNA, 484 bp, Glycine max
taaatacttacaaatcattcattgtagttcctacgtattctattttaatctttttggttattatactctaaatttatatagactgataaaaaaattaaaaatagtatttatattataagaattatttttaaatgtatagattaaaaggtaaaatttatatatacaactataaagatgatatcaataatttaatcatatttatatgtaacattgataatttctatttgatttataattaatttaatatctcaaataattataattattagttaataatatagcaggtaaaccaaaattattaaattataaaactaaaaaatcaaatgttacaattaaaaataaagaagactaaaatcatgaatttaaaaaattaggagaatcaaaattataatttaacattgtctctaagagaaaaaataattgtttttcttataatgtgtgtacttttaaaagataataaatattatgatcgtatgttaaatta

SEQ ID NO: 130063 - DNA, 470 bp, Glycine max
  unsure (1)..(470): unsure at all n locations
gctggacgaataggtgatgcatctaggtatcacaacaacttacaagtatgaaaattgtgaatatatattggttttagggtttacacacgaatggataaaaataattgtttgtgttttacaaatgcagggttaagtttgcacattgggccttaaagagactactaccgaatagccttggagacctatgtagtgtttgagaagccatgaacaatatgatcactctacaacatattgaaattaaggcatcgtttgagacaactacacatgtggttgggcatgnttttaaagttaccttatacaagaaactatttggcatggtatcaaggtatgtgttaaaccagattgttgctgangttgagcatgtaaattatgcctacattgataagtctcattatagatatataatgagaactactcacggtcttccatgtgcacgtgagctaactagatatgttcttggtagcatacca

SEQ ID NO: 130064 - DNA, 478 bp, Glycine max
tgtcatgaagctacctagtctataaatagaaacatgtgttacacttgttgtaactttgatgaatgagagtcttgtgagacacaactcaaagttcaacttctctccctttgtcttacttcaattccgtgccccccctctctctttctctccctctttcttttcctccattgaagcatactctccaagctccttcttccatgacttattccttaatggatggcgcctcctctcacctcttttcctttgtcttccgctgcatctccatggtggaaaatcaccattaaaggaccccattgaagctcaaagatccatcctccatataagccccacaagcaagcttccatcaagtggtaatcagagcacaagagcttcaagtatgtgctccttaaacctccattatatattttgctctaccttctcttccatcggtagtgcatcatattcctccatgtatctcctcacatgtctagtgctaaat

SEQ ID NO: 130065 - DNA, 436 bp, Glycine max
  unsure (1)..(436): unsure at all n locations
agcacctgaggctgcagcttgtatggaagaaaagagcaacacacacagttatctaataagtagcaagtatttaaaaaaataactgtaagtataaaatagaagtgtgtgtgctgctatttaagaaaaagaaaagctaagtgcggaaaggcaagtaatagagttggaataaaaataaaaaggttgatctatgtatgaatgctctcttagaacctaagcttttgcatcctanaaaaaccatgaattgattgcagcccagcctcgttacaagcctagtaaagtccttcagattcaatttgtgtgttcttgactatatggcatgagatgaattgcaaagattaagacttgtgttagttgttgattgctgaataaacctaaacacttgtgtttgagtgaaacagtagctgtgtgaccttggttaatgatccttccttgatat

SEQ ID NO: 130066 - DNA, 438 bp, Glycine max
aacaatatgcgaatgcattatctcctcaaagatagcttgtgtcctaagaaatgtgggcttaataaatatgtccaaaaacttgccaaacaatctacatgtgcctatgtggttcctgatgaggtgagttgaatttctgaaaaactcaagtgttcttctggcttgtatatattttgtttttgtttttttgataagcaaatgttttatagtttgatggatgttctggtgtgtaggatatataggaattcattttacttttgaaagtgcttcaaactacaaaaggtttgaataattgatattgattgcataaagtttatttaatttcatattgtaatgtgtgtttattccttgaatttttgacgtttcaagtttgtgatgatgaataccaaaataaatttatccaagaacaaaaataaattaaataacatataaatgcattct

SEQ ID NO: 130067 - DNA, 362 bp, Glycine max
  unsure (1)..(362): unsure at all n locations
ctgcagctgtatcattaccactactgaatctttatctatgagattncaaaaaatattctcaacagtcacatctttntcattggttcttgaatggccatcaaaggcctatatatatgtgacttgagacacgaatttgctaagagttttcacaacaaaaaggtcttatcctcttaaaaagcaaaatcgttttatcctcttacaaattccttggccaaaacacttgtgattcaataaggaattatttgagtgctcaaattgttcaatctatctctttcaagagagaattcttcttctcttcctctttattctgaacagggattaagagaccgagggtctctttgtggaaagaaatctgaacacaa

SEQ ID NO: 130068 - DNA, 393 bp, Glycine max
aagcttaagaaaggccaaactcccttccaaaatctgatttatgctttatagatggctttgttcctgctcgtgtgctttcttagttgatgaaaatgactaacttttgtgtataaaacttgtataaattgtattaatctctaccaatttatggttattttgtagtgttataagtattttctgttaagtataggtaataaatacttagtattttcattttgtgtgtttaataatcattttctctcaattttaggttaataaggcaaactttggaaaatgctgtttttcaccttctcgctaatccaatctgctggcttatcgagcgtgcgcttatcgcaacactcctgtgctaagcgcaaggaagactctggaagaagatgagctgtatatgttcgc

SEQ ID NO: 130069 - DNA, 398 bp, Glycine max
  unsure (1)..(398): unsure at all n locations
aagggatgccccacattatttccatgacacanatgcaaaaatgatgaattggaaacttcatgcaaaacttgtcatgcatgcatctatgcggacactcaaatgtcaaaattttatggtcatgtgatgctagggctcaagattcatttcctctatttttaatcaacccaatgtttccaaaatatgttcttttatcaatttgtgcattcatccgagtccatttcgggcgtccgggaaatntcacagcattcaccctttatgcgtagacacatttcccaaaaattggttatggtcaatgaaatcttncacagaaaaattggagatcgtctctctttaaaagcatgtcatttttagctagacaactaatttcttnttttctccttcctctttttttatatcat

SEQ ID NO: 130070 - DNA, 462 bp, Glycine max
  unsure (1)..(462): unsure at all n locations
cttctatggaggctggatctctgttcttctatgangtcctttaatggtaattttccaccatggtgatgcagtggaagacaaatgagtatatgtgagatgaggcgccatccactatgcaataagccatggaagaaggagcttcatcaccaagatgagccttggataataagcttggagaggatgcttcaatgaatgaaaagaaagagggagagaaagatagagaggggagcacgatattgaatgaagaaaaatggacagaagttgaactctgagttgtgtctcacaagactctcattcatcaaagttacaacaagtggtacacatgcttctatttatagactaggtagcttccttgagaagcatttctgataaaacttccttgagaagctagagcttatctacacacacccctctaatgactaatctcacctccttgataagcttcactgagaagattcctaa

SEQ ID NO: 130071 - DNA, 389 bp, Glycine max
aaaacaaaaaatatgacatatgttaataaaaaccatttcatacactctgcaaaaccatttcatacagtatttgtagtgtactctcaatggaaatacacttatgagataacctctaatatttttttatcagtgaaaaactctataaaaaaaggtaaaaccaaaagacagaaactccaaggaccttataagtccaatcagctgagcccactgagcatcaacagtactccattgatccccctcaataaccaaaaaaatatgaaatacggcatgtgagaatagggtcagagaggataacattagcacagaccatgatatcaaagatggttgacagacacgatatcttggttgcataacaaagaaaaaagattcacttcataaataaaagacat

SEQ ID NO: 130072 - DNA, 202 bp, Glycine max
tctctattaaccaaatattggatggcccctggatatgggatggaaagaaagcttatttggcggaacaaatgggaacgcaaccactgacaaaacttaggaaatttaggaagtataccgttacatataaaaattattgcaataccccattaagtatttaacgataaaaatactacccccgcgcactaacaacaaacccatgcca

SEQ ID NO: 130073 - DNA, 199 bp, Glycine max
ctgcaacttgctcttaatcacacgttgtttgtatttagggagaggtatatccattttgctttagagtatgcccctaaactaactttcaatgttgctttcagaaggcaccagaacttcctaagagtcaaagaatgcgcaagactttccccgaacacatcgttaacgtgcacaccctaacctagatgcttcgaccctccta

SEQ ID NO: 130074 - DNA, 350 bp, Glycine max
  unsure (1)..(350): unsure at all n locations
ctcaatggtgggagaagtaaaattttattttattcggaagacgttcatacttgttgttgcgatgagatntcaaccttccatgattcataatccgtctgaacaattgctatttctcaagcaagcaagcactgtggaggaatttgtggaagattttgagaagtacgttggagcattgatgactattgatcaagaattctgtagaggaatttttctaaatggccctaatgaagagttgccagcagaggttatattgtttgatttacactctctatcgagaatcattctaatagctgtattgatatgaacaaaacaatgtgttgcgtaataagaggaacaattatggatatgct

SEQ ID NO: 130075 - DNA, 453 bp, Glycine max
  unsure (1)..(453): unsure at all n locations
ctgcagcttacttttcttggatctcttttgtttgngaaagctgcttgcaacctatccgccaattgttttgccagctgtcccacttggacttccagattcttaatggttgactctgtgctcttatggtttgacatagatacctgcataaattgagatagagtctcttccagctttgttgttcggtcatagagactaggcccttatcgttgtggcctgttagatggaccaccctggtctttgttgaattggttaccagggtganttttccattgtctttgttgtgaattatatggctggccatgctgaaattcggaatatccatctgcattgaaattntgtcttggctggctccccatatagttgacttcatgagttggttcttcattggggatacagcagccataattgtgagctccaccacagatggcacacccaacaacctataaaacagta

SEQ ID NO: 130076 - DNA, 405 bp, Glycine max
  unsure (1)..(405): unsure at all n locations
tcaaatcgtatcttatcaaggatttattccatctagattctattttatccagattttattccatctaaattttatttcgtccagattgtatttcatccaatcttatcttgtccaaattttattttatttcgcatatgggtttggacttaaaatagatttgtgagctttgggactgatgacctatattacaacaccaanggtttaatttaaggagnttttttcggagaggagaataattctaggattttagaatttcaagttttattattgttcatgcacattgtttatgtagaataaaattcgttgtctgaatttcatttcggcttcaatctacagtttacgttctactgattaatggaaggctcagtctttatcattggtttctcttgaggataaacacatctc

SEQ ID NO: 130077 - DNA, 408 bp, Glycine max
  unsure (1)..(408): unsure at all n locations
tgtctcatcgtttatgcgagactgagaccaacatgctagtgnttatcgctaagtaccaagaagagttgggtctatccatggcccacgatcatataatcgcggacgagtatgctcaagtatacgcggaaaaagacgctagaggaatggtgatcgactctttacaccaaaatgcaaccatgtggatggaccggtttgctcttaccttgaacaggagtcaagaacttccccgcttattatccaatgccaatgcgatggcagacacctactccacccccgaagagattcatgggcttctcggctattgtcagcatatgatagacttaatggcccacataattagaaatcgttaggaaacttgtatggtctctcagacactgactagatatgacttatcttttgaaataaaat

SEQ ID NO: 130078 - DNA, 330 bp, Glycine max
gcgcaggggcagaggctgcaccggagatgacattgtactctcccgcacgagaggatgtcggcgaagacatttagttaatgataacatattttatttgattccatgaatttacgctgagcattgaataagatattcttccactgtttataaaatacacaatgattttttgcttgatttgtcgttatatagttaaggcatgatatgcatgatccttttcttaaaggattagcatgatccctgtcatattgatgcatattagttagcatgaatattaacaacactctttcaaatacttttttagtagtagaatccaatttatttaagatgaaa

SEQ ID NO: 130079 - DNA, 380 bp, Glycine max
  unsure (1)..(380): unsure at all n locations
cagagttaattattctcattccaattcgaattctangagattgctctataggacctacggataattctaacaaattgctcttctggttctaactgtgatgtcaatgttctcccatacataatatttataggctataagatgataaatcttattggaccaattgacaaattcatgccatgcttggttagggataattctagcatattgttctggttttaagtgtgatgtcaaagttccccatacataatatttagaggttataagatgttaaattttattggaccaattgacaaattcttggcatgcatggtttgtaatgaatcaagacaaattctgatggcagtgaaatcttactttcactatgttgagatagtcaagct

SEQ ID NO: 130080 - DNA, 400 bp, Glycine max
  unsure (1)..(400): unsure at all n locations
gaggcaccccggaagatttaagccaagcccctactcttgaggggcaactcccaccttatgaagactatcccgggtaagacgatggggaaggagatacccatcttggcaccctgctccacctcaaagatccatccccgcatgaactaccccagccgaacatagtccgccatattccggtctcacccacacccgtaaaagaatctgtttccttcgcggaagaaaaaggaaagattgaggcgcttgaatagaggttaatagcagtcgagggccttggcaattacccaatctcggatttggcggatttatgtcttgtgcccaacatcgtcatcctcccaagttcaagtaccagacttgataagacaatggacgactgtccaaaggcattncggatgtatgccga

SEQ ID NO: 130081 - DNA, 441 bp, Glycine max
tactcagctttcgcaggggtcgctaaggacatgccttgagtttcttttcgtctctcgaattcgcttagcgtatcatttcgctaagcgagagagttgaatatagcttagtgaagtgtaacatcagtacactcacacgtgcccaagaatctttgcataaacattaccttctctctctctcaatattacatctgcatgcccaaacatgttcttattgcattatctcattgcaaccatagcttttatgatactatttagttccctactacctcttttctgctattttgctgaactgtaggttagacaaccttaaatctagctttaagaattataggatatgaatattcttagaagtaattagagattaggactctgtgtaggttgtcttgtgtaaaatatgttaagaacattgcatgtgggatatgcctattatacgcctcaata

SEQ ID NO: 130082 - DNA, 434 bp, Glycine max
  unsure (1)..(434): unsure at all n locations
cataataatgaaattaaaggcataaaataaatgtaaaaatgtatcaaaaccagaaaaagtaaatcaaaatcctgtcatggctcctcatatactgcagtaggctcatcttgaggtgaagagggagcatcctgngctggctgaggaatatcctgagctgtagtaggccatggatcccaggtgctctgcgttgcctgtaaatctactacgtagccaatatctgcagcaccatcctcctccttagagacctccaagactggtgtggtaactggtgatgttcgtggaatggtctctggctgcggctgaagctcctgtgctgtggaagcctgacctcctcccaaaggagaaagctggactcctggccaggccacttgggccatgaaatcctncatgctaatgatgggacgatgttgatgccaatcgtgaatactctgcat

SEQ ID NO: 130083 - DNA, 443 bp, Glycine max
  unsure (1)..(443): unsure at all n locations
taacaagtgtcttcacaaatagtcatcacacagcagattacttacaaaactacccatcatatctcccataaccccatacccacaaaaatcaaaggagaaagaagtccacccaaacctgaattttcgaagtcccactcgtagccacgcacttcacgaccccgaaaatgccctcctttcgcgatttggggcagaaatgatggccaaaggttgaagctttgcttggagcttcaatggagaatgaagaagaagaaaatggcaacgtgagggagagagagagctgtctgaaaagtgtgggggctgagtgaagagagagaaaagctctttggttttaaataaaaagggttgtctctgtgtctattatnttattcaagctctgccacatgtccctatttgagtggagccaatagagcccactttccctttttactgtgacccacactcat

SEQ ID NO: 130084 - DNA, 374 bp, Glycine max
acactctaagcactgacggtaaacaccggtgagggcatgatcatcatatcaggggaaggttaatcctccgtaagagccgtgggagattctatccccgtgtgtagctcgtaactaccctcacccacattgtcaaagcttatcaacctctcaaaaggggaggacccattatcagagacctcatgaggaacctcttccgatgaaaaatcttcgatgggaaccacttcccgctctaccatgggttgtcgaacaaaacccctagagtcacttcctctcatgcctaacgcagaataaaaattagacataatctggaaaatgggggtgtcctggagtgaagtagccatcgaataatgaagacgatatattgacgaaaactc

SEQ ID NO: 130085 - DNA, 486 bp, Glycine max
tatgctgcataaccttctagaatgatcctatacaaccaacagttctttgaattcttctaggctacttattaacaccataaatatctagagaagagataaagtaaatgaaatgtgaggaatttatgcttgtagcagagtatggaaacaaagccagagagtcactaatctttttgtgtagaattttatacttccacatccattgagttgaagataagaattcctactggaacaatctgcccctaataggcctatatgtgcgaattgtacagttcttattattatgtgcaactaactttcattatgctgaaattaactatgcacgggacattgtgctttgttagcacttattatttaaaccatatgctccataatacaaaggtagatacgcgataatggtggttgtctttacgaaacctcacttttcatacaatggacaggtatattattggtcccacattatcacagtacatattttatgtctcatac

SEQ ID NO: 130086 - DNA, 409 bp, Glycine max
cattaatacttatctaatcttctttctttctatgctgcttttcctatcaaatcatatttaattatctattatatttatatttttctcttttttctttaatttctttctatctatgcgtcaaataacatatataggcgttgatgcatgattattcttgtttaaattacgatttgaggtaatgcacgagttgcgtgcttttttctctgcatatttaaatggaaaatatttgatcgacactaatatatgtttcaaaaccttagaagagagaaaattaatcgagagacaaacatatataagtatcatagaattcattatgtaataaaaaaaataaaaggcgttgactagatgttgaaaataaaatgaggagttggtatataattcttttcaaatggctgaatctaaacacgat

SEQ ID NO: 130087 - DNA, 404 bp, Glycine max
  unsure (1)..(404): unsure at all n locations
ttatatgtgtcctttaaacaaacaattcttctcttattttatagatatatgncattactccaatttgatgaacacaacgagtggcttggggtacgatagttntgtgattgtaactaattgctctggtccaccgtcaacgatggtactgacttatttcttctgctctcaaattgttgaaatcggttcaatctcccaccatcatcacatgcatttgcttgtggtgtgtcctttctgtgttcactttgttacctcaatccatcataacgacttttgaaactataaaaccgttggcaaaagcctcgcattgcataatcatttgactgatgtactttgatcacactcacttctcttaatatatttgtagacgtgtagtngaattgaataggtaaggtgggatcctaaat

SEQ ID NO: 130088 - DNA, 258 bp, Glycine max
agcccgttgacacacagagacaaattatggtcattttgcaccttttgtcatccagaggcggcgagcctgatgacatgcggagacaaattatggtcattcgcacaccttttgtcaaccataggcggcgaacccgttgacacacagagacaaattagtggacatcttgcaccgttggtcatccagaggctgtgagcacaatgacatgcgaagacaaaatatgagacatctgcgcctatcgtcgaccgagaggaacgaatt

SEQ ID NO: 130089 - DNA, 488 bp, Glycine max
tacgtacacttaaatactaagactgttaagaactgaggataaatcaagaacaagcttgtactcacatcgttcgcgtgtatgatatccactccacaaggtttgaagtagaggagagcttcaaccctatcacgcaacgtggcggacaaaagtgggcagtaaacttgaatggtcgtcattgtcaatgcggaaggtattctgtgcttcactatccatgttcacacattattgcagcttgtggttacgtgagcatgaactactaccaatatatagatgttgtttatacaaacgagcacatcttaaaagcttactccgcacaatggtggcctcttgggaatgaagcggctattcctccttctgatgacgcatggacacttatccctgacccaactacaattcgtgcgataggttggccaaaatcaacaaggataagaaatgagatggattgtgtcgaaccatgtgagcaccgaccataatgtattatatgtggc

SEQ ID NO: 130090 - DNA, 411 bp, Glycine max
  unsure (1)..(411): unsure at all n locations
ttaagtcacctgcggcatgcaagcttatgagctctaagaacattaggaggtttgttgttattgttgaaganaatggaaactgaatcataaaagaattgtggtcgagacgagttgtgatcaccgtcaaattttatgacatttttgtcaccctacacaaatcagaaacaatgattagatattttggctaccaatggaaaaatggtgcagattgctttcaaaaaatatcattctcaaagatttggaatagattaatactgcataggcttcagagatgagatcagaatggtgaggctgaatgaattngtcatcgcttgcatgtccaaataaaacaggaatgaatgtcttcggtgcaacctgtggatttaaaaagaattaatttaagataggcatggaaagaaaatgattctactt

SEQ ID NO: 130091 - DNA, 442 bp, Glycine max
gcagcttaaaataagtgataatgtttagttcaagtgatcatcaattccaaaacatagggggagtaaacgcacattttatatatatacattgtttgcttgaatcttgatttcaggacttatattgtcatcatcaaaaagggggagattgtagaagcaaatgactctgatgttttgatgatgatcatgatgatttgatgcaaatgatgcaaatgattcaagaatacaagccacaacatcaagatgatcactagtattttaggaagggaattcctaattgatttagcaaaaggtttggccaagtaatctgagttaaaaagtgtttttcaagagatatactctctggtaatcgactaccagaggatgttatcgattaccagtggccaaaaatggtttacaacagctactaaatatttgaattcaaatttagactgtgtaattgata

SEQ ID NO: 130092 - DNA, 439 bp, Glycine max
gctctggtgcatccttatggactgagcgaacatgcttgggtcatttaagagactacacatcttttaaggcacatagtgaggatgggaacaacgaatcaccaattccacattctttaaaagattgcgaaaaaaatacagaggacaggaatccctgtgggaaaccacagaaaataaaacatgcagcgacttccttaattgcctcaagtcttaatcgtaatatcgcttgacggtgtctgagtttacgggtgaaggtagttcctcgtcatccatgttggtgagcacaatggcccctccggagaaagccctttatacgatgaaaggcccttcataattctgggcccactttcccctattgtcttttatgacttgggagactttcttcagtaccatgtccccttcggtgaaccttcacgaacgcacctttttgtagaaagtattc

SEQ ID NO: 130093 - DNA, 401 bp, Glycine max
  unsure (1)..(401): unsure at all n locations
cctcgacattacattcaaacatgagtgaaggaatcataacgaggcatgtacttatgagcttacttgaatcagtaagtaatatttatctagtacattcaaaaaatatatgcattatacgtacctaattatatttgtggacttcagggcacattggtagcttgttgttagtccacgagaccatattgttgtttggttttgctttttacgtaagaagcctaatattaacatcaaagttgcaattaacaggttatggataaaattataattcatttactatataacaattataggaaacgcaaacataatnttaatcttatatatgtgtatgtgtnttttaaccaattgcatgaagactaatcactagtttggaaggaaatcggatcaacctgtacctcggtgga

SEQ ID NO: 130094 - DNA, 466 bp, Glycine max
  unsure (1)..(466): unsure at all n locations
gcagcttagcaatgtcttacttatatcttcacacagcagaaacctagcaagactacccatcatatctcccataaccccatacccacgaaaatcaagagagaaagaagtccacccaaacctgaattttcgaagtcccactcgtagccacgcacttcacgaccccgaaaatgccctcatttcgcgatttggggcagaaatgatggccaaaggttgaagctntgcttggagcttcaatggagaatgaagaagaagaaaatggcaatgtgagggagagagagagctgtctgaaaagtgtgggggctgagtgaagagagagaanagctctttgatntttaaataaaagggttttctggttttctattaatttattcaagctctgccacatgtccctctttgagtgtggnggcccactttcccttttngactgtgacccatactcagntcacaaagtgaggaaaatctgacc

SEQ ID NO: 130095 - DNA, 369 bp, Glycine max
acatgattgaacatgaattgttactcgtatgaattgatctgggcacaaatggatgaaggaaagtgtgattttcgaaatctgcacttatgcatatatttgctgtcaaaataagtgcaacataattttggcttgtgcaaaaaaatgcttgtgtgtgggtggctgtggaaagggtagtgcacaatgagttctggatgtttgctagtagatcccacggtcaaaatgtacgattaagtattagagacttccagtataattttcgagtcgatccaacggtttatgtaccacaacgaaagaattgttactggggtctttatgtgagaaaagttgtgatttggatggtgttttggcagagttctctgcctatgctat

SEQ ID NO: 130096 - DNA, 484 bp, Glycine max
  unsure (1)..(484): unsure at all n locations
ggatcttaagcacgcggctgcagctaccttgatataattgttcctnttcttctcttgngagctaaattacattttcaaaattgaaccttgaacttgagtgaatatctccagatactttgcttagattctaggagagcatatggttcaaagcaatttgcctcaaatttgggggagttaaccgggatgtaaagtggaaggtaaagcacatcagcacacacaacaaataagttgtgttaaaaaaaacaatcaaagaaagtgtgtgatgtgccatcattttcttctattttctaaaccctttttgcaccattttaattattgattggtcttaattgtcaattaattaggcagttttattatttgggctcatttagctaatttgatgttnttaatctaatttcaggaatgaatgaaacattgggcttaatccggattttagttgtggacttgaagagggcaaataaagtagcgcttaccttagttaata

SEQ ID NO: 130097 - DNA, 355 bp, Glycine max
gtctttgtacatgccctactctttgagtggcattagtattgattggtgcatcatagtctcttcttctgtccgaagaaattgttgaatatctttcggggtgtctaagttagatgtgtttgcatcattactaaatatattttccttgttttagaagttagcagacattgactatactatgctgtcacatatactatgctatgctgtcttttccccctttctctctcttatgctttgtactctataaattgtaagctgaaacatgaatatcaagagtcatgtgagtgaaatttcctcacacttaaattcaagttggcatcagtgcgggttccgaccatcaccgtcgacgacgccaccg

SEQ ID NO: 130098 - DNA, 435 bp, Glycine max
  unsure (1)..(435): unsure at all n locations
ccttaagtcacccgcggctgcaagctcagcggattctttttgtcnctcnctttaccatcgggcaatggctagaaatctggcgccgacggaggacttcaaagcgttcaatctggcggagtcaccgaaacctaacttggcggggtccttgagattggggaagttcaaacgcgcgtactctccacggagcttgtacgcggcgcgatcgtatgcgtaggcagcagcttctgcggtgtcgtaggttcccaaccacactctcattctgttctggggagtctaatttccgccacccatgtgacccagtgcctttgcctcactcccctgtacagatgtttctttgcagggttcgncaacgaattactctaggaggaagtgggaacattataagacccatttctcggcgttcttggtaaaactttgggaggatgtccctttggc

SEQ ID NO: 130099 - DNA, 409 bp, Glycine max
  unsure (1)..(409): unsure at all n locations
gaagaacgaggaagaacgaatgaagaacgtcgaagaacgggtgaaacccttgcgaaattcttcacggaaaacgttacggaaacgtttcggaagcgcctcggcttatattttcttcacggaaacgatttttccaagcaaattcgaaagagagagaagtgccaaaggggctgaacccttttcttcttcacttcctcccctatttatagcaaaataggggaggtggttgccgcccagctcgcccaggcgagctcagctcgcccaggcgagccaggttgcttcctccagaagcaaccgccttctggaggaatattctggagggcccaagtgggcctgggtgctatttgcaccaccatttttactaagtacaccccccctctgctgtnttttggtgattctttnttcgtaaagt

SEQ ID NO: 130100 - DNA, 432 bp, Glycine max
  unsure (1)..(432): unsure at all n locations
tcctttacacanaagaagaaaaagatgatggattgaagatatacacgtggtggggatgtctcctgcacctctatgacctcacaatcactcacaaactcatctcaagctctcatgatggcttccctttcaagcttagttctctgtaggtcttcacacagcaaaatctctcatactctctagaacttggacctttctctctctagaaaaccctatacatgcaaaagcttcaagaaaagacccaaactcccctccaaaatctgatttcaggcttaatatgtggctttgtttgtgcttgcatgcttatcacaattttgaaccgcttagcactcattagtggatttcggcttatcgtgtgcttttctcgcttaacggatggattgaagcggtgcgcttcgctggatgacccttcgcttatcgcaaatgcacaactca

SEQ ID NO: 130101 - DNA, 422 bp, Glycine max
  unsure (1)..(422): unsure at all n locations
aagcttgcaggttcatttaatttttgtttgngtcatccccatggactgagtgaaaaggctcgggtccttaaagactacgcatcttttaaggcacaaaacgaggatcagaacaaagaaaccccaagcctatgttctttaaaagactacgatgagaaaattacagaggacaggaatccctgtgggaaaccacaaaaaataaaaaacatgcagagacttccttaattgccccagatcttaagcgtagtatcgcttgacaacgtcgaagttcacgggtgaaggaagttacaacgaaaggcccttcgtagttcgaggcccacttttccctattgtccttcagggcttgggagactttcttcagtaccaggtcccctttcgtgaacctgcgcgagcgcaccttcttgtcaaaagcgttcttactcatt

SEQ ID NO: 130102 - DNA, 441 bp, Glycine max
cattcggacatataaatctcagcttttgcatatacattgagcataactatgtgcacatctttatataagcggcttgtggcgtcaaagcctcaaatgcattaacacttggcaaagtaagcatgacttacctcaatcaaaattataccctgtgagcactaatgagcacccttaacggactgctaagtgaaacgtacctagataaggtccttgcatcataaacaaacaacgagtccttacagagagcacaagttcgtacctaggtatttagaagaaagactcatgaaacatacctatgtagggtggcaagctgtcacggtctcgagtgcgatgaataagaagaagcttagacagagaagaagagagcttatatggagatcgatgaatagagcgcgagcaaaataggactcgcgcgcgatatatcttaaaatgtaagttcaacat

SEQ ID NO: 130103 - DNA, 324 bp, Glycine max
gagcctacaagctataagaactatatggtagaacaatcctatgaacatgatatgctacccatctctcggtctatttcagttgacctactggaagaccaggtgttgtactctattcccttctcaagtcttttgtcccaagagagaaaaccagtgtggggctgcgatgtttaacgaggcatgtctggggaacgaagggaatttgtccttaattgactaccttgaataacatctacctctctgtagtttattaaatcccttgtgtcaactctacaaaggctcgtctaattaaaggtttacccttgggtgagccctaacacaacccag

SEQ ID NO: 130104 - DNA, 388 bp, Glycine max
agaggaagaacaaggcatcaagtgcttgaatttccaattctcctcaagagaaagaagaacttagagaggaagggagatgagtatgaaaagaatgggatgaacgggatgcttttacccctaatatttggtaaagaactgatagttgctatttgcattttgtttcttatacaaacaccttatctttccttcttctctttattaaccgtgctcgtattcacggatccaacaacttatttcaaactcacgtgaacattcctaacattgtaaacacatcatgttatcattattttgatttccacagaatattttactaatttactcgcttttatgttcctcttcttcctacgcctgaatatcctctattgtgataatcacgacgttgctattg

SEQ ID NO: 130105 - DNA, 416 bp, Glycine max
tttagtcatcctgcttggacaaatgagaaaactggggcaaatgaagagggtgaggatgaaggagaagtccgtgctgtgactgccattccaatacagccaagtttcccaccaacccaacaatgtcattactcagccaataacaaaccttctccttacccaccgcccagttatccacaaaggccatccctaaaatcaaccacaaagcctatctaccgcacttccaatgatgaacatcacctttagcacaatccataaacaccaaccaagaaatgtaatttgcagcgagaaagcctgtagaattcaccccaattccagtgtcttatgctgacttgctcccatgtctacttgataattcaatggtagccataaccccaacccagggtcatcaacctccatttttccgagaatacgactcg

SEQ ID NO: 130106 - DNA, 447 bp, Glycine max
ctgctttaatggaagtcatgagcatgatattgcgccgataccgttgactggtgttcatgtatatcagcgggtttaacacctgaacactgtatttgggaagacccaaaagaaggataatagtcagagttgcatatggaagaagaggtccattttctttgatcttccgtactggtgtgatcttgacgttagacattggatcgatgttatgcatgtagagaaaaatgcttgtgacagtgtgattgagacgctccttaacattcaaggcaagacgaaggatggcttgaatacccgtcaagatctagctgatatgggtataagatcacagttgcatacaatgtctgatgggaagaaaatgtactggcccccagcctgccatactttgtccaagaaagagaagataagcttgtgtcagtgtcttcgtcatgtgaagggtccacaatgatactc

SEQ ID NO: 130107 - DNA, 422 bp, Glycine max
  unsure (1)..(422): unsure at all n locations
ggctcaaggataaaagggatgccccacattatttccatgacacaaatgcaaaaatgatgatttgtgaaatttatgcaaaactggtcatgcatgcacctatgtggacgctcaagtgtcaaatttttatggtcatgtgatgctagggctcaagattcatttcctctattttaaatcaacccaatgtttccaaaatatgttcttttatcgaattgtgcattcatccgagtccatttcgggcgtccggtgaaatttcacagcattcacccttcaggtgtagacacantttccaaaaattggttatgatcaatgaatnttttttttttttcaaagaaaagttggaaattatcttttttcaaaagcatgtcggttttcagctagacaacttattnttctctatttcccattgtttcttacttgctttc

SEQ ID NO: 130108 - DNA, 442 bp, Glycine max
  unsure (1)..(442): unsure at all n locations
tgtgtaacccaccatttccatagtagaatactgtttatgtgtctaccatcacgattatcatctccctttccatcattgggggtgccacttgggctgccatatccctccacgtttgggtgtattctttgaaagattcatgcccttttttgcacatgttctatatttgcatcctatccggagccatatcagaattgtactgatactgcctaacgaatgcaaccattatgtccttccaagaatggactcgggaaggttccaagttagtgtactatgtagcaactaccctcgtaagactttcttggaagaaatgtatcaatagttcctcatcttttgtgtatgcccccatcttccgacaatacatctttggatcgttcttggggtaagtagtccccttgtacttgtcaaagtccagcaccttcaactngggaggggtgatgatatt

SEQ ID NO: 130109 - DNA, 419 bp, Glycine max
  unsure (1)..(419): unsure at all n locations
ttatcaggggttgtttctgaataaatcanaagatgtaacttttcaaatggtttttgactttttcaaattggttttaagtttttctaaaagttataactttgttcaaaaacttgtgctattcatctagagggtacatctacttgggtttgactgagaacaagagagggtacatctcttgtggatcagttctagtggagggtacatccactatgttcaaagagaacaagggagggtacatcccttgtggatctttgcttgtaaaaggatttttacaaggttgaaagaaatctcaaggaccgcangtcgcttggggaatggatgtangcacgggattgtgctgaaccanntataaaactctttgtgtgttgttccttcttcctactctttactttccgctggcatttaattccgctttactt

SEQ ID NO: 130110 - DNA, 437 bp, Glycine max
tcttctatactcattttctccatgaagaggcgtcttctatcatctttcttccttctccattctgctgccatgatcttcaagaagcaaaagacttcattgatgaagaagatccatgacctacaagctccacatggagctacatcatttttccccctttctataaaggttgtgtctaatgtcactcgttacctggaagaaattacatttggattgtaggattcttttggcatgttcaaaaggggaaaaaaattattttgattttgatgtttctagtgagttctatggtaatggagccctaaatcttatctttgtggcgagggggtggagctggattgttgaatatgatgcatccactaatttggtcgcaccggtacaattggtagtaaaacaagttttgactaccgagttgatactgaattgatgtagacctttcatat

SEQ ID NO: 130111 - DNA, 392 bp, Glycine max
gcctgcagcttaaatcaatattaggttgttttgtcgtttctcctgagaagcctctgcttgcacgacagtttggccttggcttgaaacttttgcatgtataggaagttctttaaagagaaagggccaagttccaaagagttctgagagatcttgctgtgtgaagatctgcagagacgaaagctcgaatctgaagccgttctgagagcttaatatgaatttgtgagtgattgggagatccttcatgtgattgagacattctcaccacttgtattattgcaatctttcatcatgtgtctctcgtgatgtaaaagaagcatccggactgatggaagctacatcctctgttggatctttcttgtaggtaccctgtgccaatatatatttatctttgt

SEQ ID NO: 130112 - DNA, 477 bp, Glycine max
tatgcttggatatctaaagcttggttagaacaaggatacccttctctgtatactcgatacccttctaaacctttcatcattgctattacatgctctcaatacctttcttgtcctgcttctcgtgctttcaaactttttcaacctaattggcaaacctgccaaacaccttcaccactgctgcttttcttctctggcaactccattgatgttattgtttggtgtggttgcatcacataccactcctcacctaacaatctttcttattctttggtgatgactattgtgacaccatagttggctatgatgtaccttcatccttgcacctactacaagaaaaagcaatattgccaacggccaaattccatcggttacaaaataaatccatccgtaattaagactttctgacaacaaatgttcattataaaaaataatcctcagtaagtttaaatttgtcagtaatttctatcgaacacccct

SEQ ID NO: 130113 - DNA, 357 bp, Glycine max
gactcaatcgaacatccgagtcaaaacttattgtcggttgaatttcttatagcttctgtattcaatttcgagcgtctcgatatattacgggactcaatctgacatctgaggaaaaaataattgtcatttgaatctgctcatagcttctattttcaatgtcgagcgtcttgatatatgacggggctcaatcggacatccgagtaaaaagttattaatggttgaatttgctcagagattctattttcaatttcgtgcgtctcgaaatactacaggactcaatcggactttctagttaaaagttattaatcgttggatatgctgagagcttctgtttcaatttccagcatcttgaaatat

SEQ ID NO: 130114 - DNA, 449 bp, Glycine max
gtaagcaaattcaaatgacaataaactttgactcggatgttcgattgagtcattttataatttgagacgctcaatattgaatgcatgagctcttaccatattcatatgccaataactttttactcggatgtccgattgagtcccgtaatatatctagatgctcaaaattgaaaacagtaactctaagcaaattcaaacgacaataacttctaactcggatgttcgattgagtcatttaataattcttgacgctagaaattgaatacagaagctctcaccatatttaaatgacaataactttgtactcagaagtctgattgtgtcctgtaatttatctagacgctcaaaattgaaaacataagctcttaggataatcatacgaatgtaacttttgactcagatgtccgattgagtcacttaataattcaagacgctcgaaattgaatata

SEQ ID NO: 130115 - DNA, 422 bp, Glycine max
  unsure (1)..(422): unsure at all n locations
tgagaaggatctatggaacattttcagagagtgggggcaagtttgggagatcttcatctccaaacacaggaacaaaggggggagaaggtacggatttgtgaggtttcgtggggtggcagatatcaacaggttggaaaggtagcttgataacctggtaattggtgggctgaagctatatgttaatataccaaagtatgacagaggtaacggcccacgagcagagccaagaccaggtcctggaatgcggaacagcagcggagctcatggaaatcctgcaccacgtcagagtcacatgcaacacctgcaacacagttgaccttcaatgtcttacgcgaaggccctgctcacaaagccgacgagcctatgccaggggcgaggtacagttattgccagacanagctacggagagtcgcagtcctcac

SEQ ID NO: 130116 - DNA, 293 bp, Glycine max
tataagaggttttctttttctggcctgtctactttaatattcatacaaaaatatttaggaaatgctttgtctaaaagagctacgctatcctgaaatgctttttttatcttcatatcaaatctaaactaatgcgtacataagacatgaccgacaatttaattaaaagttgcagcttatattacaatgcattttatgccgatccttgattggtgctaaatcctcatctgatttttttttacgatggacgttcacatgattttatgtcttatgactgcagtgacactcctatacgc

SEQ ID NO: 130117 - DNA, 378 bp, Glycine max
ctaacattttaattaaataggtcagttcagaccagactttatgtatgccactataggccggtctgacctattcccatccctaaatagtttttttttatgagaaaaaaaatcttatttagaagattattataaataataaaatttttctaatataattacatattgaagaatctaatatgaaataactaattaatccgaaacaacactattaatcgacacgttagatgttatgtggtgtctctgttattcattttgctttattgaaattgaatcattcctttttagttatcaaataaaaaagaaaagagagaaaatatgtcgattgggggaaggagcatctctctgtgctgtgttcaataagtgaaggagaaacataac

SEQ ID NO: 130118 - DNA, 372 bp, Glycine max
agctttgaaccctggttctccatattacatctatacaaccccttctactatacccaactcccattggtcacaacggctattaatgactctatatattataattaaaaacgcatattgtctatttgcaagagtgaaacaaattccgaatagcacagcaattcataatatccttaacaataaaaatgttaccacattctataattaacaaagcctgtaagtgctgccactacaaacaagttgtacgaatcaattttgtgagaagagacaaaccgggaacgatgagcttattctcaccattgcaatcccaacaaccaagtgaaaaagagacactatccaccccaaacaagagttgaaggcctgcttattgaaact

SEQ ID NO: 130119 - DNA, 430 bp, Glycine max
agtgccagctagttcaaatgaactatgcttctaattgcctgagctgtggccagccagactgaccaaagtgccttattggttgttgagttcccaagctggagtgtatggaaagccagcccctgaagattcactgctgattatgaacactggaaacgtgtagtgtcccagtcttatctagatgggatgggaattaaatggtcaaatgtgcgcaatgtcatggatatgaggtctatctatggagggtgagctaaagtcactggtttgattttcgattgttactctgacttatattttgacttgctaatatgtcctttgtttgacatctgtcaccagtttgtggtttccagatttgctgcagctttgaagaattgaatgttgggtcatgaatgtgggtacaatagacacccctgtactcttccattatttttga

SEQ ID NO: 130120 - DNA, 407 bp, Glycine max
acagaagatatatatacgtagtcgacacacattgtgtggtgtgtattggttaagcaaactaatggcaataggctaatagcaagcattggtggattgtcccttcctcaaatccataactattataacaagtcaccatcatcccattagttactcctagctatgacaagctaagtttcgtgcttttactttctttgaaaattatagcataagttatctgaatttcttttctgagttatctagctatgtgctctaagatgattagggacatcatattctatgtaaggaattaacagctgtgaaaaagaaatgaactgtcgtatatatattcttaatatttacttttaaatagacggtacatatcatgcgtgatgggttgaaaaagcaaattgatgttacacgaaatatat

SEQ ID NO: 130121 - DNA, 397 bp, Glycine max
acattgttgaatgtgacatcctctaccattcattttaatgatcaaataaaacttattaaaaacatgttcgactcaaaataatgtcgttaaaatttacaaaaatattttgttaaatcagtgaggtgaaataatatagactaacatcataaaattaatataaaaaattatatcacaatgtcacatcttatcatatcgttgtgtcccgacgtccttcagcataatattcagttcatctagtcatctgttcccctgaacacaaagttcaaaattatcactggatccaaacacaaacaacataccgggagtgagttatcacattcgtgactaatagagatataagacaactagttatgcatatcatataaatcaaataaaacttacttacacgttattcatg

SEQ ID NO: 130122 - DNA, 491 bp, Glycine max
  unsure (1)..(491): unsure at all n locations
agcttgtagaattatggngtacccatcatatgtggtactaggtggcggtcgggcgatggtgcacaacaagctttccacatccacaatgcgcgcataaacccaccatcccctgttgcccacctccaactgagctcacgtactcccacgtagcccatctcctcgtttctctcaacaccgggtccccatcaatcctctcaagcttccacaacatccaagcaaaacaacgttcaaacagcacaagctatcacagccaagcaaaacagagcaaaggcagaaaactctgctcaacacatcaaccaaaatcacagctnttctcacgtaaagaccacagtaacaattccttcgatccaattcgttaaccgttggatcgactccaaaattntactggaagtctatagtgtataagcctgcattttgaaccgtgggatatactagcanacatccagaactcattctgcactagactntccacagccaaccacacacaagca

SEQ ID NO: 130123 - DNA, 488 bp, Glycine max
  unsure (1)..(488): unsure at all n locations
tgcacgcgtgcaagctngagccattagaagactagctgatgtatttattgctgattnctctacctttacagtttactgagtttaagatctgttataagtgtcagaaggagaaatggtctcttaatgaactcctttcatattgtgcaagaagaggaaaggctgaagcaagaaataactaaaagtgctcatgttgtgagtacctttaaagacaagggctaaaggaaaagaactgaggagcccaacaatgaagctgctaagggtccaacacaaaagacacaaaatcagggtgacaactgtttcttatgcagtcagcctatacatgtaaagaagaaatgtaccaaatatcatgcttggcgtgcagagaagggtatgtttcttactatgtgtctgtctgaggtcacttagcttcatacctataacacttggggtanattttgtgccctctacataaggtttatgctggtgcctactaccgaaccaatgttcta

SEQ ID NO: 130124 - DNA, 393 bp, Glycine max
agcttgatacttacagctgatgcaataatctctgtctgtccaacttcaaggccatttattccagcgtgtatatagatgggaattgtgcaaaaaacagccaagagccccatatatagtttatacatccatcctgccccataaaacaaagtcaaaatagtgaatctttacagtaattagtaataactcctcaagtatcatttacataaaggtacaacatcaatatggaagctcagaaatgacattatcttcaacaatcatccttttgtcatatcgaggctgttggacaatacacatttcctctcttggtcttggatgagggggtgggaaaaggattataatgttccttatcaccaatggtcttcatctatggctttgtgttctaagtaatgatag

SEQ ID NO: 130125 - DNA, 427 bp, Glycine max
  unsure (1)..(427): unsure at all n locations
agcttagaagtttagcccaatagtgttcatttattctgttgccgactgcagataatttgcagcagaatgcgggaaaattggatttcctgcgaagatgtatttcagtggttatattntttccgaccattcaatgcggtccagaatgcgggattccttttgtacaataagagttgtttttcaatatattacataanaatttgaatcttcattaacttgctaatcctagaacttatttagcatgttcttcaatatgcatgagtntatcgggtatttctgtatttcatgttgcaatttttttatagtgttttgacttagtgcaatttattttgatttaaagagataaacgagttggtaactaaactgtaaaagtagagatgcacgatcgtgtccacgagaaataatccctgcatcatgactagtgtaccat

SEQ ID NO: 130126 - DNA, 242 bp, Glycine max
gcagctttcattatatgcgccgaaactgcttttgttttatagaatgaccacttgaatgtctcgagagcatctgtcgttcaattcacagcgtctcgatgtattatgcgcctgaaatggactttcgtgtgacaagttatgaccatatgaatctctcgagagctttcgtatgttaatattgagcgtttcgatataatatgcgcctgaatcaacactatcctgtgacaaagtatgaccacttgaaa

SEQ ID NO: 130127 - DNA, 377 bp, Glycine max
aagaaacttactatccaatccatctgatcaccgctctcaccacttcttgtgaagatccacagaccagactactctagctttcttggtggatgatggatccaaacattctttgtcatcgggttgttatctgcatcttttcttttctttggtgaggtaacatcttctaccgcaaacaggttcccatcatctgatagctctgatccatttctcatcaagtgaatgctctcataactctcaaaactgtcaaattctttggcctcatgtatcccttttcttaagacatgcatgcatatgtttctcagttctttcatacttatatgcttaaagagataatcacacgctccatgttgaacacctttataccctgcttgttccca

SEQ ID NO: 130128 - DNA, 409 bp, Glycine max
  unsure (1)..(409): unsure at all n locations
agcttgctcttagttaagtgatgttttcctgggtatcaagctccatatgcattctcaaaaccatgcctcctgaatcccaatagctntgtgctcactaatcttgatgatgtgtactccaagtattgacatgtttgtagtgcatgccaattgtttgacaatcactagtaatgtagaagtttgcaattaagttaaaaaaccataaaataccaaacaacattagaatttttttttaacttcaacttagtagtagtatcttcaaagataaaagctaggccaaacgctaggtaagttcatgctcctttaagttggcatatattaacttatttgattaaatgtatgttaatataaaaattgtatgtttgggaattcattaaactgggttgccaatgtcttaacctttaaacttttc

SEQ ID NO: 130129 - DNA, 462 bp, Glycine max
  unsure (1)..(462): unsure at all n locations
agcangaacgaatataagagacatcttctttaaccttggtgattcttgactccatctcattaaagcgcatgtccacttgcaattccaaagtgtcaaacctttcaccaacaaaggtttagagaccatcaaacctgtccaaaatctttgaaagaaaagatgaatcatctccatcatgtccctcttaaccaacaagtatagcaccctttttcacccaagagccatcatgctcgttttgataaacaaaggatgcaaagactaaagttcctatcaggaaggatctcttgattggaacgtaaggttcagaatcaagagggatgttaaagtgttgaaggaaaagagagactacatgtggatatggcaatggagcattcaatcgcaatggcttattcatgcgatatctaacaagatgtgcccatcaaattgttacctttatgaaagtccaataacaatgagatcttcttc

SEQ ID NO: 130130 - DNA, 274 bp, Glycine max
agcttgtcctcggtgacgaaaacaatagaataatctcccttcgagcttttcacaggcgtcaacgattcgaagaatgaagggtctgtgtttggaggtggcgatgaggtggaggacaacctcggtgtcagaggtggtgttgaagatggagccgttgtcttcgaggttggttcggagggtcttatatttgacgaggttgccgttgtgggccacgccgacggagccgaagcggtaaccggcgacaaagggctggacgcttttgagcatggattggccg

SEQ ID NO: 130131 - DNA, 275 bp, Glycine max
  unsure (1)..(275): unsure at all n locations
acatgaacaaaatgaattaccatgatgattatttttggagcttcatcacaaatttcactaaagtgatagagtcgtaatatcccacgagatttgtagtatcaccatattgcaaaaaacaaggcagctataatagtggaataaacttcagagatttgtgttgactacatttgtagatgagaccataaatgtntgatattgtcaaactctaattagagcaaatgctaaaacttaatgactgcattacaaagcctccttaatgaacatagatagaaaag

SEQ ID NO: 130132 - DNA, 481 bp, Glycine max
  unsure (1)..(481): unsure at all n locations
agctttgatagagaagttcacgttgccttttgaagctaaagtgcttccgtgcaagaggaagaacctacagaaatgaggagttaggtatatagaataaatatgttaaaaggtagcttgataaagaaactattttgtcaaactcttgttatatatattcaactttgaattaagtagagaacttcccttcctatgtcaaacttttctatcaatataataataataacaatgaaaataataataattaggtaatacaagaaatgctcatgtttatcaagctctgataagctgtgatgtgatttctacacatatgacaaaaaacataccccaaccaatttattaatcatcctattgtaacattaacatttaacaatgtatttgctaacaccttcacatcttaaaataaggaactaagaanaattatttatgacgaatcaagaatcacctgaacttcttcattatggaaatgtctctgtattgtttc

SEQ ID NO: 130133 - DNA, 470 bp, Glycine max
  unsure (1)..(470): unsure at all n locations
agcttatgctgcanacatttataatagactcttcactgcagcaaaaccaacaacaaaatacttatgacctttcaagcaacagatacaatccaggttggatgaatcatccaaatctgagatggacaagccctccagaacaacaacagtctatccctcattttcagaatgtcgctggtccaagcaagccatatgttcctcctccaatgcagcaacaacaacagcagcaacaacaacaaagacaacaagcaactgaggcccctcctcaatcttccttagaagagttagtgaggcaaatgaccatccaaaatatgcaatttcagcaaaagacaagagcctccattcagagtctgacaaattagatggggcagatggctacttagatgaatcaagctcagtcccaaaattctgacaaattgccttcacaaactgtgcagaatccanaaaatgtgagtgccanntcaccttgatgt

SEQ ID NO: 130134 - DNA, 481 bp, Glycine max
  unsure (1)..(481): unsure at all n locations
agtcacctgccgcatgcaagcttgtgaccaaaagatagaaaagaccatcttttattttaacatgaaattgttactaaaataattacatgaagaagagatgcataccttcactttcatatcaccactagccatcctaaccaaaccacaaagattgtatgaaatggcattggtatcttttattgaagccatatttggcaaaacctgagcgagcaaacaaagtttgaaacaagagctaagcaacaacatttatcattattacaaaataggtagcaagtctaaatttcaagcttcttccaaccatctaacaaattttcaccaacatactaaaagagaaatataatgaactaaaaaatctgctaaaactnttatgatatatttaccatataattctccagtttcttgaatttgtaatgctccttttgggcctctatggtatagtgcgtggatgtaacctaataaaattaacatagaaataagagag

SEQ ID NO: 130135 - DNA, 403 bp, Glycine max
  unsure (1)..(403): unsure at all n locations
ctgacgctgcaagctgcctaataacctgaattgagggttattgtttttttcacacaaaacggaagtactaagtatttattacctatacttaacagaaaatacttataacactacaaaataactataaattggaagagtttgatacaatttacacaagttttatacacaaaagttagtcgtattcaccgactaacaactcccccaaatttatagttttgcttgttctcaagaaaaaagagaacaactcacttgtcctcaggtgacattgacatgcaatgactatgtacaaaggtgtatgcaacaaaagttactgattacatgataaaagaatgaagtanaatgcccccatcacttgtctttcacaaggtatgcatgtatccaaagagaagaataaaatgtaacc

SEQ ID NO: 130136 - DNA, 350 bp, Glycine max
  unsure (1)..(350): unsure at all n locations
gcaagctggctctggtttagacatgattgatttatgtattgggactcgcacgaatggatgtgggcaagattggatgagaggaagtgggatttttttatatctgcacttatgcagaattttgctgtcaaaataggtgcagcagaattttggctttgtgcataaaaatgctagtgtgtggttggctgtggaaagtctagtgcagaatgagttctggatgtttgctagtagatcccaacgngcaaaatgtaggcgtatgcactatagacttccagtaaaattntggagtcgatccaacggttaacgaattggatcgaaggaattgttactggcgtcttttaaagagaaaagct

SEQ ID NO: 130137 - DNA, 478 bp, Glycine max
  unsure (1)..(478): unsure at all n locations
agctntaagcactgacaacaactctcctttttgtgttacttttcatccaatatctatgtgcttatctatatgaaaaatcatctttgtttgtctttcatgcaaaagtatgcattacttattcatttacatantttttttttctagaagcaagttagatccccatgaccttagagtagactcccaaaaaaatcttgaattttcctggaaaaaaatgggatactatntgaacaattcttaaaatatcaaacaaaatcatattcacttgtgtccttcttctcttttctcatgcatgtcacgaggtaaaacttgagaaactatctatcattatcttcacaaaaaattaatgtcaaattatttttctttccaatgaagattnnttttttgttttctttatgattttggaacctcctgctaactntgcttccaggtcatggatataaactaagggataacatgttancaataagttaaattaact

SEQ ID NO: 130138 - DNA, 481 bp, Glycine max
  unsure (1)..(481): unsure at all n locations
agcttagctgaattccgattgaatttaagttatcttcgctcaaccttggctagcttagcggaccaaatcagcctcagatgcaagggttgggcgctaagcgcttgagactcacagctcagcgcatgaacagagatgcgcttagcaaaaggactgttnttcagaaaatatttttctaagctcattttcagtcctttttccaagaaattgaaaccttatgttaagcattcaaagatgggctgatataatcctatgtacagattatatagcaagttccaaatgatctaattgcatgaaaaacaaagataacataaattaaaaactgtgttgcctcccaggaagcacttctataacgtcattagcttgacgctcttacctcaccgggtgatcttatgttntggttcctactntcagaacctcttgacctccttccattacctataagcaaacattgtgttctggagcaggcttgtcttcacataca

SEQ ID NO: 130139 - DNA, 476 bp, Glycine max
  unsure (1)..(476): unsure at all n locations
agctnggagaggatgcttcaatggatgatattaaagagggagagaaagagacaggggggagcacgaattgaaggaagaaaaagggagagaagttgaactttgagttgtgtctcacaagactcccattcatcaaagttacaacaagtgttacacatgcttctatttatagactaggtagcttcctttagaagctttcttgagaaaacttccttaagaaacttcgttgagaaaacttccttgagaaactagagcttagctacacacacccctctaataactaagctcacctccttgagaagcttccttgagaagattcctaaagaagctagagcttagctacacacacctcctataatagctaagctcaccctcatgccacaatacatgaaaatataanaaagtccctatgacaaagactactcataatgtcctgaaatacaaggctaanaccctgtactactagaatggccaaatac

SEQ ID NO: 130140 - DNA, 336 bp, Glycine max
  unsure (1)..(336): unsure at all n locations
cccgcgatccttagagtcacctgcggctgcagcttaccctagaggggatggacttttttatgtttggagaggatcaataacaatgcctatatgttggacctcccacaagagtatggagttagcaccacttttaacatttctaatttaattcctcttgcaggtggagctgatattgaggaggaggaactaacagattngaggtcaaatcctcttcaaggggaaggggatgatgcaatccttcctaggaagggaccagtcactataaccatgagcaagaggctccaagaagattgggctagagctgctgaagaacgccctacggttctcattaacctt

SEQ ID NO: 130141 - DNA, 420 bp, Glycine max
  unsure (1)..(420): unsure at all n locations
agcttagtggctacgtgtacttntttatcttattgcgttaacggtacagcgctcgcttcccgatctggcattgccagcgcaaaattgccccccatgcagatcaatgctcgagcctgccccgtacatattgcttgcatgctggcaattgcagcatgtccaggtgcatgaggtggggtgaagccatagcgctcacccagacgagccagaaactctgcagacggtttctcggtgataccgacggttcggtcgccctgtacattagagtgtccacgtagtgggcagatacccgcaccaggcttgccaatgttacctttcatcaacagcagattgaccagttgctgtacgttctgggtaccatgttcgtgctgagtgatccccattccgtaacagataatggttgcgtcggcagcggcatatgcg

SEQ ID NO: 130142 - DNA, 483 bp, Glycine max
  unsure (1)..(483): unsure at all n locations
agcttgaataacagatccagtgcactcagtatattcatgttcaaccacaatgttccctaaaatttctgtgggaatgagtaactaanaagtaatgacaaaattgattagtttattaattaatggatgcctttttttatcggttaatgaatatgtacttgttgcatgcattactctaagtaagttggcataggaaaaaataaataaaaaagaagcacaatcattactctaagtaataattatgtccacttcaagatggagttggatagaattacggaaaacaaagtaagaaaagatcaagagaaaataaagtgatggatataatattgtaatgaaaaaattaaaaagagaaaataatgcaaataatatgaaagtgtaaatagaagtatcagggttctaaggatattaaggcccacgagttntgatatattagcatattaataaccttgaatatgattggataaaatatttatgaaatttagtgac

SEQ ID NO: 130143 - DNA, 426 bp, Glycine max
  unsure (1)..(426): unsure at all n locations
agcttagccctagaggggatggacctttttatgttttgtataggatcaataacaatgcttataggttgaaccttccagaagagtatggagtcagcaccacttttaacatttctgatttaattccttttgcaggtggagctgatattgaggaggaggaactaatagatttgaggtcaaatcctcttcaaggggaaggggatgatgcaatcctccctaggaaaggaccagtcactagagccatgagcaagaggctccaagaggattgggctagagctgctgaagaaggccctatggttctcatgaacctgagggtagaattctaagcccatgggccaaggttgggtccaattatctntgtacatattagactaggatgtcattatatctggtccttgtatntagggctccatattgaggtagggacac

SEQ ID NO: 130144 - DNA, 411 bp, Glycine max
  unsure (1)..(411): unsure at all n locations
agctntgaggaatggaccctataaggaagttatcttatagatctaaatctgtgagaggttctatgatgctaagctcacttggtattgatcctgtgagctggtttctgaagaggaaaatggattgcaaactggtgaggttggagagttgcttcggtataggaccagaaagatttgctcctgcaatgtcaagatactgaagctgactcatgttacctaattcaggaggaataaaaccctggtattcgttgtagccaatctccatgtgggtcactgttttgaggtgaccaagttctggaggtatgcttcctgttagagaatttcctgcaagatgaagaaactcaaggctcttgaaagaaccatattcaggtggaattgaacctctgaagtagctcccagctagattgagaacct

SEQ ID NO: 130145 - DNA, 356 bp, Glycine max
  unsure (1)..(356): unsure at all n locations
ctgcaagcttcataaggagctctagtttcttggttcttctctttgaaccagtagtaacattgtcatcctatgaagctgagtatattgcagcctcagaagctgcatgccaagcagtgtggctagatgccccgatgaagaaattgcaactggaaaaatcatgtaaagtgaagttgttggtagacaataaatcttccattgatttagctaggcatccgacttctcatggaagaagtaaacacatagaaacaaagttccacttnctaagaatgtcagcaatgagaaactgaagattgaacattgcagaactgaaattcagcttggcaacatactcactaagactttgaagctagaaatgt

SEQ ID NO: 130146 - DNA, 415 bp, Glycine max
  unsure (1)..(415): unsure at all n locations
agcttcacacaatatattgttctcttatgttctttntaaatgagntttggaatatcaattaataagtcctttttaactagatgattgagatgatgcatgtttatatgtgcagccctacgacgtcataaccaagaatcatcaatcttacttaccaagcaaataagtttattaaatgatgcatgttcaatattcaacatttagatattacctattcttttacctatgtgaacaacctcaccagatattgtttcacaaatgagacaacaattcttgttgaattcaattttgaagccttcttcacatagttgactaatgctcaagagattgtgcttaagtccattaacatataaaacattttntatatttgtgtcttgtgctgattccaatggttcctctacataattattccctatta

SEQ ID NO: 130147 - DNA, 413 bp, Glycine max
  unsure (1)..(413): unsure at all n locations
cccggatccttaagtcacctgcggcatgcaagcttanaacgaggtcaggaagctttgttgtcttctgctaatcgactaccaagggggtataatcgattaccagacttacaaatcaaggcagcaggttgtggaggcctctggtaatctattaccagtctgtgttatcgattacacataggaacatgccactggtaatcgattaccagttatgtgtaatcgattacacattgcgtttttgcaggtttcatggcctgaagcatgttaattcgagtttggcctctggttatcgattaccaacgctgttgtttcgattaccagagatgaaagcctaagatacccctttacttgctgtagtggtatagacgcatgtgttgcacgtaatttattttctgaataattaccctctctttctt

SEQ ID NO: 130148 - DNA, 258 bp, Glycine max
  unsure (1)..(258): unsure at all n locations
taaatctcgctaccaaacaaccacaaccctaggcccaacaagaggattacgtgactaatggagattattcatggaggtgataatatgtctttttgtcaatttatttccttaagtcttaccacacactataagttatggtgttttcgctcttacttacatccaatggtagatcgttaaaacatttgaaggnggacctaaggacacaaacgacaagatttctgccataacattgacatccataggatgcaaatagttgat

SEQ ID NO: 130149 - DNA, 418 bp, Glycine max
  unsure (1)..(418): unsure at all n locations
agctntacttactttcaaactgtatgatgtttcatagattctaagatccttacaatattaatagattcattgaatataaatgtatggattctataactaataggcacgattagtagtgaatggattcacaaagagtttatgatcaatctaaaggagaaaatagcgagagaagtgaataaaaaagtgatgaggagagtgaattgaactaaaatattaaataagagtaacactctttaattaaaaatgagtngaccttccatcaacacggggtaattgatgttatttcataagctattgatctttccttcctaagtagtgtgtgcagaccattactctcaacgacaatatttntttataataatgttcgagagtaactcttatgtataatatatgtatgtaacacatctatacgatgatg

SEQ ID NO: 130150 - DNA, 438 bp, Glycine max
  unsure (1)..(438): unsure at all n locations
agcttatgtattggatttaggctttttaattatttatcgtttaaccaataaaagcggaaaagaccatttcaaggtgttggaccttaaaaaatggttttttaggtgatgacaaaagctnggtttatgaattgattttagccttagtttcactttggttattagtcaattcgattaagaaagaaaatcccanagaaaaacgtccgattgatttttttgattattttattaaaagacattcttttattattatattattattttgcctctttttggttttaaacgtggttacggcatgaaagatcgcgccggatttattctaacagaaattaaaagatattacaactcaaattatcagtggaaatttatttttattttttattacgcgagaaagtgacttatataaatgactaaagcacgtcaaaagggggacagaaagta

SEQ ID NO: 130151 - DNA, 452 bp, Glycine max
  unsure (1)..(452): unsure at all n locations
tccctggcacctctgagtcacctgcggcatgcaagcntttgcaaaatctttcaagtattgtcttactgttttttgtgtgngaaaacttgtgatttttaaatcataatttaacctcttattcttgtgatttttgcctatacaatttgggttttcattaaatggagaagaatcatttatgctactaatatgtttgtcaagtaccgtcaaaaaaacccaattgttctattgttgttttccaccgttgcacaccaattattcgatattttgtgtatttgaaatctgtncagnnnttaactatttagtttagaacttagattttaatttcagcaccatttccatacaaacaaattattccttttgtctagacattgaaattacacaaaagactagtacaaacaaatttatgtggagatggctttgtactcgatatatatcaaaatatattacaatga

SEQ ID NO: 130152 - DNA, 475 bp, Glycine max
  unsure (1)..(475): unsure at all n locations
agcttagcccacactactggcttaggatgcaaaattcccacggcgaagcccaaatgtgtgcttaacggcttacgctaagagcgaatttagtgtgaaaattaagttacctgaaggctatataaggaggaagaagtagaagggaaagacacacggagtcttagagctatccaaagcctcagtctatcccttaggggaaacccctctctgtttttttatccatttccctttttcttgctattagtcatccagccctttctttcattagctcccgaagtgtaaagcctctaatgactatgagaggccaaacccctttttgttgggagccaggaggccgaactcttgtaatgtaattcttccctactatctatttaatgcaattatgtttctattattcttctntgngcnntttatgttatatggcatgatcacccatataatgtttagatggtaatgcatagaagaaatgatattttct

SEQ ID NO: 130153 - DNA, 402 bp, Glycine max
  unsure (1)..(402): unsure at all n locations
ctctgagtcacctgacgcatgcaagcttgtatcgatctcacttggttggagcattctcttaaaacagcgtaaccctgactggtctccctatgattttacttagtgagagtaacctgacatactcatgttgtggtgtgtatcttgttgtgtactcctaagcgccccagggtggtttttcactgacatgataccacattgtatatagggttgagttttaacataactgttgcatacgcttgctaattngttattatgaaattgatgngttattatgtcttgatcggagtgtgtgattcatgtgtaatgtgattgatgattgaaaagtgaattttaaatgaacaagtggtggaattacgtgaagttatgttaagtaagntgtatctcatttgtatgatatgtata

SEQ ID NO: 130154 - DNA, 433 bp, Glycine max
  unsure (1)..(433): unsure at all n locations
ggatccttaagcacctgcggctgcagctacgatcacctaacttaattgatatttccgnngaatggatgatgtatggatgacacaactctgtaatggctatcaatgggaaactacaggtgtgcagggaatctttggagcactgttgttaccatcttagttaaacacagtatatggaatccaagttaacaaatagcaaccagcattgagtcggagggtcaaattggagagcgtagcanaccacatctcagacaactgangaatctcggagccataatacaaaagtgatgggaaaatggcgacatgtaaatcatacaacataatgttgggtgaatgatatgaaggaatgtggcatgtgtcatatgtgatcaatcaagagaagcctctcgagctacaaaatgaacatttatcaccatgcataaatgagtaatcttat

SEQ ID NO: 130155 - DNA, 472 bp, Glycine max
  unsure (1)..(472): unsure at all n locations
agctngcatcactgggagataggaatgcttactgtgaggaaagatggagggtgagcgttcgcggcggcgtagggtcgcggaaaagcagtggcacggggtcgcgacggcgagctatgtttgtgagtgggttgcgggctcgtggcagagagtggatctttgtggcgctgtgcctgagtgactgactgagtgggtcgcggcatcnagctcgagagtgagtgagtgagtgaattcacaaaaccctctctctctctctcttcgctaattgtggctntgcttctttctacggagttctttttctatctctnntgttttgggaattttaatttgtgctgtgtgcgactntgacagtttggaagtggaagaaaaacacactttaccactcacacactgaaaaataaagctcgctacttttctttcttcgagtgtgttggggacatgacaggagccaaacgacctcgctttgacttttttt

SEQ ID NO: 130156 - DNA, 308 bp, Glycine max
  unsure (1)..(308): unsure at all n locations
agcttataatatatcgatacgctctatatttaacattggaaactctcgggaaattcagatagtcataactnttcacacggatgtccgattcgggcgcataatatgtcgagaggctcgaaattgaacaacgcaagctcttgagaaattagactggtattacttttcacaccggatctctcgtgaaagtcatatggtcataactattcacactgaggtacgacggaggctcatgagaaatcganacgctcgaaactaaacatcggaaactctctagaaagtccaatggtcataacgactcacacggatgt

SEQ ID NO: 130157 - DNA, 326 bp, Glycine max
agcttatagaagactaaacaaacatttttatcatcttgaaagagagaatgaggatctcaagaaaattcatgaagctcatttagttgattttgtccttgaaaccacttcagttgatgatgtacaagacacctctatttgtgaagaggtcaaggcattactagatgaaaaggtatctagtgcatgaaagattcttcttaaggatttcctagacttggaagaaaggttgaaatccttaatcacaactcttgaagattcaaaagaagagagcaaggaaatgcttaaacaaaagctcttactacaaaaagaatgcatcctttctaataatg

SEQ ID NO: 130158 - DNA, 478 bp, Glycine max
  unsure (1)..(478): unsure at all n locations
agctttctctctaagcaacttattttatatactttcttgnngggaaatcttctccttccatggcttattctctagngggaggcgcctcctctcacctttactcctttatcttccactgcaactccatggctaaatatcaccattgaaggaccttattaaaacttaaagatttaacctccatagaagcttctcaaacaacattccatcacttgggctagtaccagctggatgcaaacattaaccaagttcactacttacagtagacaggccatactaatagtaaaaaacgtgtgcacattccatgaaggtacaaagttaaaggctaaaatgataagggacacacaaaccttcgatggcagggtgacatggtcacggtacgatatgagtcaaggcacgattctgtgacagcatggtcacgattctaatgacaacacacgaaggtatcagaagaaataacctttcatatgatgtaactact

SEQ ID NO: 130159 - DNA, 193 bp, Glycine max
aaaaaacacagctcagcaagagagagaggaaagggttcttctgtataagacccacgaaggtccagtaattgccacggacacgaacccgcggacacaaggggagacatacaaaaccaccgaccaacacaccacacggcaaaaggcagaaaaacgtgagaccaaaagggaacacggcgcacagacaaggaccaaa

SEQ ID NO: 130160 - DNA, 455 bp, Glycine max
  unsure (1)..(455): unsure at all n locations
agctntaagagcaattcccttctttntcttattttntcttcgtgttgatttagtctcaatagttccatttcgtgttcttgtaactttccaaatagtgtagcaagagacattttagataaatcccgtgatttagtaatggctgttaccttaggtttccattctctgcttaatcatctcaatactttatttatgagatcttcattttgaaaatttttccctaaggatgcaagatgatttactatgtgtgtgaacctcttttgcatgtattgtatactttcatttgcaatcatcctaaatagttcatattcatgagttaatgtgtttatcctagatcttttaacannttttgtgccttcatgtgttacttgtagggtatcccacatatcctttgcacttttacagtttgataccctaaagtattcatccattcctannggcagatgtaattatgtttt

SEQ ID NO: 130161 - DNA, 357 bp, Glycine max
tgcaccatgcaagcttatgagcatgatacctttctcaccttccgttttgtaacatcaaatgattcctcatcctctaacaacatcccaaaatgttcaccaatatcagattcaggaacctgtattgtgtttaactgagaagaatctatggacgacactaaaaccgcaatagtgcatattatcttcaagcaatcatccttgagaaaatttgacgtctcaaggtgtctccgtttgaaaaaccgcgtatagcccctattacacaacaagtgcatcattgatcactacgtaatgtacaccacaaaaaatggataccagagctaataaatcatgatgatatccaaatcatatcaccaaaatcac

SEQ ID NO: 130162 - DNA, 404 bp, Glycine max
  unsure (1)..(404): unsure at all n locations
tctgagtcacctgacgcatgaagcttgaggattatggggtacccatcacttgttgtactatgtggcggncgggcgatggtgcaaaacaattctccacatccacaaatcacgtataaacccaccatcccctgttgcccacctcaactgagctcacgtactcccacataacccttatgctcgttcctctcaacgccgggtgcccatcaatcctcccaatcttccacaacatcaaagtaattcaaaatccaagaatcatgaactaacacagccaagaaaatagggcagaggcagaaaactctgtccaaaacacanaccaacatcacaacttttcacactcaaataccccagtaatattctcttcgttccaattcgttaacccggtggatcgtactcgaagatattac

SEQ ID NO: 130163 - DNA, 455 bp, Glycine max
  unsure (1)..(455): unsure at all n locations
agcttctcaatgttaagaaggnaattttattccttttctttctcattcttagctgggtgtttattctgacgtgatgaattctataattgtgggcacacctcttgaaccataaaagaaatgtcacatcttattggttgaatttcatggatatagctgttttatcctattccatgattctttaatatttctgttatcatttgtaggcttatagaacatgcatttgncgactgccgctcatcagcacatgagcatgtntggtattggatattggcatgcatgtcggacatattagtagtagtacaatctaattattcaaatgttgtcacttttctnggtttaaatacataacaaaattgattttcttgtatttcaatttctgttattctgctaattntatgtgatggatatgtgatatgtcatgatgttcaacgggatggtggatgaagaaattgtgc

SEQ ID NO: 130164 - DNA, 213 bp, Glycine max
ctttagtaccttcttaagcgagagaaaaacaagagccttccccaccactctgctcttaggcacaccaacaatcacggctttcttgctctgaacacatctaaataggtctaccttggaaaccttcttccgatgaatccttggtgtaaacaaagccttggccaccgaaggtgaatgcttcaccttagcattcaggggggcagcaaccataaaaag

SEQ ID NO: 130165 - DNA, 324 bp, Glycine max
  unsure (1)..(324): unsure at all n locations
gcatgcagctttcactatcctccttctgttctcctatatcttcaaggnggctttgcaattcaaccttcattgaacttcccacaactgctacttcttccattactgcctcagctccctctaccttgttactttcaggtgtaacacttgcctctacacttgagtttgaatcatgctcactggctgtgagtctgaccaaaacatcatgctcatcagaggtaacactcaatacctttgcatcttgttcttccttgacaaccatttcagaaattggacttatatgtaaattatgagtgtcattgncattgtcaatcactccctcatctt

SEQ ID NO: 130166 - DNA, 408 bp, Glycine max
  unsure (1)..(408): unsure at all n locations
gatccttaagtcacctgcggcatgcaagcntttaattcggtggtcatgtgtcttattttttattatcaaggatctctaatctggtaattttctagtacttgatcaactactatctcctagacactctttaatttgacttatgtcccatctttgtttgccaacgataaacctgccaatatataaaatcacatttagcttgattgttttttaaaggctatttagctcgattggtgatttcttaaaaaaatcaaatcttactgattgctccatggcatgnttgtcaaggccctttaatatgaccccatctcattcaccttaatactttggttggatggtaaaagaaatccagagagggaaaaaaaaagaaacaacgggagacaactcttctaatcattataataaaatact

SEQ ID NO: 130167 - DNA, 329 bp, Glycine max
gctcaactgaatggcaatgatttttctttttttggtcaagataggggatgggcattttccacaacaaagcccaatgagattgggatttatgcaaatggcatgctgcccttgtgacgctaaatgaaattttatgtatgtgagctaggctcagatattttcttatttaataacccatgttgcaaaaatgtgcttatcaatcggcataatacaatacatacaagcggcggggaaattacagcttaccttcaggtaaaactttcaaaaatggtatataagaatttttttaaaaagagcgaaacgattcacaaaaaggtttttaagttttcttt

SEQ ID NO: 130168 - DNA, 383 bp, Glycine max
  unsure (1)..(383): unsure at all n locations
agcttacttggattgagattattatctgcttataagaagcgaaatgtggggaatgcagggactggatgcacaaaacaaaatgaatgcaagaaatgggcgagtcaaaaaagtgtgtgtggaaaaaaaaataatgctctttagtgtaaaatggaaacttgctaggcagttcccattttantttaacagtttcgtgttgtgcgcttagcgcacagctgtgcttaacgtgacaacacaacgtttggatattttaaggcccaagcgcttagcatgacctctcgcgctaagcccaattcacaaatatcatattccagagaggttgttatgcttagcgcgaggacctatgcttattgcttcctgcaactcagattggtcctgcnatctgc

SEQ ID NO: 130169 - DNA, 487 bp, Glycine max
gcaagcttgtgccaataaagatggtgaagaaattcattatttgttcaataccatttcatctctggaaaatctacacccttgtggagtggatcccacctcaagagttccaatcttacatacggagagaagatcagtggaagactcaatgacatataagcatctttataggttgatgagtactctcttttccattcttccattctacttttgaccaaggatagttgaccatattcctcagaagcatcactgaaaatctcatcagcagcctgcagcaccaaatcactttgtgactgatatgcttggctctcactatcactctcatcagtgcttgattcaccttctattttatgatcatcccattccatggatgtgaccttattataaccaaatgctagtgacctcttgcgatgcaagcctcggcctcactatatattcatcgttctcaagattaaatctctaccaaatcatctaacttcactgcagatct

SEQ ID NO: 130170 - DNA, 468 bp, Glycine max
  unsure (1)..(468): unsure at all n locations
agctntggctgcgcagcagctctgatttttgagtatttattgaagatgacgcattgtaatcgattacatgtattggtaatctattacaggcccaataagccttctggtaatcgattacaggatgttgtaatcgattacaggcagcctgttcatgtgtaatcgattacactggatggtaattgattaccatagcctaacctaggctagtttctaagagaatatctatatttatgctcaaatacattctatatgactaattttcactactaatacactaaattcaatcattcaattactatatacacatgagatcataaattctatcatacaaacaagaattcataccagatcaaacaaattaatctactatctaaagggtaaagtatatcaaccaatcaatcaaccaatcaatcactcatcatttctatattattaaattctacatataaaaacctatttcctctaata

SEQ ID NO: 130171 - DNA, 368 bp, Glycine max
  unsure (1)..(368): unsure at all n locations
gcttagccctagaggggagtggaccttttttgttttggataggatcaataacaatgcggataggttggacctcccataagagtatggagtcagcaccacttttaacatttctgatttaattccttttgcaggtgaagctgatattgaggaggaggaactaacagatttgaggtcaaatcctttcaagggggagtggattntaatagcaaaaaaaagtcaagtcaatttaactcctttntaatagcaaacaaagctaattttacatgtaataatacaataaaaattggctttagctaaattaaaaactaagttaatcttgtatctgtctagcactaaccagctaatgttaagaacctttgaaaacaatc

SEQ ID NO: 130172 - DNA, 233 bp, Glycine max
tacattatgcttgtcacgtgaatgcctgggcgctcctccactcgccaatttcctagttggaaatcaggagggcatggtcgtaccaaatccgaaccacttggagcatcatcttcgcatattgcaacgacttggcctatctcccctagacccgtgcttataaagctcctacttgtgtggaagggtgggcttccttcgtcctcttgcctgaataagaagacttgacctctgccttt

SEQ ID NO: 130173 - DNA, 361 bp, Glycine max
  unsure (1)..(361): unsure at all n locations
gcttccctgagagagaaagaagagggaatttactttctttaccaacgccttcaacagtatgagaacagatggtctgaatatgaattaaagatgaaatccatggaagaagtatggcagaaacaaatgaggtctctacagtctagcctctctattgcaaagaagagccttgctatggatgattctgaaagaaattcagatgcttctgttaatgcaagtgatgacagggatttcagctgggatgtaggaaccaatcaccggcgccaagaaagcaatggggcaagatcaatgagtgctggtttgagtgttataagtcggttggctgaagaaattgagcagaggagtcanagtgttggtgatgatg

SEQ ID NO: 130174 - DNA, 450 bp, Glycine max
  unsure (1)..(450): unsure at all n locations
agctttgtcaataatgaggcattttggttattatatccanaaccgtgaatggaagggaatgtatgatatatcctaacctgaaaaacaataaacacaaccaattaatagtgacaacagtgtgttaaaagcgttgggtctttctaataaacgagttgatgcatataaagatatttctctaattaagaatgttcttgcgttctatgctgaagactaaagtactaaacctcgatccctcgttcgttaagactaatttaaaccatgcttcatcctcggatccctcttgttggactaggcataattataaatgcgctataatcacatcataattaaaaactaaaaaacatgcaatatatgcctatcaatgcatgtatctagccctgctctatcaagtnctaaggaaataatacacttgtcagcgctgaagattctaacagtacacaccatagggtg

SEQ ID NO: 130175 - DNA, 428 bp, Glycine max
  unsure (1)..(428): unsure at all n locations
agcttgtccgcagatccctcatgtaagattatgtccgatatagacagccctcttaggtttagactaacttaaactgagttccctcatgtaagactagactcaactcaagtagcttacgaaagtttagcctaatttagcctaagcttcgcccacagatccctcatgtaagacttggcctaaactaaacagaattattgtaacaacataattaaagccaaaacttaacccgcaaatccctcatgtaagactaagtttcgatcctgcttcaatcaagttctaaggcaacagtacatttcccaatgctaaagtcacctaactgtgcacacaaatgggtgatcagaccaaaagcatacaaacattaagcattgaatgaaacattgaatgcagaanatataatcaatagatttatgtattacataggtgtcatt

SEQ ID NO: 130176 - DNA, 338 bp, Glycine max
  unsure (1)..(338): unsure at all n locations
ctcacctgcngcatgcanncttcctaagttttgattgttcaatacctttttttctgcaagngaaaattctgcacaaaacaaaagtgtgctatactttcttctcttctccctttgctaaaagaataaaaggactaactgcctgaattcttttgcgtctcccttctctctttccaagagaattcataggactaaccgcctgagaattcttttgaatcttcccttccccttaaacaaaagatttcaaaggagtaactgcctgaccatatctgttgttctccttacaaagattcaaaggactaacccgctcagaatcctttgtctaacacattggagggaca

SEQ ID NO: 130177 - DNA, 269 bp, Glycine max
agcttgaaattgaacaacgttagcttcttttagtttcaaatagtcataactcttcactctgaggtcagattcagacgcataatatatcgagacgctcgtaatagaacaacgaaagctctctagaaaataatatggtcatatactttcagtcggatgtccgattcaggcgcataatatatcaagatgttcgaaattgaacaacgatagctcttgagaaatcaaatggccataactcttcacatggatgtctgatatacgcccctaatata

SEQ ID NO: 130178 - DNA, 278 bp, Glycine max
agcttatgcgcatactcctttattatcttttcttgccaagacatactatctactaagaagaatgcacccatgtacaaacaacgcaccttcaggacctagattatctacatgtacttgcaaagtgaatttgacacctatatgacacgcatctgcattgctcaattacatacatgcatactcaaagcactctggctatcagaaagtgcgtacgtgcacattctggtattattaatacccatacatacacaaaactcatgatgaatcttgactatctacac

SEQ ID NO: 130179 - DNA, 352 bp, Glycine max
  unsure (1)..(352): unsure at all n locations
gcgagctctgaccactgnccgtccttcccgcgatgcttcttttcatgtccgcctgagtgggcttatagcctaaaccatacttnccacgatttccttgggtttttatcaggctagttatgccgccattgtctttgctaaacccatcccgggttcataaccgttccccaacataactcgggccatcattaccgccgcatcggacagacaaggttgcccaaagagggagtccacggaggaaatgctgaccacctcaaaagaactggaaagcggttctaacgattcttctgcggcttccacataaggcatggaggatgggcagcttaccaagatatcttcctcgcctgacacgatg

SEQ ID NO: 130180 - DNA, 451 bp, Glycine max
  unsure (1)..(451): unsure at all n locations
gctggctatagctaataactgtttcttttaacttctcaaacttattagcctatgctatcggcttatgcacagaanagttataattggaattttgttaatttgttataaaggactctggtttatgacttcatgttgagacctatatttggcagcatatgcatatggtaaaacttgcaacatgtccatatgatttataatattgaattgtctaaaataaatagatttgtagcaacatagttcaccatgaattggagttcattataacattattagtgttggcaaggaggagggcagacagcgttcatttcttttgcgctntgtcttgttttctctcttgaagatttacccaatgatattataggttaagaagcttgaggagcttgggattggaaggccatcaacatatgcatccacgaataaaagtttgcaggtattttataactggaacagt

SEQ ID NO: 130181 - DNA, 475 bp, Glycine max
caccatgtacgcctcatccgagtgttactttgggcttactctaaccctatttgttccccctctgacgtgtcctacaccatcatgccaaacatgggttacttcgagttccttccccacgaagaagatttatcttctagctcttcaagctccaccttgtcacgtgactcgctcgaccttgcagatcttgaactcggaaaatcctacgagctcatcgtcaccacgtactccggtctgtgccgttaccgcgtatgcgacattctccaagtcacggggttccacaacaccgccccacatttcagcttcgtgaggagaaaaaacgtgcttctgagcatcgactccgacaagaccgacgaagcggagttacagaacgccgtcgagaacgcctccgtgctgctgagggagttcaagacgagcgtggcggagtacacgagcttcgccgacacgaagtcgatcccggggcactacgtgatttact

SEQ ID NO: 130182 - DNA, 332 bp, Glycine max
aatataccacaagagatgtaaaatttaatgaaaggttctatcttttcatgaaataatgtggctattcatgtaaagatataaatatgaataagtgtaactcttcctcaaggatcatgaaatgaaatgtaactcctcattaatagctatatgtatctttgaaagggttttaattcaacaaatgaataattaattaattaccacgcataggatatatatatatatatatatatatatatatatatatatatatatatgggcatatatattgtcatgcatccatcggtatatggtcccctgagatccacagaaatggttgatcccctacgcaaaaa

SEQ ID NO: 130183 - DNA, 442 bp, Glycine max
  unsure (1)..(442): unsure at all n locations
actcagcttaatgttaatgtcacatcaaataatgtcaaanatcgtatcatattatggagatctgtattggtattgtaagtgacatccttggccaaagtgagtttaattgggatggcactaagcacatgatcacagttgagaatgaaaatgcttggaatgaatattgcactgtaaatattctttaatatatgctatttgttattcaaagcagattgaatttgactttttcttttttccagttacataaatcggctaaactgtttcgattcgaagtgcttcaagactgggatgatatagtgaatttgtgtgctaaagatagagccactggtcatggagctgaaactgctatggatgctgatgaagtgataagtaaagaaacaaatgaagtgcatgnggttaggtgctactgctactatagacttagaagaaccacactctaata

SEQ ID NO: 130184 - DNA, 401 bp, Glycine max
acacgggtaaaaagttcacattcacttcactattatcaattaaaacttattaaaacatattcgactcaaaataaagcaggcaaaatttacaaaaatattttgttaaatcagggagataaaataaaatagactcacaccatgtaattaatataaaacttatgtcccactgtcacatcttatcaaagcattgtgtcccgacgtccttcagcacaaggttccttaaagcacttcacctagccatctgctcccccgaacacaaggttcaagatcatcataggatccaaacacaaacaacacacagggagtgagttatcacattcctaactaatagagaaaaatacaacagcatatgggtataaatattatataaccaaatacaatgtacttgagcataactcacg

SEQ ID NO: 130185 - DNA, 280 bp, Glycine max
ggatgcccccattatttcatgacacaaatgcagagatgatatttgaaatttatgcacaactggtcatgcgtgcacctatgcggacactcaagtgtcaaatgtttatggtcatgtgatgctagggctcaagatttatttcctctattttaaatcaacccaatgttgccaaaatatgttcttttatcaatttgagcattcatcctactccataatgggtactcgggaaaattgcacagcattcacccttcatgtgtacacacattgtttcaaaaactagcta

SEQ ID NO: 130186 - DNA, 451 bp, Glycine max
  unsure (1)..(451): unsure at all n locations
cctgcacattatctcgacggtttgtcattctcaaanataattcggatgctggtaataaaaaaatattttaaagtattcttctattaattaatattttcttttaaaaggaaatgggggaaggaaaggcaaagcagagctattatataccagattttcactagctgtatatttctgtcatccaccttcccattatgttctttaatcagataaaaaaaccatttagtatgttcatcgctcaccttgacttgtagttcatataacattataatttttggcacggaggatggctgacattcatacatcttttcgcctatgtctcgccttctctcttgaatatttacccaacgactttactatgttatgaacctatgaagagcttgcgattgaaatgccatcaacatattcatccactataatactttcatgtctttattactgctcagtgaatgcc

SEQ ID NO: 130187 - DNA, 469 bp, Glycine max
  unsure (1)..(469): unsure at all n locations
gacctataaaactcagcttatatgcatgtggaccatgttttgaaaacctcgtttggcgcctagagacatgacaaacaagccacacaatagtagtcngtcactctcactggtaatatcatagggagaccagtcgggtcacagtgttttgaagaattttcaaccatatgagatcaacataggcttaaaggagcactcaaaccgtgtgacccccaaggcctacactccgaagagtccgtcagggcctctccctcctgattcaggtccaaccaagaaaatattttagcacacagactctatctatgaactgtacaaaacacatgacttctcaattgttctcaaaataaatttaactcgtcgtcctttaagggtcttatcattaactcgtcgcccttaaagggacttaacattaactcgtcgccctanaaggaacttaacatcaactcgtcgccctaaaagggacttagcatta

SEQ ID NO: 130188 - DNA, 458 bp, Glycine max
  unsure (1)..(458): unsure at all n locations
ngcccagagaaggagtccactgttgatatgcttaccacctcatatgactggaaagtggtttctaatgactcctctgcggcttccacataaagaatagaggatgggcagctcaccaagatgtcttccttgcctgatacgatgaccagatgcccttccactacgaatttcaacttttggaggagtgttgagggaacaactcctactgagtggatccacgggcgccccaacagacagctgtagggagggttaatatccattatttggaaagtaacttgacaggtgtgagggcctatctgtactgggagatcgatctctcccctaacctctcggcgggtgccgtcgaaggcacgaaccaccattgaactcggctttaagtgggaggcattgaatggtaatttctccaaagtgctcttaggcatcacgtttaaactggaaccattatcgatgagcactttggc

SEQ ID NO: 130189 - DNA, 373 bp, Glycine max
  unsure (1)..(373): unsure at all n locations
caccgggctttgctagtaaaagcaactatgtggttcaggatactttagctcacataaatcatgaacatgattataagaaaatctcatatgctaacttgttgtagaaaacccatggatgtatgcgaattatgcacagttgaagtattacgaatttttacacaggacatggggttgaatcattttagatttttaacatggtccatgacatctttgtcaaggtgaaactggaagtaacaaggacatcaacagtcctaaatgtgtntggcaatagatgaaacagcgatgtaactcgatccatcttttgccccaatttttgcaagatggttacttncatgcttcaacttgacttgatgaaccttttcattaaagcatg

SEQ ID NO: 130190 - DNA, 461 bp, Glycine max
  unsure (1)..(461): unsure at all n locations
tcaccatttggtcttcctcatatttgttgcatgagacatcatgctctatnttcatctcccactccaagtaggcctccggatcattctttcctttaaatggaggaatgttgagtttaataccatcaatttggttttgtctaggaacaccatcattccctcttctcctcctttcttcttcattatgatctctattctccatttgatccaacctctcatggagcgcatcatctcgttgtttcattaacctctccaaatgttgcatcaaagcttgcatttggaattgcgaaagccccactccatcattaggattagtacctgacatctcaaacaaacaaatcaaacgtaacaagacaattatagttgctggttaaatacctcacccactcaagtgtatcacacaattatggcttttctctaatgaaacactcttgccttttaccactctaaatccccttgagttc

SEQ ID NO: 130191 - DNA, 248 bp, Glycine max
cgcatcggctcaacttttaaaagtgtctacaatccctttcatgagaagattgagtctatagccaaaagaaatatgtaaaaaaagtctaccggtctcttaggatgctaagatgcttgagctgcatacttccacttgacacttatcattaattagaaaaaaaatcattaaatatgtgctgacacctatcattaattagaaaaaaaaaatcattaaatatgtgctgctggccatgtagttccttttggact

SEQ ID NO: 130192 - DNA, 350 bp, Glycine max
tgggatccacaagacccacactctgtatttaccaatgtgctaataagtaagtattaatacactaatgtacaccactgatagcttgagatagattacacttacactcgctatgttacaaaaaaagtagcccgatccagcacgctacactactcactgacaacagaaacaacgtgaggcaccttgccatgatcaaatggcaagcaaacgtactgccacgcaaactcctcggcgatctcaaacgcgagctcggcagagactgccttgcagtacatgtataagacggtgtctcgtgcggcgttgtaatcatgaagagcgtgatgagagtagaattatgacgatctgtatcacca

SEQ ID NO: 130193 - DNA, 277 bp, Glycine max
  unsure (1)..(277): unsure at all n locations
tggctntgattccccatgagagaatatgaagcccaggaatgttccgccaccaatcccaaaggtgcacttttcaaaattaaggtgcatgtcatacctacaaatctctctgaacacttctttcaaaattgctacatgttggaccacatgtgagacttcgcgaccattgtatccatacagatctctacattttggcctatctgttggttaaagactaggtcaatgaacctttggtatgtagcccctgcattcatgagcccaaaaggtatgactttgtaac

SEQ ID NO: 130194 - DNA, 457 bp, Glycine max
  unsure (1)..(457): unsure at all n locations
tctatccntggtttaaaacaagcttcctgtcattgttaccttaagttttatgggataatngcttcatttggnnttgaggaaaaccccatggatcaatgcatataccacaaggtcagtgggagtaaaatatgtttccttgttttatatgtagatgatattntacttgcagccaatgatcggngtttgctacatgaggtgaaacaatntctctctaagaattttgacatgaaggatatgggtgatgcatcttatgtcatcggcattaagattcatagagatagatctcgaggtattttgggtctctcacaggaaacctatattaacaaaattctagagagatttcggatgaaagattgttcaccaagtgttgctcccattgtgaagggtgataggtttaatttgaaccaatgtccanagaatgactntgagagggaacaaatgaaaaacattccttatg

SEQ ID NO: 130195 - DNA, 466 bp, Glycine max
  unsure (1)..(466): unsure at all n locations
aactatgttctcaaacattgttntttctgcaagttgtttattctacagattacaaaagtgngctatcttttcttccttctcccttntgccaaaagattcaaaggactaaatgcctaaaaattcctttgattctcccttctcccttttgtcaaaagattcaaaggactaaccgcctaagaattctnttgattcttcctcttccctttaaaaaaagatttcaaaggactaaccgcctaagaattcttttgattcttcctcttccctttaaacaaaagatttcaaaggactaaccgcctgcgttatcttttgtttccccttacaaagattcaagggactaaccgcctgagaattctttgtcttaacacattggagggtacatcctttgtggtacaagtagagggtacatctacttgggttgtaatactgggaacaagagagggtacatctcttgtgaactagttcaagt

SEQ ID NO: 130196 - DNA, 447 bp, Glycine max
  unsure (1)..(447): unsure at all n locations
cgcttgtggggcttctatggtggctagatctttcagcttctatgaggtcctttaatggtgattttccaccatggagatgcagcgaaagacaaaggagaataggtgagaggaggcgccatccattagggaataagccttggaagaaggagcttcaccaccaagatgagccttggataagaagcttggagaggatgcttcaatggaggaaaagaaagagggagagaaagagagaggggggagcacgaaattgaaggaagaaaaagggagagaagttgaactttgagttgtgtctcacaagactctcattcatcaaagttacaacaagtgttaaacatgcttctatttatagactaggtagcttccttgagaagctttcttaagaaaacttccttgagaagcttctttgagaaaacttccttgagaagctagagtntagctacacacacc

SEQ ID NO: 130197 - DNA, 433 bp, Glycine max
gctgagagtaagtctcgatcgggtttatcattatcgatatctcataattgattacactgctgtttgagacaatgattgatttagtcaggagtctccactttaatcgattaccaagtggattaatcgattacttctctctcgttcatgtgttcagaggggaaaaagaacactttaatcgattacataaggcatctactcgattatatcgtccttgagttgttttctagatgttggatgaacactttaattcattacttagataatctaatcgattactttgttaaaataatcgattaccttatagaattaatcgattactgacaattataaatgggtttctctatagataaccctatgttagaccttgtggcctcataatcttaagaaggatagacttagaatgctgaagaaccgccacaatcaaattaataat

SEQ ID NO: 130198 - DNA, 441 bp, Glycine max
  unsure (1)..(441): unsure at all n locations
tatcgaggacgggccttggattctgtgaacctgtgagtgatcattcaagtgcagagcttgngtttgacgagtcttgtgtgcagtgcatgtgatgtactctttcatacatggcactcgccatgggtggctgataacgacaatcaaatcgttcaaaaacaaatttactagggaattctgtagcacaagattaacctagatcaaactcagaaatatgattcaatatggttcctacattcattcacatataaatagaaagggggatttttgtcaaacaatttgtgagaaactctaaaagaatgtgaaaacacaaaaacataattgaagaaacaaaacaaaacaagaacaagatacaattcaagattaaaagcgtcaatccaattcaccanaccaatgcanttagattatcatagtcactacaatgatgtcaatgtgaaagtcagt

SEQ ID NO: 130199 - DNA, 176 bp, Glycine max
gaacttgtaaaatttatccttcatcagcctggttatgtatttgaccttacacataatcatcttaacattgagtttgtatttggaggacaactgacatctctatttatggcagttcttcaagatccaaaccttttgccatgactgaccataaagaatatatttcttctcttagcttc

SEQ ID NO: 130200 - DNA, 401 bp, Glycine max
aatcatgaataggccaacacattaccatgacatccatatgctgagcaattgactaaagatgaaaaaataattatagctgatatgacaaagtcaatggttaaaccaagaaacattatgctaacccttgaagcagcacaatgccaatagttgtacaacaatcaaacaaatatacaatgcaagtagtgcatatcgttcttccattagaagaagtgatattgaaatgcaacatctaatgaagcttattgaatgggatcaatatattcattggcataaattaaaagatgaagatgtggtacatgatatctcttggtgtcaccctaatacagggaagttatgtaatgcatgtcatttgcccctgatatagatcttctatcatatggacccgaacccaatcacatcat

SEQ ID NO: 130201 - DNA, 235 bp, Glycine max
  unsure (1)..(235): unsure at all n locations
atacacagaggatggacacgcaccatcgtcatttgcaaaatatcttcaagaacatgggtttgttgcccatacactatgcctggtttctcggatcagaatggtgtggcagaaccaagaaactagagtttgcgacatatacgcgtttggggatgcccatctgaagtaagaatttataatccataagaaaagacactccaccctangactattactgggtatttcattggatatgctg

SEQ ID NO: 130202 - DNA, 448 bp, Glycine max
cttgacgccaacattggagaggtttatgaagcaatgagattattaactccatgagttgttggatcaaatggagaatagagatcataatgaagaagaaaggaggagaagagggaatgatggtgttcctagacaaaatcgaattgatggtattaaactcaacattcctccctttaaaggaaagaatgatccggaggcctacttggagtgggagataaaaatagagcatgttttctcatgcaacaactatgaggaggaccaaaaggtgaagcttgccgccatggagcttttcgactatgctcttgtgtggtggaacaagttacaaaaggagagagcaagatatgaagagccaatggttgatacatgggcggagatgaaaaggatcatgaggaagcagtatgtgccgactagttactcaagggacttgaaattcaagctccaaaaactaacc

SEQ ID NO: 130203 - DNA, 290 bp, Glycine max
caagtgatttcacatgatacacgcctcgccacagttgtcgtacgcccacgagatgagtcccagcacactcgacaatcgagagaagtttgacttcaatatcctcgagcagacgcactcatgattctcgatatggaatcaacatggcttcacatcggaagtgaaggggggatattttgcaagacacatacgtagcacactttagttcctcgagagagctcttctgcagatccgtgaagtcaccacagatcctgctctttggtcatcgatgaccaatcagcgataatccatta

SEQ ID NO: 130204 - DNA, 353 bp, Glycine max
tgtgccctcgcaaactacctggcacaatgtcagccttggcaggacatggccctgaagaagcttgactacaagatgtccaggagaagacaaggccgccaagagaactctatacgctcctgagaatgatgatcaccgctggatgatagcttgacacacacatcatctgcaatgccgaaatggatggacgattctgcggaagcgactcgataatgtgatggcccactagcatactggtttacacgaggcaatacggcagcggatgcgggcatacatggatactcccattgccaagcaccataccaatgtagttccatgaatcttatgccctgctaggacgcccatgagggcgttcg

SEQ ID NO: 130205 - DNA, 382 bp, Glycine max
  unsure (1)..(382): unsure at all n locations
agcnnnngacaaaagaagaagaagaagatttttctgaagatgttcaaagagactcaagggttgtaaaggaatgaaatcaatgtattcaatgtgaattttttaaaatgcaagttaaggtcttgcctttatagactcttcatatctggttaagaaaaccatttgaaagagtataacctttagaaaaacttgaaaacctttggaagagtacatcttttgattttggtcaaacttacactggaatcgataccaatcatgaatcatacacaacattttggaagcaggacctacattaattgattcacgtcaacacctgaatcataccaacatgatcatcaccttgaacatgacgtgaatagtgaactttaacacttgcctgacaaca

SEQ ID NO: 130206 - DNA, 422 bp, Glycine max
  unsure (1)..(422): unsure at all n locations
tgaaggcatgtaacccaccatcttctcatagtagaacactggttatgtgtctactatcattgntatcatctccctctccatcattgaggatgctacttgagctgcccgatccctccatctttgggcgtattctttgaaagattcatgctccttcttacacatgttctgtagttgcattctatccagagccatatcataattgtactgatactgcctaatgaaggcaaccattatgtccttccaagaatggactcgggaaagttctagattagtataccaggtgacggctgcccaagtatgactttcttggaagaaatgcatcaacaaattttcattttttgagtatgcccccattttcctgttgtacatcttcaggtgattcttggagcaagtagtccccttgtatttatcgaaatctgaca

SEQ ID NO: 130207 - DNA, 297 bp, Glycine max
  unsure (1)..(297): unsure at all n locations
gtgtgatatagtctaagggtgccgttgattcaactaaaaaataaagggacccgaataaacacaaaaatattttgttaaatgtntgatttgaaaaatgaccganggacaatacnaaataaaggatgatgggctagacaaaaacccaaaaacttgtaactcactaaatcgcgtacaaacttttatccaatgtcntaacaaaagtaaaaatacaatactanttcctattttcactttcattatcccacacctttttctcttctcccctcttcttcccttcattttcaattcttcttcttt

SEQ ID NO: 130208 - DNA, 449 bp, Glycine max
  unsure (1)..(449): unsure at all n locations
ggtattgcttttctctatattatttanaactaaagatcttttgttgttccagatgtagcacattgtattgtatgcattttaatcaaggttctgtgatggcagacggtaaactgcaatgatgtgattattaggaatgataagaatcaattttacacctgttgcactatagtntcataaaatttagtaaactgtaccaattattttcgtggaaaacatgaaatttcttgaaataattaacatatttttatgacatatataattgaaaataaataaatatatctaaggaatctagctagcagtgtatagtagagaattgaacctgatagctatgctgatgtgcatgtggctctatnccgagtgaaaatactatcatgataaacttgtacaaaagccacaagttattcataatgggacaaacttacctcgtctataaaagcccacatacaaca

SEQ ID NO: 130209 - DNA, 464 bp, Glycine max
  unsure (1)..(464): unsure at all n locations
gagactatgtcgacctaaatgaatttttgatcatgcatnnttatctaatngtattcttattttgttgtaagtcgttaatcaacaattattaagtacttgttgcgttaagaaaaaaattagttggtgcaaccaaaatcaattacgcatgtatgatacgtcgttgtcataattgacaacacataatgatatgcatgcatattaaagtttgagcgtgacacgacattcactgacttgacaacacattctaatgcacgatacagcttgacaccacattggtttagtaggaaacataaacacgaaacatgttcacgcgtgtctatttttntataaaaaaagtaaatcaatcatttggtgagaaccatctatatatatgagacacgataaacactaataaatcacacatgaacttgatttcacatactctcctaattgttacacaaagtatgacattnntaggagaaact

SEQ ID NO: 130210 - DNA, 476 bp, Glycine max
  unsure (1)..(476): unsure at all n locations
ctagggatgaagtaaccagctcgcctgngcaagctaggtttcttaggaggaagcttgcttctcgcctaaataatcatgagggggctgaaggaaaggggtcctgaggcttctaaggtccagaggtccagaattgagaagaaataagagaaaaagaagctcgcgactgcaatcgatttctacatcgttcttcaccgttcttcatctattcttcggtcgttcttcattcttcattcggttagtgcatgtctttaaggatttgaacttgattcatggacccttaggggtcctctttattactttatgcatcttcatctccttcttcgatcatcggtaatcacttttcttttgtaaagtaagttttaatcgatcattagcgttgcaagttctcttaaaaaaggattgaagactaataagtaaaatcaaaacaaaaccaactcataaactntcttcatttcatcanaaaaatcaagagattg

SEQ ID NO: 130211 - DNA, 291 bp, Glycine max
attgactggagtactctactagatataaataatactgcaaatggggcataatttgtgtgggcctgatataaaattttgatgtaaaaaatattataggcaggggctctcaatgtgctaaaaagtcatttatttctagttgtatgaacttattaattaatacttttaaaaagcttgctaagaaaataaaagattggaaaaataactcatgagaacatcttgtttaaaattgactggccgtgacagcttccaacctaataagtaatagattggtcccctatattgggaagggga

SEQ ID NO: 130212 - DNA, 463 bp, Glycine max
  unsure (1)..(463): unsure at all n locations
gcaaagcccactccatcataagttattacctgacatcttaaacaaacaaatctttcgtaacaagacaattatagttgctgtttgaatacctcacccactcaagtgtatcacacaattatggcttttctctaatgaaacactcttgccttttaccactctaattccccttgagttcttaggtaattcaagagattatggccacaacaaagaacaattcaccaatatgtgtaaggtaaggctagagagacaaggaaaaggttaaccaagaaaaatgctaacaatgtttttaggcacaaatgaaggaaataaaattcagaatttaggaattcaagtaacaatccttcatgcaaccaatatattaccttaaagagatatttttttaaaagttcttcaagcatgaaccattcagcccaatntttttttttttttttaatattgcttatacgaaattctgcttcttttt

SEQ ID NO: 130213 - DNA, 304 bp, Glycine max
ctgctttattgtgaccacaatggttccttgaatatgccgggggcatgagacttggggacgtcacggggggtgctattgcccaaaaccaaactttgaccaatccgacccaaccccggcatagtctgtcagtgagaacctgtgatgtacctaaacaggcgagctccttgcagtcaacagataaaaggaacaataacccacaagcaaggatgcttgtggtggctggctagctgtgaaacttgattgatatgtgaaatatggtctctggtaatcgattaccaagggtgggtaattcattaccaagctt

SEQ ID NO: 130214 - DNA, 179 bp, Glycine max
  unsure (1)..(179): unsure at all n locations
agctagcatgatatacattctccctctgtctcaagagaatncgatagtcttctggacnatttcaaaatcttcatgatttacacaatctttcctgcttggctgcacaatcttctctaaaattcttttgatttcccggttagaaatttctgcctgtccattggtctgggggtggtatggtg

SEQ ID NO: 130215 - DNA, 312 bp, Glycine max
ccttctaacaaccatttatattatcttcaagaatgtttgaaatctattatagcatgaaccattcagcccaaataatttttttttaaataaggttatgtttcttttaataaaaaattagaggcctaatttttgcaatgattcagcctcaataaaaaaaaatagcatgaacaaggtaatataaaatggccaggaagaaattaaaaggatggtaccaagaaatttcaacccaagcactcttggaaaactcctgaaccggagcttctgtaaccaaaatgatggtaacccatttgcacaagggttgaagatggatct

SEQ ID NO: 130216 - DNA, 453 bp, Glycine max
  unsure (1)..(453): unsure at all n locations
cccatcacatgtggtactatgttgctgtcgggcgatggttttcaacangntttccacatncacaatgcgcgcataaacccaccatcccctgttgcccacctccaactgagctcacgtactcccacgtagcccatatcctcgtttctctcaacaccgggtccccatcaatccttccaagctttcacaacattcaagcaaaacaacattcaaacagcacaagctatcacagccaagcaaaacagagcaaaggcagaaaactctgcttaacacaccaaccaaaatcacagcttttctcacttaaagaccccagtaacaattccttcgttccggttcatcaaccgttggattaactcgaaaatattactggaagtctatagtacataagcctacattgtgaccgttgggatctactagcatacatctagaactcattctacattactctttccacaa

SEQ ID NO: 130217 - DNA, 467 bp, Glycine max
  unsure (1)..(467): unsure at all n locations
gaccttaaaactaagctctgaattcaccgcttggcttgttagttgaaacgatgncttaccctctttacgtggcatgccatcacatttgacttggcagccattcctttccttggagacattactcatccctacaaaagtacacgtgcactcatcacaacaacacgtaaatatattccaactcaaaacgtgtatatatatatatatatatatatatatcctcataccatatacaattgtagcaccgatcgaaaagtttccttgacaatctaattctgcaaaaatggcaagcaataaggagtctaagttcccagcacagagccagaaaactcagccaggaaaagaacatgtaatgaatccactcccacaagccacatatcctgatcacaaggccgccaataaactccaggtatattttaacaaacacattattatgatggttactattagtgcaagtctctgaatgcatg

SEQ ID NO: 130218 - DNA, 297 bp, Glycine max
  unsure (1)..(297): unsure at all n locations
aatgcaggaagcgagttcatcgccctgtcgacctccacgtacacatncgcatcccttcctgcgtcaccccccaatgcccccccatcggcacgtacttctctcgtcggaacgctaccacgtgtgtatcacctcgtcccccgccttcacatatatcttcgcccggcgaaacaccgcatcaccgctggcacacactttttcttcacactcggagtctctttctcaccttcggtcacattattcttttccgaaaactcggattcactggcgctttcacggttcggatggggaatatatttg

SEQ ID NO: 130219 - DNA, 449 bp, Glycine max
  unsure (1)..(449): unsure at all n locations
tctttggaccttgacaagtcataactcctctntcattgtcatgctatgngttcgcgactggtccctttcttcccttcgcaacttgagttcattattgctaccccatagagctccgcgaaatttgttccggccatactcttccttgcgagccctcttggtctcttgttcaagggtttttgcggtaattgcattctcttcccgtaacccggcgcactccttccgaatgtgtgtagcagccaacttgaacttctccttggcgagttttgcctttcctaactcgcttttgagagcttggacttcctcgtcctcttccggtgcttcaaaattctcttcactgacgacttttaacttggcgagccaatctaaacctcgtatgcgaactttcagccattcgtggtacccaccaatgatgccattacgaatgcctctaagctcttgatctttcctta

SEQ ID NO: 130220 - DNA, 345 bp, Glycine max
tcaccttatgagattattagactatagatgttaccgtcataaaatcttcccgtatcttgacacctcttctgggataatctggattctggagtgtgactggatataatacctaagatttattttgtgtccatacatatttgattctactaaaggaacacacaatgaccaatgagatggttttttatattggactattaaaatgctatataatatatttactttttgaagatgagctcaaatttgaaaggggataatagaacaagaaaaccactctttggggttatgtgatatctgcatcttatattaaatttttaataccaaatattgataattttaacttagggt

SEQ ID NO: 130221 - DNA, 321 bp, Glycine max
  unsure (1)..(321): unsure at all n locations
tcatgatgatgaatcaagttgatanctgtagttttgattatgacaaagatgatgacatanagcccacagaatgatttcacgattgagtcaaaaaattcaagatcaagtttaatttcaagcttcatgagaagaaatcacgaagattcaagaatcaagagaagtttgatttcatgattcaaaagaagatgaattcaagattcacgagaagaaatcaagaagacttcacaagggaagtattgaaaagatttttcacaaaacaaacatagcacaactttgtttttcacaagagtctttctcccaattctctacgctaccatcgct

SEQ ID NO: 130222 - DNA, 457 bp, Glycine max
  unsure (1)..(457): unsure at all n locations
ggcattggcagaagactatgttatttcgccttgcattcttacacngaccagatgaattggtccgcccncgccctatggaccctgcgggtcaaacgggctgatccgcgggcctaattttaaaaaaatttcaattgcaatgaaaatacaacacaatcaaattaaattcaatataaatgtatataaaatcttaacaattagtcaattacatcaataaaataaataatgtcttaataaaagaaaattcaagcaataaatttaaaatatgaaacttaaacatcttcaataacaaatgatttcatatatgaaacaataaaatccttatgcggacaatcagtagaccccgcgggccaaacccgtatagttagtgggttaagtaggacgaacccataaatacgacataatcatggaccgttaacaaaattgatccgttatccgcgtggaccgcggactccacgag

SEQ ID NO: 130223 - DNA, 444 bp, Glycine max
  unsure (1)..(444): unsure at all n locations
tgtctttgttangtgcacgtgtttttactggtggaggcacttgaatctggttgccaaacctcaaggtgatggcactcacattttttggattctgcatagnttgtgaaggcaatttgtcagaattttgggactgagcttgattcatctgagtagccatctgtcctatttgatttgtcagactctgaatggaggctattgtcttttgttgaaattgcatattctagatggtcatttgcctcactaactcttctaaggaaggttgaggaggagccttacttgttggttgtctttgttgtcactgctgctgtattggaggaggaacatatggttgcttggaccaccaacattctggaaatgatggacaggctgttgttgttgtggaggacttatccatctcagatttggatgattcctccaacctggattgtatctattgcttgaaag

SEQ ID NO: 130224 - DNA, 319 bp, Glycine max
ttagtagatgaagatgaattcgtgcgcacctcatggactcctctcagaacaataacatcatttcttgcactgaattgttgggagttggaagccatcttctcaatcaaattcctagcttcagtaggggtcatatcaccaagagctccaccattggcagcatcaatcatactcctctcgatgttgctaaagccctcatagaaatattgaagaaagagttgctcataaatctggtggtgagggcagcttgcacacaatttcttgatatctttccagtacttatacaagctttcttcacctagtttgcctgatgcctgaaatg

SEQ ID NO: 130225 - DNA, 476 bp, Glycine max
  unsure (1)..(476): unsure at all n locations
actctagcttctgtctaaatcgctgagtcttgtaattctacagcttgtttctctcactcaccttttgttggatcttggatagactctggtgcttctgatcacattgctggtaatccctcacttgtcttcaatttgtcacaaaccaaatcctcccaccacataaccttagcctatggatctaaaacccctgttattgttattggacagcccacccacaccccctccttatctttaaacattgttgtctccctttaatcttgtttctgttagcctactcacccaaactcttaattgctctattacctttctttctgattctttttgtataaagaccgaaggacaggaaggatgattgacatangatatgagtcacatgggctctactacttccactcatcaacagttgttgcatgcaccactattgagtctcccagtcttctccaccatcatttaggtcatcctagtctgaatacatt

SEQ ID NO: 130226 - DNA, 407 bp, Glycine max
gcctgggacttaggacgcttcattataaatcaagccaaggctattgttcaagcaaatcaatggggcaaaacacaccaaatgatataatatggtggctcaatttcacaagtaaatatactttaaattgagctttcaaactatcatgacatgtataaaaaaatcaaggatttcaagtcacaaaatgtcaagaacttttatttttaaaacaatcacccatctcttgaacatatcctattattcaaagaaaaacatgcaaagtcttacgtgcacacaatattgcccaaaatattaaactaaaattcgacgaactaacaacattacaattacacatctacaattatcaaccatctaactgcaaaccaagacactctcccatcttaacaaacatgtctatgtgcacataaaat

SEQ ID NO: 130227 - DNA, 448 bp, Glycine max
  unsure (1)..(448): unsure at all n locations
gagttgacaagaacatctttatactgatcaacacaatcctttggccaaagatgcatgggagatcctgattatcactcatgaaggaacctccatagtgaagatgtccagattgcaactcttggctacaaaattcgaaaatctgaagatgaaggaggaagagtgtattcatgacttccacatgaacattcttgaaattgccaatgcttgcactgccttgggagagaggatacagatgaaaagctggtgagaaagatcctcagatccttgcctaagagatttgacatgaaagtcactgcaataaaggaggcccaagacatttgcaacatgagagttgatgaactcattggttctcttcaaacctttgagctaggactctcggatagggctgaacagaagagcaagactctagctntcgtgtccaatgatgaaggagaagaagatgagtatg

SEQ ID NO: 130228 - DNA, 436 bp, Glycine max
  unsure (1)..(436): unsure at all n locations
aaactctgcttctttccaggctcatcttggtggtgaagctccttctttcttggcttattccttattggatggcacctcctctcacctcttctcctttgtctttcgctgcatctccatggtggaaaatcaccattaaaggacctcattgaagctcaaagatccagcctccatagaagctccacaagcaagcttccatcaagtggtatcagagcacaagagcttcaagtaggtgctccttaaacctccattaatttttttgctttaccttctcttccattgttgtttcttcattttttctccatgcatctcctcacatgtcttgttctaaatgttgttaacatgattctttagagtttgcaccgattaaacttgctatagaagttagaattgattntctatggttcaaatttcttgttcttgttcttgaaccatgaat

SEQ ID NO: 130229 - DNA, 383 bp, Glycine max
actagagttctcttacatacccatgattcaagaatataagattaatttactcgactctataaatggccttatgccctcacttggacataaatatactgcagaaaaatgccatgacgggtgtaggtacttgactcaatattgagaaaaaaaataatttaacatgtaatgaatggattaatgagattgcgtcttcaatttaaaaattaacaatttgctaactcttttagaaagaacaatttgttactaaactgtttttattaaatttaaaattaaaagtctgttaataattaaaaaaaacctttcttgttacttgaaggaaattaagaaccatattcattgacaaaaaaaaggtacaccaataatcccagttttttttgaaaaaa

SEQ ID NO: 130230 - DNA, 438 bp, Glycine max
ctcgaacaccatataagtgaaggcaaaacccataaacctattccttaaagtttcggattaatttgtggctgcatgttcacttatgtagttgcttgacgcttgttggtgtaaatctccttagtgcttacccctctcgattgcacaaaattggtatcagagctttgattcttgaaattaaatgttatctatcctctgggttttctctttattgtgtgcattctcatctgtttgttctttcccttttggttaactttatattattattccatcttcttttgctttatttctttgagtctatctctcttttctgaactctatctagcatcaatatctgttttacttctttttaatatatattatcaacaaatttgtgccaaaaaagatagatgtgataaacatatataactttcaaatttgaagcctaaattctattagaat

SEQ ID NO: 130231 - DNA, 334 bp, Glycine max
tatagccttttttttattaaaaacttatgcttacctaggaattaaaaacttaatggctgattactgaaattgggaaccaaattaccccaacagcaaaagtcaccccattgtctccaaagctatccttgtttcaatttgccttttcaacttgactaacctaactaagcctcttttattacccaaaatttttggtaccacttacaggatgggccttttttaaaactaaacctctaaattggacaagggtgtatttatcctctcattggcctgaacactacaactgacttttcttaactggctgtttcaatgtatgacacctgtgaaacttcctgtt

SEQ ID NO: 130232 - DNA, 423 bp, Glycine max
  unsure (1)..(423): unsure at all n locations
ngcatctgaagttctcgagaggtgttgaaattggttatgtcttaacaaaaaacacattcccctgctntcatttactggaagttcaaaggtaattcctctctctcttattnttgattaaacattgtaatctttatttttatgtgtttacaacgtacattacatttttatgatagtatttttatgttatgacctctactagttagctaacaagtgtaatttattataatcttttgtaattcatttttttgttggttccattggtttttattctaaatacctattcttattttataacatatatggtagtagctgtaacataaaaattggtattgaatcttanggtatgcttcttcccccaccaattattctttttagttagaataattattatagctcttcttcttaatatatattataaattta

SEQ ID NO: 130233 - DNA, 425 bp, Glycine max
  unsure (1)..(425): unsure at all n locations
tgcctaactagctggcttattttaatgccatattagctgnagccggatcctgtcaaatgagatgagttggcaaatgaggctgccattatattgtgtcatttgaagatatatattccttctactttcttcgacatcatggtccacttaattgatcatctggtcagagaaatcaaacgttgcggccctcgttatctgcgatggatgtacccggttgagcgatacatgaagatcttaaaatggtatacaaagaatctacatcgtctgaaagcatctattgtggaaaagatacatcgcataaaaactattgagttttgtttatagtacactgaagaggaaaaacatgttgggcttcccaagtctcggcatgatgaaagagtgggagcgcacggttcaagacgactgcatgttatcacttccagtgtaga

SEQ ID NO: 130234 - DNA, 305 bp, Glycine max
gtctgctttgacacaggtacaatcactttgatcttctcataatatgctttatggaggaatcaaaggtctggggtctttaactagcctcacttctctcaatatctcctacaacaacttctcaagtcctatcccagtaactccattcttcagaactctatcttgtatttcatattctcagaacccccagctttgtcagtcaatggatgggacatcatgtcctcaagcctgattcataaaaatgggttgaaattcgcaaaaaccatagcctgggtcacagtcattctaccctcagttactataatact

SEQ ID NO: 130235 - DNA, 465 bp, Glycine max
tcagaatcgcatccatgatcaacgggagcacctactcatttgtcttgaagtagttctcgatctgcgctttcaggtatgccaagggaaattgaacggcaatggtgtaaaacaacgtcgttagaatgagaagaaagagataaattgatataactttgttgtccacgtcgtcgatttggggaacagagagatgagaatgcaaaagaggaagaaaaatgagaaatagtctacagagttgtggcattcagattcagattcaaattcaaatttcaaaaacctaaactctgtagccaaaatttcaggattgtggcaaaatctcttgttcctgcatgttgttttctgctacttgctttttttggtttcacccattccaaatgaaccggattgatgcttctcattggttagtccaacgaattccccagaatgggtgtatagttggtaattagtggttttgcgtcagatgactgg

SEQ ID NO: 130236 - DNA, 302 bp, Glycine max
  unsure (1)..(302): unsure at all n locations
tggggctaaacacaccgaaagattatgatgaaggatggctcaaattctcacaaagggcaacttatcactttccaaatggagctttccaaactatcatgacatgttgaggaacaacaaggatttcaaatcacaaaatgttcaaagactncttatttcagaaaattacccattattaaacatatcccataatcaaagacgaacatgcaatttacaccaacaaactaccaaaataacctgaccccacaaaccaaaatattaatcatttacccaacaacaaactaaaccaagacactcccccatcc

SEQ ID NO: 130237 - DNA, 472 bp, Glycine max
  unsure (1)..(472): unsure at all n locations
gacactatgaaactcagctgtcaataaaggtaacaaagtcttggtgtgcgcgtcatggtgtgngccccgtgtgtatgcgtgtgtgtgtcacgacgtgaaactgcttgtggactaaaatgataatgttgattaaatttgggacaatcattgtcaagttaacatatgtgtcaaactgtcatgtcatcttgtaagtgttatatcatgacttaaatgttttgttaggaatttttattaaaaaattaatgaagagactaatgtcaaaattattaaattttaaaaacatggagggctaaatgggtaatacaattttttgtgtactaaaattacacaataaaaattataaggatgaaaatggatttaaaccttaattttacggctgattgattaaactaattcanaattacaaattaactactaaaagattcactttagaacaatctatcanatgggttgtttttgccatatataacac

SEQ ID NO: 130238 - DNA, 280 bp, Glycine max
  unsure (1)..(280): unsure at all n locations
ctatattattatgacatttgaacacattaatatttcttttattcgcatgttatgattgaacaattatgaattatgctatatgactatgtgggttttatatatttgatctattcatgtttcttgcttcatgattggtttatattctttaatgaatgtcttgtgaatgaatagtagtgtatataatttttntactacttggtacgtactttggctttntggtgatgccaaggggggagagaaatacggattaatccagaacccccttaaaaatttacttaat

SEQ ID NO: 130239 - DNA, 422 bp, Glycine max
  unsure (1)..(422): unsure at all n locations
ggaccttagaaactagctttttggacctgacagcttctatctcctctntcattatcatgctatgngctctcgaatgggccctctcttcccttcgcagcttgagttcattgttgctaccccacagagctccacgaaatttattccggccatactcttccttgcgagccctcttggtctcttgttcaagggctcttgcagtagtagcattctcttcccgtaacccggcacactccttccgaatgtgtgtagcgtccaacttgaacttctccttggcaagtttcgcctttcctaactcgcttttgagagcttggacttcttcgtcctcttccggtgcttcaaaactttcttcgatgacgacttctaactcggtgagcccaacctaaccatttacatgaactcttaacctttcatggacccaacac

SEQ ID NO: 130240 - DNA, 414 bp, Glycine max
  unsure (1)..(414): unsure at all n locations
cgccccctcttcagtcttttctggaatctgaattacangngctctatgnnnnnnctnnncngannnccgccatgaatctgacggctctatcatgtttttctgaataagttttgattttttttcaatagtctctgagccccatttgagttgtttcctcctcttccatatacattttgccccactaaaatttattgttgtccaccccatcaacttgtggaaatgcttcttcagatatctttcagagtttctactttctcaattgcaaccactctttctcttgctcctgctgatctcaatgggttttctttcaaactcaaacttatctcattcatttttccaaggtagcttcaccatcactattttctccaacatatattgtgaggagtcttcacgtttagcaaacatgtatatact

SEQ ID NO: 130241 - DNA, 437 bp, Glycine max
  unsure (1)..(437): unsure at all n locations
tggagaggatgcttcaacggtctanatgaaagagggatataaagagggaggcggggagcacgaaattgaaggaagaaataaggagagaagttgaactttgagttgtgtctcacaagactctcattcatcaaagttacaacaagtgttacacatgcttctatttatagactaggtagcttccttgagaagctttcttgtgaaaacttccttgagaagcttctttgagaaaacttccttgagaagctagagcttagctacacacacccctctcataactaagctcacctccttgagaagcttccttaagaagattcctaaagaagctaaagcttagtacacatacctttctaatagctaagctcacctccttgagatgagaagctagagcttagctacacaccccctataatagctaagctcaactccctgagaaaaaa

SEQ ID NO: 130242 - DNA, 245 bp, Glycine max
  unsure (1)..(245): unsure at all n locations
ccccccttctatttntttttttagaattctttttccggaacggtacgaaactttacgaattttgggacgatacttatattcctttccgaaggctacgaatccttacgggatatgtatttactcttttttagcttatcaagaagttacggaaactcacggattgtgcaaaaacacctctttgtaatttcccacacattacggaattgcacggatcgccaagcctgcttcttttgagtttgagacgt

SEQ ID NO: 130243 - DNA, 461 bp, Glycine max
caccatcttttatactagagttctgattatgtgtctactatcacgattatgcgtttttctttccattattgggggtaccacctgggccgccagatccctccaccttttgggcgtgttctttgaaagatccgtccccctttttgcaaatgttctgtagttgcatcctatccagaaccatatcaaaattgtactaatactgcctaacaaaggcaaccattaggtccttccaagaatggactcgggaaggttccaagttagtgtaccaggtaacagttaccccagtaagactttcatggaaggaatgtatcaacaattcctcatctttggcgtattcccccatcttctgacaatacatctttagatggttcttgggacaagtagtccccttgtactttgtagagtccagcaccttgaacttgggaggggtgatgatattgggtactatgaacaactcttttagg

SEQ ID NO: 130244 - DNA, 265 bp, Glycine max
aaggaggaaaagggaatgatgggtcctaaacaaaccaattgatggtttaactcacattctcatttaaagaaagaatgatcccgatgcctacttggagtgggagatgaaaatagagcattgtttctcatgccacaactatgaggaggaccataaggtgaagcttgccgccacggattattccgactatgctctgatgtggtggaacaagctacacaatgagagagccagaaattgaagagccaatggttgatacatggacggatat

SEQ ID NO: 130245 - DNA, 461 bp, Glycine max
  unsure (1)..(461): unsure at all n locations
tcctgcgaagggcaaacattggaatgtttgttttagtgggacattactctttaaagcaaaaatggcatataacctcctcccataaatacaaacatcaatgtaaatttagagcaagcttatgcgcctatttccttacaaacgttctcttgcaccagacattntaaccgaaaaatgcacccatatacaatcaaggcagcttcgttacctagattatttacacgtacctccaaggtgtatttgttacttacatcacacacatctccttggctaaattcacatacatgcatactcaaagcattttggggcaccaaaaattgcacatgtgcacatcttggcatttctaatacctatacatacgcaaacttcatgatgaatcttgactatctacacaataaggtgctacatttcatgcntcctttttcaagttttgctacctaaagccgcatgcanattcaagcata

SEQ ID NO: 130246 - DNA, 467 bp, Glycine max
  unsure (1)..(467): unsure at all n locations
ctctngccatcggctntcctcatagtcactgttatctctttatganacatantattgctccngataccttgcgcgaggctttgtatcttgtcataagcatatctctcataagatggtggtaagaatgtcttccatataaactcattcatttcttgccaagctgctatctcaggcttccttatctttcctcttgtaatcttctcaagctcctaccatacaattgctntatcatcaaactccaaggtagccaacctattcttcttcccttcactatacttatgacatgcaaagatttgcccaactttcacctcccactcaagagatgccttcgggtgacgtttcatctaaaaataaggaattttaagnttctccctttccatactatctactctagtaatttctcctctctatctactcttctatatctgcctctaccatgtctcctaagccctctttcttcttcatat

SEQ ID NO: 130247 - DNA, 277 bp, Glycine max
taaaataaaatcttgacattataagattagattggatgaaataaaatctggaccaaataaaatctagatgaaataaaatctggataagataagatttgattaaataaaattgtctggttttttcaagtccaaacccaattctggattcaagcccaattgcttataactttccttgaattaaatcaaaaacacaaaattagtcaagtaggcccaaatgatagaactgcataattaatttgacaattaaggctaatcactaattaaaatggtgacaaaa

SEQ ID NO: 130248 - DNA, 477 bp, Glycine max
  unsure (1)..(477): unsure at all n locations
agctnggttcaaccccgtaatccaaggaatggaaattctgattgccaatactttttcaacatctcatagggatgaatgactcgggcatactttaagcttatgcacggaaaatgtaatttgagatgcccgaagaaacaccatttcctagttaaccatgcattaggtaccatgttcaattattttgttttgttgttgtgtgtttttttttagaaatgggtttatgatcccaacatggttggctcatggtgcctaacacatgcaactaagaatgtagtgtgaagtttcacgcttccccctttttgtttttgttttgtagaggaaaacgcaaggatgagcaaacatgaaaacaaatggtatgcaattttgcaaatcaaaaagtttgttgaacgcatatgcatgatgatgccatgactcatgcaaaatgtgaggttggaatatgataacggacaaaagcangaatgatatgttcattatgat

SEQ ID NO: 130249 - DNA, 334 bp, Glycine max
  unsure (1)..(334): unsure at all n locations
tagagacacatacctctctaatattaatctcacctccttgagatgaaaagctagagcttagctacacaccccctataatagctaagctcacccccaagacaaaatacatgaaaataaaaaaaaaatccctactacaaagactactcaaaatgcctcgaaatacaaggctaaaatcctatactactagaatggccaaaatacaaggcccaaacgaaggaaaaacctattctaatatttacaaagataagtaggctcatacttagcccatgggctcaaaatctaccctaaggctcatgagaaccctanggccttcccttggatctctgcccaatct

SEQ ID NO: 130250 - DNA, 471 bp, Glycine max
  unsure (1)..(471): unsure at all n locations
ataagaacanaattgccttaatcatttccaaatatgcatttgttttangacgcattaacaagaatcaagccaaggctattgtgcaagcaatcaatggggcaaaacaaaccaaatgattataatgatggatggctcaaattctcacaaaggtaaaatcataactttcaaattgagctntcaaaactatcatgacatgtagagaagaatcaaggatttcaagtcacaaaatgtcaagaacttttattttcaaaacaattacccatttcttgaacatatcctataattcaaagaaaaacatgcaaagtcgtacgtgcacacaaaattgacccanaatattaaactaaaaatccgacgaaactaacaacattaacaaattaacacaactaacaaattaacaaaaccaacaaaactagcaaaaccaaagaacactcccncccatacttaaacaacacattgtcctcaatgtagcac

SEQ ID NO: 130251 - DNA, 275 bp, Glycine max
ttttgatggatcgatatattgccagataagagaaacatgttctgatatctttgggtatcctgacgcacggaagttagtcaatgcatgtaatttggtggtttgataacaacacctaacaaacaaaccgatacagactttcactactcgattttgttggggtgacaccgactgggatgacattctcttccagtttagcatatgtggagtgtgaacacgtaataaattggtttggctttacaacgcttgaggtcctttttaaagcgagagccctcctg

SEQ ID NO: 130252 - DNA, 315 bp, Glycine max
gccgacacagtataatctaaagaatatgaagacgtctaacactttgatcttggagaccaaatactatggcgccaagagataaaactaataacatgttctgagattgccacttactaaaagaaagtaacttcaaacattcttttatactcaaaatggaaactgtaatcagccactaacacaattttaatttcattgaatagtctcaaactgagttttatgaaattaagtgctctatgccaaaacattaataatatttttaggttaaattactcatttggttgctatagtttcacgatcgtatctttaagtctatag

SEQ ID NO: 130253 - DNA, 454 bp, Glycine max
  unsure (1)..(454): unsure at all n locations
ctatgccctatttccttacatcttctcttgcacaatatttctattaattaatattaatgcacccatatacaatcaaggcagcttcgttacctagattatttacacgtacttccaaggtgtatttgttacttacatcacacacatctccttggctaaattcacatacatgcacactcaaagcattntggggtaccaaaaattgcacatgtgcacatcttggtatttctaatacctatacatacacaaacttcatgatgaatcttgactatcttcacaaaaaggtgctacacttcatcccttttttcaagtttttgctacctaaagccgcatgcaaattcaagcatattttcctttgctgactaanattgtattcaaattaanaggtatatactttcttggaatatgttttcttacataacatgcaacatatntatatatattttttgtgagacat

SEQ ID NO: 130254 - DNA, 464 bp, Glycine max
  unsure (1)..(464): unsure at all n locations
tgagaggtcacgatgacaatgtctctcctccctctctctttgttccttcnagangcggntatgcagaataacggcaccattatttgcaaccaagttttagaagacccctgcgttacacaatgacactccattaccctttatttacattcctgccattcccatatgagaaattaaatacagtaccagtatatttgtaaattttcaaattaattgatgcttattgaaagttcattccatattccttaaaaaaaaattatcagtccgtaatctttttcgtaaatatttataaaaattaacatgttcatgatcgatttcacattgtaatgattagaacttatgaaacaacatttcatattcctttaatccatcatgaacatgttaatttttaatttgattaaaggcattaaattatcaacttagtaacataaatattaaaaataaattatacgatgttcaccactagc

SEQ ID NO: 130255 - DNA, 198 bp, Glycine max
gaagactcggcatacttaagcgatgcccgcaaagaagagagagcccgagaacaccatgtcctagtgaccatgcataagcaccacgatcaaaaatcgatggccgcggagatcattcacatagggttggagccgaaaaggcggacaagggccgaccaagcacaaaatgaggtgagtgcaccctccactatgctggtatgc

SEQ ID NO: 130256 - DNA, 400 bp, Glycine max
  unsure (1)..(400): unsure at all n locations
tangccctntcacttcaaactctttcattnnggggaccttattattccctccttcttgaaaagaatctatccttggatttgaatcaattgtacctacatcacaaanagataaataaatgacattgaaagntttacttacaccataatcaagaggcaaatcaattttatatgcattgtcatttatgcactccaaaacttgaaaagggtcatctcctctagctngaagtttatatttcctttgagaaggaaacttgttcttcctcgagtgcacacaaacactcaatcactatgcttaaacaccatcttcttcctccctttgatggcttgtttaacatattgttccatcttccttctaatttgagccttcacttgctcatgcaagttcctaataaaagaagct

SEQ ID NO: 130257 - DNA, 440 bp, Glycine max
  unsure (1)..(440): unsure at all n locations
tattattaagtaatgantaattaatgggcatatgaattttctatagatacatatcagtcaacttttgcagaatatataaatcaacatttgaaattgatcacaaaaattaaaattgtggatcttttgaaaatgaaagaagaaatctcttaataaaaaaataagagattaaaatcgtaaacttttaaaaaataagagataaaatgtcttagttaacaaaataggaaaaccaaaatcacatatttaaaaaaataggagaacaaaaattgtattttaacctagataaaaatgtggttgtcggtggttaattcatgattacattgcaataacaatttggtcttaaaattatgtttgtcgttctacaaagcagatcgaaattaacacggatttgaattaaaattatccactagattagggttttcttatggctatgggctccacaa

SEQ ID NO: 130258 - DNA, 347 bp, Glycine max
accggacacatgcgttgtttacccctccacgagacatggatcccaccatgggcaacatcacacgttcaacatcaaagcgattagtgaccctacccaacagcacatccgaaacatataaatgatcacgataaacttgtagaactgaatcactatctcttaataaacttgattcatactgtcctgtcaacataaaatggttgaatcaactaaacccatgtcatttgtgaaatgatgcgggtttaagtaaaagatttgacctagtacaaatcactacttaccataaatataatagtcggcattcattacacactatttgaattgtcgtaaattgtagaatactgatgaaa

SEQ ID NO: 130259 - DNA, 402 bp, Glycine max
cctattatagctaagctcacccccatgaaaaaatacatgaaaatcaaaaaatttcctactaacaagactactcaaaatgcctcgaaatacaatgcttaaaccctatactactagaatggccaaaatacaaggcccaaacgaaggaaaacctattcttatatttacaaaaataagtgggctcatacttagcccatgggcttcaaatctaccctaaggctcatgagaaccctagggccttcccttggatctctaacccaatctacttggagtctttatcccatgccctttgcggataggattgcatcattccctccaccttagaaaggaattgacctcaaattccgaggttcttcatactctgggctccttccctctacacctgtaaaaagaacaaaacatatg

SEQ ID NO: 130260 - DNA, 465 bp, Glycine max
  unsure (1)..(465): unsure at all n locations
cctcatgtaagactaggcttaacttttatatcattatcatcataacatattcaaaaatttctaaccccacaatccatccctggtaatgtagttatttagtcctgcttctatcaagttctaaggtaataatacatttcccaatgctaaagtcacctaacagtacacacaagtgggtgatcagaccaagagcatgtaataattaagcattgaaagaagcattgaacacacaaaacacaattaattagatatgaaaagtaattacatcaactgttcattagaaatccctaactagggtttttagccaaccatacaaggaaatcctaacacaaatgagatagagggtaccgaataattgttgcttacacaagaagggggatccctcctcctcttcttggcacctcacaatcactctaacacttactaatctctctcanaatgtagaaccctangcttctctgcacaact

SEQ ID NO: 130261 - DNA, 359 bp, Glycine max
tccactgggtgtctcggcagtgcaatacatattaactaattgatgacatctgagaatagccgcaccacatgtaccttgatttgggtcatgatcctgtagatcagctgacactttggtagcggagatcagagttatgggcacctagaaggattgtactggataggagcgtcttctcaaattgagtcagattggtcatgcctatgcgcatgatccgaacccgcctccctgtatgctacttgcaaaaatatgtcccgtggagcaaagtatctggactataacctctttatataatctgagaatggatgttcttttcagggtccacatctttgccctttattaaaacaatggatgcccagatt

SEQ ID NO: 130262 - DNA, 466 bp, Glycine max
  unsure (1)..(466): unsure at all n locations
attatgccctctcccctcggtggggatttcttcttctctattgcgagatagttgttggcagtgatattattgaccagccctccgaaaccttctaccgagatatcttgggccacgtgggcctcgttcaaaaccttcactagcagggctcggagctcatgagtaactccaacagcgagaccctggccggngttttgttgagctgttcgataaccttgaattcgctctgctgaattatacggaggaactcgctggcttcctctagcgacacctcctttttaccatcctttttctccggaaggccttttgccggaatatctttattcgaagcatggggtgctttgccatcttgttcctcccccacttttccttttcccttgacgtccgtgggttggactggtaggtccggaggcgcgaacacacgaccactacgggtcacaccactcagtcccgtgatatttgttacttt

SEQ ID NO: 130263 - DNA, 287 bp, Glycine max
tcttttatatcattgccacatattgttattattgctttttcacttataagcaaagattttttggcatagattaattaaagaggtgtttaagttaatcttggccctctcaaaaagatgcattaattattatctattaccagatctaacgagataataaattaaaatttttatccttaaatatatagatcgttatttgctaataataacaacattttgaattacctgaacgctgcccatgtgtattgaatacttcatgactgagaccggtaatttacagcttgggacta

SEQ ID NO: 130264 - DNA, 466 bp, Glycine max
  unsure (1)..(466): unsure at all n locations
ttcctgacctcagaaagtatatatgttttcatatgagagatgttactactgaatngaccttgtaataataagtaacagtatggtagttgttcggatctgaagaataatgaatgggtgtgtcagtgaagtgaagtgatgtgataatgggccttgcagtcttgcctgtcattaattttggttggtgctgcttttattgattctttaactatcacaactgcactcatggatcagttccagtatcaactggcaacattgacaacaccttaccagcgtagctatatgaattagaaagtaaaaacattttatgcatgttggagctacactcncacgtacccttgccattaaaagttctatatattgacaaactttctcacattcacataaagctcaacctcttcttacaccatagaagaaggtattaccatatatgtcataactaactgattaatacaatattgatacgtat

SEQ ID NO: 130265 - DNA, 351 bp, Glycine max
tgctagacagtttgtatcgccaacatcacaagtggtgatatcatctggtgcttaacaaagcttcctacattggtcgtaaaagaaccgtcgtacaacacgtgacataactacatccgttgtaaaatgaccatcgtagaaaacgtgagagacaaagtcgttcttgagccaagaacgatgtagaaagcagtgctttctacatcgatgctgctgtaggcacgacttcgtttgtcacgtgtttctaagacgggccttttacgaccgatgtaaagacatccaccctctactacgacattagctctagagacgtggctaccgtcgtagaaatgccaattccaccgatgtagaagcctc

SEQ ID NO: 130266 - DNA, 455 bp, Glycine max
  unsure (1)..(455): unsure at all n locations
ngtagaactaccctaaggaatttaagcaataggttccatttgggtattcaaaaattattaggaaaaggcaagtaaggttgtgcaaaataaggcaagattagttgccaaaggctactcacaacaagaaggtataaactatacaaaaacctttgctcttgtttctcgtctagaggcaatacgtattttactttcatttgcagctcatactaaaatgagactatgtcaaatggactatgattggatccctactatatctaactgcgttcaaactagacatattgtttagtgttggactatgtactagatttcaacaagacccaagggaagttcacgtcattattgttaaaagaatatttatatatttaattgaaacttttaatcttggtctttacttcaattataacaaagaattcaggttgattagttattgtgatgttgacaatgcttgtgagaaa

SEQ ID NO: 130267 - DNA, 402 bp, Glycine max
  unsure (1)..(402): unsure at all n locations
tgtgtgacaaagagagagagagagggatatgtggcagtggagaaagcaaagcagtgcagctgaaaattctgaaaaaggtgtcctaacgtgggtcgtcagatattgaatgccacccctataatacaaaggcaaagcactcactcaccccttatacccttattatttccncatcaattgataaacatatgcactgcaaaagatgtattataagtgttggagagaaagaaattacgggcaagcaaaggacctcgtttactgagcctcaaaactccaagttgtgtcgtatggcgacaaaatcttgactgaggggggcataatggcttggtaccacacagcacacttatgaataccaaaatacaagagaacaaccatgacagataaccaagttcacatgcatggaat

SEQ ID NO: 130268 - DNA, 414 bp, Glycine max
aatttttgttggggaattttatttagaaggtggcaacgatagacttatactatgtatcgctatattactttaatgggatcatgtatgctagtgaataacatattgacaattcgaacacaaactatcaagttgtagcgctggttgaggtgcctgccttgcttcattaaccaatgcctcagtctgctaagagcttctcctacttcagcggttgaagcccttaaatttattctttcattagaataccaaatgcatggtaaaaacaactataaccgtctaaactctcatgagttatgcaattagacaacaatttctaatggtgctgctcatatgcctagaagcaataaacgattatgcttcaatatccctgaactattgtttactaatcttaccattaacagatcataactatttatt

SEQ ID NO: 130269 - DNA, 450 bp, Glycine max
  unsure (1)..(450): unsure at all n locations
tctgatttcaatttcgattgtttcgatctattacgggattcattcggacattcgtgttaaaagttattgcggtttgcatttgctacgagcttccgctttcaactaagagcgtctcgatatattactgggctcaatcgaacaccggagttaaaagttattgtcngttagaattgttcagagcttctgttctcaattacgaacatctcgatatattacgggactccatccgacatccgagtaaaaagttattgtcgtttgaattttctcagagcttcggtaatcaatttcgatcgtctcaatctattacaggactccatcggacatccgagtaaaaagtaattggtcgtggaatttgctcagagcttctgttttcaacttcgagcgtctcgatatattacgggactccatcggacattcgagtaaaaaagtattgtcatttgaatttcgtac

SEQ ID NO: 130270 - DNA, 250 bp, Glycine max
aaatctctacctgggtgtacatgctcctttgaccttacaccactctgtatcatgctgagactcaggaagcccaacaagtgtagccttctctaagtattctgaacaaaattcaatggcttcttttgcaatgaacctctcaacaatagatgcttctggacaataaaaaattctttgtatacccttttaagatcttcatgtatcgctcaaccgggtacatccaccgttgataaacaggaccacatcatttgat

SEQ ID NO: 130271 - DNA, 417 bp, Glycine max
  unsure (1)..(417): unsure at all n locations
gacctataaaactcaacttttttctaatgaacattcttggtggcgaagctccttcttccatggcttattccttagaggatggtgcctcctctcacctcttctcctttattgtccgctgcatctccatggtggaaaatcaccattgaaggacctcattgaagctcaaagatccagcctccatagaagctccacaagcaagcttccatcaggaataacccaagaagacacattcctgagatttgaattggaacttgtgcttgttgtatggtctaagaaaggggaagcatgaccaaccaaacaccctaagaaatgaataatgaggaagtttgttgaacagttngtgataaggaaccccattgtcaatagttgaagatggcaacctgttgatcaagaaatgctggaactcaatagtgtagt

SEQ ID NO: 130272 - DNA, 434 bp, Glycine max
  unsure (1)..(434): unsure at all n locations
ccaggcgagctcagctcgcccagttatctttgntgctttttccagaagcaatatttttctggaggaatcnnctggagggcccaagngagcctggaagctattcgcactcccattnttactaaatacacccccctgccctttttttggtgattcttttttcgtaaaattacggaaacttacgaatttcgtaacgatacttgttttctttccgtaatgttacggaaccttgcggattacataatcatcccctttttgacttacggaatgttacggaacctcactatttgtgcaacgatgcttccttttgatttccagtgtgtcacggaaccttacggattgtgcatcaatattttcttttgatttccggcacgtcacggaatttcacaaatcgcctaatgatgggtgccaagcaccttcaaatgaccaaacacaag

SEQ ID NO: 130273 - DNA, 344 bp, Glycine max
tataataaattatttctttttaatatattaattatattataattgaaattcataataaataaatattcttaactgaattttaatgaaaaaaacaacaagatcattattgtggtattttaaataaatattcacgttatttcttttgaatggtttaagggaatttgatatagaatctaaaaatcaattgctccaatgtatcataaaagtatatcaatactgaatgttatgaaaaaaaacacagatcttattgggttacattaagacctcaaattgcgataaaatattgaaattatacttgatatatgctctttgtggtactacattgtctaggattatattctatt

SEQ ID NO: 130274 - DNA, 420 bp, Glycine max
  unsure (1)..(420): unsure at all n locations
actcaagctngctacaagtntagtagaaacatgctntctaaccaaatgttaatcagtgaatgtttttgagttaatcagcactnttagttgtaccagttccctaagtatactctggttctagccagcaatatattttggtgctaaccagcatgtcctttggcttctaactgcctgacttaattagctccattcttttacgtatcagaagaacctagctctgacacctagttagtgctggataatagaccataaatgctaccatgacatagccttacgacaaatgtatactattccaatttccaagttctaagacatattaaactcttttaacagttagtatagatagccctgattgtcatgttttcctttatatattgacttttatttcttatctaacttctattcgcagtggaatatttg

SEQ ID NO: 130275 - DNA, 254 bp, Glycine max
ggaaatcccattgcctaaataaaacaaaacttaaaaaaaacaatgggcgcggctataccacccgcagggccactggaggatgtttgcaggatgtgctgcatagacgggggagaaaaactacctcgccctatcatttataagcgagcttaatgggccaacccatttgaccctcccaacattgtgacccttagttggcccaagaaccatacaccaattggtcagaggtactaggtggggcatatatgccctgaact

SEQ ID NO: 130276 - DNA, 344 bp, Glycine max
ggtcgcgtgcaagtctgagcatacataatacttcctcgactgatgcatttgaatgctccttttgcttcgtccaatcatttagacttggcgaataaattgctcttttgaatggacggaatgctgacacttccatctaactttaactcatgaatatgcttttgaacaagcctacaatcctgggatctaattcggaataattctatccctatcacatagcttgcctcacccatatccttcatttcaaagttactagaaagaaacttcttagtctcatgaagaacaccaagatcattagttgcaagcaatccttcatcaacatacgggactagaaacataaccttact

SEQ ID NO: 130277 - DNA, 406 bp, Glycine max
  unsure (1)..(406): unsure at all n locations
tagctcataatataccaagatgctcgatatggtacaacggaagctctcgagatattgaaatggtcataacttatcacaccgaacgccgactccggcggatagtgtatcgagaagctcggaatcgaaaaccgaaagctctcgagaaattcaaatggtcataacttatcaaacgaaagtctgattcaggcgcataatatatcgagaagcttgaaattgatcaacggaagcactcgagaaattcaaatggtcataactaatcacacggaagtccgattcacgcgcataatatatcgagacgatcgaaattgaacaacgaatgctatcgagaaaataaagcggtcacaattggtcacacggaagtccgattcaggcgcatactatatcangactctntaaattgaacaac

SEQ ID NO: 130278 - DNA, 289 bp, Glycine max
ggggttgaaataattatgaacgcgtcttaactaattaaaaaattatccttcttaatagtactaaattcaaatatactttacaactaagttatgagaaaagtaagaacagaaactaatacttagacaaaagtgaagcagaaataaaaagtccacagcggaaataaagagtgttggaagaagaaaccaaccaatattatactggttcggcacaaccgtgctacagcagtccccagcaaccacgattctgagattccaataccgtggaaatccttacaacaagatcccaacg

SEQ ID NO: 130279 - DNA, 462 bp, Glycine max
  unsure (1)..(462): unsure at all n locations
tcctcggggccatttcctgtgatatcaaacatttagaattatttttacaagataatgctcatcttaacgcaaaaaatgtcatgctaatccctccggtatagaacgaactcatgcgcacgtttaatgtaacacatttacgcacatgcgtatgtgtagaatatcctactatntatatcaacatagaggccatccaacacattctaattgtcatacatatatatgcatttgaaaagaacacacattctcacgctcaaggcattgcgtcaaaatttacacttaactatatcctaaacatttgctatcacaaactacctacacagactcgaaatatatataccatacaaactntcattgtttcactcacacttatgcatattggcaagctatttacattatgtacatactngcattcaaaagggaatcccgtgctatcatacattcatttaggaagcgacctcaata

SEQ ID NO: 130280 - DNA, 419 bp, Glycine max
  unsure (1)..(419): unsure at all n locations
tgatatgaggaagtgtanatggttgttacttcctgctttttgtttgtgaccacagagtggtacctagagatatgtcacggnggttaggagaccttggggacgtcaggtggggtgctattgcccaaaaccaagcttgaccaatcccgacccaacccgggcatagtcagtcagtgagaacctatgatgtacctaagcaggcgagctcctagcagtcaacagataaaaggaactaagaccacaaagcaaggaggcttgtgtggtggctggccagctgtgaactttgattgatatatgggatatggcctctggtaatcgattaccaagggtgggtaatcgattacaaggcttaaaagtgaagacaggaagctaagatggtctttggtaatcgattaccaagggagtgtaatcgattactatgc

SEQ ID NO: 130281 - DNA, 161 bp, Glycine max
tttacatatattaatcccttacaggggtgtttgggagagaaaacaattgagcaaaccttcaagggagggagatcatctcagaaggacaacctaagcatacaaagtcaaagatggctaacacgaaagccagtacctaacccaggaaattgacccggcaagtg

SEQ ID NO: 130282 - DNA, 163 bp, Glycine max
  unsure (1)..(163): unsure at all n locations
ataacaccacacacctgatatgaatccaacagggtctgtgatgaaacaacatattggataatggtgattacatgcctcanacaacaacaacactacccccacatggttttatggtactgctccagtgctgcacaacattctatgacaactcagtttgcaatgt

SEQ ID NO: 130283 - DNA, 451 bp, Glycine max
  unsure (1)..(451): unsure at all n locations
ntgaagcttctcgtatacaaattatctctgcatgggcattgtagtcccgtaactcttcaactctggaacagatatttagatataaataaaaaaattaaaaactagggcaattacaaagaacgaaataattccattacacttacaaagaatgaaataatatcctcacttacaagttgcagcctcgagcaataattntcccatgctgcacaagaacagcaccaacaggtacctcccatgtatcagcagccttcttggcttccaaaagtgcttccttcatgaacatttcatctatgcgtcgctgctcaagttcacattgataggcttcttcccagtcatcaaacctatctctcaagacttgcctgttccgttgaaactttctttgcttcaactctccatcctttctctctgagccggacaattcagaccgcacaggagcaatagattccttgat

SEQ ID NO: 130284 - DNA, 413 bp, Glycine max
  unsure (1)..(413): unsure at all n locations
tattttatatgcctatagcctgttatatcggnctatatatatatattacttatattattnttctgcatataattaattctttttaaaactatcagattttgattacacattaatgttctataacttttattcctataatcaagtaagattttaattataattggtgtgagtcttgtgccattctatatttttcatcatttttattgggtttcctatttctgttaacgtttcattttcctctaactttactattacgtgcctatttcagaacaaagaatattaaaaatttaatgtaaaaaaggctatcaagtccgactaaatttttaaagaagtcaagtcgagtcaaaataaaagtctttgataaattataagtaatgttgacgcttncaaaatttatggtaaactaaactttc

SEQ ID NO: 130285 - DNA, 259 bp, Glycine max
agagaaaaaaaaaagcacgaaaaagagaaaagaagaatagcgaagaggaaaaaaaaaggaggaaaaaacgaagaagaaaaaaaagcacaaaagaaaaaaggaaagagaaaacaacaagaacaaaagggaaaaaagaggaaaaaaaggaaaaaaagaaaaaaaaaaaaaaaaagaaaaagaaaagaagaaaaagaaaaaaagagaaagaaaagaaaaaggacaaaacaagaaaaaaagagaaaaagagaaaaaaaaaaaa

SEQ ID NO: 130286 - DNA, 448 bp, Glycine max
  unsure (1)..(448): unsure at all n locations
gttgatctatcaccaccgncgncatcatcatcttaggtcttctanttattttaatattactagtactctgttttctagccgtgtatttggctatattatgacatttgaacaatttagtatttctttatttgcatggtatgattgaacaattatgaattatgttatatgactatgtggnttttatatatatttgatctattcatgtttcttgcttcatgattggtttatattctttcatgattgtcttgtgaatgaatagtagtgtatgtatgtttcataattgttacgcactttggctttttgttgatgccaaagggggagagaaatacggattaaatcaagaactcacataagtcattaacccaatttcaagtgaagcataaactaaaaaacataggggagaatggaaacttatgtgagtgatcgacttcgaaaaatgtgtgtatgt

SEQ ID NO: 130287 - DNA, 445 bp, Glycine max
  unsure (1)..(445): unsure at all n locations
gaaccccggtcatgttgttttgatccatcattgtatccatgtaaagttgtaggcgcagcctaatcattaagccagatatttagaaaacttagatgatgcacaagcacttaagacaaactattaaagagtttccgcgtgctctcttcacactctnttcttttcatacaaaaattacgaataggattctggttggttcaagaaacaataataaatatattatggatttcttttatttaggttaatattatggatcctctttctttctattttgggtgttgcggtacgcaaactcactgggtgtgatttgattattagacgttggttttcaccaaaaagccagtattatcttcacattcacacggaccagtagaatcacgtttgctgtgacggaagctaacgtgagtctttccntcaactaagctatggttntgttggcctttctact

SEQ ID NO: 130288 - DNA, 473 bp, Glycine max
  unsure (1)..(473): unsure at all n locations
atagcacgcagagactaacatcgtcttctgggccctttgtgaatcgtggccgttcttcccgttgacacgcggagatttacgtcatcttccgcgctcacaagacctgtcatactgacatttgagtcacgctgactggcagaaatacccgagttgttatccgtataaacattcttttttgctgtctgtaagacgaanagcctgatagcacgcagagactaacgtcgtcttctgcgccaatcgtcagtcgcggccgacaagcccgttgacacgcggagatttacgtcatcttccacgctgacaagatctgtcatactgacatttgagtcacgctgacgggcggaaatacccgagtggttatccaaataaacattctttnttgctgtctgtaagacgaaaagcctgatagcacgcagagactgacgtcgtcttctacgcccttcgtcaatcgcgggcgacaagaccggtgacacgcg

SEQ ID NO: 130289 - DNA, 448 bp, Glycine max
ataagggtgactaactattttttattttgactcatgaatgactgttggaagcccatgaaaattgtgttcatcaagcacacaactgggatggattccttttgagatttctactaaaaatgattaaattaaaattcttcccaaagatgggtatttgtgctctttaccaaaactagaaaattttatcctaaacgccttaattactatgttaatctccctaagattacatgtaactagagtaaacctcacacaaagatcactctcacatagagctaaattacattgtcactcaatgtacaatgccaatttgttacacatggaatattcattaagcaggtctcgtatctctgccaccctatacttaaccaattattctcacagaatatattcatatattgcacataaattattaattaaaacacataatcattgcaattaaatacacacatgc

SEQ ID NO: 130290 - DNA, 345 bp, Glycine max
tatttggacagggacaatctctataaagaagtgaaaatgattattacccactgaactaactcctaactaactaacttaactgaaagagcatatgaatactacaactctgtacaatactctaataagttcaggggttaataatattttcattgtctcttttctaaagcttttcttttctctcaaatattctctttacaattctgctagactacaatatgctctagtgtgttgtccacccagcataatagtctacttatattcaagagcagtgtaaagataactcatgctatatcaatcttgcaagagagcaaactatttcctaatacgcattgaacttagctatac

SEQ ID NO: 130291 - DNA, 451 bp, Glycine max
  unsure (1)..(451): unsure at all n locations
tgtttgtgacaacaaaggaatcttatatgaggagatngtattcatggaggaccttcttgcgatggtcttactttacggtggaggtggcctagccattggaggctatggtgcaattgaaactaaacgtctatttggataagagttgaaaaggaaagaaacatatacagagaaaccgtatacaaaatggtccaccattggccaccgacaatgcaaagggcaagaaggagcacatgtagcaacaacgagttcaaccccccccccccttctctctctctctctgacacaaagataaaaaggaatcagatagatgaatggtcactttgtgtgatgacttttaaaggtaaaaaacaaaaagatagaactgacaatttggtccatagtcacattgtccttcacgtgccatgtcaccaaaaatgttaaaatcaagataacttgatggtcgaactaaact

SEQ ID NO: 130292 - DNA, 412 bp, Glycine max
  unsure (1)..(412): unsure at all n locations
catctttncattctcttctccctntgccaaanagaattcgccaaggactaaccgcctgaattctntttgtgtctctcttctcccttttccaaaagaacgaaggactaactgcctgaattcttttgtgtctcctttctcccttgtcaaaaaattcataacgacacagtctgagaattcttttgatttttccctttccctaatacaaaagtgttcaaaggactaaccgcctgagaattcttttgtatcctaattcacaaagtatcaaaggtttaacagcctgagatttttgtcttaacacattggagggtacatcctttgtggtacaagtagagggtacatctatttgggtttgactgagaacaagagagggtacatctcttgtggatcaattctagtgganggtacatctact

SEQ ID NO: 130293 - DNA, 461 bp, Glycine max
  unsure (1)..(461): unsure at all n locations
actccgcttcaggatccacactgaaatttataagactctcccatatctatggaacctgaagctcgngataccaatgttgaatccggttgctcatctgtacaagcaaaccataaatgtgacaaatttggatgaatctgagtcttgaatgatgaagacaagagagaaaggaagtgagaaagagaatgaaacaaggagaactaatcgtgaaactgaaaatggaaactaactttcattgaacaaactagttccatttatacaaccatcacagggaccactctgcaattattctacaaaactaactctgcagatcggtccttctaactgagataatagaaaaaacaaactaacaactcagatacaactcttcaatgactgaattgactttgaactaactccaacatgaaatacatatgttattaatgttcanactctaccactctacgtatgggttatacgggatg

SEQ ID NO: 130294 - DNA, 262 bp, Glycine max
gacagatcttatgtgacgtgtcattccagaactactatttccaaatactatagaaggatctttacttgatcaaacaaatccgaaccttgtgcatactctgttagcaacccaacagcaaaaccaaacatttgccatctgtagaaatgaaattacatattagtaagtcaaaatacatacaaacttgcacaacaaatggggattcaacttaattgtgacaggtttgcaattaatcagaagacaatccattaacacaagaagctga

SEQ ID NO: 130295 - DNA, 458 bp, Glycine max
  unsure (1)..(458): unsure at all n locations
agaagcgttacttcaggtcttctcctgtatttcggcatttgtcttacatatgttcaccaatggttgatatttataggttgtgttaagatgtgtagatctagtggcactaagtctctttggaattgtttgatcttgggattaagtctcactcaagctgctctgctttcactttagttaatgagataagtctacgttgttgttgtttcgtgttaggatgtgatgctaattatgttatatctcatataatacaatatgtaacatattttctagcaaccgacaactaaacataaaaacttctaaagcataggagaaaaatgcaccttttggtgcatattttatgtgctaaaaacacttggctttgcacaaggtgagatgcgactccaaatatgtaatgcttgctaatttatagatgtatgccctttcactgacaagttntagaacagagattgaatatttta

SEQ ID NO: 130296 - DNA, 436 bp, Glycine max
  unsure (1)..(436): unsure at all n locations
gttggattatggggcacaccgtatattatggngcacccgtcatatgtggtactaggaggtactagactgactcttcaactctcccccttccacaagtcaaacataaacacaccatccctagttgcccacctttcaactgagctcacgcactcctacgtagccctcatcctcgttcctctcagcaccgggtccccatcaacccctccaagcttccacaatatccaaggaattcaattccaaatatcatgaaactaccctaaaccaagaaagcagagtagaggcagaaaactctgcccaaaacacattcaaataccacagctttccttactgaaataccccagtaacattctctttgtccgattcgtaaccgtggatacgcttgaaatttactggaggtactagtacataactacatttgaacggtggatctgtataa

SEQ ID NO: 130297 - DNA, 388 bp, Glycine max
cctattcaaaaaattttgtcaatataataaaacaaatttacctaaaattctgaaccactccacttgtttttaattagccaattccaatcttctggagatacgtattttggtctaccttattctttaagataatcttgatgtaaatgataaagcttatttttgtattgagattagaattgcttcattgcatattctttcacctcgtcagataaactaaaagcatccttatatcatacgttttcatcaaaaaaagaaaaaattaaatactatcaagatacattatcaatccaatttgaagacataactaatattcacatatataaatatatctaatatcattgatctaattatatactggaccttcatatgtcaccacattttatctaca

SEQ ID NO: 130298 - DNA, 450 bp, Glycine max
  unsure (1)..(450): unsure at all n locations
cgatcntttagttntttatctttaatctntaatccctgttcgaactattcaagtttgtaattcgaactttaattatcttttaattcgttcctaaagatagatcgccaaatctgttgctaactgcacattaatctgttaaagatataacagatttatgtgtccagtattttcgggcaagatgtcctggacatcgtatccgacatcgtggatcctgcagcttcaattcttcatttgacattttatcttgccttgtgcattgtgcagcccaatctgattccttgacataacgttggacatcatgtgcagcaactccagctttccttcattgtctaagtgcttatgttttaacaaaattntagccaatcttttatagctcagtaaagctaagcactaacaactatcataatgggaaacatanacatatatattattgatgagaaanaaacatca

SEQ ID NO: 130299 - DNA, 463 bp, Glycine max
  unsure (1)..(463): unsure at all n locations
ctaagcaccgcggctgcagcttcttgatgaaatggggagaatttgtctttttttcgtggacgcggaagaggacgtggtcgtggacgtagtcgtggcctacgaagaggacgaagacgagatcatgatacatttgacaataatgaatggaggagccatcaatccactagaagtcgtggaagacgaacatgatgatgtacaaacaattatgaaaaagcatatgaaaagaggtatgataaatctaatgttgaatggtttaattgtcataaatatggccattactctcgggagtgtacaacaaatgttgaagagcacgtcattcttgctgatgaataagaagaagttgaagagtcaacactactactatcacttaataatggtgagaaagaatacanatgcttattgtttcttgacaatggagcaagcaatcacatgtgtggttgcaaagagaaattcggggacttga

SEQ ID NO: 130300 - DNA, 486 bp, Glycine max
ctcagcttaaacctaacggatctacattctacatcataccctcaatcatgtacttcaccaacccaatattttcttccctacaaaaatctcaacattattaataaggaatatgatataagatgacaaaagcagttataaaagaatccaaataagatagcaattattgtatagagaaatgttaatataatttctttttttattttgacgaaatgtttaatataatttctaacatattctttttaaacatgtgtttttttattaatgatgaagtttattaagaaattagaaaattttatgagacctacttctcatttaatgagcattatttaagatattataatttttaaaaaatataactcatgaaatttgataattctaatacattttagtcaatgataaaaagtgtattaaaaaattgtaatgtaagtaatctttctttaatagaggatagagagttagctagaataatatgttaaccttctacta

SEQ ID NO: 130301 - DNA, 65 bp, Glycine max
actatctgaactgtgcttggctccaatttcctttctgctatttaggaattctgattgctgtcaat

SEQ ID NO: 130302 - DNA, 396 bp, Glycine max
aacagcaacgacgacgataatggtgatggtatcaacaattgatacatgggtgctagtagtagtgataatgaataaaacaatacagcgagccggaaaagagaataaagatttataaatctatatacaagtcctggacatcccctttgattatctcatttatggaatcatgtttgttgattcgtgcttagttccattaaaataccaaccctttttaaaatagtctacacagctactatatgttaagcgtcatgtccactaaaatatagaatagcatgcctatttaaataggttagatctttattcgatcactaaaattactttcaaagatcactgcctccttcggatcaacattaatgcaacgcttgattaccactagttgataagatgataatataa

SEQ ID NO: 130303 - DNA, 131 bp, Glycine max
ttctcatcaatgtaggcaaaccaaaatcgcgcattagcgcgattataagcattgtgtgaagagagagggagcaactattacccacgcctcatcagtgctctctactatgagcgcagatccacatgacgact

SEQ ID NO: 130304 - DNA, 230 bp, Glycine max
agcttgtcatgatccactagagcaagaaattaagctgtagggggatttgagaataccagaggtccttgaagctagactgagaaacatctctgagagaaagatgaccatcgctggagttattacttccgaaggagaactgcgatgaccatatctaccgtaaccaattctctattttaaacgctaagaactcaaaaaatatattcatttctagttttaggataaaagaatgg

SEQ ID NO: 130305 - DNA, 146 bp, Glycine max
atggaaactgcacggatcttatgtgatgcctgtggtatttgcggcatccacatgctcttactctggcacactgaacgtgcttttggaggtcattgtattgctctttatcttgatatgatgctatagagaactatcttacttaccct

SEQ ID NO: 130306 - DNA, 341 bp, Glycine max
  unsure (1)..(341): unsure at all n locations
tgaaaaatctgttatggtatgtgctctgacatttcatcgaattatgatanatctgtgcatttcaggtgaaaaagagcagcagttgggctaagctcaacaattgggctaagcgcatatccaccactaagcgcagcttcagcgtgcttagcgctaaggagaatctggcagagcatcagcatcaaagctgcgcgcctagcgagagatcagtgcgctaagtgcagcacgtgcctttagccaggctaagctcgagactggcgctaagcccaatttcacttactcgtgctaagcgcgagggtggtgctaagcataacgtcacaaaattcaagcctatttaaagccta

SEQ ID NO: 130307 - DNA, 440 bp, Glycine max
  unsure (1)..(440): unsure at all n locations
ntntattntcagtagataaagatgaattcgtggccaccttatggactcctctaaggacaatagcatcatttcttgcacggaattgttgggagttggaagccatcttctcaatcaaattcctagcctcagcaagggtcatatcaccaagatctctaccactggcagcatcaatcatactattctccatgttgctaagtccctcatagaaatattgaagaaggagttgctcagaaatttggtggtgaggacaacttgcacacaatttcttgaatctttcccaatactcatacaagctctctcctctaagtttcctgatgcctgaaatgtcttttctgatggtagtggtcctagatgcagggaagaatttctccaagaacaccctcttaaggtcatcccaactganaatggacttgggagaaaggtagtatagccaatctttt

SEQ ID NO: 130308 - DNA, 371 bp, Glycine max
  unsure (1)..(371): unsure at all n locations
agctntggagtttccaagtgccttttcgtctttttcttttgtccagncttcttctggcttcaattcatcagtgggctttccttctgtgtccagcatcttgggatgttcccagcctttgatgacagctttccaggttctactatccagtgatttgagaaaggccaccattcttgctttccagtattcatagttggttccatcaagaattggtggtctgttcactggtcctccttctttctccatgttcatcagaatttatctccctagatctcactcagtgatttcgagtgcccgctctgataccaatngaaattctgatactggggacagatgtcgtacaggatgtcacgacatcacgcttcagaacatgc

SEQ ID NO: 130309 - DNA, 481 bp, Glycine max
  unsure (1)..(481): unsure at all n locations
actcaagctgaggattatggggtacccgtcacatgtggtactaggtggcgatcgggcgatggtgcaaataaactctccatatccacaaatcacacatgaacccaccatccccagttgcccaccttcaactgagctcacggactcccacgtagcccttatcctcgttcctctctgcaccgggtccccatcaatccctccaagcttccacaaaatccaagcaattcaatatccaaacatcatgaactatccaaaaccaagaaaacagggcagaggcagaaaactctgcccaaaacacattccaataccacatctttccttactcaaataccccagtaacattctctacgttctgattcgttcaccgttggatggactcgaanattttaatgaaggtccctagtacataagtccacattttgaccgttgggatctgctagaaaatgtccagaacccaatatgtacaaccctttctacaaccagc

SEQ ID NO: 130310 - DNA, 469 bp, Glycine max
  unsure (1)..(469): unsure at all n locations
tgtctcagcgtttatgcgagacggagaccaacatgctatttatcatcgccaagtaccaagaagagttaggtctagccacggcccacgagcatagaatcgtggatgagtatgctcaagtatatgcggaaaaagaggctagaggaagggtgatcgactctttacaccaagaggcaaccatgtggatggaccggtttgctcttaccttgaatgggagtcaagaacttccccgcttgttagccaaggccaaggcgatggcaaacacctactccacccccgaagagattcatgggcttctcggctattgtcagcatatgatagacttaatggcccacataattagaaatcgctaggaaactngtatggtctctcagaccttgactggatacgacttcctttttaanatanaatgagtaggtcccatggttctactttcaaaagcttgtgcaaatcaaatcactcctacatttca

SEQ ID NO: 130311 - DNA, 211 bp, Glycine max
ccaaaatcgagcattatcacgatcataagcattttgtggcaagatggacggaacattataccaagcctactcattgtactcaactatgattgccgattcacaaatgacttaatcctcatggaagaaaactggcacactcctgtgcccagggctgcacctataatgcaagtcactcttgggaatcaaggtctcttcaacaacctcatatact

SEQ ID NO: 130312 - DNA, 395 bp, Glycine max
  unsure (1)..(395): unsure at all n locations
tactgtctaaaacagggaaaaattcatgtggccaaaaataganttatgcccagaagatgaccccgtttcacatcagttgcacccattgttttgatactttacagctgaattactaccacagctaaacttctattggcttatataaaagaattactctcattatcatataggtggctttcttctatttatataaacacaattgtatactctctgactccctgaaagaaacactggaatcttgtaatattcatttcttttcacgcccgacgaatgtgggctatggcgagtgcataccctcaatgtatagaacgcaacaagaattttttatgaagattctggacttcaaatactcctttaaatgtataactgagtgtgttaccacatttatttcttat

SEQ ID NO: 130313 - DNA, 326 bp, Glycine max
agcttaaccctctggctcaaatgatagatttattgtcatttacacccctcaaggacaaatgggtgttaaacaaccagcgattgaaattccacaaactgttgaaaatgatcctgtagatcaagttgtaatgaggaacaacaagttcctcgagaaaaccacaaagcaacattaagaagatatactagattcaaaaagtcatcaattccttgtgattatgtggtgtatatgcaagaatcggactacaacattggagccacaaatgatcctaaaaagttttcacaggccatgagttataaggaaataaatttgtggaacaatgttgtgaa

SEQ ID NO: 130314 - DNA, 429 bp, Glycine max
aattctaatgaagattggatctctattggagaccaaacttcgggggaagccatggagcttacataccatatcaaaaattagtaacacaactctaaaagttgtgtaatgagggtggagatagccaaagagaatgcctttcaaaaaacaatcaatgataatgaagtagtgtggccttaagaagggggaagactgttaataaagtctaaagacagatcatcccaaatggatgaaggtatatgaaggggttgaagaaaaactgtgatgatgagtagagtgcttcatttgttaacaagtgaggcatttgggccacataagttataacatccttgcgcatctgtgcccaaaagaaattggcttgcaatttatgtagagtcttggctattcctatatgcctacctatagggggtttgtgaaactcttcttgtaata

SEQ ID NO: 130315 - DNA, 212 bp, Glycine max
gagcgggattcttcgttaaagtttaaaaacctccataatagatatgggctcatctaaaatttcatttcccgaggaaattctattaataggcctcttatgttcaatggcgaggttatcactcatggaaaaccccaatgcaaatctttattgagccatcgattaaatatatgggagccattgaattggcccttattctacatggaggggaatca

SEQ ID NO: 130316 - DNA, 450 bp, Glycine max
  unsure (1)..(450): unsure at all n locations
agctcacttagcccaggtanttncttctaacatggcngagcggcngagagagcaagctcgcttagccacgaacacgaaagcaataaaattctttctaagtgtctgaaacacattactcccttatcgcacagccgcgcttagagagttcataaacattcaatcattcatcagataaaatgaactcgcttggcgggacagggtcggcttagtgagttcatctggaaatccagatatttcgtagaaagtgatgaactcgcttagcgcaacaagacacgcttagcgcattcatcgccatttccagaaaaattggggctttttcagccctctcaacttatgcctctattaggccatcaaatcctaaccaaaacatttcaaaatgagatacattgtatgcgaatcaaaacccctacactattctaactaacaactaacctacattatgcagtcaaa

SEQ ID NO: 130317 - DNA, 493 bp, Glycine max
  unsure (1)..(493): unsure at all n locations
cactcaagcttcttatccatggcaattcttggtgggaaactccttctttcttggcttattttctagnggatggngcctcccctctcctcttctcctttgccttccgctgcatctccatggtgaaaaatcaccattgaaggacctcattgaagctcaaagatccagcctccatagaagctccacaagtaagcttccatcacttagcaacatggagcggagtatgattgatgctgccagtggtggagctcttggtgatatgacccttgcagaagctaggaatttgattgagaagatggcttccaactcccaacaattaagtgcaagaaataatgctattgttcttagaggagtccatgaggtggccatggattcatcttcatctattgaaaataaaaagcttgaaggaaaacttgatgccttggtcaacctattaacctagcttgccatgaattagaaatctacacctattgcaagagttngtggtctatgttct

SEQ ID NO: 130318 - DNA, 355 bp, Glycine max
  unsure (1)..(355): unsure at all n locations
agcttaataaaatccttagtgatccacattatgtatgtatgatagcatngactaagatgatgtgcaaagttgagagttttactagtcagttgttataatttaaacacttttattgagatacttgtgggattgagagaaacactagtcttgtgaggactgaagttggtgattattccttgaatctgtcattcttgctaccatttatttgagacatttgtttgtcctttatgnctttgacaatggactgagaatgacatgactttaaagttgcgtattatgatggatgaacttaacttttttgtgagacagaaataattggggtggatgtattgattttggataattaaatgatttc

SEQ ID NO: 130319 - DNA, 432 bp, Glycine max
  unsure (1)..(432): unsure at all n locations
gggttctatacattcaaacagttgtacgtttaatgtctcttctccctcaaacttcatcggcactctcgagataggtccaaatatctcctccaaaatgtttaacaagaaactcatcaacactcttgagaatgcaggtgaatgatgacattntagtgtcggcgttgccactctcgaggcagagctagaggtggtcgttggagtcaccctggaggcacactctgaatgagccttccatgagaggtagaaagactgtgtacatgaattggttctggttctggacacatctttggtttccaccaactaaaattgagtctccaatggaatgtcccttcctcgatctcccattttcttaaacatctaccacaacttgatctggaagcacaccatgaaccaaacatccttcaacgttcccaatgaaattatgtgtctact

SEQ ID NO: 130320 - DNA, 409 bp, Glycine max
  unsure (1)..(409): unsure at all n locations
agctnntacatcagatttagtaatgaccctctaacctataattaaaataacttaatgccattaacctagggaattaaaagaacttaatggttgagtgtaactgaaattgtggcaaccaaaagtctgatgcctgggttgccaattgggcccttattacaacttgaactaaacctaactaaagcctttttagttgattaacccaaaacatatttttggtcagccaactntacaaggattaggccattatttagacaaactgaacactctaaaattgagacaaagtggtgccatttaatcctcctccatttgggccatgatacaactcacaaccttggacttttctccttgaaacttgggcttgtattcaaatagtatggtcaacacttgttgagaacgctcgaaattgaac

SEQ ID NO: 130321 - DNA, 468 bp, Glycine max
  unsure (1)..(468): unsure at all n locations
tctcgatatattatgtccnctaatcggacatccgcgagtttacttatgacctttctaatttctcgagagcttccgttgttcaatttcgagcgtctagatgagttatgtccctgaatcggacatctgtgtgaaacgttatgaccattcgattttctcgagagctaccgtcgatcaatttcgatcgtcttgatatattatgttcccgaatcggacatccgtgtgaaaacttatgaccatttcaatttctcgagagctttcgctgttcaatttcgagcgtctagatgagtaatgtccccgaatcgaacattcgcgtgaaaagttatgaccattctaatttctcgagagcttccgatgctcaaattccagcgtcctcgatatattatgtgctcgaatcgaacatcctggggatatgttatgacccatccaatttgcctagaacttccgttgttcacattcgagcgtctcgat

SEQ ID NO: 130322 - DNA, 302 bp, Glycine max
  unsure (1)..(302): unsure at all n locations
agcttctcggctcatactgngaacgcctcttttcattacccgtgcagcctaaggcacccacccagagggaaactccccaagttccaactccgaacacgactcgaccagccagtaattcaacacgacaggaactttccttcaaggcattttcggaatcacccccttccatgatgtacaagaattttccatcctatcccatatttgcctgtactccgaaggctcaacctttccaatgttactaccactcatacatgggtccggattctaaactgctaaaagcactatgtcgtgtctcaagtgca

SEQ ID NO: 130323 - DNA, 421 bp, Glycine max
  unsure (1)..(421): unsure at all n locations
caacaagttttccacatccacaatgcgcgcataaacccaccatccnctgttgcccacctccatctgagctcacgtactcccacgtagcccatatccttttttctctcaacaccgggtccccatcaatcctcccaaggttcctccaacatcaaagtaatacaacattcacacagcacaagctatcgcagccaagcaaaacagggcaaaggcagaaaactctgcccaataacaccaaccaaaatcacagcttttctcacttaaagaccccagtaacaatttcttcgatccaattcgttaaccgttggatcgacatccaaatattattggaagtctatagtgtatacgcctacattgtgaccgttgggatctactatgaacacccagaatcattctgcactactcttncacaggcaacacacac

SEQ ID NO: 130324 - DNA, 377 bp, Glycine max
  unsure (1)..(377): unsure at all n locations
agcttgaatcggacctcagggttantagttgttaccattngaannncncgagagcttgcgttcttcaatttcgcgcgtctctatatgtgagtcgcccgaatcggacatccgagttaagagtgatgtgcatttaaatatgtcaagagcttccgttgttcaattacgagcatcttgatatgcgatgcgtctgaattggagattcgcgtaaaaagttatgaccatttgaatttcttcagagcttccgttgttcaatttcgagcgtgttgacatattatgcgcccagatcggactttcgtgtgaaaagtgataaccaattgaatgtttcgagagctctcgattattaatttatagcgtcgtggaatattataatcctgaat

SEQ ID NO: 130325 - DNA, 449 bp, Glycine max
  unsure (1)..(449): unsure at all n locations
actcagcttatatatatcgatacgctcgaaatttacttcggaaacnctcaagaaattcaaatgggcataacgtttctcacggatgtccgattcgggcgcataagatgtcgagaggctcgaatttgaacaacggaagctcttgagaaattcaaatggtcataacgtttcacacggatgtccgattcacgcttataatatatcgatacgctcgaaattaaacgtcggaaactctcgggaaattcaaatggtcataacttttcacacggatgtccgattcgggcgcataatatgtcgagaggctcgaaattgaacaacggaagctcttgagaaatttaaatggtcataacttatcactcggattgctaattcaggcgcatcacatatagaggcgctcgaaattgaacaatggaagctcttgagaaatcaaatggttgatacttatcacactg

SEQ ID NO: 130326 - DNA, 472 bp, Glycine max
  unsure (1)..(472): unsure at all n locations
agctnggcgctaagatagcaaaatctaacttatagtgttatcttccatttcagatccccatcaaaaggagaaagagaattgatatcatcagtgactaaaagaaaatgaagcaaaacttgatggctcttttgattggattaattggtgcagccgtcaccttatttgcttactcacaaaccttcgtatcaccaagtctgtgcatcacacttggccttattgttctcatgcatgttgggcttgcttgtaggagaaggtctgatatctttctaatttcttcttgtttttcttttccctttcagtatttccttcatctatgtatatgccttgcttatgtgcaataataagtctttgattaagaactntttctagatactctnnnttgtttatccatatcttgaatattgcaaattgaatcttagtctatgaagggttgaacgaacaatgatgtaatttctgagcaacaatatttctt

SEQ ID NO: 130327 - DNA, 351 bp, Glycine max
  unsure (1)..(351): unsure at all n locations
atctgatgtgcaataaanattatatttttttactttttactttnttatccaactaaatatgtaaatagagttcattcttttaatttactttntatatatttttcctttttactttcttgtccaactataagtaaatacttttaattcaaatagtaaaatgtatacatttttaatcttttttgctttcttcttttccttctatttttttcagtcgaatttttattgaagaaagcttnttttcttgtttgcctaacatactatgaaatattaaatgtcattatanccaaaagaatttttagtcgcaattattttaagtcttagcgacaatatattttggtacttaaatattta

SEQ ID NO: 130328 - DNA, 331 bp, Glycine max
gatcttaagcgacctgcaggctgcagcttagggcggtacagtatttgctgtttctgtgatcaacacatcgtcatctcgcgtctggctcacgatgttaaacaagcatttctaagaggcagcctagtatctctaatcctgttctttaaaattcatgcttttatttatctgttttcttgaatcgtatttgaatgtgccttgtttatttgtgaccatacgagttaactaaacgatcaacatggctaggaatagcttaaatcgttacaaaggggtcgcaaaaaaaaaaacagttagctcgcctgggcgagcatgtctgcaccaaaaacataaaatg

SEQ ID NO: 130329 - DNA, 462 bp, Glycine max
  unsure (1)..(462): unsure at all n locations
actaagctttcattattctatgacccgtagtgtccacattgttgtttcgtgcattttattctcgatttgttactttntatacccnctgttgacgtgcttaagccattgtacttaagtcgtttctcgcataacttaaaaataaaataaatttccaccgaacgtttgaattatattatccagtaacttcggttaaaatcaattccgaccgttcggtcgtgccgtaaccacgttggaaatcaaaaagaggtaaaaaataatataataatcaaaaaatatcttttttagtgaaataaagcggaaaatcaatcggacgttctctctttgggatttctctttcttaatcgaattgattaataactaaagtgaaattaaggctaanaccaactcgcctagtcaagctcgtccacaaaaataagcttttgaaatttgtcattncaatctcccactaagtaaaatggatca

SEQ ID NO: 130330 - DNA, 416 bp, Glycine max
  unsure (1)..(416): unsure at all n locations
gatccttaagtcgcctgcggcatgcaagcttgcctaattaacctgaaattgagggttattgatantttacacacaacatggaagtactaagtatttattacctatacttaacagaaaatacttataacactacataataacgattaattggaagagtctgatacaatttacacaaattttatacataaaagttagttgttttcaccgactaatagtcatccgccacccttgtcatccagagacggcaagtacgatgacacgtggagacaacatatggttatttgccacccttgtcatccagagacggcaagtccgatgacacgcggagacaccttatggtcgttcgccacctttgctatccaaagacaatcgagttcgatggcacgcgaagacagattatgatcatgcgcaccctt

SEQ ID NO: 130331 - DNA, 463 bp, Glycine max
  unsure (1)..(463): unsure at all n locations
ntgtgggggggattcagactcgagtgggaatcttagccgttagtaaatacagctggtgggttgttatgtatatggaacgagaaagtatttaacgtggaaaggagggtcatgggtaggggcttcatcctgctggagggtatgtggacgcaagacttacagaaaatctccattgtgaatgtttatgcaccatgtgaagctgatggaaagagagctctntgggaatccattacgcaactcaaggatcttaaacctggtggtttgtggtgtatattgggagactntaacagcatcaggcacccctcagagagagtcagtactcgtcaaagggagggggaccacaatagcatcactgagtttaatgattgggtgtctgacttagctgtataagaagtggcatgggtaggcagaataattacatggattagacccgacgggaatgcacagagttagctggatagaatct

SEQ ID NO: 130332 - DNA, 194 bp, Glycine max
agcttcacaaccttagtagcaattgctacattattcacataacacctgctatgttcactttgaacttcagaagcaataatcctttaattattcttctaagttctttcctctaatctaaaaggatggacactacaccttttgagatgctttctattgagacttctggcacaacatgtttatagacactctacata

SEQ ID NO: 130333 - DNA, 453 bp, Glycine max
  unsure (1)..(453): unsure at all n locations
actcagctgatgatacatcgccttttctttgctattctttttgatatatcaaaatcttcatgatttacattctcccccttnttgatgatgacaaccacctgtaggctatgagcaacacccaagaaaatatctatttgcatatagtttactcccccttggttttacaatgattgctcatatgagacaattgaagacttcattatttttcatatataaaaagatgtctcatataacaatagataatttttcttactatattatcttttatctttctctcaccctttgtcaacatcaaaaataaatcatgaatagaaaagagaaagatgttaccacttgctgcaatgtatgagaataagtgataccaaaaggtcttaaaacaatcatttcatattaatcacggcaaaacaagtcaattacacatttattcaacacaatctaacacaatcaatcatc

SEQ ID NO: 130334 - DNA, 372 bp, Glycine max
  unsure (1)..(372): unsure at all n locations
cctcaagctagcatgaccaagcttcttatgccatacccattgattctctntgactgagagtaagcacgacaccttttgactggacaaatcaccaagtttaatcttataaagatttccttgtctcttagcaaaaagagtgaagaattgtccttgttctggataatacacatatccttgttaaaggtgacattatatccactatcacatgattgacttgtgctctgcagattatgctttaaccctttaacaagaaaaacattatccataggaggatatggaggaatacggattttacctacaccagatatctaagcctttttattccctccgaaggtgaccaccccaccagtcatagggtttagggattggaac

SEQ ID NO: 130335 - DNA, 470 bp, Glycine max
  unsure (1)..(470): unsure at all n locations
tccagggtagttagtcttcgacaatttcctatttttaattcttcattctatttatttatagcctatttattgagtattcatcttatttaggacatataggtcaatcaatcatgattcataattaaatgatggattactgcttacgccattgtagtcgagtaatgttcatcctacttcacactaataaacagtagtaaaatctacaacagccataacagcaacccaatatttaattatatttaacaacctttgttctgcatttcatccttatgcttaagatttgaatttctaacgcttcttcacaaattcatcctattaagaatttaagntaactacgtataacccccccaaataaaattgtgcgcttcttagtttgcaatattacaaaaattttcaaccttacatatcagtttgcaatattacaaaaattttcaaccttacataaattctatgatacaatcatttccttc

SEQ ID NO: 130336 - DNA, 304 bp, Glycine max
agctagaagagaagtgttacaatatctagatacatatataatatcattattgaatcatataaagttaagagtatcttagatgataacttatgagcagtttccatatatcattatatttccttatttaattagtatttgaacatacaagcatagaataattataaataatgttagagctttgcattttgtaccacattgtatcccaccaatatagataagagaatgttattcttattcatggtctcttctatctcaatttatctccatatataatattattattgatgaacacatttgaaaatgc

SEQ ID NO: 130337 - DNA, 188 bp, Glycine max
cattatcatcatagcatactaagataactaaaaccccacaatccaccacctggaatgcaattatttagccctgtctctatcaaggcctaatgcaacgcacatttctcaatgctaaagccacctaatagtacacacaagttggtgatcaacactacccagcatgcctctctttatatccttctatgaat

SEQ ID NO: 130338 - DNA, 258 bp, Glycine max
gctggtctggacgacccagaatttatttttgtttttatcgatgaagaacgtcgtagaacgggtataaccttagctaaatcctcatgaaacgttcacaaacgtttctaagctccctcgctgggattttcttcacggaaacagacttaacaacctaagtccgaagagagagaacggcctaatgggctaaaccctgttgtacctcactccatagccaatttgtataaaattggggagaagcttaccactctccttgtcatg

SEQ ID NO: 130339 - DNA, 484 bp, Glycine max
  unsure (1)..(484): unsure at all n locations
atctctaagtcacctgcggcatgcaagctntaaaaggctntgaattcgcgacattgtgctattcgccatcctcgcgctnagcgcgagtaaatggatttgagcttagtgccagtcgtgcgctgagcttggctaaagacaactaccgcgcttagcgcattgatctcgtgcttagcgcgcggccttgatattgatgccctgccagattcttctgtcgcgctgaagctgcgcttaacggtggatgcgtgcttaacccactgatgagctaagctcaactgtcacctttagcacttcatgacttagccttattttcacctaaaattgcacatatttcattattaaatccaatggacatattctagagacaacttaaaccataaaacaagatttatttacaaaaatcactacaaaataaccataaattatggaactatactagttttggaaatgttttctatacaaaagttagtcatataagacgactaac

SEQ ID NO: 130340 - DNA, 474 bp, Glycine max
  unsure (1)..(474): unsure at all n locations
ctcagctatatgcatgtggaccatgcagtgaaaacctcgtctggcgcctatgtgtacatgacaagacaaaccacacactagtaagtcaagtcactctcactaggtaatatcatagggagaccagtcagggtcacagtgttttgcgagaatgctccaaccatatgggatcaacatangcttaaaggagcactcaaaccgtgtgatccccaaggcctacactccgaagagtccgtcagggcctctccctcctgattcaggtccaacccagaaaacattntaacacacagactctatctatgaactatacaaaacacacgactccttaattgttctcaaaataattntaactcgtcgccctttaagggtcttatcattaactcgtcgcccttatagggacttaacattaactcgtcgccctaaaagggacttaacatcaactcgtcgccctataagggacttagcattaactcgtcg

SEQ ID NO: 130341 - DNA, 230 bp, Glycine max
  unsure (1)..(230): unsure at all n locations
gcagcggaagaaaaaggagaaaaagngagaggaagcgccatccactaagaataagccctggaaggagaagcttcaccaccaagaaagtgtcttggataacaaacttagaacggacaccttcaatggaggaagagaatgacatagacagagagagatacagatagagagagacagagagagagagagagacagtggcatgcacaattgaaagaacggagacaagttgatct

SEQ ID NO: 130342 - DNA, 496 bp, Glycine max
  unsure (1)..(496): unsure at all n locations
ctctaacaaactcaacttgtagatatggggacccacacatgtggactaagttctgtcgggctatggngcacaacaagatttccacatccacaaatcgcgcataaacccaccatcccctgttgcccacctccaactgagctcacgtactcccacgtagcccatatcctcgttactctcaacaccgggtcctcatcaatcctcccaatctttccccaacatccaagtaactcaacattcaaacaacacaaaccatcacagcctagagaacagggcaaaggcagaaaattctgcccaaaacaccaaccaaaatcacagcttttctcacttaaaggccccagtaacaaatcccttcgttccaattctttaaccgttggatcgactccaaactnttactggaagtctctagtacataagcctacattttgaccgttgtgatctactagcagacatgccgaactcaatcttacatacttcttccacaactcacaaatacata

SEQ ID NO: 130343 - DNA, 334 bp, Glycine max
tgtcatggagccaaccaccagttgaagaagaggaactgatgttattcaccatagaaaccaatagtgagctcagataaaagccgaatgagtaagagcaatatgtgatggcagtgaagaatgtctgcatccctttcaaggactggttgtagaagaactcaatgagcccaacagctgtaaacatctcagacaagccaaaaattaagaattgtggggtaatccaaaaaatggatatagtttcgttgaggttcacagctgcatcccttctctttttctccacaagggcagctgatatcatagaaaatgtagctagaaagagcccaaagcctattcgctg

SEQ ID NO: 130344 - DNA, 458 bp, Glycine max
  unsure (1)..(458): unsure at all n locations
ntgcatcagacanagatgatagcaaatccatttcacgatatgttntcactttaaatggtggtgcaataagttggaaaagttccaagcaagctatggtagcagattcaactactgaagcagaatatatagtggcaggtgaagccgctaaagaagttgcttggatgaaaaagttcatatttgaaattggtgtggttccttcaatagaagagtcggtcccattattgtgcaacaacaatggggctattgcttaagcaaaggaaccaagatcacaccagaaatccaaacatattttgtgaaggtatcacttgattagagagataatagaatgtgcttacgttaagattgaatggtagatggaaaggagaatgcagcagatcccttcaccaaagcgcttgacataaaagattttgacaagcacaaatgggaattatgaatgaagtccatgaatgattggctct

SEQ ID NO: 130345 - DNA, 275 bp, Glycine max
  unsure (1)..(275): unsure at all n locations
atcttaagcaccgcggctgcagcttgactgagtctcaagagatatattatgtgtctctggcatgagnntcaatcatcaatcatatttgaataatctatctttcaatcttttttcaacatcatctctcaaacatctttcaatcaatctttcaatatctttctacaggcatttcttattcatttctcttcatctttctaaaattttttgatcaacactttcttttccaagaaaagttctttgttcaaaaacttgggctattcattcttttcattctt

SEQ ID NO: 130346 - DNA, 444 bp, Glycine max
  unsure (1)..(444): unsure at all n locations
atgattgatacatgattngggtcttgtatgattcaatttgggcaaaattggatgagggaaagtgtgatttcnaaaatctgcactttatgtagaattttgctgtcaaataggtgcagcagaattttggctttgtgcagaaagtgttgtgtatttgctggttgtggaaagagttgtacagattgggttctggacgttttctagcagatcccaacggtcataatgtagatttatgtgctagatacttccagtaaaattttcgagtcgatccaacggttaacgaattggaacgaagagaatattactggggtatttgagtgtgaaaagctgtgatgttggtttgtgctctgagcagaagattctgactctgccctgttttcttggctgtgttagatcatgatgcctggatgtgaattacttggatgttttgaagcttggaggattgat

SEQ ID NO: 130347 - DNA, 410 bp, Glycine max
agcttgccacccagctcgccaggcgagcttgttgcttctccataacaacagccttctggaggaaggatctggaaggcccaaatgggccagaatgctatttgtacccccctttttactaaatgcaccccccttctattttttggtaattctttttccgtaacgttacgaaactttacgaatttcgtaatgatacttatgttccttctgcaaggttacgaatccttacgaattatgtatttactcttttttagctttcaaagaagttacggaaactcacggattgcgcaaaaacacctcttttcgatttccgccacattatggaatttcacggatcgcgcaagcctacttccttttgatttctgacacgtctcgggacttcatttattgtgcaacaaaggacaccaagtacc

SEQ ID NO: 130348 - DNA, 340 bp, Glycine max
actgtgctggcaccagtactatcttgcattattataaatctgcatctgaacttgttactgttgcaagagtctgtggtctatgttcttctgctgatcaccatacagatctctgtccttctttgagcaatctggagtcaatgggcaacctgaagcctatgctgcaaacatttataatagacctcctcagcagcaaaaccaacaatagtagaataattatgatatttcaaacaacagatacaatccacgttggatgaatcatccaaatctgagatgggaaaatccttcataacaacaacaacaacaacaacaacaacatgtccttcccttccaaaatgttgct

SEQ ID NO: 130349 - DNA, 428 bp, Glycine max
atgtacataaccaggtcgatatctacttcgcaattgattatttaactctgaacttgttaagtcggggttccgaacacgaagaaatgaatgttaagtaaatggtttattttctctccttgcgtgcgtatcttatgcaccttctggtttttacaccgtccggttagatgatctcaaatttaagaaaaaaaaaagacttaattagcaagttggttcctaaattatttaaaatgcatcattttggtccccaaattttagaacactccaattatgtccttcaattcttagaaaagattattaagaacctaaaacaaaattcactaatgtatcaggtcataaaacattatttgaccttttatttattaattattttagtagaaatcatagtatcttacacaagatagttatgctttaattgagtgagatactaa

SEQ ID NO: 130350 - DNA, 436 bp, Glycine max
  unsure (1)..(436): unsure at all n locations
tgtgtgttnttatattggtattgacttggtcaatattaattgggtcttctacaagataaaagttaataattaataaatatatatttttgtaatgccaattaaattaagttctatggtgattatttctgtgataagtctttattaaagtggtgcattgaactgggcccgcaagtaatgacctcactcaatgtactaccagctctgaaatataatatacacttatctctcataaatacatcccaaatttcttctctgaatttttgtgggatagaattggtcttcagttcaagtctgtgatgacaaggaagtatctttgtgctgagtctggaagaggaacaatcctagttgccaattgcacagnttgcttcggttgggaaacatttagagtgagctatatatttatatcttatgaagtctattatctatcttaattaat

SEQ ID NO: 130351 - DNA, 161 bp, Glycine max
gcttgaaagttctgggggattttttttatctttggtatcagacgacaagcctctacatgtcctttaaaagaaggcatgatccaatttgccatccctcacatctagctgacaccctttagaagctgtgatacaattccaagccatcttgggccttttcaagc

SEQ ID NO: 130352 - DNA, 465 bp, Glycine max
  unsure (1)..(465): unsure at all n locations
cactcaagctatanaagattgcgctggagtcaaaggtgacgactcagtttttgtccttgtctctgtttgcggaacacgcaccatacgtctgacgcttgccagaaggtaatctttgatctccatctggttttagtattttatgataaactgtgaagcaatgagattaatttcttgtcttccaattctgaacagtgttacgcatgtttattggctatgaagtagttcctcaagccatcacagatgctcgtcttaatgccaagataaatggaatacaaaatgcaacatttgtccagggagatctcaataaaattgatgagaaatttgggaagatatttcctaaacctgacattgtcatatcaagtatcattgctctaagtttccttattcctacttatccttatgctatatatatttcccttaaataatttagcttctgctgaaagcttattacttgatataaactta

SEQ ID NO: 130353 - DNA, 378 bp, Glycine max
  unsure (1)..(378): unsure at all n locations
gatccttagagcgaccgcggatgagcttttgaaaacttctgagagtgatttactcaccaccccttatgacaagctacctcctggagcttcttagaagatcctaagaagctagagcttagctacacatacctttctaatagctaagctcaccttcttgagatgagaagctagaacttagctacacnacccctataatagctaagctcacccccatgacaaaaaccatgaaaatacaaagaaaggtccttactacaaagactactcanaatgccccgaaatacaaggctaaaaccctatactactagaatggccaaaatacaaggcccaaacgaaggaaaaacctattctaatatttacaaagataagcggctcatactt

SEQ ID NO: 130354 - DNA, 414 bp, Glycine max
  unsure (1)..(414): unsure at all n locations
caattctgttcttagaaatatgacctaagagtttatgccataatgatcctgagtttgtattatcaattctacacttagtaccatgcaattctgcattaaaggattcaccataggaagctacaatatcaagtaaatatagattatcattaaccaagagtgaaccagtttcaacaatatctgaattaaaagacaacctgaacacattgtttccaaatgaacaaaaataacccaatttgtccaaataagaaaatgaaaccaaattccgtctaaatgaaggtacaacaaaagtgtctttcaaatccaaataaaaactagtacgtaataataatctaaagtgtcctatagcttccactttcactgatttaccatctncaacatagatccatctnttagaatcaattgacttctggtagc

SEQ ID NO: 130355 - DNA, 316 bp, Glycine max
  unsure (1)..(316): unsure at all n locations
cacctgcngcatgcaagctcgctcacactaagcgcaaagaccccttattgattggctgaattggttagctaagtgcacatcgctgcgctaagcccaacatcttcactgtaagttgcaccttaagcagtgggctttgcgtggatgatgcgctaagcgccactttctctctgtgaaaatttattatagctggtctaagcgcgccatcctgtgctaagctctagaatcattctggtagttgagctctcaagctgggcttaacgggaaaaggatgcgctagtgtcaacaatattttgttttgaaaacattggaaatgtgc

SEQ ID NO: 130356 - DNA, 320 bp, Glycine max
  unsure (1)..(320): unsure at all n locations
ttaatgaagcttcttaaggaagtcttatgagctgcctcggnaaaaacgctgctcagcctttgttaaccgttggatcttctcaaaatttggtcttcagcttcacaagacacttgtccacgaactgacctctgggattttgagaagattttggattgtgcggaagttttgtgtcgagacatttctacatgacggttaagcttgcttttgtactaagaaaacaccattttcttttctttttcaagccattttacgtccagcctttttctaccacgcccataacacaaaccctgtgtttcgtgcacccacgaagaccttacgac

SEQ ID NO: 130357 - DNA, 307 bp, Glycine max
  unsure (1)..(307): unsure at all n locations
tctgtgcaatccctgaataattatttgatgatgacgactatgaactgttcggttggcttcatccggtgatgctttctggtatacctccgactggtaatctttcttggccgatgtcgcatcggattattttcgatcaatgtttgtaatggagtcttttctctgttgagggcagatacatttttgtttgcctattcaattaccgcagtccaatgtcacccgaaaagaacgtcagatgagtgtgcacgatataccatangcgaccttgacggaaaacattttgagcgacactgaataatataacatcctc

SEQ ID NO: 130358 - DNA, 384 bp, Glycine max
  unsure (1)..(384): unsure at all n locations
taaattttataacttaatgccattaacctatggaattaaaacaaactatatggctgagtgtaactgaaattgttggcaaccaaaagtcacccccaacaaccaacaagtcagccaccatttggtctcccaaaaggctgatgcctaggttgccaattgtgcccttattacaacttgaactaaagcccttntagttgattaacccaaaacatatttttggtcagccaactttacaaagattgggccattatttagacaaactaaacactctaaaattgaaataaagtggtgtcatttagtcctccatttgggccatgatacatatcacaaccttggacagcacttgttgaagagcttccttggctttccttgctctagcgcttgtca

SEQ ID NO: 130359 - DNA, 453 bp, Glycine max
  unsure (1)..(453): unsure at all n locations
tgcagctttaaggaactcctttctatttttgagctgtgtacacttatnggaaagttgatgaatgaaagtcttatgagacacaattcaaagttccacttctctccctcttttattccttcaatttcgtgctccccccttctctctttcttttcctccattaaagcatcatcttcaagcttcttatccaaggcacattcttggtggtgaagctccttcttccatggcttattccctagtggatggtgcctcccctctcctcttctcctttgccttctgctgcatctccatgatggaaaatcaccattgaaggacctcattgaagctcaaagatccagcctccatagaagctccacaagcaagcttncatcacaactaaactattataactattaatagcagttacctaaccactttctggtggatacagtggcctcggaataataagaagggggg

SEQ ID NO: 130360 - DNA, 433 bp, Glycine max
  unsure (1)..(433): unsure at all n locations
tggatttccttttattagggaatccattcttcctaagattgagccaatcccagtcaccctcattaagaactagctctnttcttcctctattgcctttagttgaatacacctttgtttggttctctatttggttcttaaccctctcatgcaacttctttacaaactcttacctagattccccttctttatgtataaaaaaagtgtccagtgagaggggaatgaggtctaaaggtgttaggggattgaacccatagacaacctcaaaaggggactgcttggtggttctttgaacccccctgttgtaggcaaattctacatgaggaagatactcatcccaagacttatggttgcctttcagaagagcccttaaaagggtggataaagacctattcactacctctcgttgcccattngtttatggatgataagtggt

SEQ ID NO: 130361 - DNA, 482 bp, Glycine max
  unsure (1)..(482): unsure at all n locations
ggaccctagatactcagcttgacacattgggaaangggctgtttgttctatttttgcatgcccaatacactcacaccacatagactacatctcatgcacggctgtcagagttattagatctctaggcccacaagcaagctataccacaaatgaacactcttatagtcaaacttagcttacaagactatatttacaattggttgtggcctcataatgcaaaaatatggttgattttgataaactacaaaataatgcagtgctaactatgtataacgtgaatgttcttacttaattactactttttgtcttgtttgctatgctactaatctgaaatgttaaatgatagtaattatggaaataacaagtgaatgccccctctggtctggctcagctccaccatgttcagcataatgggcgggatctcataatcctctctgtagcttccaacactatgcagatcaaggaaactaacacaacttttt

SEQ ID NO: 130362 - DNA, 445 bp, Glycine max
acttagctatatcgttccttggggtattattgatcaaccttttttcatttataccaaggaccaagagaagaaagcttttgtgtgtccttctggggtatatgcctataagagaatatcattcggattatgcaatgcacctcgtacatttcaaaggtgtatgctaaccatattttctaatttggtgagaaatgtattaaagttttcgcggatgacttttcattttttggcccatcctttgatttatgcttgggcaatttggatattatgttgaaaggatgtatagagactaatctcatcctcaattgggaaaaatgccacttcatggttcacagcactaatccttggccataagatatcttcacgaggaatagatgttgatcctgcccacgtagaggttattgcacaacacccatcaccacctgggtgttgtgaaacgggtataaaa

SEQ ID NO: 130363 - DNA, 237 bp, Glycine max
  unsure (1)..(237): unsure at all n locations
tttttttatgncggaaaatagatgacttcaactatcaagactctcttcttagggcttaagtggcagtttctttaccatcctgttaaagctattatacgctcatacaaatcacaattattcttcaaacgtgtgcatcgcccaattagttttggtccttaacacgaatgtcattcatatgatgacttggacacattccaatatcacattattgggtttctcatattgggtcaataaact

SEQ ID NO: 130364 - DNA, 350 bp, Glycine max
  unsure (1)..(350): unsure at all n locations
cactctcaatactcaagctacagaacaacaacaggantngngctattgctttgccgcatttatattgtgactctccctctttggccaggacttatttgcttcctgacctttgggagcatgagttccttcctcaccttctcatcttaaaatttggtatgccgaggagctcgacgcagtttcggcctcaatagaatgtcatggtgagaaggacaagataaggataactttgaccanggtgtttggaccaaggtggacacaggaactgctatgttggctttgtatcacaaccagggcttatgttgggcaatgacctccttcctatgcttttgcttcaaccactgcaatataaa

SEQ ID NO: 130365 - DNA, 257 bp, Glycine max
atcacgcactcaaataaaggggcaaccgccactatgttggtaaacaataaagctatcactgttccttgatttaatcagcaattcaattgtcacggaaaattcctatgtccatgggcgcccttgtttatatggaagcctctggtttacgaaacaatggtttaatgggtgagcttccttcttctttgcaaaatcgccccgtatatttatgctggacctagatgaataatatgcatatcaggtcccaataccattaatgg

SEQ ID NO: 130366 - DNA, 324 bp, Glycine max
  unsure (1)..(324): unsure at all n locations
gaagcatacatgcttactacacttagagaactaaatcttaattcttttggtggagaaatccattctaacgtagggatgcttacaagcttgctacattatatatcttcgagtgggagatctcttcttcttggagaaatacctcttgaagtatggaagcttacaggcttacgatatctagatctaaaggataatgtggctattcatggagagagcccttatcactttaaaaacctctcacaactgcaatatctttgtcttggagaacataatctntccggaccaataactttccgggttgggaaaatccctatcttgtctactctt

SEQ ID NO: 130367 - DNA, 326 bp, Glycine max
cataatgttatctctattcacctactcagacgcacaaagctaggataacaaatcatgaaatgcggataacttaacaacttccctattgatcctacaaagatccaagttcggattcaatgtgaggtgaatatgtgaaagctttgcatataacaatttgcactgtgtggggatcaaaattagcggtacttttaatataattgatagcatacacaaactgcgaaatacacacttgagcgcgcatgcatacctttttatgaaccatgtacatacatctcttcctgttgacgagagcaatgagatgcatataggatgtcgagatacaaaaa

SEQ ID NO: 130368 - DNA, 416 bp, Glycine max
  unsure (1)..(416): unsure at all n locations
cgcactcttnacactaagctgtccacnaaatagggttttgaaagtgtatcacttcaatttcttattaagttaaatgggtcatttttaaggtccaacgccttataatgatcacctttcaagtaaaaagaatcacttgattcacgcataagaaagaactacgtaggtttgattttctcatcccaattgaggaatacgtaggagcaaagggaaacacccttgtcgaccacaaaaagagaaaaaatataaaaagggtataaaggatataaggacataaaagggaacgtaaaagtcaaagtcatgtttgcacattcgattaaaggctgctgtcccttgtgacagatgtgtggggtgctaataccttccccgcgcgtaaatacaacttccgagcctttcaacttaaggttcgtagatcgcgt

SEQ ID NO: 130369 - DNA, 273 bp, Glycine max
agcttctcccctattttcctataaataggtttgagaagtgaaggaaaaaaatgttcagccctaatggtaattcgagatcacttgaaattagtgaaaaaaatgtttccgtgaagaaaatctaagccgaggcgctttcgtaacgtttccgtgggtgatttcgtgaagatttcaaccgttcttcgacgttcttcattcgtcttgcgtctttgcgtcttggcttaccgaaatcctgaacgacttcaacatcatggcctagggcctatgttaccctta

SEQ ID NO: 130370 - DNA, 383 bp, Glycine max
tgcagcttacaagaagcttcataatatttttcttatctatcctaaaaaatgatagctgtttcaattggaaacccaagattgctaaccagacctttaagtcagatcccatcctttattgcttctattagagcatgcattctacctttgtagtggataaaaccacaatgggctaaagagtttccttcaaactatcaagagagttgccaatgatgaatgcgtaccttgtcatagttctccttgcatccaaatctacagcatagtcaaaatctaaataaccagcaagagcacaagacgtgtttccatggtagacaagtccaatattagttgtacccattagtacccaaatatacatatcaccacttaccaagtggtcgaacctaccc

SEQ ID NO: 130371 - DNA, 420 bp, Glycine max
  unsure (1)..(420): unsure at all n locations
tatagaagctagattgattntctatggttcanatttcttgttcttgaaccatgaattgtgttgagtttaggttcctttgagttttacattgtcaatttttttggctgaaacctaaaccataaaattcttacaaaaacattaaagtagaataaaacctcaaaaatctagaatgacatattcacctattgtagttntgtcataaaattcatgtctagtcatgaaacttgtcacgtaagattccttatgttgtgttgaattttatttttcttgtttcttttctaactcatttgttcatgagtgtatgaaatttttntagcctataatttgatttgagtcacatcttgcatgttaattaagccctaacatgttcgtgcataattcttagagagtctttgattgtgaaccttttcttgaactttt

SEQ ID NO: 130372 - DNA, 396 bp, Glycine max
  unsure (1)..(396): unsure at all n locations
atctaattaggatttatgttntttttttttatcttgaggtatcaccataagctttgatcacgtgagttggttatgagattaattaattattgatttgaaacttagttaaatttaaaggtcaccatccctctctaaaaatttattttgtgaaaaatgaacctaagtcatttttctcaaatttatagtgttatcaattgaatatattattacatatattaaaattctatactaaattataaataattattattgcattaaaaaaatgccaaattatactcatatgaagaaagagcttgagattgcaagaagatcaattgtagtttaatccatacaaataatagctcttgtgattatcttgtaaagaattgtagctctttctatacatctttgtttgag

SEQ ID NO: 130373 - DNA, 395 bp, Glycine max
tttgctcatccagtatcacatcaacatcaggaatatgaagagcatgataccaagcattagaggagaaagaattgcccgtagattctcaacatacccagtttctaaactgtattgatctaaccagtataatgagtgaaattcagtagttaaagcatggattaaccagtcaactcttggccagaaattggcataattctccttcaaaagcatggattttaattttaggtgataggattctattgcagcatgtggctcaagagttgtcacagagagtgattttatggcattaatccacatatttgcatgagaagcacagtaatatggttattcaagaaacaatattaatgcagaatactcatatgactggatagtccactaattatgatgacaataaa

SEQ ID NO: 130374 - DNA, 471 bp, Glycine max
  unsure (1)..(471): unsure at all n locations
actcagctttacagtagctgcagctgtcacttgcagctgggtcactaactcccacactcttttctcactttaccgagtacaatactcacatattgcctgcttagtctttgtaataattgatattataaattgagagccagttttgtggcttacgggtaactatgcaatttcatgatgtaaattgaaactaaatagggagatccatttattttcctacctgatcattctctttagttntgcctatcctatctatcattttttaagcattcattggatattgtctgctagtcttccttccatgcaatagtgcataactgcatatgcttattagaaatccagaatccctgnattcttgctgcccctgttgtttgttgagttacactcctaattttcaagtttctctgaatcagtcttttgcagatcctgttcttatatgctttcttgtaccaggacttctggattgataattct

SEQ ID NO: 130375 - DNA, 367 bp, Glycine max
  unsure (1)..(367): unsure at all n locations
agcttcctcttattagtgcacagttccttcattaatttggcatatcttggaaattgctttattgcatccagcagaggtatgtttacctctacttttntgaatgtttccaagatctctttctctgcctcttccatttttttttggtggaaactgctcttggagggaatggaaaaggagggatgtgctgcttctgcaaatcagaactaccagtggaagattcacctgcacaaaaattgttaggtaaatttttgtcatcacctttttctggagtagagtgaagtttggcaggttcagttgcagatgaggaaggtgctacgggttgaggtccttgacactgctttcctgacctcaatgaaatggcactaac

SEQ ID NO: 130376 - DNA, 444 bp, Glycine max
  unsure (1)..(444): unsure at all n locations
tacggaccttaaaactcaagctgangattatggggtatccatcacatgtggtactaggtggcggtcgggcgatggtgcacaacaagttttccacattcacaaatcgcgcataaacccaccatcccctgttgcccacctccaactgacctcacgtactcccacgtagcccatatcctcgtttctctcaacaccgggtccccatcaatcctcccaagcttccccaacatccaagtaactgaacattccaacaacacanactatcacagccaagaaaacagggcaaaggcagaaaactctgcccaaagcaccaacacagcttttctcacttaaagaccccagtaacaattccttcgttccagttcgttaaccgttggatcgactcgaaacatttactggaagtctctagtacataaacctacattttgacccgtgtgatctactagc

SEQ ID NO: 130377 - DNA, 452 bp, Glycine max
acctgaggctgcagcttctatagaaccacgggtagtttcttatgaagcctctaatgaagcttcttaaggaagctacatgaagatatctcgggaaaaacgctgcccagcctgtggtaaccggtggatcttcctaaaatctggtctggacgttaataggacagatgtccacgatctaaccgttgcaattttcaatacgacgtctgacatgtgaggaacgcttcctttcccgcaagcagaagcacttgagtgattcagcctttgcttctcgtgtaaccttggaaaaatgccattttcctctgctttttttttccaaaaccatttccaacattgcaagttctttcttcattacccacagtcaccagtagccactacagattgccattggtcttccgtgaaacccacaccgggaggaaccctttaacctaagcggaatcttccaaacttgtcctacg

SEQ ID NO: 130378 - DNA, 473 bp, Glycine max
  unsure (1)..(473): unsure at all n locations
ntaaagcaagccagagtaagaggacatctgatcaaaatatatgcagacagcctgaatgagtntcttcagactccagtggtattaaaggagggggaatctttacccacatactctagattttgcaggttgaggtctaatcctcaagagattgaagctaggctctatattcctcgcaacaggtttggtttgaatgctaagggccaaccatggaaacaccttagaaaggatctgcctacactagctcagacatggagtgtcttctcttactccaacttagctcccacatcccacacctcaaatttgaacatggatagagccaagttggtttatggcttggtaacccacatggatatgaacattggcgccctgatcttaggtcaaatctcttctattgctcatagtaactcctttaggcttggatttccagccctgatcactgccctctgtagagctagagggagtacctctgatag

SEQ ID NO: 130379 - DNA, 364 bp, Glycine max
  unsure (1)..(364): unsure at all n locations
agtcacctgaggatgcagctttacaaaaggtcatattgtatgttaaatatggaagtaaccatcctgcanaattggggcaaaagatgaatcgagtcacatcactgcttcgtctactgccaaacatatttaggattggtgatgtccttgttacttccagtttcaccttgacaaagatgtcatggaccatgttgaaaatctaaattgattcaaccccatatcctgcgtaaaaattcgcaatacttcgactgtacatcattcgcatgcatccatgcttttcattggttgcattgctcgttgcattctttccttgaaaaataaaataaaatgaacttaatcaatgttataaaaaaagaaagggacacgc

SEQ ID NO: 130380 - DNA, 453 bp, Glycine max
  unsure (1)..(453): unsure at all n locations
ctcagctgttacccatgttgaattgcttacatagagctgtttatagcaccactaattggtctccttttgaagatgtttatggttttaatccactaactcctcttgatcttttgcctatgcctaatgtttctgtttttaagcataaagaaggtcaagcaaaggcggactatgtgaagaagcttcatgagagagtcaaagatcaaattgagaggaaaaataaaagctatgctaaacaagccaacaaagggagaaagaaggttgtcttcgaacccggagattgggtttgggtgcacatgagaaaagaaaggtttccggaacaaaggaaatcatagcttcaaccaaggggagatggaccatttcaagtgcttgaaagaatcaatgacaatgcttacanagttgagctgcccggtgagtataatgttagttccaccttcaatgtctctgaattatctc

SEQ ID NO: 130381 - DNA, 348 bp, Glycine max
  unsure (1)..(348): unsure at all n locations
agcttgaaatcatgatttgggaattgagtttctactgtgattcagagctttgcatgtctagggtttctagagagagaaaggttcacgttctagagagttntgagagattctgttgtgtgaagatctgcagagaccagagcttgaagcangagccagtttgagagcataagatgagcttgtgagtaattgtgagatcctagaggtcaaggagacatcctcaccgcttgaattttgcaatctttcatctattctctctttgtgtaagaagctcctgtatggaagtaatccttgtggactcctgagtactgagaattattcatcattatgatgttgggtcatggcactgtt

SEQ ID NO: 130382 - DNA, 472 bp, Glycine max
  unsure (1)..(472): unsure at all n locations
tcagttaagttgtgtttaatctttttgcaagatatattttgattgaatgaaaggtcatttaaggcgttgaaccattaaacaatctttcggttctttttgaaaggagagaaaacattaaggcattggaccattaatgatctcttattattnttgaaagaggtaataaagctacatgttgattttatgcctttagaaatctacgtttaaccaataaaagtggaaaagaccatttcaaggctgtcgcaacctacccttcggcgggagggcgacgcgtgactcgcgggatgcgtgttccacgaaaggaatacgcgcggagtcgccaccaacgtttatttgaggaaaacgtcggaaaaaccggaaaagacgcgatctacgaactctttagtgaaaggttcgggagttgtatttacgcacggtgaaagtattagcaccccacacgcccgttccaagggacggcagcctttaatcgaat

SEQ ID NO: 130383 - DNA, 357 bp, Glycine max
atacaacaagatggggtaatgtttatagaagcctttgatatgcatggatgggatatttgaacaccaagaggaatccctaattgggggtgaaggtaaatatgtaaaaccatatcttcgcaaattgtgttaatgcccaatatttggacatcaagtgtacatgattgaccacattacaactttcttctcacagcacctatcttatttgggtgttggagtacatgcatatggagcattgttttattacttgcatggagagtcaataactttcttctcgcaacacctctcttatttgaattgtaataactgcactcctatactcattgagagtcaataaccctcatttggatcatgcacatg

SEQ ID NO: 130384 - DNA, 403 bp, Glycine max
  unsure (1)..(403): unsure at all n locations
ctttctgcttttattgttgaccacagagtggtacctggagatatgtcgcggnggtcaagagaccttgtggacgtcatgtggggtgctattgcccaaaaccaagcttgaccaatcccgacccaacccgggcatagtcggtcagtgagaacctgtgatgtacctaaacaggcgagctcctggcagtcaacagataaaagaaacaaagaccacaaagcaaggaggcttgtggtggctggccagctgtgaattttgtgtgatatgtggattatggcctctggtaatcgattaccaagggtgggttatcgattacaaggcttaaaaatgaagacaggaggctaagatggtctttggtaatcgattaccaatgggtgtaatcgattaccacgctttgaaaacgaagtca

SEQ ID NO: 130385 - DNA, 434 bp, Glycine max
  unsure (1)..(434): unsure at all n locations
caagctttataaactacattcagctttgggtctgacgcgaccccctcatttaaccatgggtggcaccttctttaaacgaggctccttgaatcaaaagggcttgccactatctttccttgcttaagcgcaccaaatatcgcacttgaatgaggttggaacaatctttttttaaagaaaaacatcttaattnttattaaatattttagctcatttacttttttagaaaataataataattaaattatgttgggttaaatatttttcgggcctttagtcctgggaagcctaatcaactcttaaagctaataagttctttgaaaacctagtttgtttcttacggtgtctctttttgctctctntgggaactgtgctaccaaaatcgcaaataaaggaggaagatgaaacataggggatcatcatttatgctgcttcta

SEQ ID NO: 130386 - DNA, 448 bp, Glycine max
tccatcgtcatataccatagtgtaataatccattgccattcttcaatgctgcatgcgatcaatcccaaagccttatattttcttattgtacagaataatcgaagtttttaaataaaaaggggcgaaccctaggatcaatattttagttgattgattaaaatgtcaaatgactccactactgtcatccaaaactgtcaggtgattaagtcaaacaaaatgtacactctcagagagtctctgaagggatctgcaaaagataggatgagattgcatgaattatcacgtctttcagaaagagacggtcaatctgtgtttttcataaaaaaaaaagaaaaacaaacaaacaaaagaaatcacaaaagagggaaagaatgtcatgagcattgcatagttttcatgatacaaaaccttttgtatttcaatgctagatacaaagcctacatttact

SEQ ID NO: 130387 - DNA, 429 bp, Glycine max
  unsure (1)..(429): unsure at all n locations
gatctctaagtcacctgaggctgcagcttgagcctaatcctgactaccattttccttgtctattgtgagaatgccaatccttatcctcggaagcaaaaaaagaaggagaaggaaaacttccaatcaaagaacaagagaaagaanatttccatcaaagaaaaaaaaggtgaagcaaagaaattcccaatcaaagagtgggagaaagaaaaaaaggaaagaaaggaaattcccaaccaaagaatgggagaaagtaaaaagagaagaaagttctagatcaaagaaactagaagaaatatgcagagaggtctttggaccggacaatatctgaacaatacagaattgtcaccaaatgaaacaaaaaaaggaaggaaaggaaaccacgacctanaatggtcttcttcctttgataccaaccacaatctgtgcgtc

SEQ ID NO: 130388 - DNA, 472 bp, Glycine max
  unsure (1)..(472): unsure at all n locations
actaagctgtaagtatatacacgacgcttattgcacatatttgttgtntctcggcattgagatttaatagaaacacttggtgagttgccaactaaactgtctactagtcaaccttcatattcttctattttgcaggttacaggttgtaccatctgtggtgaggctcatgaaacaggccattgtattcccattgaagaaaatactcaagaagttcactacatgggaaatcaacagagacaaagatatactcaaggaggattctcaggcttccagcagagtccttataatcaacaaggacagtggagatcacaccctggtaatcaattcaacaaggaccagngtggaccttccaacaagccaattcaataagggcctaacattntttagaggactactaagatgaaggaaaccttgacgcaattcatgcangtgacaatgtcaaatcataaaagcactgagttagcactgaaaa

SEQ ID NO: 130389 - DNA, 430 bp, Glycine max
  unsure (1)..(430): unsure at all n locations
gttggtctaagatttctaaaagctacagttttgaccaatgtattttcgacatgtttagatatatttttcagactttattttcatttcctttgatgcaaatgtatcttctccaagcttgaagtgttttcaacacatttcagtttgcggnggatattagagatatagattagtttaattagttacaaattagttattaatttagtttattacaagttagtttagttaattacaaatttagttacaagtttaattatataagatttcaagtaaaatctgatttgctcgttttaagcattattcaaagtaatattcagnttttcttttctcttattntcatctctctaccttgaacttttatcataaaatgtaattgaactaatcaagatcactagttaattcagctcaaagntntaaaaatgatacacgatcg

SEQ ID NO: 130390 - DNA, 322 bp, Glycine max
  unsure (1)..(322): unsure at all n locations
agcttgtccagtctttccatggccatnntttcacctttagcattttacttaggngattcttcgtcacaatgactggtctttctttcctctgaaccttgagtggacttgttatctataacaacaccctgaggaaacacaaaattactggttaccacatttctccagaagaaaatcgggtggaattggaagatctaagttatgaaaatgccaacacgtccacagatcatgacaagccaaacaagaaaaactttttatcaatctcacatatgaccgttacaccaacacaaacaaaatcaaagtaaatttcacaatgaaacaagga

SEQ ID NO: 130391 - DNA, 473 bp, Glycine max
  unsure (1)..(473): unsure at all n locations
ctaagctngtagggtaaagtctcacgattgtcatgtgctcatgctttaattgntagtttgtgctatacnagacatcttgccaaacaaagtcaggttcacaataactcgtctgtgctttttcttccatgctatatgtagcaaagtgattgatccagtaatgtttgatgagttggaaaatgaggccgcaattatactgtgccagttggagatgtattttccccctgctttctttgacatcatgattcacttgattgtgcatctggtcagagaaatcaaatgttgtggtcctgtttatctacggtggatgtacccgattgagcgatacatgaagatcttataatggtttacaaagaatctatatcgtccggaagcatctattgttgagaggtacatcgcagaagaagccattgaatctttgttcaaatacttacagaaagctaaagctgtgggcttcctgagtgccgcatgatgat

SEQ ID NO: 130392 - DNA, 306 bp, Glycine max
tatatttatttaacagcatcaaatattaattatatcattgagataccatacgtaaaatcataatatttatgttaatggatcaatttttattgcatacgaaattatattaaggaaacacgtttaactatcaatagttttttaacatgtgatttttaagtcttaattgatagatttttattgcacgggtgtccatgttgaaggaaggtctcatcaaataaggtaaactagttctaaaaattatattagatactaatacacgataatatatatatatataaaagatctatggggcattacttaattata

SEQ ID NO: 130393 - DNA, 155 bp, Glycine max
  unsure (1)..(155): unsure at all n locations
ctcagctgctaatggagctngtctttaaagaaactctttatgttattcttttttactaggggaagcaanctcattggtagcggaaagaagtatagcttttagccctttggtcggagcaaggtcgagtaattggtgctggataaggtaactaatcg

SEQ ID NO: 130394 - DNA, 270 bp, Glycine max
  unsure (1)..(270): unsure at all n locations
agcacctgagtgagctgagaagggtccataatgtggttggtggacggcgagggcacaaaagttttacatccaaaatcgcgcataaccatcatccctatcgcccacctcaattgagctcacgtactccacgtacccatatcttggttctctcacaccgggtactcatcaatcctccaaagcttncccaacattcaagtaaattaacattcgaacaggacaaactattacagccaagaaaaccgggcgaaagcgcaaaaccctacctaaaac

SEQ ID NO: 130395 - DNA, 309 bp, Glycine max
  unsure (1)..(309): unsure at all n locations
cactcagcttagtagcttatatcctaaacagatggtcagactgttcanaccattcttactctagaagatntacttcgggtgtgtattatagagcaacaaggcagttggatggaatgtttgccaatgattgaatntacttacaacaacagctaccaagccagcattggtatggcaccttttgaagctctatatggacgatagtgcaaaactcctctttgttggtacgatgatggggaagcaatacttcttggacctaanatgcttcaacaaattactgaacaagtgaaattgattccagagaaaataaaa

SEQ ID NO: 130396 - DNA, 222 bp, Glycine max
ctctgagccaattcaaacgacgataacgttttactcggatgtctgattgagtccccgtcatatacccgaggacgctcgaaaattgaatggttgaaagcctctgagcccaatttaaacgacaataactttttactcggatgtctgattgagtccccgaatatatcgagaccctcgaaattgaatgttgaagctctgagccaatcaaaacgacaataacctttt

SEQ ID NO: 130397 - DNA, 394 bp, Glycine max
  unsure (1)..(394): unsure at all n locations
ggacactatgaaactcagctaaacattcactntcgagcctcacgattattacgggatcttttcaaacatccgagaaaaaagttattgtcgtttgaaatggctcanggcttcaactttcaatttcgagggtttcgatatattacgggactcaatcagacatccgtgtaaaatgttattgtcgtttgaattggctcagaggttcaacattcaatatcgagcgtctcgatatgttacgagacccaatcagacatccgagtaaaaagctattgtcgtttgaatttgctcagagattcaacattcaacttcgaacgtctcgatatatgacaggactcaatcagacatccgagaaaaaagntattgtcttttgaatttgctcagaggttcaacattcaat

SEQ ID NO: 130398 - DNA, 323 bp, Glycine max
gagagaaagagagaggggggagcacgaaattgaaggaagaaaaagggagagaagttgaactgagttgtgtctcacaagtctcattcatcaaaggtacaacaagtggtacacatgcttctatttatagactaagtagcttccctgagaagctttcttaagaaaacttgctcgagaagcttctttgagaaaactttcttgagaagctagagcttatctacagacacccatctaaaaactaacctcacctccttgagaagctagagcttagctacacacgcatctaataactaagctcacctccttgaccaaatgcattgaaatac

SEQ ID NO: 130399 - DNA, 371 bp, Glycine max
  unsure (1)..(371): unsure at all n locations
tattcgttgaccacagagtggtacctggagatatgtcgcggnggtcaggagaccttggggatgtcatgtggggtgctattgcccaaaaccaagcttgaccaatcccaacccaacccgggcatagtcggtcagtgagaatctgtgatgtacctaagcaggagagctcctggcagtcaacagataaaaggaacaaagaccacaaagcaagggggcttgtggtggctggccagctgtgaattttgtgtgatatatgggttgtggctctggtaatcgattaccaaggatgggtaatcgattacaaggcttaaaaatgaagacaggagactgagatggtctctggttatccattaccaactgggtggtaaccaata

SEQ ID NO: 130400 - DNA, 168 bp, Glycine max
  unsure (1)..(168): unsure at all n locations
atgactcttcactgagacgtctgctctagattaatactcttgtccacgcctactgaaattgtaagaagaagcaacctttaagaatcgcccagcggtggagagatttggcggcacaagtagctcctcccatggttgagagagagatngaatcaccatgtatggtagaca

SEQ ID NO: 130401 - DNA, 468 bp, Glycine max
  unsure (1)..(468): unsure at all n locations
ntgaatgctctattcaatggagttgacaagaatatctttttactgatcaacacatgtacagtggccaaggatgcttgggagatcctgaaaaccactcatgaaggaacctccaaagtgaagatgtccagattgcaactattggccacaaaattcgaaaatctgaagatgaaggaggaagaatgtattcatgacttccacatgaacattcttgaaattgccaatgcttgcactgccttgggagagaggatgatagatgaaaagctggtgagaaagatcctcagatccttgcctaagagatttgacatgaaagtcactgcaatagaggaggcccaagacatttgcaacatgagagtagatgaactcattggttcccttcaaacctttgagctangactctcngatagggctgaaaagaaagcaagaatctggctttcgtgtccaatgatgaaggagaagaagatgagtatg

SEQ ID NO: 130402 - DNA, 311 bp, Glycine max
ggcgcatatcaactctcccacttccacaaatcaaacatgaacacaccatccccaggtgcccacctgcaactgagctcacgcactcctacgtagcccttatcctcgttcctctcagcaccgggtccccatcaacccctccaagcttccacaatatccaaaccattcaattccaaatatcatgaaagtaccctaaaccaagaaaacagggtagaggcaggaaactctgcccaaaacacattcaaataccacagctttccttactcatataccccagtaacattctctttgttcatttcgttaccattggatcg

SEQ ID NO: 130403 - DNA, 199 bp, Glycine max
  unsure (1)..(199): unsure at all n locations
tctagccaaatggacttaccttgaattaattcctctgattgcccctttgagcctatgttcccctttctttgttttgaagctcattacaagccttaagtgaaaaaccatgatatcgccttacccttaaggaattntggagctttggaattattttgggaataagtgtgggggtgggggtgggggttatttcccttctcat

SEQ ID NO: 130404 - DNA, 403 bp, Glycine max
  unsure (1)..(403): unsure at all n locations
agctngttcttgactcatcttctccttgatgtggcgtttccaatcgcctntctttattctccattccacttacattgatattaaagaagaaaaggactccattaatgaagaagatccaaggcctacaagctccacatggagctacatcaccttcttccttcactcatcttctcctaccttcaaggtcttatccatggcttccaatggtggtaagcatgttcgagactcatcttctccttgaagtgatgtctctaataacctttcctccttctccattcttctgtcattgatcatcaagaagcaaaggacaccattgattaagaagttctgaggcctacaagctctacataaagctacatcatgtggtatcagagcatcttcatctaagggatgctcctttgct

SEQ ID NO: 130405 - DNA, 447 bp, Glycine max
tctcagctaggcattcatatgctgatgaggatgttccatatgttctcaagactggactaatacatttgttgcccaagtttcatgatcttgcaggtgaagatcctcataagcattttaaggagttccatattgttttttccaccatgaaaccccccgatgtccaggaagatcatatctttctaaagctttcctcattctttggagggagtggcgaaagattgactgtactaccttgctcccaggtccattaccagctgggatgaccttaagagggtgttcttggagaaattcttccctgcatctaggaccattgtcatcagaaaagatatttcaagcatcacgcaagtggagagagcttgtatgagtactgggaaaaattcaagaaattgtgtgcaagttgtcctcaccaccagatttctgagtaactccttctacaatatttctatg

SEQ ID NO: 130406 - DNA, 359 bp, Glycine max
ctctgtgtcttaaggtactactcgtacatctttgtttgaaggattgcagacggttatgtactctcttgatattggagtaatattgtgtgcaggaagtatccgatggataactcgccatccttaacttgccaaattggaatgacatatgtcgttagatcacctatgatgtcttgtttccgagggtaatctatatcctttctgatggcataagcatgaaaccaatcaaagaaaatgatattaattttgacttgttcgacaaattcgtagaactggtcttggaatcgtatctggtcggacccttgtaatgttggaaaaaccatttctttgaggtaattctccgagaatagaatatttctaag

SEQ ID NO: 130407 - DNA, 459 bp, Glycine max
  unsure (1)..(459): unsure at all n locations
cttcacctcttggcctctttatagntgatgcatgagaaaacatgctctattgtcatctcccactccaagtaggcctccggatcattctttcctttaaatggaggaatgttgagtttaataccatcaattcggctttgtctaggaacaccatcattccctcttctcctcctttcttcttcattatgatctctattctccatttgatccaacctctcatggagtgcatcatctcgttgtttcattaacctctccaaatgttgcatcaaagcttgcatttggaattgcgaaagccccacttcatcattaggattagtacctgacatctcaaacaaacaaatcaaacataacaagacaattattgttgttgtttgaatacctcacccactcaagtgtatcacacaattatggcttttctctaatgaaacactcttgccttttaccactctaattccccttgag

SEQ ID NO: 130408 - DNA, 379 bp, Glycine max
  unsure (1)..(379): unsure at all n locations
agctaataagaatgtatgaattgttttttcanaaaactgagtagcacatggatttttctataacatgttactaaagagtttttactctctggtaatcgattaccagattattgcaactcgattaccaactagcataatggatttgaaaaagttttaaactaaatttacaacggtccaattaatttcaaaaggttgaatcgattacatgttnggcaatcgataccatgcctttgacgttaaattaaattcaatgtgaaaagcaatgtttcacataaagcttggtgaacaatacccggtttggaaatcatacccaggttgttttaataacaaaaaaggaccttttaaaagtttggcttttaaaaggttaaatttctaagat

SEQ ID NO: 130409 - DNA, 424 bp, Glycine max
  unsure (1)..(424): unsure at all n locations
gcttatgcgcctatntccttacaaacattcttcttgctctagactatttaaccgaaaatgcacccatatacaatcaaggcagcttcgttacctagattatttacacgtacctccaaggtgtatttgttacttacatcacacacatctccttggctaaactcacatacatgcatacttaagcattttggggcaccaaaaattgcacatgtgcacatcttggcatttctaatacctacatacgcaaacttcatgatgaatcttgactatctacacaataaggtgctacatttcatgctccttnnttcaagtttttgctacctaaagtcgcatgcaaattcaagcatattntcctttgctgactcaaaacgcattcacaattacaaggtatattntcttgaatatgtttcttcacataacatgcaac

SEQ ID NO: 130410 - DNA, 470 bp, Glycine max
  unsure (1)..(470): unsure at all n locations
gtgagctaaatatacccattctgtcttttagtttataatgatgctntgngatgcttgggtgctgaaatcgttggtagaaaactgatagagatgaagggtagagttaacctaaggttgaaaagtgagaatgtagtgatatgagtggaaaagtgtgatgctttaagggtttgaaaagctaaatctggatttagtggtaattggaggttaaagtgagttaatcctagtttgaaatgtcatttangactgtgggaaagcttgggctgtgcaaaggaggaaaatgagtgaccaaagtgaaggcaagagccatctatagggtaaattgcgtgttgaggagtcaaattttgattcggtagagttttcatcgtaaaaccagtttgagcgagtttagattaatgttatagacttgnttgagatgagagtttgcttccaaattaccctattctcattttcactttccaaacctttgaaat

SEQ ID NO: 130411 - DNA, 356 bp, Glycine max
ggacttaagcacctgggctgagcttggccaatctactacattttagtttatgaattccaatcaagagaaagcttataaataaaaagagatgtgaaatttccaatctaaggaaaaaggagaggaaaggaaattcccaatcaaagagtgggagacagaataaatataagaaagaatatttccaaccaaagaatgggagaaagtaaaataaaaagaaagctcctgttcaaagaaaccaaaagaaatgtgcaaagaggtctttggaccagacaatatctgaacaatacagaattgtcaccaaatgaacaaaagaaagaaaaggataccataaccttaaagggggcttctccctttgatta

SEQ ID NO: 130412 - DNA, 405 bp, Glycine max
  unsure (1)..(405): unsure at all n locations
tgaagaaagagtcatagatgcttgtataaaanctataatttatagnttgtttttgcaataggnattatggagctcatcacctcacgaacgaattctattaattattttaatacggttaattctttggacataaaacataataacttgcattttacatgcatttgaaggatcaaatcagtataaagtaaaataaaggaggtaaataaggagaaattgtttatctttgaaggacataatgagaaattgttaagaaaataatcaaatactactgcccagttagatactttgacttggtgcccaacagcaattagagtgcatcaacaatttctattttgacttattgtgcatgtgcaacagcaattatagctttcaacggtcaaagttctcactgccaccataactatt

SEQ ID NO: 130413 - DNA, 288 bp, Glycine max
  unsure (1)..(288): unsure at all n locations
agcctgggcatcaatcctgtcattgaacctatttccatcattattctaaaangacacccacccttgtcccctttatgcaacgtgcatttggtccaatagttaggcgtggcgtcctaagattccatttgggagatagggatcaactttctgctgcatatgacctaaaggacaaagtcatttatccggatgtgggtgaagtccacctttgaaccaactaacccatagaccacgtaaggcaacatacataaaaactcgctgatccttcattaaaacaatagggacataata

SEQ ID NO: 130414 - DNA, 436 bp, Glycine max
accatatgaaacttcaaaaacaagaagcattgcaactgcttaagaagaaggagaaaactgaatatataatcaaggttttttcttttacatctttcagattttagcatttaacaatctggatgtatgccaaacaaactaagaaaagggacaaggaaatcaaatcccaaaacaaaatagcaacaggtgactttcaatcataaatgtacaggatttgactcgacaacaaattggcaattgattaattacagattcctctataattattaagaataagtggctcacgatagacaagaagaatacaggtttgaacaactaaagaagtacatgcctatatggtgtccacaattgatagatcccacccagcaaattaatcaaataatcattcaactagtagataagcacactgacatttttcaatacaacacacactaatggg

SEQ ID NO: 130415 - DNA, 295 bp, Glycine max
  unsure (1)..(295): unsure at all n locations
taagcacctgcagctgcaagcttgaaatggagaaaatgagctgtcnactctgtgaaggtaacgagcatctattatacttggttgtgtgtacattttatcatgctaatgttcataagattgtaaaaacacgtatntcttatacaggccactgcatgtattcaaccacaactatggcaaccatctattggaatactgatgactaatgatataagtgatcctaacccacaggatgctggggtatggtctgcactggcaaagaatgacccatatgttatggcctgctttaagggggaaa

SEQ ID NO: 130416 - DNA, 382 bp, Glycine max
cttcctagtgcttaatgatctatatgtgtcatatgtgcaatctccgatgccggtatcgcccttctctcaagggccagtctgcctagcttgcaagtgctttccttgtctggttgttctgatgtatcaaacaagagtgcgcctttcctgaccaaattgggccagaccttgctgggattgaatcttcaaaactgcaattcaattggcagcagcacaatggagttgctagtggagaagttgtggagatgtgatattctggcttaatcatgttagaaactagaaacaaataaaactggctaaatcacggaaggagatagaattgttcaggtcacattcagcatacattttggctgatattcctatcaagggtggattggtggcagtt

SEQ ID NO: 130417 - DNA, 480 bp, Glycine max
  unsure (1)..(480): unsure at all n locations
attcccaaacaaaaagtatatttggcaactcgatcttattatgtcagtctcactacttttcgctcaaggttcttgttagttacctccttatctttatcagcaagagtaggaagatcgatgcaaatctaagagacatgtacagtaaacaatgatccagacaatgtagcagtcatttttaccagacaggtgacatcctcacctttctcctcactgacctgcattgtgaagcaaaaactactagagtgacaataataaaacagaataattctgactttgcactggcaacattattctttttgcactctgcttcatataatgctcctagctacaaagctaactgcacaaaagcagcatacatgtggcaagtctaatatttgatgcagaacaaaccttcaaatatacagaactaaaatagactaagaacaaattaagattgaagaatgaanaaagaggttaagcgggaaaagaggaaaatggaaa

SEQ ID NO: 130418 - DNA, 416 bp, Glycine max
  unsure (1)..(416): unsure at all n locations
acgggatcttaagcacctgcngctgcagctatattacagctaagttttgctatattatcctancaaggagcgcgtccactactactaccacttaatgtgaggcctcccctcacagataggcaattggtttcataaaccctttatgcattagatatacttatgaggctgctctcctaaatggttatgacaattttacaagaaacaaactatatgcacattatgtttgggatgtcaaacctctgaacaaaagcacaccaacatcaccaatggccataatcaaaatcaaggggacggcgaccgatttaacttcacgcatttctcctgtatggtctggacttcccaggcgtgaaccttcttcacagtattcatgcaaaagattgctcacacggtctaattgaggcatgatttgacgtagt

SEQ ID NO: 130419 - DNA, 388 bp, Glycine max
  unsure (1)..(388): unsure at all n locations
aaaaaaattaacttataagttactatcatctaacttttaaattaatttcattagatacttttaatttaatcaattaaataataagtttttagttttttttaactctcatatcataacttacaagctntactaacttacgagttcttaactattttatcagttaattttataaaacacaacatttataggatgagaatctcttttgagtgcatgctatagtctaagcccaagcatttattagacaagggaaggcgatccaaggttttcatccctgcgataggtttaatcctatcgtgggagagccaattaagtgacatacgatggaaaatagatggtagtcgtggaaaactagtgtttcttgtgataagtgatgcaacgaccggagcaa

SEQ ID NO: 130420 - DNA, 337 bp, Glycine max
tcgaaacctctacgaaattcctcacggagacgttaccgaaacgattctgaagcgcctcggctcacattattcttcacggaaacaattttctccagctcatcctaaagagagagaagtgcctaaagggctgacccttttccttctcacttcctcccctatttataacaaaataggggagatgcttgccgcccagctcgcccaggcgagcagggttgcttcctccaaaaacgacagccttctggaggaatattctaagggcccaagtcggctggattctatggcacccccattttactacgacaccccatttgtcttattggtgatcttttttccacat

SEQ ID NO: 130421 - DNA, 238 bp, Glycine max
aatggatgaattactcacgcttgtgaaatataaagaacatgtgtattgatccttaaagggtcaattttggggtattttgtgtgtctttatgaaacacaaatacttgtgcatgcttataatcgagaagttgactgtgttgatggatgatcgaaaccgtacccgaatcaaataaacatttaaatgcagtaactacgaagtgatcctacgacggttccccacgagcaatgcataaccaaat

SEQ ID NO: 130422 - DNA, 370 bp, Glycine max
accacccatggcataagggactgacatcattccaccagctacaccttgaagtgggacatcttgcatgttgcggccaggatggtaacgatagacacgcccccttggaagcatctaacaaacaaataagacagtatctcaccattcaggcatgcatgcagatgagtaacgtgagagacaaacaaaaaaattggaaactctgtgcaagagcagacctgctgctgcatcattggcattggctgctggggttgttgcacatgacctgttcctcggcggccccctgagcgctgcccttgttggccttgctgaaacatatgaacaaagaagcttggcatgggaccaccaccatgtctcattccaagaactagatgct

SEQ ID NO: 130423 - DNA, 246 bp, Glycine max
atgtaacatgaattgcaaaagaacttaaggattctacagatgctggagggaacggcatttttaaatacattcagctcactagacagctacggaaatattcagcctgatgagctacactggcctatcgccaatttaaaacatttgtcttctatgaattgttttcacaattctctttttagccttcagcgttaagatgctatttttacacgatatgtcagaaagggccttcctgaaaaaccctgcttc

SEQ ID NO: 130424 - DNA, 462 bp, Glycine max
agctttagccaatggacgtatcttgaatttattccttagattgcccttttgagcctcgactccctttccttgatttgaagctcactacaagccttaagtgaaaaaccatgatatcaccatatccttaatgaatattggagctttggaattgttttgggaataagcgtggggggtttttgtctcattggataacatgttatgttggctatgcttcatgatgtagtttgggccatacttgatgtacattgtatattggttaaatgttggacatgctgaatgagatgttgtttctcaaaggctacagagcaaaaaaaaatcgaaaaagaaaaagacaagcactaaagctgagtgaatagaatcttaaatgtgcaaagactgatgagactcttggttctactcctttatgttacatattatctttaggtctttttattatcttcattcttttcgtaatatgcactt

SEQ ID NO: 130425 - DNA, 173 bp, Glycine max
agcttatatacactgttaatgtaatcttctgtctcccacaggacagatccaaatgcaacagcttccaagactaccctcctcagactagaaaatgaagttccataatctcatcatgctgagacaaaccaaatttccattttccaaaaatgccttactagaccttttaccaatgc

SEQ ID NO: 130426 - DNA, 299 bp, Glycine max
agttagagcaatattactgcctcttgtgacggtggataacgataggagaatctggtcgagaaatctgttaggagatttttgagtggctagtgcttatcataaattgaatgacaacttggaggttattaacgataatctttggaatcagatctgcaatttgcaggttgctcgtacttttatgtgactcgtcatgtaagaattaatatcttataacaacgagatagatatgttaaactaataaataaataattaataattaaagattaaattataaattgagctgatatttataagatatt

SEQ ID NO: 130427 - DNA, 470 bp, Glycine max
  unsure (1)..(470): unsure at all n locations
actaagcttgccttacggcaactttatagcactggcatgntcttcttcattgcctacaattggaagcaagatgacagaaataaaagccactgacatattcaatgactcagatgctccctgcaagagaccagaaacacaatgtcaatgaatgaacttatgatgcagaatttatggataataggaatattgtgaatgtatgaatacagagttttgatgatgtcaaagtaaaatcaaacaaggttgtttcaacaaacattattgctttaagattaattcaaggtcaaacaaataagatcaagaaaaagataaggtctcanataatctcactggttgattgatatttgccttataacaaattgtttccaagagatcaaaggctctagtattcgattactaggcaatgtaatcgattaccaggagacaagtttacaaatcaacttttataaaagaatttgaaattcgaattttga

SEQ ID NO: 130428 - DNA, 466 bp, Glycine max
  unsure (1)..(466): unsure at all n locations
ntgactgattctcaacactatgaanataatgtgagagatactgcagngcatgtgagtgtgagttgacatagaatatacttttatattgatggtgtttaattggctgtatataaaagtataatgtatggactatactttaagcacattacacccttttttgtctccgtggtactcgcgagaatacacaagtatcgcattccttgtattgagaccgctggctcgaagccagttgtattgtaactgtgaggccatattataatattggacttgcaagaaacttctgagcaaatcctgtaggtgaaaagataaagaaaggttgtttttgtacaattataggggaacaaaaagggattctgtactgtaaagatggttgaagagatgaatacacatgtcttattttggtttcagacctttgaccaaaggtattttcacacatttgccttctctacatgtaatcttctatgct

SEQ ID NO: 130429 - DNA, 381 bp, Glycine max
  unsure (1)..(381): unsure at all n locations
cacgggcactggtaatcgattaccaaaacattgtaatcgattacagccttttgaaaatatttggaacgttgtaaattcagtttgaaaactttttcaaactcattntgctactggtaatcgattacaacaatatggtaatcgattaccagagagtaaaaattctttggtaaaggttttgtcaaaaactcatgtgctattcaaagttttgaaaaaattcttaacctaccatttttagctttcatagttagactttgaattttgtttgaaattntttgtgctatcttctcatcattttatagggttgctcacaaaaattcaaagtatttggatattattttgacggtagctgtaaattcacacctacacctttatttacatgac

SEQ ID NO: 130430 - DNA, 473 bp, Glycine max
  unsure (1)..(473): unsure at all n locations
actcagcttgaatgctgtgaaccttggatcatcaaacatttttttgatcctttgtctacaatctccccctttttgatgatgacaatccctgaaatcaagacaagctatatacaagatgatagcatgttcacacaacccttactccccctatcttttggcatgcatgcctaactttacttaatgataaatttctaattgatttctaacccaagttctctcaagttctctccctctttggcaacatcaaaaagaactaagcaacacaatcaaaattcaaacagagccaaacattaaaccaaaataaatccatacattgtcataaccaaccaaagcaaagtccaaaaatataataatagtgcaagagtacgataactagtgcaacanaaagccaaatacacggcgataaaaacaaaataccaataatacttaattactaataagacttagtcctaataataataacaatgaatcta

SEQ ID NO: 130431 - DNA, 449 bp, Glycine max
  unsure (1)..(449): unsure at all n locations
agcttaataatatatataaaacttatcattttgtaattctttaatacgactattactgtatgtataagattttagattattaaattaacacttttcaatagaaaagacaattataatttgataaaggaacatgtaagtatgtaataattatcaacaaaagacaatttgagtaaataagagtacaattagttctatttttggcttttacctgatattgacacactcaaaaggaagaaatgccaattggttcctctactctccaaatagagacacatgcacataagtgatgagaataaataaataggtatcgaggagctattggctaatgtgtncaagtgaaacaataatcaaggtaactgaagaagcaggtgagacgaacaagaagttgagagacatgagaaaagagacagaattgaattgataggaagagattgaataaagatattttt

SEQ ID NO: 130432 - DNA, 360 bp, Glycine max
agagatgaatgtggtgttgaatgtttcggtgtgtaaggagttgtgtgggttccgcgaagatgtgggagtaacgggtaagcaccgaggtgatcacgggtgatatgggagcaggggacgaagaagaaggtggcgaagactgaagtgatgtggtggtgagaaggaagagggctgagataccctgtgtctgggtgagtctttttaattgatgggctgaagctgatgaacgtgtggggggtgcatcagcattaagagtgatacgttggcccaagtgggagataagtatggttaacgtctggtaattcgtggttattgggccgagaagttttatccactgttcgcccaattccatgtccgccccgc

SEQ ID NO: 130433 - DNA, 476 bp, Glycine max
  unsure (1)..(476): unsure at all n locations
tcaagcttatagtgcgggtctgggagacgaaggtcaagtggtctctatatgtgattatgatgttccaagaactctggatttggtccgaccatgccctcctgatttccagctgggaaattggcgggtggaggaacgccccggcatttacacaacaagcataatgtaaacctttacggttttaaaagctctatagttgggcctaggctttagagttttcattttgttaaggctttgtgtcttttgtctttgagtttataatacaaagatctttcttcatctgttcctggtctctacccattctcattcatttgcatgtgtacttctttttctgaaacggcagatccgatgacgagtcccccgaaagtactaatacctgngacccgtctatcaatttcgagccagatatgaaccaaaccgaagatgaatgagatgacggggtgggactttcctcggaactataaaggatggttgccatg

SEQ ID NO: 130434 - DNA, 347 bp, Glycine max
ttaacgtgagaacctaaacatgatattgccttgagaaggaaaagcgtcaaggctaatgacgtcaaagaagcgcttcctaagaggccattcatttttaagctttggagggctgttttacatgcattgaacattagaacttgcttataaaccttacatggagcatttaaacttcctttaatggaaatataccgtttaatttttggaaagactagtttacctaaaaaaatctttgaaatagtccttcctaaggtggctttcgtaagcattcactttgccctactcagttaaggcttacacccccgcgcccgggggtatttcctaacccccagggggtacccaacattgcg

SEQ ID NO: 130435 - DNA, 288 bp, Glycine max
  unsure (1)..(288): unsure at all n locations
ctaagctngtaaagaacttagaaaaatcaagaacaagcttgttctgcacatcgccttttgtatgatattcactccacaacgtttgaagtataggagaccttcaaccctataacgcaacgtgacggacaaaagtgggcagttaacttgaatggccgctattgtcaatgcagaagatattctacgctccactatccatgttcacacattattgcagcttgtggttacgtgagcatgaacaattccaatatatagatgttgttacatgaatgagcacatttataagcatac

SEQ ID NO: 130436 - DNA, 218 bp, Glycine max
ttctaggcctgccaaatctcagtcaaatatttgttttcgaaactgatgcttaggaagtggcgttggtgttgtcttgagtcaagatggacagcctattgcatttttctccaagaaaataatcccaaaaatgcagaaacaatcaacctatgcaagggaatcccttgccatcatagaagctatagccaaaattaggcactacttgttgggacacaggtttt

SEQ ID NO: 130437 - DNA, 376 bp, Glycine max
tacagttgtttcattggctctaaagcatgttacatcaagttttactggatccaagataatcttccattttcatttgaattacacaactttttcttctatttgtgtagaacttttatgcaccataggtttaataaatgggaaaaggcaaaatgcttgtatcacacttgttaaaaatacaaaaaatatatattatacaaaaagtaaagctttttatgtccctaatataataaatgttgtattattaataaaatgctttcttttctaaaaaaatctaaataaatgcccttgagatacttgttgacatgaataacgtggtgcaatcttcatgttctttgatatgtgcatcatacctcagaattcacttctgtttcacatg

SEQ ID NO: 130438 - DNA, 411 bp, Glycine max
cacctgcggctgcagctctcttctttctttttgggttggaggaaaacaacatggcaaccctcctggtatctgagattcacttaaaattagcgagaaaaattgcttccttgtaaaaaattcaagccgaggcgcttttgttacgcttccgtgaccttttcgtgggtgatctcgcgaagattttcaaccgttcttcgccgttcttcggtcgttctatgtcgttcttcaatcttcaaccggtaagtccctgaaatcgaacttttcaattcattctatgcacccttagtggtcctcattcggtttgcgtgcttttattttcatttcgattactttccgtaccaccttttgacggctttatcattttttaaggcttttctcccctataaaaataaatcatctcccccgtcattcttt

SEQ ID NO: 130439 - DNA, 471 bp, Glycine max
  unsure (1)..(471): unsure at all n locations
actcaactataaaacaaatgcctaatcatttctaatatgcatgtgaattangacgcatcaacaagaatcaagccaatgctattgtgcaagcaatcaatggggcaaaacacaccaaatgattataatgatggatggctcaaattctcacataggtaaaatcatcactttcaaattgagctttcaaaactatcatgacatgttgagaagaatcaaggatttcaagtcacaaaatgtcaagaacttttattttcaaaacaattacccatttcttgaacatatcctataattcaaagaanaacatgcaaagtcctacgtgcacacaaaattgacccaaaatattaaactgaaaatccgaccaaactaacaacattaacaaattaacacaacttacaaattaacaaaaccaacaaaactagctaaaccatagaacactcctcccctcccctccatactaaacaacacattgtcctc

SEQ ID NO: 130440 - DNA, 352 bp, Glycine max
gtggtgctgacttaaattgaaactgttggaatttaaaagttgacttaagagtttgataacaatttaacatgtagtcttaaaatacccaccacaagactgatatttatttgacattcttctatcaggtgtggttcccatttatggctattgttgggattataatctgtttctattttattattgccttcttttaaatggaaggtcaattccttgggcactagtatgaatactgccatactacttacgcctattatttgacctcataacaatttgttaccttgtatatattttgctagaggctaattgttattggtatagcgcttaaataatggttctcttcatgtaaattgca

SEQ ID NO: 130441 - DNA, 476 bp, Glycine max
  unsure (1)..(476): unsure at all n locations
ggacctcagaaactcaagctttaaccccttctaaatgataggttctgaatgcagatgtataagcaataatcaatttaataatgttctntaaacatgcaagacaaaatttattgcaataataaatgagataaggaaagagagaaatgccaacttgatttatactggttcgaccacttcccgtgcctacgtccagtccttaagcaacccacttgagatttttcactctctttgtaaaaatcctattacaaagtctgaaccacacagggacaatccttcccttgtgttcagcaattcttacaacttaagagaccctcggtcctttaatcaatctctttgaataagaagaagaagaagaattctctctttatgagaaagatattacaattgaagttcctggatgaactcttaatagaattacaagtgtttgcccaagagttttgagagagcattgacaatgaagtctctagaatatctct

SEQ ID NO: 130442 - DNA, 121 bp, Glycine max
cttagcaccggtcacaaacctggatgtttttgttatgaagcagggtgccgaaattctctaaatcttcctcccatgaggctgagccaaaattgaatgactaatcaaattattacactataaa

SEQ ID NO: 130443 - DNA, 142 bp, Glycine max
tctacctcgagcaaaaaagggaaggaattcctcaaaggaccaaggaagagaatttcctccaagaaaaaagagaagggattccctctcaaatgggaaaccaaaaaaaaaaaattcctctaatgggaaaaaaaagaaaaaaggg

SEQ ID NO: 130444 - DNA, 244 bp, Glycine max
  unsure (1)..(244): unsure at all n locations
agctntaaaatttgaattaaaatgttcaatttctgctttgttatcgataccatatatgtgtaatcgactacacagtgccaattttgaattcacatttaatagctgttgtaaatcagttttggcgcctgggaattcaatacattttctgggaattcattacccgaagagtaaattgttgaaaaatactttttacctaaaattctttggccaaacctttgcttcttccattggaaatccctttcta

SEQ ID NO: 130445 - DNA, 415 bp, Glycine max
  unsure (1)..(415): unsure at all n locations
ttctcatgctatagtcctttganaactcttgtataagggaaagggaagaatcaaaagaactctcagactgtgtcattttgaattctttgacaagggagaagggagacacaaaagaattcaggcggttggtcctttgtttttttggacaaaggagaagagagacacaaaaagaattcagacggctagtccttggtgaattctttttgcaaagggagaagagatgaaaagaatgaatagcacaagttttcaaggtttagaaaaccagaaaactntggaaagcttttggcacgaagaagaagaagttccaagagattcaaggcttcgtaagaattgtaatgaattgattgaattgttagatatattctttgaaaatgcaaaacatagcctcgcttttatagactcttcatgtctggtc

SEQ ID NO: 130446 - DNA, 289 bp, Glycine max
tttttttttcctccttgcgctcctttttacttcggtaaaaattgttcattagtgtgggttagcatatcaacttctagaaaataaactacgcacaaaatgctcttatttttatcataatataatttattaaaaagaaagaacaaaattccaaactgaagcattgtgttttatctcaaagagaaccattattgggattcaacattcaagataagccatgtcttatctatctttccaaaaacttttttgttctgaaaattaaactccccattatacacaaaaaaactctgtt

SEQ ID NO: 130447 - DNA, 110 bp, Glycine max
agctagtctcttggatgacaactattggttttacaggaatccacctttaaccttttcttgtatgtgatagtgggttagcgcgccaataagttgttaattagtcaaaaaat

SEQ ID NO: 130448 - DNA, 409 bp, Glycine max
  unsure (1)..(409): unsure at all n locations
gatattccttatttaaaaagtctataaccaaagaaatacaaattgaaaatttgaaaaagtggaaacattatatccttcgagcagntctaccagtactggtcatgaaagccgtattaatcttaataggagctatctangaaccactcagagaacatcacaaaacataatagttaatatacacctgacttcaagggaattgttaattactagcctattaaaccttattgatcttcaaatccctaatgttaaacccaaggaataagatcaagataaattatataaaccaagaacaagtagcaaatatctagatgacttaccaatgtcactccttctntagagagttcctctaaagcttcacgatcaannaactttccatcaagtggtgtttcatcaatctattgaatcaact

SEQ ID NO: 130449 - DNA, 346 bp, Glycine max
  unsure (1)..(346): unsure at all n locations
ctgcaagctttatggttcaggagagaaaccttgttcttccatataaaacaaaagtgcggtatatctttacattctcttctccctatgccgagagaactcaacanagacacactcgcctgaattctttatgcgtctctcttcatcccttttacaaaagaaaagaggactaactggctgaattcttttgtgtctcccttcttccttttcaaagaatacaataagacacagtctgagaattctttcgattcttgcctttcccttaaacaaaagatttcaaaggactaaccggctgagatatctgttgattcccctttcaaaagttccacatgactaaccgccagagaac

SEQ ID NO: 130450 - DNA, 220 bp, Glycine max
  unsure (1)..(220): unsure at all n locations
tctgacgtgtcaagtgaaggaaatcactgtattcgacaactctatcctttgctgaccgctggagagtgcattttagatacaccttacgctttgtccgttgctgtatgagtgtgccacacatgcatagtactctgcatacatgtcactcgtggagtgggtacctactanagacatgatgcatgggtgagtggggctgtgcattgggccaacattacgaaat

SEQ ID NO: 130451 - DNA, 406 bp, Glycine max
  unsure (1)..(406): unsure at all n locations
agcttggcctgtancagttgcattaaatttgtatattttttatcttagttgaatatgggtcctttaattcatcatataaagcatcttatcagtcttggaagtttactcttgcaggtgggatatgtctgtgtgcactataacatcacattggtcttgatttcttctgaaaattattcactataagttcaaacattatagaaggtcagaaatgccaggtataagaatatataagttaaagacgactgtcataatttctatgtgctgtactaagtcagacaaacaaggaaaataagaacactaattaataagtgggtctaataaataataaatatattaatatcaatttgactaatattccctttttctgaagtaaagaaaacacaaaaatgaaataaaaaactatgca

SEQ ID NO: 130452 - DNA, 453 bp, Glycine max
  unsure (1)..(453): unsure at all n locations
actccataatattgtcccttaagagctacaaagtattcttgcagatacaccacggnatattcctgatcaagccttcgtatatgaacaaccaacggaagatagtctaaaatcctgccacaatgcatagataaaatatccttttgtcacaaagacatattcccacaaagttgcatgagatataaacttcanggtcattagtgcctcacatgttcacccgatactcatcatctatcatttccttgaactctttggctgctttttcatcaagaatcatacgacaagcaacattgcacagctgtgggtctctcattctaaactggaagaattatgagtgtaatattgtagtgtgaaacatcttaacattaagggaaagttggacctgtcctaaagattaatataccaaccactaggagagtttcatgcatctcccggagaacttcccagtttctgact

SEQ ID NO: 130453 - DNA, 420 bp, Glycine max
  unsure (1)..(420): unsure at all n locations
agcttggtaattntattgctacctaatgttataccattatcaacatatcatgtgttctgagaaatatgaaactgagagtaaaagtagattatgatatattcagttgttaatattcacattttagtatctatgtgtgtacagtgttccctcccccccccctatcatcttgtgcatgtattgactttacaatgctatgagtgtgatttttgtaccataaagaagagaagctgcagggaagcctgaactgaaaacaatatacatttatgcttgatgaatatgaatcagctagaaattcttattttgcttgctctgttgtccattaatgaggatcctattaagtagtaacatactctctttagcatctagaaatggagtggtgggtatatgtaaatcgaatnggtgcaagcatgtatcatgttt

SEQ ID NO: 130454 - DNA, 470 bp, Glycine max
  unsure (1)..(470): unsure at all n locations
nntaaagcgctcacatactgaatatacaaagtctaggtgatacatattctctgtggatacgatactcggtcttaccgtttttttactacttgtgtgaatcggacactcgctgaccacattcgaacaagttgttggcaccgctgctgggaaatttctttccacttagatagtatacttcacgttggaaacattcattctttattctttgattgtttcttgtgaatagttagaattcaaatcttatctcttgacttggttaaatgctgctctgtttagttgcttcttgtatgcgaagtaaaacttcagcgggaatttagctccattagatctagagattgaagctacttgcaagagaaacaacacacaaaggaggagaaaagctctacaagagaggacagtcaatccaagcatcgagagaactatgtcatctgaatcttcatcatcatttccagcaagctcgagagaatctg

SEQ ID NO: 130455 - DNA, 385 bp, Glycine max
agcttgtaatggtaagagaagagcaacacattctttcttctaataagcagcaagtattaaaaacaatagtaagtataaaataaaagtgtgtgctgccaattaagaaaaagaaaagctaagtgcggataagcaagtaatatagctggaataaaaagaaaaaggttgatctaatgatgaatgctctcctagaacctaagcttttgcatcctagaaaaaccatgaattgtttgcagcccagcctcgttacaagcctacaaaagtccttcgaattcagtttgtgtgttctcgactgtatggcatgagatgaattgcacagattgagacttttgttagttgtggattgttgaataagcctaaacactcgtgcttgcaggatacaatgact

SEQ ID NO: 130456 - DNA, 425 bp, Glycine max
  unsure (1)..(425): unsure at all n locations
ttttggagcaattggacaatctgaggagtggtgtaaactttctgctgacttcttgaaccagggccctctgcattntcccttatgctatttagggctgcctatacgtgtcaatccgagaaagaaggtggtgtgggagcctataatcaaaaaattccaggctaggctaaataaatggaatcagagaagtatatcaatggctggcagaatcactntaattaatgctgtcttaacagctntgcccttgttttatatgtcttntttcaaggccccttcagcaatgattaataggcttattggcattcaatgaaactttctttggggtggaatctataacggaagaagatactcgngtggcttggagcaagtgtgtgctctagaaaaggggangatggagtcaagcatcaagctctcacaaactctctatt

SEQ ID NO: 130457 - DNA, 464 bp, Glycine max
  unsure (1)..(464): unsure at all n locations
atctctaagcacctgcagctgcagcttagnccaagcctcttgaaatgcctgtattgtatttcaatgtatatacagatgcttctattacagtaccaacttggcaacttccacaaaaaataataagtataataaaaaaatacaataccaagtaccaacttaagataacaatttaattagaattatttactgtcattcaattacaagttgctatgtgtagtaaatttatcatttttttattcaaatttatcaatttttatcataattactataaaagctatatttatgatgatttctaattgattgatattataaattttttaacacctaaatgtgtgtgcatataatgtatngaatataaaaacataatctatctgcatatttaatagcttcacaattaaaatacgctttctatacgcttaaaagatactatattaaatactaggtggtgctgagatcactgattc

SEQ ID NO: 130458 - DNA, 340 bp, Glycine max
cactattggacacgactataatatccggttagtcagtcgcgggtaaacctatggtgttaacgaacaaagaaccatccttcaatttggaagtcatatggagcgacaaaagaaaagatgaacgtggtgatgagctttctacagaataggctctatcaattagggatgtaccggccatattttggaaaacttttgctttacctataagaacattttgcttcaacatgaaaaggaactcgggtcttgacttctaagattcggggtctggaaagtaggccagcataaagacaattaagcctaacaggaaggtaattactgaaacgtagaaatatatttataataa

SEQ ID NO: 130459 - DNA, 373 bp, Glycine max
  unsure (1)..(373): unsure at all n locations
agcttgtgtgacacatcactgtgacagtcatattgccattcacttagcaaatcaccaaatgtaccatgagaggacaaagcacatatatgtgaaactacccttcattagatatgtgattgaatctgcaaaagtgaacgtggacaatgtttccacaaaaaaaactcatctgatatgttcacacagtgctttttaatgtcaagttcagccctgtctggacttgataaatatgaagatgcctaaagtatattggtattagtgcaccctgaacacaaggagacacttgtgattggagtcaggtggaatttgggtgtggactcaaaatccaatggccagtgagacgctctaaanggctgcatacagtttcattatatac

SEQ ID NO: 130460 - DNA, 305 bp, Glycine max
atgggcaagctaaagaaaaaggtgggtgattcatctcagacatcaaccatatgaactgaatatcatggaatgattaaatcaatgacttatcacaagcatgcaggcttttcaaagataggagcactagtattatgactccagctgaaataagctagtaagcatgacaaacattaaggaaggatcatcaaccacgacctcacagtcattgtttcactcagactccaaggtatatgcgtattccatcataaacaaccaacacaaggtccgaccttgtgatttcatctgctatcatacagcagtgagca

SEQ ID NO: 130461 - DNA, 424 bp, Glycine max
  unsure (1)..(424): unsure at all n locations
agcttgtgtcagcttgtggggccacactggtatcctcttcaatggtgcccttcctggaccacttcgcggggagcttcttcgtagccaattctaggttgccttctaatagcacttctttaacgtcttaagccaaacgcgtgatgacttgtcagtcacgggcctagtacttttgcttacctttggctttggacttggtcgcctgctggtcggccatgagtcgtaggcaacactccatcctttgtagatgagctgangggctctggaggtggcggtggtgtgtctgttgcccgctaccggccatcccctgtctgctgtggtgtctcgccctgggcctgcctaagggcgcaatacttcctgatgaaagctcgattagtaggaggcctgatgaccttgttatgggcaatgggcactccgtacaactgac

SEQ ID NO: 130462 - DNA, 413 bp, Glycine max
  unsure (1)..(413): unsure at all n locations
tgncactggagctgctccattaactgacctaactctcttttactggtgattcctaagctcttgatcttgacttgataaaacctcttgatgagcgaaagtgtttgacttgatcccatcttctactaaagcgaatcaaaatctaccgcgaatcaaaactctgacatctatcatgggtggaatggatgaatgcctgaagaaatgcatatgacacatatgcactttatgaataccggagcccgtgatattgtctccttcttatattcaacatcttggggtagcaaagtgcccgacgtatgtattttataaggtggcatggaccctccattggnttgccaaagatagggaacaaaatccatgcgtgatgcatatgctaaacgcacaacacaggaatgtacagtttgacaatattcaca

SEQ ID NO: 130463 - DNA, 356 bp, Glycine max
  unsure (1)..(356): unsure at all n locations
acgctgtatctgtatcagttcttcatcgatttgganattcaactgctgagcagagtgctgttcttgagagtcctttgtaccttctactgaatgttggggactgacatcctcttactatgagttgagagctcccctattatttaacctttactgtttttgagatgacgagttgacaaacatttagtgtgttttggaacctctcttcatcacgaagcaacattttgtgtcattcacattctatgatgactggtttcatatgttcaactggtaaccaaactcatgctaacacagataatgtctctganagatgcttcgcaatgacgaactcatcacgaacacagtctattaagtattaa

SEQ ID NO: 130464 - DNA, 367 bp, Glycine max
  unsure (1)..(367): unsure at all n locations
gcgagaacaaacatttagaagttagttttacaagacaatgcttatcttaacgcaaaaagtgtcatgcttatccctctgattctagaatgaactcatgtaatctatttatgcacacgcgtatttgtggaatatcctactatttatatcaacgtagaggccactcaacacatcctaatactcatacatatatatgcatttgaaaagaacatacattctcacgcctaaggcatcgcgtcaaaactcacacttaattatatcctacacatttgctaatacaaactacctacacacatntgaaatatgtatcatacacatnttattgcttctgcatattggaaagctatatacatcctgcacacacttgcat

SEQ ID NO: 130465 - DNA, 398 bp, Glycine max
  unsure (1)..(398): unsure at all n locations
cttggatatcattggcaaagatttactgagctctcttccattattagcgacaagatntaaatgatcggaggatctccaagatatccgactcaactgattgccataacacggcacatagttaatagtcaagcttctcccattcacgtcttttatctactgaaacagaatcagaggttttctccaagtggtcatggtgtgcttgaccaaagaaccacaactccacggaaacagaccatgaagggtagtttttccaattcagctttgcagtggtgatagttggggtcccgaataacgaataaacaggtccagaggaggccatttaagagccaaacagcataccctaacacataagagaggaatacacacaagaagngaccaaactgcttgccggaagtggg

SEQ ID NO: 130466 - DNA, 439 bp, Glycine max
  unsure (1)..(439): unsure at all n locations
agcttncacaacatccaagagaagcaacattcaaacagcacaagctatcacagccaagcaaaatagggcaaaggcagaaaactctgctcaacacaccaaccaaaatcacagcttttctcacttaaagaccccagtaacaattccttcgatccaattcgttaaccgttggatcgactccaaaattttactggaagtctatagtacataagcctacattgtgaccgttgggatctactagcaaacatccaaaactcattctgcactagactttccacagccaaccacacacatgcaattttctgcacaaagccaaaattctgctgcacctatnttgacagcaaaattctgcataagtgtagatttcgaanatcacacttcccctcatccaatcttgcccagatcaaatccttacaagtccaaatcatgtatcaatcatgtc

SEQ ID NO: 130467 - DNA, 454 bp, Glycine max
  unsure (1)..(454): unsure at all n locations
tgtnnggtgtaagnctcacgatagtcacgtgctcatgcaatatgtgttagccatggctatacgagacatcttgccaaacaaagacatgatagcgataactcacctatgctttttcttgcatgctatatgtaacaaagacattgatcctgtcaagtatgatgagttggaaaatgagggcgcaattatactatgccacttggagatgtattttccccctgctttctttgacatcatgattcacttgattgtgcatctggtcagagaaatcaaatgttgtgggcctgcttatctatggtggatgtacccgattgagcgataacatgcataacaagccattgaagttttttcagaatacttaaagaaagctaaacctgttggccttcctgagtctcggcatgatgacaaaagtgggagtaagggttcaagaggactacatgtgatcactactagtgta

SEQ ID NO: 130468 - DNA, 313 bp, Glycine max
  unsure (1)..(313): unsure at all n locations
agcttcagtggcttagtgaagatgaagaggtttaattgtctccacacgttgaggtgcgactcaccattgggagatataatgacaaggtgctgtgtgatgtggtcccaatggaagcgacccatgtgctgttaggaagatcgtggcagtatgataccaacgcagtgcatgatggcttcaccaacaacatctcttttaagcaagctgaccagaagattgttctcacaccgttatctcctcaagaggtttgtgaggatcagatatacatgagagaanagaaaaagagtgagacacttgagaggaaaaagagtgagac

SEQ ID NO: 130469 - DNA, 461 bp, Glycine max
  unsure (1)..(461): unsure at all n locations
ttcacttgctcatgctgctncttcacatactcagctagagcctgtgcgtccttatgcttaaacatagcaatgttaggcataggcaacaaatcaagaggagtcaaaggattaaatccatacactatcttaaatggcgaacaattagctgtgctatggatagcccgattataggcaaactcaacatgaggcaaacatgcttcccaagatttaagatttttctttaaaatagtcctaagcagtgtgcctaaattcctattgactaccttagtttgaccatcagtttgtgggtgacaagtagtacacaacaacaatntagtaccaatcttaccccacaaagacctccgaaagtgactaatgaagtttgcatccctatcactgacaatgttcctcggtaatccatgaagccgcactatttcttttgaaaacacatcagccatatgacaagcatcatccactttctt

SEQ ID NO: 130470 - DNA, 395 bp, Glycine max
  unsure (1)..(395): unsure at all n locations
agcttgcctaattaacctgagattgagagaatatgtattttaaatacacaaaatggaagtactaagtattcattacctatacttaacagacaatacttataacactacaaaataaccataaattggaagagtttgatacaatttacacaagttttatacacaaaagttattcgtattcatcgactaacacctttgcaccgaaacctctgcaccttctgcttgcctgcatcttcattgcttcatttcaagaacaatccaagtaagttagcacatttcaatntttatttntcattcttcaaaccttaggatagatgacttcttgctttcttaagtgtatgatgttagggtaagggtattagttctaggggtagtcaatgtacgaatttatgtaactt

SEQ ID NO: 130471 - DNA, 443 bp, Glycine max
  unsure (1)..(443): unsure at all n locations
agcttatctacctcactattacaaggccagatattttctttgcagntggagtggtgagtcaattcatgcaatctgctcataatgatcattgggatgcagtaattcaaattttgagatacattgaaaggaccccacgacaaggactactttatgaagacaaaggaagcactcaaatagttggattttgtgatgcagattgtgcaggatcacccattgataggcgttccacttcaggatattgtgtgtcttttggaggaaatcttgtctcacggaagagtaagaagcaaaatgttgttgcaaggtctagtgcagaggctgaatatagagctatggttgtagccacatgtgagctcatttggattaaacatcttcaagaattgaggtttggaaatactcaacaaatgaagctatgttgtgataatcaagaagccctacatatagct

SEQ ID NO: 130472 - DNA, 478 bp, Glycine max
  unsure (1)..(478): unsure at all n locations
taataaagtccttagtgatccatatcatgtgtgtgtgattgcattgaataagatgatgcgcaaaggtggggattataacttcaatcgacttaaatgaaatacaaataaccgaaacacttatgtgcttgagagaaacactanccttgtgaggagtgaaacatagttgatctttctgtgacacatgtgcgacttgctaacctacttcaatctctgagtgcattctttgcatgattccatcatgaaaaccatggcaagtgtgaacttgaggagtggaagctaaaattgttcgaaaagtatgcaattatcttacttgttgtgattgggtacatcctgaacattgccattgatataacttagtgtagtattagttcactcttgcttgaggacaagcaaaactttaaatctgggggagtttgataatcgatatgctcacgtaacttatatatttaaatcatataacaagtatctaacttttctc

SEQ ID NO: 130473 - DNA, 234 bp, Glycine max
cattaacgaagaagaacagtctctgacatattaaaattccgactatagagaaagattaccatcttaaattgatccctggagaatgtgtctcagagatcaggaccatgaatgtgttaagctggccttccccagtcgacattgcatatgctgctgctacgcaagaagacagatgatgaatgacctgagccagtgggatactaagtcagggtgaatcgcggccatatatcatctcca

SEQ ID NO: 130474 - DNA, 411 bp, Glycine max
  unsure (1)..(411): unsure at all n locations
gtcacctgcggcatgcaagcttcttatccaaggctcatcttnggggtgatagctccttcttccatggcttattccctagnggatggcgcctcctctcaccttttctcctttgtcttccgctgcatctccatggtggaaaatcaccattaaaggacctcattgaagctcaaagatccagcctccatagaagccccacaagcaagcttccatcacgggcggcccccatgatgtgcaaattcaaaacgagcacgctttcccgccatatggcttgcctctcaactatacgccacccaatgtggcgtacactcccaatgagaatgtcaataactccactcctatactcgttgagagccaacaacctcaatctgatcatgcacatgtctcttgacccatgaggaaggcacataaatg

SEQ ID NO: 130475 - DNA, 408 bp, Glycine max
  unsure (1)..(408): unsure at all n locations
tgtgcacaacaagtgtgccacatgcacaatgcgcgcataaacccaccatgccctggtgcccacctacaactgagctcacgtactcccacgtagcccatatcctcgtttctctcaataccggggccccatcaatccgtccaagcttccacaacatccaagcaaaacaacatttaaacagcacaagctatcacagccaagccaaacaaggcaaaagcagaaaaactctgctcaacacactaaccaaaatcatagcttttctcacttaaagaccccagtaacaatttcttcgatccaatgcgtaaccgttggatcgactccaaaatntactggaagtctatagtgcataagcccacattggaccattgggagctactagcaacagctagaactcattctgcactacatctt

SEQ ID NO: 130476 - DNA, 395 bp, Glycine max
  unsure (1)..(395): unsure at all n locations
agcttgccgatccacttagacaactactatttttgacattgagttcagatggacagaagacactgaatcagcatttgctaaattgaaataggccttaaggacaagtcctatgtttgaagagggggaaagttgtaataagtgaaattagaggcttgatcagcaagttagttgtcattaggaaaatccagattaagagggtataaataaacgctcttatgtacattctcattcattcatgaataaagtttagaatttttcctcttattctttgagaattaatagagagtgagtgaaggttgaatngngtaattctattcccaattgttatagaaccaccccacttaaatnggcacatatggcgaagtcatgaccattactacagtgtatcctgttcg

SEQ ID NO: 130477 - DNA, 473 bp, Glycine max
  unsure (1)..(473): unsure at all n locations
tggtgcatatgatctatatgctctaactctaaggggagtgttgaatatccttgtagnttagccatttgtagtaacttagtttgtagcctttttcagagggcaacagtgcattgtcactgtcatagcctctctcttctctctctctcttttgnactctatatatatgtactattttgaattcaataaagtaaggaagaaagctcttattctggtctccttcaactctatgaaagtacaagtcttgtngttttctttggatgatgtggaggagactaaggaattgaaatgtgccgtcttggcttatgttgntgtcttatatcaatggtgagtatgtgctggtttatcttctggcagctaaagaggacatgaagtgtgctctaaaaganattgatgttgatgaagaaaagaggaaacaggtcattctttcntcaggaactaaatattgagctgaaacaggtcattcttatacatgc

SEQ ID NO: 130478 - DNA, 436 bp, Glycine max
  unsure (1)..(436): unsure at all n locations
tgtgacatttgtcagcatcagaagtatagtgctacctcatctgtatgattgctgcaacctcttcctattccggaacaagtctgggaggatgtatcaattgattttatcacaagggtgccttgttcgagaggctatgaagctattctggttgttgtggacaggctgaccaaatatatccattttgttccattgaaacacccttatactgccaagggaattgttgagattctcgtaaaggaagtagtgaggctacatggagttccaaaatctctcgtgagtgatagagatcctttatttatgagttcgttttggaaggaatgttntaagttacaggggacaatgctcaagatgagtacaacttaccttccgcanacggatggacagaccaaagtcacaaataagtgtcttgaaacctatttgcgttgtttcatactga

SEQ ID NO: 130479 - DNA, 398 bp, Glycine max
  unsure (1)..(398): unsure at all n locations
agctntgagccanaatcctgtctcaccatatttcttgacccagggtgagaatgtcaatccttaccctcggaagcgaaaagaatagaagggaaatttccaatcaaagaaaaggaaagaaggaagatctccaatcaaagagaaagcaaaaaaagaaaagaaggaaaattcccaatcaaagagtgggagaaagcaaaaagaaaagaaagaaaattcccaatcaaagaatgggagaaagtaaaaaaggaagaagaagaaggaaagacagctcctgatcagggatcgaaagaaaacagaagaaatgtgcagaaaggtctttggaccggacaatatctgaataatacagagttgtcaccaaatgaacaaaaagaaggagaggaaaccacgaccctaaatggtct

SEQ ID NO: 130480 - DNA, 411 bp, Glycine max
  unsure (1)..(411): unsure at all n locations
ctctctgagccatttnctgcgaaagcaaacattctggaagtttctttaccagcgtgacactactcttaaaaaataatggcgtacaaccttctcccataaatacaaacattaatgtgaatctatagcaagcttatgcgcatatttccttactaacgttcacttgcacaagacattctatttaacttagaaaaatgcacccatatacaatcaaagcagcttcgttacctagattatttacatgtacttccaaagtgtatttgttacctacatcacacacatttccttagctaaattcacatacatgcatactctaagcactttggctatcgaaaattgcatacgtgcacatcccgggatttctaatacctatacatacacaaactttatgataaatcttgactatctacacaa

SEQ ID NO: 130481 - DNA, 445 bp, Glycine max
  unsure (1)..(445): unsure at all n locations
agcttgtttaccccatgttgaatntgcttactatagagctgttcatagcaccactaattgttctccttttgaagttgtttatggttttaacccactaactcctcttgatcttttgcctatgcctaatgtttctgtttttaagcataaagaaggtcaagcaaaggcggactatgtgaagaagcttcatgagagagtcaaagatcaaattgagaggaaaaataaaagctatgctaaacaagccaacaaagggagaaagaaggttgtcttcgaacccggagattgggtttgggtgcacatgagaaaagaaagaattccggaacaaaggaaatcaaagcttcaaccaaggggagagggaccatttcaagtgcttgaaagtatcaatgacaatgcttacaaagttgagctgctcggtgagtattaatgtagttcccacttcaatgtctct

SEQ ID NO: 130482 - DNA, 411 bp, Glycine max
atcacatgatgctgtgttgggccatatctagtttgtttccaagcaacctggagctcttactgaaacacttagagagttggcaactcaattgcatgttggacaaccttttccctgttatgatgtgcaggatgccagccaggttatatgtgggggagcacaagattctggctgctgcattcccacggaagatacaacacatgaagcgaactatgtggggaaccagccaagaccaaacttttatgtaagcgggtattctggatgtcaacatgcccgacaatataatcagcaacggggacagtggagaactcaccctccgtaattaagtcaacaaatactacggtgggccatcttatatggcacatcaacataggccgtacctctattacagaatgacgaagctggaagagactc

SEQ ID NO: 130483 - DNA, 381 bp, Glycine max
agcttagccctagaggggatggacctttcttgtcttggagaggatcaataacaattcctataggttggacctcccagaagagtatggagtcagtaccacttttaatatttctgatttaattccttttgcaggtggaactgatattaacgaggaggaaccgatagatttgatctcaaatcctcttcaagggggagaggatgatgcaatcctccctaggaagggaccagttactatagccatgagcaagaggctccaagaggattgggctagagctgttgaagaaggcccgagggttctcatgaacctcacggtagatttttgagcccatgggccaagggtgagtccacttatctctgtacatattggatgaggatttcattt

SEQ ID NO: 130484 - DNA, 279 bp, Glycine max
cgatattagatatccctatcaactcagagatgccgatttatattaattaaaaaggaatcagaaaccataaaatttctgtgtgcagtaccaaaatttcatgatcgtcaagcaaatcttcttctatgcaaatgtcgacacacagttgcagctccttgcctttgctcttgggcggcgctcttcttctcgccttcctgtactccctctgcccggcgcggactccagccacgcgccgccgcgtcatctcttctctctggcaccgcgcgaaggcgtgaaaagtgc

SEQ ID NO: 130485 - DNA, 278 bp, Glycine max
agcttctagccaaatggactcacctttaatttattccttcgacagcccttttgagcctagtcttcctttcctctgttagaagctcactacaagccttaagtgaaaaaccatgatattaccatatcctttaggaattttggagctttggaattgtcttgggaataagtgtggggggtttttgttcattggacaacctgttgtgttggctatgctttatgatgtatcttgggccatacttgatgtacatcgtatattggttaaatgttggacatgctgaa

SEQ ID NO: 130486 - DNA, 217 bp, Glycine max
aagcgcccaatgtggcaaaacacaccacataattataatgatggatggctcaaattctcacaaaggaaaaatcatcactttcgattgagccttcataactatcacgacatgtagagaaaaatcaaggatttcaagtcacaaaatgtcaagaacatttattctcaatggtggaggatgcatcaatgacactcaattcatggggctcccgataatacat

SEQ ID NO: 130487 - DNA, 479 bp, Glycine max
  unsure (1)..(479): unsure at all n locations
agctnngagctttcacttcacattccactcattatctagccggctcaatttacantttttttattataattattgataacaatagtagtaataattataataacaataatcgttttaatttagtatgtaacttttttatttcacttaatattaaaaaagtaaaggcttattaattgaagttacgaagtggagcataatcgaggttaaaatattaaatccaattaacaccaagggtagtaataactaattagctcggaaaactcacttcaaaaaagaaaaatgaattcgatntgttgttgaacttaagctagcctagcaagcataactcagcttagaaattcatcaaaagctcacttccaaacacatgacaccacattaaacacaaagatatgaattggcaattacatatggacaacacccaannaaaaaaaacaccatatctncagaggaagaaaaatacactcatatcaaacacaaac

SEQ ID NO: 130488 - DNA, 456 bp, Glycine max
tggtggaaagaacttgtagaggcgggtcatggagatctgatatattatcttggcggcaaaagatgcaaactcgtgaacagttggttgaagcttccgctatcctcatatggattgcttcaacccttcatgctgctgttaacttcggacagcatccatactgagggttaatcctaaacaggccatctatcagcacgagattcatgcctgaaaaggggtctcctgaatatgatgcgttggctaagaaccctgagaaagagtttttgaagactattactggcataaaagagacactcattgaccttacagttattgaaaactttgcaaggcacgcatctgatgagttctaccttgggcacagagatggtggtactactggactttgatgccgcccattagaggctctacaaggttggaagaagcctgaagagatgaaaaacctattataaacaatatgaa

SEQ ID NO: 130489 - DNA, 368 bp, Glycine max
tttaattcacttttaatccgattcttataaattaaataaaatgattacttttttgccatatcaagaagggcgttttttatgaactgcaacatttgttttgtcgttagtttatgtagttgcaatttaagtgatcagcaactcaaattggaactctgttttaattgaaactatgtaaaaagtcataccgcaaaaacacaggacaaaggagcagtaatgctggaaccgcggttgaagatcaccaacaattgtttcccaaggcatgttttgttatttactaaagaacttatttgcgatatatatccatgcaagtcccagaaacaataggaactttttagacatgctgaagtacagaactagagggcgaaact

SEQ ID NO: 130490 - DNA, 386 bp, Glycine max
tttctaaaatccgacaatccgttaatcccatcaaatgcacggaaaagatcttaaactaaagaataccatgctccaaaacatataaatataataatataatataattgtatccaaaggagaaataggcgatgatattttggaggtgcgtgcctctttgatttgtccttatttttctgtaagaggaaactatatataagcaaaaaaaaaaaatctttcattacaactgtgcaatattcattgattgatctctggtgggaaatctgatgggtgacgtctagtaaaaattctaatcatattcttccatctatctaattggaacataaaatattacttagaggaaattatttctagatgcatgcatagccagaatatataattactacacg

SEQ ID NO: 130491 - DNA, 415 bp, Glycine max
gcgtgaagacatgacgcttaacgcaagggttgctcttatcgggtggacaacttgaaaaaaaatctaagtcttttctatccatttcttcacatgaacttaaaaaaaaacccttgttcactactaaacaagctacaaaattaatcacaatcacaagcaattattcctaactacatgcaagagataagaatgaaaaagagaaaagggaaagaaaagtcaggttgcctcccagtaagcgctcttttaacgtcattagcttgacgcattatcctgttatctgggtccaacaaggttccaacttccaaaaccttcttctctagcctcttttcctccatcacattcaccttcaaacaaacattttggtgaggcaaagctttctcttcatgaaacatatcacaactgatttgtggtcttctat

SEQ ID NO: 130492 - DNA, 476 bp, Glycine max
  unsure (1)..(476): unsure at all n locations
tcaatggcttagtgaggatggagatgtgcaagtcaagaatcttgtgttattggatatctccatgggaaagtacaatgatgaggtgctctgtgatgtngttcctatggaggccaaccacttactcttggggagaccatggcaatttgataagagggctaatcatgatggttttaccaacaagatctctntcacgcatcaaggcgaaaagatagtgctcaaaccattatgtccacaagaagtgtgtgaggatcaaagaaaaatgagagagaaaattcttgaagaaaagagagaataagaaaaagagagccaaacatttgagagttcaaataatgatgacaataagagggaaacacaagagaggaagaagatgagtgaaacacttatagtgatggagaactntctagctacanaaggataaggcataaggttgtttcattcaaaacagcccctatgctctntgatttgcataaattatg

SEQ ID NO: 130493 - DNA, 76 bp, Glycine max
  unsure (1)..(76): unsure at all n locations
tcccntcccgacncggngctacccccccccacacgggatatctccttcccccaatatcccggtactaatatcgaaa

SEQ ID NO: 130494 - DNA, 298 bp, Glycine max
tcctagctctttaatgctacgtatcatctactcttttaaaattgtatatgtgttacgtgctctaaatacataagggtatactattttctttagttactaaacgttttagtaattcctcttttacttcctgaaatttttttgactaattttagactcttaattctttgtgggccttactgttagtctctatctaaacactgaaagtaacaatgaaataagttgagataattcactagtaaaaaaaaaattacggactaaaagaaattgtgattttatgatataactgtcaattctttta

SEQ ID NO: 130495 - DNA, 461 bp, Glycine max
agcttgcataactaagaacagacatcactgtttacttttcctttgtgtcataagccttattcaccctaatcaaagaaccaaaatacaaagttcaagccactttacacaacatatattggggaacatttttcaaaatatgtcataaataatcagcagaaaagcaagcgcaagcactcataatttgatatctagtttaatctgaaatagcatttaaaatagcaccaaataccatcttcgacatttgatgcgtcctgttccataatccaaaacaaaaatgacatcagtatttctctcaactttctcaaacaccatcccaagcaatgctacctgaacccaatatatataaagcacgagttcattacgcatccattgtcactggtaaagttttacacaaccaatgaaaactatcctaggactactcttagtagtagtcaaaaataacaacatatatatgtgccgtt

SEQ ID NO: 130496 - DNA, 443 bp, Glycine max
  unsure (1)..(443): unsure at all n locations
tcaagaataatggcctcatcaaacttcttattcccataatgttattaataaataagcctcctatttttaatggagagggttaccactactggaaaacccgaatgaaaattttcattgagggaatagacttaaacatttgtgaagccatataaattggaccttatgtacccaccatggtggcttggaatacaacaattgagaaacctagagaagaatggtgtgaagaagaaagaagattactgcagtacaatttaaaggctaaaaacattattactttcgtcctaagaatggatgatatatttatggtttcaaaattgtaagagtgctaaagatatgtgggatactctacaagttacacatgatggaaccactgatgtcaaaagaactaggataaatactctaactcatgaatatgaattattcaagatanagacacatgaaag

SEQ ID NO: 130497 - DNA, 410 bp, Glycine max
  unsure (1)..(410): unsure at all n locations
agctngctaagctcagaggatgccgcaacctatctcgcttggcccangatagctcggcttatcgcacgaccatcaacaaaacaatgatttaagttacctgggcttagcgattcaacctcgcttagccacaggtagttcaacaagaggatgagtgttcatcctcaaaagatgaactcccttagcgcggtaagcgcgcttagcgagttcttcagataacgttacatacaatgagcattgatgaactcgcttagcgtancatgctcgcttagcgaggtcatcgcgttttccagaaaatactgctcattttcttgcacttttcaagcctctataaagcataacagacattccatgtgtgcctcatactcaaattaatatacaagcctatatagccctaatcttaaacttcatct

SEQ ID NO: 130498 - DNA, 319 bp, Glycine max
catgatacatgtcaagagtctggttgtttctatgattaaagggatgccccacaatatcttcatgacacaaatgcaaaaaagatgatttggaaactctatgcaaaactggtcatgcatgcacctatgcggacactcaagtgtcaaaattttatagtcatgtgatgctacggctcaagattcattttctctattgtaatcaacccaatgtatccaaaatatgttctcttatcaatttgagcattcatccgagaccatttcgggcgtccggtgaaaattcacagcattcacccttcaagtgtatacacattctcccgaaatt

SEQ ID NO: 130499 - DNA, 414 bp, Glycine max
  unsure (1)..(414): unsure at all n locations
agcttgctaagacaatgcacacatcctcttttttcaggtctcttgacttttaactatatatcttttgtccaatcagtaaaatcttgggtgttttgtaaatttggtgaactctctgtttcaagcattttctttntttagttcatcctacataaatataccttataaattattaccatgcatcaatattctcaatacttcaatgtcaccaaacaaaactcatttcctcattagttacccccctcacaccataaccctttattagaaaattgagcanaacaaaacacgaaacaaagagaaagtattgaaatataaaaaattcttacaattatagtagcaacacttttagtaacaatgcttccatctttttgagttcaagagtcaatataaatttctgctcaagaaaggttcactcct

SEQ ID NO: 130500 - DNA, 453 bp, Glycine max
  unsure (1)..(453): unsure at all n locations
atcttcttcatcaatagatacctttgctatatgttttgaatttgaaaatggaaggaaattctaatttctattcaaatttcacttggagggaaatttgaatttctattccaatttcacttaaatttgaaattgaatttatggagccaaattttggagcccaaatttcactaattatgattactgaattttatctatggttcagcccactaatcccagatcaaggccaatattcttcactaagtgtgcttatgtgtcctgaggcatgttaagcatgaagaacatgcacaaagtgtgactatatgatgtggccatggggtgtagcaagcaaatgctcacctctccctacaaaatttaatnggattgggcctcttccaattcaattaaatctatttctcaacacacacactcaatattcccttactgcatgtgagattacaaaactacccctaatac

SEQ ID NO: 130501 - DNA, 415 bp, Glycine max
  unsure (1)..(415): unsure at all n locations
agcttggagacgagatcagggtgcanagaactaaaccaccctcgctagaagacttgtggtaggattgaatggtgttcgaacctggcaagtgcaccagatcacgcaagtagtataaaacggtaagaatcgagtatcgaactctcggggaacttgtgttacttggtaaaactatattcagtgaataggtgtctagtatgaaaagatatgtgtagactatgaacaggtatgtaaactaactattataaggaaaatcacgtgagtaatgatgtgtaaagacaagtagacaacatgttggtcttcttattacgtgcctgatgttataaggatattctctacttaacaatgctcatgtattctatggtggtctcccgaaatggctaaaccccgattcttcatgataatctagcctaatcct

SEQ ID NO: 130502 - DNA, 367 bp, Glycine max
  unsure (1)..(367): unsure at all n locations
tactcaagcttggagaaccaggtagtgcctcccaactcatctaataacttgttcactgtagggatggggaaacggtcacgcacgatgatggcattcaatgccctgtaatctacgcagaacctccacgttccgtcgcgcttccttaccaatagaataggagatgaaaaggggctggagctatgttgtacgtgaccactacgaagcatcgaggccacttgtctttcaatttcttgtttctgaaagtacgggtaccggtaaggttctacgttgatncgtgctgcattatggatgatattgatgggatggtctattgctcgagatggaagaagattgggtagtggttggaagacggaagcgtatttggtga

SEQ ID NO: 130503 - DNA, 369 bp, Glycine max
ttcaataactgctggttatctattaccatatatgtgtgatcgattacacagtccaaattttgaattcaaattttaatagttgttagaaatcagatgtggccactggttatcgattacatcctctggtaatcaattaccagagagttaatttcttgaaaaagactttttaacttaaatttcttggccaaacctcttgctacttcaattggaattcccttcctatttaatatactcttcctaagactctagaggcgtgcttgatcttccatcttgaatatctctgatttctttgtcttgaataaagctctgagaagcatgtaaccctttggcatcatcaaaacattcagctagatcctttgtctacaatct

SEQ ID NO: 130504 - DNA, 414 bp, Glycine max
  unsure (1)..(414): unsure at all n locations
catgcaagctanctcacacacnccctgaatagcttatctacccccatgccaaaatacatgaaaatacaaaaaggtccttactacataaactactcaaaatgccctgaaatactaagctaaaaccctatactacaagaatgtccaaaatacaaggcctaaaagaaggaaatacctattctaatatttacaaagaagagtggacccaaccttggcccatgggctcagaaatctaccctgaggttcatgagaaccttggggccttctntagcagctctagtccaatcctcttggagtcttctatccaatacccttggggggtaggatngcatttctagatgcgtgggccattttgtctcttcctttgtggacgatcctctaaatgtcttagatggtaaagctccttaccttgtcatc

SEQ ID NO: 130505 - DNA, 351 bp, Glycine max
tctacatcgcttgtatctaatgatatgcatttgcctcaagaatgactccaagaatggctccacaaacaaatccttggttatgattcactaaagaccaagccttgccttaatacaaagtgctgtcaagacatgcaagactctggtaatcgatcacgccgaagtggaatcgattaccaatagacagggttgagatattactgtcgaaaagggctttgaacttgaattttgaacatgtcatcgataccagcaactgaactttgaaatttaaattccaaagtcataacccttctattataactgtgttatcgattacacaaacacttggcatcgactactcaacggaaagttctc

SEQ ID NO: 130506 - DNA, 393 bp, Glycine max
  unsure (1)..(393): unsure at all n locations
agctngtaaaaaaatgaagcaagttaaaactcttttcaaagaaaaaattntgtttgtattagaaaaccccttgaacaacttcacattgatttatttggtccctttagaactatgagtttgggtggaaattactatggcttagtaatagtagatgattactcaaggttcacttggacttagtttttgaaaaccaaaaatgaagcttttgatgcttttcgcaaacttacaaggtgattcaaaatgaaaaaggtctcaacattgtttcaattaaaagtgatcatggaggtgaatttcanaatgagtcttttgaaaacttttgtgaagaaaatggaatttaccataattcttttgccccaagaacacctcaacataatggtgttgtagagaggaaaa

SEQ ID NO: 130507 - DNA, 355 bp, Glycine max
aatcatcccacttggacgaatgagaaaactggggccaatggagagggtgagaataaaggagaagcccatgttatgactgccattcctgtacggccaagtttcccatcaacccaacaatgtcattactcaaccaataacaaaccttctccttacctactgccattttatccacaaaggccatccctaaaatcaaccacaaagcctacctaccgcactttcaatgacaaacaccacctttagcacaaaccacaaacaccaaccaagaagtgaattttgcagcgagaaagcctgtagaaatcaccccaattccagtgtgctatgctgacttgctcccacatctactcgataattcaat

SEQ ID NO: 130508 - DNA, 422 bp, Glycine max
  unsure (1)..(422): unsure at all n locations
agctngcacttttaatgtgttaagatgtcatttatcattaattaatcatagacagctctttcctgctgaacgttagtaatatattcattttcaattttgacagagaatctgaacctaattcatgggaagatacaatgaacgatgaactagaacgtgaaaaatattctcgtatgccttggcatgatgttcattgtggcctttgaggaccaccttgccgtgacattgctatgcactttgttcagcgatggaattatgccaggttagtcttattctgcagttgcattgagtctngaagcattctggtcctattctatattcccaaataggaaataatatttttttataacatcagaggaacaaagttcatatgagcagcaattccattactatgcctcagctcatatgggtattcacattacttg

SEQ ID NO: 130509 - DNA, 409 bp, Glycine max
  unsure (1)..(409): unsure at all n locations
agctagtgttgtgacttctgggctatcaattattatgcacatagatccggccatctctgccggacaaaaagtcttcagcaaccgaatgggaattggctgattcaatcggtcattttctctgatagtagtataaagctaagactaattgagattcaatttcaaggaaatataaagaaaatagtctaaaaacactcaatttccaggtaatttgttgataaatactagtaatacataattctattactcattatgaggcgagcttttctttncaatgtatagaaaaggtaagtttttaaattcatgcttaacaatatgaaaattattttggtctccaaaataattaattagttctttaaaacaatcatgtaaaatacgtactttattcctttattttttaaaactcttaaca

SEQ ID NO: 130510 - DNA, 338 bp, Glycine max
  unsure (1)..(338): unsure at all n locations
agcttggaaggtagccatacctcacanaatatatgtatgtgtgtttaggtagcaagataccttggatatgcatgtatgtagcaaaaagatacctcacaaaatatacatatgtatgtttaggtagcaagataccttggatatgcatgtatatagaaaaaatacctcacaatatatatatatatatatatatatatatatatatatatatgtgtgtgcgtgtgtgtgtgtgcgtgtgtgtgtgtgcgtgacagcgtttatatatatatatgtatatgtgtggttaaggagcaagaaacctttgatttgcatgtgtatagcaaagatccctacaaaatata

SEQ ID NO: 130511 - DNA, 204 bp, Glycine max
cttacaaactacatcatatgatattgggcgttttaccgaacacttggtgtgcgcgtgtttatgcataaattgcaagagaatgtgggcaatgtgcatgccccattgttataatacacatagcctaagcatccctacacccctcactctaacaagataggcataaaaaaccccagatctggcccatacataagagcacattcttac

SEQ ID NO: 130512 - DNA, 415 bp, Glycine max
  unsure (1)..(415): unsure at all n locations
agcttcgttatgatagtcgtgcactctatattttagtactaacgctcnatccaacgtccaatgcgttgttaatggaacaaacattgaacactagtgaatcacccactatgaatatatgattctatcacgtgtccaaaaagactcttaaacacttgcataaatatttctatcctttataagcgtagttgaataacgaatggatgtgttcatactatcaattttctactttagactattctttactacttgatataaactaacattttgaatctagcatgattaagacaaacttagaaaggatttattcaagaataatccactacttgaatcgagaagagcttaccttatataacaagatttgcaccttttgtggtcaaaatgccatacagactgacaacgatcaatcataaatgcg

SEQ ID NO: 130513 - DNA, 339 bp, Glycine max
  unsure (1)..(339): unsure at all n locations
cactggtaatgtttctactattattgggatcatctctttccccatcattggaggtgccacttgagctgctaggagtctccatctttgggtgtattctctgaaagaattgtgccacttgagctgncaggtctctccatctttgggcatattctttgaaagattcgtgcccctctttgcacatgttctgtagttgcatcctatccacaaccatatcaaaattgtggcgatactgcctaacgaatgcaaccattatgtccttccaagaatggactcgggaaggctccaagttagtgtaccatgtaacagctaccgcagtaagactttcttggaagagatgta

SEQ ID NO: 130514 - DNA, 263 bp, Glycine max
  unsure (1)..(263): unsure at all n locations
gaagtgatcttaattacgacaggagcgtgagcatcttatctctaacntctcaaagaagatgtttcaaataagcttcttcaagaactttcctcaataaatcttctcatagaaacaacctgacctataaatagaatcatgtgttacacttgtcgtacgcttgataaatgatatgcttgtgacacatactctcaagagccacttctactccctattatattgcttcaatttcgtgctcccccctctctctttctactacctctttc

SEQ ID NO: 130515 - DNA, 436 bp, Glycine max
  unsure (1)..(436): unsure at all n locations
agcttctacaatgatgcccagagccgatgattgtcccaatttttcgtccaaagccggaataggtttgattggaatgcccctacaatgacccagatttaactcaaattctaaagctcaagccttaactttcatgtgacaggcccattttgccacctttacaggctacacaacccaagtaccaaccactcctaaacccaacaagcatgaactaacattagaattaatcattaataaggagatataagattgatcaatcggcgaaagaaggggagaagtcgcacgtttcaatctccccaaataacatttctagcanaactaacaaacacgaacatttgctgattaaacaaaacttagaattaataatccacaaagaagaagagctctgaatccaaaattctcataccttgctaatattaggcacaacagactctaacat

SEQ ID NO: 130516 - DNA, 461 bp, Glycine max
  unsure (1)..(461): unsure at all n locations
agctngcttctacagatgatcatggagcgacccgagattttctgtgtcaaatcaatgtgatcaagtagtttgaaccctattgttgggcctaggctttatggtctgtgttggatttcccatgtgattactttttgtaccactttttcttcgtacaaatatatttaagggaaatctggtttgtcggaaagcgcactacatcgtcatgtatttaaaaattacaatgaatggatccgagtatcgaacacagggaactaatgttagcttgagttaaattcacaaatgaagcattgtngagagaacatgtatgatggataatctcatacagaatttaaactaaacctttatgctacaaactataaaatacaacgtaagtaaaagtgacagcagtncgtagaaatgtngggtctctctaacagacacgcctgatgatatanatatatttctctaatcaatcatgctct

SEQ ID NO: 130517 - DNA, 359 bp, Glycine max
ggtgaaggagtgattgattaagtgttaaagtgtatcgaatatattttcatagccttgctgttataaactctccatgtttggccaagaggaccatctagaagagttataacttttagaaaaacttaaaaccaatttgaaaaagtcaaaataccttttgatgagttacatcttttgatttattcagaaacaaacactggtgatcgattaccaaattagtgtgatcgattacaccaagctttggtgtgaaaggatgtgactcttcacatttgaatgtgaatttcaacgttcacaggcactggtaatcgattaccaaaacattgtaatcgattacagctttttgaaattaattggaacgctgt

SEQ ID NO: 130518 - DNA, 448 bp, Glycine max
  unsure (1)..(448): unsure at all n locations
agcttcttggtgtggatgcagtctcgctattgttcaaaaagatatcttctggtaattctcaacttaaatatccttctctgaaatctgaactgtaggtcccgactcgttattaaatactattaaataataatgttttcgttattcttatctaagaactgctataaaaaatcgaatattttccaaaactaaaacccactgccactggactgtattgcttgagacttttacatgaaaagaatttcattaacaaaaattaattttatcatattacaaatattcttaactctaatgacatacttttctgttanaagaaactctcgtgatgaaaaaaaaattaatgaagaatccctctaaattgaaatggcgtatatatataatttaaaacctataacaaatactttagtgtgacctttgcaacatctattacgtataccattaaagaatataa

SEQ ID NO: 130519 - DNA, 483 bp, Glycine max
  unsure (1)..(483): unsure at all n locations
taacaatattggggcctncgccatattctgaagtattttatctctcttttaatctggcaaatgatattgaagagctcataaagttattaaaaatatcacaagaatttggaatggccttgtacgtgaaacaaaatatagtttaaaaaaataacaattgaagctgacaagtatattattaataccaacagtatggaaatgttctccctgctcaagtatattattaatttcacagtatattatgttaatcttgatatttaattgtacattaatagagtactgcacaaatcgggattaatggaaaatntatagacatggtatctgtgacaagacttctctatccaacggtggattttgtgatgaaatgatccacagtaaaagctacttaatggtataatagcgggtttcacttacatcgtgtgtgtgtgtgtgtaaagaataaagtgagacatgccttaaccactcctctggatattttacaatgac

SEQ ID NO: 130520 - DNA, 447 bp, Glycine max
agctatataagtgcgggtctgggagacgaatgttaagtgttcgcgatatgtgaagatgatgttccaagtacttcggatttggtccgaccatgccctcctgatttccagctgggaaattggcgagtggaggaacgccccggcatttacgcaacaagcataatgtaaaccttgacggttttaaaagctctatagttgggcctaggctttagagttttcgttttgttaaggctttgtgtcttttgtttttgaatttataatacaaggatctttcttcatctgttcctggtctctacccattctcattcatttgcatgtttacttctttttctgaaacggcagaatcgatgacgagttccccgaaggtactaatacctgcgacccgtctatcaacttcgagcaagacatgaaccaaacggaagatgaatgagatgaggatgtgggacttcc

SEQ ID NO: 130521 - DNA, 449 bp, Glycine max
ctctactctctggtaatcgattaccagaagatgtaatcgattactcttggccaaatacgtcttataacagctataaaaatctgaattcgaaattctaaaagctgttatcgattacacaattgtggtaatcgattaccaacagttagtaaacgttttgattcaaattttaaaagctgtaatcgattacacaacttgctgtaatcgattaccagacaggaatttcagaaaaataatttcaagagtcacaacttttcaaaggctgtactcatgaccaccaatggtctatatatatgtgacttaaacacgaaattgctcagagattttcagaacaacaaagtgtttatcctctcaaaaagcaatttcattttattctcttaaagaattccttgggcaattcaattgccattattaaaggattaattgagtgctcaatctgtaaaatccatctc

SEQ ID NO: 130522 - DNA, 267 bp, Glycine max
cgagcagcgcaggatcaaggaggccatttacgaccaacgcccgaaaagcccgacccaacgcaacacccgcccactgcccccccaccacgaccacaacacaataaaaaagcgcgaccaccagccccccaaagagccccacataggaccacgaaccaaaaaccatgcgcgatcgacacctcctcatcgaccccaataacgacaaccacacgataaacatgccggatcgcaacccgacagcggacccacaccggccccccacagcaagaa

SEQ ID NO: 130523 - DNA, 363 bp, Glycine max
  unsure (1)..(363): unsure at all n locations
agcttctntaaagcaaaagataaataacaatttataaaagaagtttaagggaagagaggaatgcaaacttgatttatactggttcggccacttcccgtgcctacgtccagtcctcaagcaacccacttgagattttccactctctttgtaaaactccttttacaaagtctgaaccacatagggacaacccttcccttgtgttcaggaatcctctacaacaagagacccacggtctcttaatcccttttcagaaataagaagaagagaagaagaaatctctcttataagagatagattgtacaatgaagatcaatcaaaattccttattgaatatgcgagtggttggccaaggaatcttttgag

SEQ ID NO: 130524 - DNA, 403 bp, Glycine max
cataagaacaatattggcctaatcatttacaaatatgcatgtttattatgacgcatcaaccagaatcaagccaaagctattgtgcaagcaatcaaagaggcaaaacacaccaaatgattattatgatggatggctcaaattctcacaaaggtaaaatcatcactttcaaatcgagctctctaaactatcatgacatgttgagaagaatcaaagattttaagtcacaaaatgtcaataacttttattttcataacaattacccatttcttgaacatatcctataattcaaagaaaaacatgctaaatcgtacgtgcgcacaaaattgacccaaaatattaaactgataatccgacgaaactaacaacattatacatatatcacaactaactaattatacaaacc

SEQ ID NO: 130525 - DNA, 338 bp, Glycine max
atattgagacgcttcgaaatgaaaacgggagctctgataatattcaaatgacaattactttttacgtggactgtcgattgtgtcccgtaatatatcaagattatttaaatggaaaacagagagttctagctaattccaacgacaataactttttactcggatgctcgactgtgtcctgtagtatatcgagacgctcgaaattggaaacggaagctcgagcaaagccaacgacatcacatttactcggatgtccgattgagtgccgaatatttgagacgctcgaattgaaacagaagcttgagcaaatcaaacgaaataacttttactcggatgcgcga

SEQ ID NO: 130526 - DNA, 415 bp, Glycine max
ctggagtgttcaagagccaaatcggaatcttctttattccattcttcctctggcttcaattcatcaaagggcttttcttctgtgtacagcatcttgcgatgttcccagcctttgatgacagctttccaagctctgctatccagagatgtgaggaaggacaccatccttgctttccagaattcatagttggttccatctatgattggaggtgtgttcaatggacctccttctttctgcatgtgcatcagaaatgatctccctagaactcactctgagatatcgagtgttggctctgataccaacttgaattctgataccacaggacagatgtcgtacatgatgtcacaacatctcgcttcagaacatgcagagtatgtgtgtctgcatgaacagatcatacaagtaagtaacacaa

SEQ ID NO: 130527 - DNA, 373 bp, Glycine max
  unsure (1)..(373): unsure at all n locations
agcttgctagcatagatgtgttgttgcctgttgatagagctagaactagagcctgagtcagcccctgaccctgggttctctttctccttttcctcttcaaggcacggattaatcgattctgcagataaagataccgatcctgaaagtgggaacgatttgcgacaattctccgcccagttctccatacccaaatgtcaccatcttccggccaattttacggtgcatatggaaatctctcgccggacatttccggtgccactgcctgtacattcaggaatccattattctncatctccatctcgaacgctacttagctagctacggtttatggtgtgatcgaatcacaacagtaataggatcagatcacgtcaca

SEQ ID NO: 130528 - DNA, 389 bp, Glycine max
ttgcgttatgtcataattatgatattagaaacaatctgtatttttatttctcacgctcttagataagcaaaatatcataacttaaggtatagtttccttggttgagaaagatgcgtcaacttttataaactccatagtaccttttttttataaaaaacaaaacattcataaagaacatttaaaatcttttactgatggaaaattgataactgacttttaatatcatagctcatgattagatgaattgttaagttaacagataaatataaatttgctttcatatataatagtaattttctaagagaattaattaaaatattaatgtcgaacataaattgaggcaaatatatatatatatatatatatatatatatatatatatatatcat

SEQ ID NO: 130529 - DNA, 455 bp, Glycine max
  unsure (1)..(455): unsure at all n locations
agctntacaacagatgccactctatgctaaattcctgaaagacatgctaactaagaagaacaagtatatccacagtgacaccatagtcgtggagggaaactgcaacgctgttattcaacgtatccttccaccgaagcataaggatccatgcagtgtcactataccttgttctataagagaagtttcagtaggcaaggttgtagaagcaagcttcatgatgatgaatcaagttgattcaagtagttttgataatgacaaagatgatgaaaaaaagcccaaagaatgataaggttcaagagaagatgaattcaagattcaagagaagaaatcaagaagacttcacaagggaagtattgaanagaattnttcaaacaacaacatagcacaagtttgttttcaaaagaagttttctcaaaattttccagttaccagagttctactctctggaatcgata

SEQ ID NO: 130530 - DNA, 474 bp, Glycine max
  unsure (1)..(474): unsure at all n locations
tganaatcaataattgaatgaaaacttgtgattcatacctatatttatatctgaattggcaaacttattattataaatagatagatatacctaccattatttttcaaaaaatgtttataattaattgtaggaattactcaattacaggttacaaaatgatggaaatttaataaaatttaataaaaaattgttaaacatcctataatcatgtaaattatggattaaattaaaatctattctacaatatttattatgatntacttggtttctctctctatatatattaattaggtaattgattgagttattaatattaatttaaatttaaattatattgacataaatgtgtttcgcttttttatggacatactttgtaactaaaccgatcaactatgaagcatcgcacataagataacatgaggtatcatctgaagcttgagaaacaataattgaatgacatgtntaatccataaa

SEQ ID NO: 130531 - DNA, 395 bp, Glycine max
  unsure (1)..(395): unsure at all n locations
agcttgactaggcgagttgattntagccttattttcactttagttattagtcaattcaattaagaatgagaaatcccaaagagaaaacgtccgattgatctttcgctctattttactaaaaggtatttttttattattatattattattttaccttttcttttatttcccacgtggttacggcacgaccgaacggtcggaattcattttaaccaaaattaacggatgatacaattcaaacgaatcggggaatattattttatttttagattaggcgagaaatgacttaaataaatgacttaagcacgtcaaaaggggtataaaaagcgaatgaaaacgagaatacaaatacatgaaaccaaatgtggaccaccacgggtacatagaatgaattga

SEQ ID NO: 130532 - DNA, 437 bp, Glycine max
  unsure (1)..(437): unsure at all n locations
tctcaagcttagaaggagcgcannccaccatctntacatagaggagtaccgattatgtgtctaccatcacgaatatcgtctgcctttccattattgggggtaccacccaggccgtcagatccctccaccttttgggcgcgtactttgaaagatccgatcccacgttgcacatgatgcattctattcagaaccatatcaaaattgtattgatactgcctaacacagcaaccattaaggccttccagaatggactctggaagattcaagttagtgtaccagtgacagctaccccagtaagactttcttggaaggaatgtattcgcaattcctcatatgttgcgtattcccacatcttctgacaatacatctttagatggatcttgagacaagtagtcccctctgacttgtcaacggccagcaccttgaacttgggaggg

SEQ ID NO: 130533 - DNA, 431 bp, Glycine max
  unsure (1)..(431): unsure at all n locations
agctataaaagattggctaagaatttgttaaacataagcacttanacaatgaaggaaagctggagttgctgcacatgatgtccaacgttatgtcaaagaataagatcgggctgcacaatgcacaaggcaagataaagtgtcaaatgaaaaatngaagctgcaggattcacgatgtcggatacaatgtccaggacatcctgcccgaaaatactggagttgctgaaagcattgaagttgcaggatccacgatgtcggatacaatgtccaggacatcctgcccgaaaatactggagttgctgaaagcattgaagttgcacgatccgcgatgtccgatacgatgtccaggacatctggcccgaanatactggacatataaatcctgtatatctttaacagattattgggcagttagcaagagaatagatgatcta

SEQ ID NO: 130534 - DNA, 418 bp, Glycine max
ttatcagtgcggggctgggagacgaatgtcaagtgggcgctatatgtttatattatgttccaagtaccttggatttgtgccgaccatgccctcctgatttccatctgggaaattggccggtggaggaacaccccggcatttacgcaacaagcgtaatgtaaacctttactggtttaaaagctctatagttgggcctacgctgtagagtttcattttgttaacgctctgtgccttttgtctctgaatttataatacaaggatctttcttcatctgttcctgggttctacccattctcattcatttgcatagttacttctttttctgagacggcagattcgatgacgaagcccccgaaggttcttatacctgagacccgtctatcaacttcttgcaagaaatgaacctaacgggagatga

SEQ ID NO: 130535 - DNA, 394 bp, Glycine max
  unsure (1)..(394): unsure at all n locations
agcttattgtgtaaacactcattgagtaattagaattcattttctattaaacatattgntagtcggtgaatacgactaacttttgtgtatataacttgtataaattgtgtcaaactcttccaatttatggttattttgtagtgttataagtattttctgttaagtataggtaataaatacttagtacttccattttgtgtgtttaataattattttctcccaatttcaggttaattaggcaagctntgaaaagtgttgttgttcaccttcttgcttagccaatctgctggcttagtgagctttcgctaagcgcaacactcatgggctaagcgcgaggaagactctggaagaagatgagttgacaggttcgctaagtgcactgcttcatcttact

SEQ ID NO: 130536 - DNA, 379 bp, Glycine max
ctttctactacttggagaaacttcgaccacagtttcagggaatccattggtagaagcttttataattggcaacaatacacctcactaacgacgctatttttaaattttacggcgaagattattttgcaaaacttatgcaaaatataaactattttttacatttcaaaaaaatatagactaagttacaaaataggtgaaaagtcaggaatcaaaatggctattcactctgaaaggtccctaattctccatgggccggctagagacatcagcatacaccaacaacaaccaccacagttggcatcaacaacccgagttgactacgccgaaccaccactatctaccattgcaccaaacctaaacaccaccattgaatcaccac

SEQ ID NO: 130537 - DNA, 94 bp, Glycine max
agcttcattgcctaacaagccaacttacaactatttgccccaagagacttagcataaggatgcacacgtcaaagttgagtatgtgaaaaagatg

SEQ ID NO: 130538 - DNA, 440 bp, Glycine max
  unsure (1)..(440): unsure at all n locations
tcacaagatgatgccagacgaactgttcctaaccgacattatgtctatntcgttcacgaagaaattgaagactcaatagccgacatcggtcgcgaaactgccccgactgatattgttcagtcgacattgagcaaatgtttattacactctctctctagcggataattttttttacggcagaggaagttttcttgtggtggtgcacataaagaatttacaaaggaggtcagctaagttgttttgtgcgagctcaaccgacgtattgttttgggcgaaactaacatggtgccatttattctgccaggaaaacattatcccatctcggcacaaaattattattgaccgcatatgatcgaaaaatatgacagttgacgtcgggcatgacagatgaccgattgagggctagaatagatacatccccggatgatgccgatcgaaca

SEQ ID NO: 130539 - DNA, 348 bp, Glycine max
  unsure (1)..(348): unsure at all n locations
tggtgttagctcctatttcatgatctcctctaggttacagagaaatacacggacccaattacaggacaccaacatattgaggatgtttgtataagcgaaaataaaatgtgtcatgtctaagatactatatatatcatatgcttatgtatgtatatatgtatttatgtaccttgctcgaaaagaaaaaatataaattaaggtctaatgaaaaaaggtatatcatgggaaaagtaactcttctagctgtaattactatttggntctttagtaattaaaggcatacattatagtcattcaataccgttttatttatcgatgtttttatagcaaagaaatattattaaaata

SEQ ID NO: 130540 - DNA, 380 bp, Glycine max
agctattatatgcatttcatgccaccactgtacagacaaacatcaggcagaccttacagtatcaccagaacatacatatttaccgttgatattaccaatcatatcatctctactcctacacctctggtaagagtatcactttttatatcataaaccactatcgacaaaattcatgtccttccgattctaattaactacgttgtgttaaatataagtgttgccacctaatgctgtggatatcattgggcacagatatcaatatcttactgttgaagcacctcgtggtcatcagaattggaggatgtctatccaagatgggctgcaaactctcactacaccttggtactaatttctgagagacaataacttgatggctcgag

SEQ ID NO: 130541 - DNA, 332 bp, Glycine max
  unsure (1)..(332): unsure at all n locations
attcgctaggaagaagtatganaagacggtctggttcttataaacttagatccttgtgcttngtaggtgcccaaaatatgtatcgtgaggcaccaaatccctatgataggttggatgatgaatatgttgagtgcggcaccatctcttgaaaatacccatgttccacatcttatgattcacaactagggaatcattatcgggtcgccttatttttgggtcatacaacctatggctcttaggaaccctattttggatacttttgggtgacaataacatgaaatattaaaaaaggttatgattgatcattcctatttttaaaatatcaaagggtc

SEQ ID NO: 130542 - DNA, 244 bp, Glycine max
  unsure (1)..(244): unsure at all n locations
agcttatatagcncttctctatattntatatttacacgagttcccatcagncttntgggaggacanccttctgctatagataaaggaagaaataatttaatttaaatccactattttatttgcttgatacctgtgaactaactctaaaataaggaactcttttatgttgatgggaaggttacggcacactggtattatgtctgctgaacatttgcttcaaacttgactaaatattacttattca

SEQ ID NO: 130543 - DNA, 336 bp, Glycine max
  unsure (1)..(336): unsure at all n locations
gatacctactcttttgaatgaaggaacagagatgaaggtgaaatccgaatacaaatatgaagttgtgcttaatggtaagacatttgcttatgcgtgcaagaagcattttgaagaatgcttcaagcccaagccttctccgacttcttactactacaaggctnctcctcctccttctccaatttacaatgtacagaggcaccaccctccaccatcacctacttatgtttacaagacaccacctgcacctgtgaagtcacctccatattatatcaatctccacctccaccatgactaaaaccttagccaccatactatttcaaattaccacctgcgcct

SEQ ID NO: 130544 - DNA, 296 bp, Glycine max
  unsure (1)..(296): unsure at all n locations
caaaatctatttttattcaaaatgaagtaactaactaactaattaacttccactaaaatatacaattactacttaggaggaagggatggaccttgatcaggctcatctaatctacctaattatactaaatacacaacgcagagaccaaattcacagtccgaatattgaaatgcagagattctgacttccacagtcaatttaaccctttaaatggcaaaattgacccaagtgtatttttgacgaaactgaagatcattntcttagcttcccaaaactactcacatgctccatttgga

SEQ ID NO: 130545 - DNA, 370 bp, Glycine max
gaaaaacccaatcataagagcatttaatgtgtattaatcgcccaatctgtttttcttaagtcaatactaggacttttatgcttgtgccaagtcgatcccctagtgataatttcataggtaacttctctccatattgtgctagtatccccaaaatccctgtgtgataatcatataatcctgagatctatggaaggtggtggtaggtgatcacgaaggtcaatccgttaccgactaccatagagagacaacacatgggggttggagagccaatggaacacgtagcatatgaccagaaagatacactatatcatcctgaaatatatatagttataaatcgatgggtaattgatttatcgcgtatttgatatat

SEQ ID NO: 130546 - DNA, 338 bp, Glycine max
agctatagtttaattagaagaaaccttttttaatgctgattttaatccagagatttgagttcttcttttacagcttatcaagctcgttattagcaagggcacattctttttgtagtaagagcttttgattaagcatttccttacattcttcttctgaatattcaagagttgtgggtaagggatttaccctttcttccaagtcttgaaaatccttaatacttcatccactagataccttttcgtctagtaattccttgacctcctgacaaataaaggtgtctggtacatcaccaggtgaagtgggtctcacgacaaatccactaaatgagcttgatgaa

SEQ ID NO: 130547 - DNA, 315 bp, Glycine max
  unsure (1)..(315): unsure at all n locations
cgctctggatacgacagcaccgctctagagcgttgtcaccatctgcgcttctaagccatcaagggatggtcgtttctccgggagcgacacgttcaccttanggacgacgagtatactgatttccaagaagaaataaggcgcccgcggtgggcaccactggttactcccatggccaacgttgatccagaaatagtccttgagttttacgccaatgcttggccaacagaagagggcgtgcgtgacatgagatcctgtgttatgggtcagtggatccccgtcgatgccgatgctattagccagctcctgggatatcca

SEQ ID NO: 130548 - DNA, 468 bp, Glycine max
  unsure (1)..(468): unsure at all n locations
atcctctaagcacctgcngctgcagcttgtcataaaatactaaaaccgttttttgtccaacgccttaaatggtcctctttgcttttatcgcgtaacatggaccgttcaaaagcatgaaatcaacatgcaactttaccgcttttgcaagaactacgtacgtctgatttcctcatcgcaattgaggatacgtaggagcaaaagccctgcntttgtcgaccaccccaagagatcgttaatggtccaatgccttaacatttctctcctttcaaaaaccaagagatcattaatggtccaacgccttaatgtttctctcctttcaaaatcaaaagatcgtttaatggtccaacgcctttgtcataccctaatctcagccggggacctttgctagatgacatgcgaccattcttctgtccttgtgaagggctcggcacccatcattaggcaatttatgacattccaggacatggc

SEQ ID NO: 130549 - DNA, 253 bp, Glycine max
aactccgaaaaccagcttgtctcatacgggaaaacaccaagtatatatgaagcaatctacaagcaactccttcaagacttcaaatatacatgaaaaaacagattagtcaaagcaaattatttaacatacccttttgaacaattatataaaaactgcacgacatcccaatgacaattacaaattgcaactcacttcttaccacacaaaacacccaataaaacaaatcccccaataaaaactgctagtcaataaa

SEQ ID NO: 130550 - DNA, 139 bp, Glycine max
agcttctatcgatgagccaagtgattcttctgctgcagtaattgatgactgtgaccaaggaggagtaaggaaatcacagagagctagacaaccctctagccggttacaggattatgaatcgatacatgattcagcaata

SEQ ID NO: 130551 - DNA, 208 bp, Glycine max
ctgctgccctgactgagggaagatgatactctctactatgttcgtgtaaggcttacggggaaacacgggcggaatttggttgagcctacgaatggatagccctacgaggggcccttgatggaacctttcttgaatacgtacaaatatctgttccaggagaagcaaaatgaggatgacccatgtgacgtgtgaggctaactccatgaaa

SEQ ID NO: 130552 - DNA, 416 bp, Glycine max
  unsure (1)..(416): unsure at all n locations
agctntgaatgctctattcaatggagttgactagaatatcttcagactgatcaacacatgcacagtggccaaggatgcatgggagatcctgaaaaccactcatgaaggaacctccaaagtgaagatgtccagattgcaactattggccacaaaattcgaaaatctgaagatgaaggaggaagagtgtattcatgacttccacatgaacattcttgaaattgccaatgcttgcactggcttgggagaaaggatgacagatganaagctggtgagaaagatcctcagatccttgcctaagagatttgacatgaaagtcactggcattgaggaggcccaagacattcgccacatgagagtagatgaactcatttggtcccttcaaacctttgagctaggactctctgataggactgaaa

SEQ ID NO: 130553 - DNA, 482 bp, Glycine max
  unsure (1)..(482): unsure at all n locations
acctatagaatctcaagctgcttctcaatctccccttttgtgatgaaacttctgtaatctataaacacacacacatattntttcctagtcgatcactcacataaatttccattctccacctttgtttttgaatatatgcttcactaaaaatgaagataattactcatgtgaggtcttgatttaattcctatttctctccccctttggcatcaacaaaaagccaaagtgcgtaacatgtaagaaacatacaaatacaactaatcattcacacaacaatcatggaaaagtataaactaatcatgaagcaagaaacatgactagatcaaatatatagaagaatcacatagtcatataacataattcataattgttcacacacaccatgcacatatagaaatactaaatcgttcacatgtcataataatatagattatttggataagcactgacatctagcaggcctaatctcttctaatgtggag

SEQ ID NO: 130554 - DNA, 422 bp, Glycine max
  unsure (1)..(422): unsure at all n locations
catgcacgctntgaatgaggctgaagaagctgctgctcatgttcaatattatccggtggagattaatttatctcagcctcatttgtcacaagatagtgacatggagtttatggtaaatatttgtcacaacaaagtagttttatctcaacctaatttgttgcagcactccatttttatatattacaattattcatgtttggcatttacatgtaggtccctgcaactattgttccaccaatagcaaggaataagctagccataacaagagccaaaaaaaggaaggttgctgataaagatgatgcacaaaactgaagaagcattttttgttgcantttgaaggtgctgaagttgctgaacacccatttttgttgcgcatttgacggtgctgagttgaaggtgtgatgaaaaactgagaacatttt

SEQ ID NO: 130555 - DNA, 436 bp, Glycine max
  unsure (1)..(436): unsure at all n locations
caaaagtccgcaatactctatgaagactgtctttgttcgcgactaaccgtattcccaacgataaaatcgtcatgtagtacttgaaaatatgatctatgagaatgattttgcatgtgtgttagccacgacgaaagtttcgcatatgactcatcccaatcgccatattcaattgcaatggctttctatttcgccaaccaagcttttttgtacgacaccttgtacgcaaattcactgttaatcctctcttgaatcacagaaatttttattgatggatcttctctgatcatgcctgtcaataacataacaaaatntaaatgataattaacaaaaaatgaacataatatgaacataaaatacgtacctactacacaagtggcgattaaatctaaatcatgtttctcgtgatcttgtgtcatgggcatattcagacatgtgt

SEQ ID NO: 130556 - DNA, 445 bp, Glycine max
  unsure (1)..(445): unsure at all n locations
agcttcttgggatagaacaaataaattaatatttctctagaaccatatacaaaagataccaaaaaattcaaaaataagtcacataatattaatttccaaagactaattagccctttaacaaatatatttatatttttaagttctcttgtaaattaataaatagccaagttctcctaaaatgaatcagagttggtattctagaagaaaagaaacaaaatagtaatatagaatgcataaatatatttagctaagagaagccaatcaacttctatcgtgtgtttacaaaatagttaagtctatccctttaattaccatcatgttatcaaatgcaaaaggaatgagcattaccatgatgttaaacatcttccanagctttcttcttatgtagcangaatataatgaaaatgcatcaatttatacatgttatttatttgtgacacatata

SEQ ID NO: 130557 - DNA, 482 bp, Glycine max
gcgcatataatgcacaagcctaactactttgtgctgtatattaaccgttgaaggagaggaagacaaatgcaagagattctgaaaccgtttgtttgaactacatatcaaagtccgttttatatagactcgatgcaataaatacaaataaatacaggagataacattcctatttacatcatacgatatgcctataattacaaagatcctaattaaataagataacagatcataaaatataaaagaaaaataaatcctaagagattatcttggatactctaaatattctaagatataaaaatgatatcattacagagttctaagattttctatcactcccctcaagctaaagcttattaagctctcagcttgtgagaaagaaaacaattcatttcctcacaaataaataggaagactaacaattgagctccaccataacaatagtttgaagggaactcaatgatgagaagcctaagagaattgat

SEQ ID NO: 130558 - DNA, 339 bp, Glycine max
  unsure (1)..(339): unsure at all n locations
aatggatcaatcattacagccatacgaccattccaggtgcacaagcagaagcaaaaatgctttttgaaataatactgatattgggtggaaacatgggatagataggttacggaatgtgtaacaagtgaacaaccaatattgcttaaagatcaacaactggagaatcttcatatctcaagcatcatcttgttgggactacatgggattctgaaccagctcaagtgtcttgtgcaacccgcacactgttgtctggtagaaaataagcgagacagtaagccttggngtttcgatatcaaccgatacgttgaaagcaaagatgacccactcgagacttccgac

SEQ ID NO: 130559 - DNA, 406 bp, Glycine max
agctagggcccttcatatagcaattaaatgttcacaacaactcaacattcacaatatcattttcgagatggattgtaaatcgattgttgataatctggttgtaaacttcaaaggctctatagattaccatgctttattacaaaaatgtaaagcaaatttatctaatctcttaaactctaaggtgagctctgttaaaatgtaagataatcttgtaactcacaatctagtaagggcttaaggatcttgtgttacatcttatgtatttttttttcttattaatatatcctcttcttggatcctttcccaaatcatgaatgaaatgatataactatggttactctaaaaaaattcaaattcacttatgacttctttaattgacgtgggaagttatattactattaaatta

SEQ ID NO: 130560 - DNA, 353 bp, Glycine max
  unsure (1)..(353): unsure at all n locations
tttactactagacacccacgtgagcccgctaagaggtagtggtgaatttattacaattgaagttagaatgaacattttgtaggatctttagaggatcaacattagggttatttttggatggttattgtattggaatttttcctatatgaatatgtgaaattggtgaagggtgttactcctcatgttgttagaaacatttttgtataatttggttgtgttttggataagaattactagattagcatgataaattgttatattgggatcatgaaattatgattgaaactttttatangtaataacattgaatatgtgatgaattgtgagataacatgtntctttgagaatataac

SEQ ID NO: 130561 - DNA, 377 bp, Glycine max
tcagccccttaagcacttctctctctttcaaatttgcttggaaaaattgtttccgtgaagaaaatccaagccgaggcgcttccgaaacgttttcgtcacgtttccgtgaggaatttcgcgaaggtttcgaccgttcttcgacgttcttcatcgctcttcgatcatcaacgggtaagtacctcgaaccaagcttttcgatttattctatgtacccgtagtggtccacattgtgtttcgcgtatttttattctcgtttaatttactttttatacccccttttgacgtacataagccactttatttaagtcatttctcgcttaacctaaaaataaaataaatctccaccgaacgtttgaattgtattatcccgtaacttc

SEQ ID NO: 130562 - DNA, 409 bp, Glycine max
atctctaagcgaccgcggctgcagcttaaagattgcttgatttgttttacataagcactcagacaatgaaggaaagctggagttgctgcacatgatgtccaacgttatgtcaaagaataagatcgggctgcacaatgcacaatgcaagataaagtgtcagatgaagaattgaagctgcaggattcacgatgtctgatacaatgtccaggacattctgcccgaagatactggagttgctgaaagcattgaagttgcatgatccacgatgtcggatacaatgtccaggacatcctgccagaaaatactggagttgctgacagcattgaagttgcaagatctcggatgtcggatacgatgtccacgacatctggccctgaaatactggacatataaatctgtatatccttaa

SEQ ID NO: 130563 - DNA, 337 bp, Glycine max
  unsure (1)..(337): unsure at all n locations
atatgtgaagatgatgttccaagtaccttggatttggtccgaccatgcccttctgatttccagctgggaaattggcgggtggaggaacgccccggcatttacacaacatgcataatgtaaacctttacggttttaaaagctctatagttgggcctacgctataaagctttcattttgctaaggctttgcgtcttttgtctttgaatttataatacaaggatctttcttcatctgttcctggtctctacccattctcattcatttgcatgtttacttctttttctgaaacggcagattctatgacgagtccnccgaaggtactaatacctgtgacccg

SEQ ID NO: 130564 - DNA, 279 bp, Glycine max
  unsure (1)..(279): unsure at all n locations
agcttctagaaagagatcaacttgatgttctattcttcttgaaagtggcagtccatgaagaatctccttgggaaaaacatctttaaatttctgccataaagggtgaacactaagaaaaacataaatagttaactgattaaaattatcaccctctctctcttggggatcacctctcttctcgggggtatcactcttctttttcatattcccttgtggngccccactaatatctttctcttggtctctcttttctctcattctgaattgggcaacacacac

SEQ ID NO: 130565 - DNA, 259 bp, Glycine max
cgcgtatggagagggtccatcaaccgcactaacttcttgattctggtggtatctaagctcctaaccttgacttggtagaacctcctgccggtttgatttgttcccattctagctaaagtgagacaaaagctggtgcaaatcaaaactccgatatctcatgggtggaatggatgaatgcatgaaagaatgcatataacacagatgtaatctaagaatgcgggggtccggggaatacctcccttcttagaccaatggctac

SEQ ID NO: 130566 - DNA, 448 bp, Glycine max
  unsure (1)..(448): unsure at all n locations
agctagttaaaactcgtttttgtcctacaaatccactgttgactctacataaatcaaatgaatttgttggttgttggtacaatggctagcttttaatcttcttacagatgaatatacaatcttattagcctttatataaatcaaacaccattgttanttgtgtgcacaatgacgggctcttaattgtcttacaaacaaatatacaatcttagcccttagtcatttttcttaagataatcaagttattttgcggagttatatagacatttataaagagtcttttacaaacaaaaaatgaatgtttatgtgtaggttcatagtcaaagtgtatgttgtctcacaacgggtgaatntcttcactaaagcttgcgcttgatacttttggtcattggagcataatgcacatcctcttgatgcaacaaattactctgattggctttgtgtagat

SEQ ID NO: 130567 - DNA, 471 bp, Glycine max
ttaagatgaatttgtctatgacatgtattgatagatatgtatattactaacctcatttcagtcatcaatatatgtccaatacacacaagtatgcatcttaattaatagattgagttaatgtcattggcataactatccaatgtgaatgactctatgtctaattgattgtagtactaggtggcataacctcgttagtgctaggtatttcattgacaaataaatagtcctaaggagtagtatgtatgtatgtctttcttttcttaaaattaaaaaataggtggatgctgacttacttctcatagtattaatcatatacggggctgctcatcacgacccgttccattgcaaagaggctaagaatgaaacagaacatggcccttgcacaagaacatatgggtttttcctcatttgattctgccttctacaaagaggttctgccaacacgcatggcaccttctaggtcaatactat

SEQ ID NO: 130568 - DNA, 347 bp, Glycine max
  unsure (1)..(347): unsure at all n locations
agctataaccatttngaacttttactaaagattactttggtgttcacaaagtcttgacataaagggtgaagcacttagagattttgactttctaagtggttagtcataacacttattattaaatgtttgatatgattatgagaacctaatatcaatgtgcatttgctcatgttcagaagatcattacatagataatgtatctcttacttgttatgagaaaacacattatgtaatgatgattcatcactcacaaagttgttgggttgactacagtgctcataatgctatactcaaaaagaaattctgacgctcacaatgttctaatgcaaatgcattatatatgacaa

SEQ ID NO: 130569 - DNA, 446 bp, Glycine max
  unsure (1)..(446): unsure at all n locations
agcttgaagacngtttgtctntctcatgcccaactctcttaagtgacatatgtattgattgttgtattatgtgttgcatcttaatctctatcttttcatatgagcatcatgcatcatcttgtaggagtaagaagaaaggttccgaagttagaaaatatcttatgtgtttaaaactctctgttttaatcgattacaggctaatcataatcaattacacaagtgtttatagctcgcaaaaaagtttcttgtatcggtttaatcgatcacaaggtaatcataatcgattaaatagttcaaatgagacaatgattgatttttcaagagtctttgctttaattgattactgcgtgatataattgattacttctctcctaaaagtgtntcaaaagtgatcaagaacacttcaatcgatacatcaagaatctatcaatacattgtcttgatgt

SEQ ID NO: 130570 - DNA, 406 bp, Glycine max
  unsure (1)..(406): unsure at all n locations
agaccacgcgcagcgaggaggaactacttatctttacttgaagaggccaatgcaagttgaaagccttggaagacacaggtatgcccatgatgatagggatgactccctcagacttacctgggccaactctatcagagagaaatctgacacctttgaaggattcaaagagttgaggctaagacttcaaagagaaaaagactgagttatcatagagaatcaggagtgaccacggcagacaagttgaaaacagcgagtttactgaattctgcccatctgaaagcatcactcatgagatctctgcagccattacaccataacacaatggcatagttgaaaagaaaaacaggagcttgcaagaggctgctaagagcatgcctcatgccaaagaacctccctatnatctctg

SEQ ID NO: 130571 - DNA, 400 bp, Glycine max
  unsure (1)..(400): unsure at all n locations
cacatttggtactaggtggcggtcggcaatggtgcacaacaagttttccacatccacaaattgcgcataaacccaccattctctgttgcccaccttcaactgagctcacgtacttccacgtagcccatatccttgtttctcttaacaccgggtccccatcaatcctccaagcttctcccacatccangtaaaacanaattcaaacagcacatactatcacagccaagaaaacagggcagaggcagaaaactctgcccaaaacaccaaccaaaatcacagcttttctcacttaaagaccccagtaacatttccttcgtttcaattggtaaccgntggatcaactcgaanattttactggaagtctctagtacataagcctacattttgaccgttgggatct

SEQ ID NO: 130572 - DNA, 362 bp, Glycine max
  unsure (1)..(362): unsure at all n locations
aatcttgccacattgatatatagagaggtgaaaaggggattgaataaattctgaaaagaattgacaatggtcccaatttggctttatacattctaaaaaaatgaaatggaaaaaatagtgaaagatggtgaataatacaaataaataatttccaactcaaaataaaaaagattattcattntggcttatgtcgcttggaccgaatttgggtaactttggggtgttcatgatcggtgaaggaagaaatgagtgatagttcttgtgtttggtgataattgttctcctaattattctaggcatatcttgaagaaacatgtttcgttgaagcctaaccaagtcacaagctaataaagtccttgtga

SEQ ID NO: 130573 - DNA, 422 bp, Glycine max
  unsure (1)..(422): unsure at all n locations
agtcacctgcggcatgcaagctngtttctttatgtgcttcggtcaatanatttgtctaccttcaagtgttagtcgaattatttgcttatgtattgatttgctttttccctattttaggttgctgcttattttggagagagattgatatcagagaaaaccctgagcagaaatgctgtaagacaattgtctaacaataaggtattttcaactgttctgttataaaacctccaagttcttgttttatgattggaaaattattatttttttaatttctagaaaaactgaatttagatctcacaggttatataccatttcataagggaaaaaaatcttcaatgatcttggcatcatgaactttgtcctgtaatcctaattaaaagactgatattaagtgcatacagatggatgtgaagtatgttttc

SEQ ID NO: 130574 - DNA, 466 bp, Glycine max
  unsure (1)..(466): unsure at all n locations
ttgagcaccgccgctgcagctgaagactgactatacgaggatctttttgtttataacaatatctctaagggctaccgtgtctacaacttgcaaactaagaaactcgtcatcagtcgagatgttgaagctgatgaatatgcttcatggaattgggatgaagaaaaagtggagaagaacgttcttatagtcgctcaactacctcaagaagaagatgaggaagaagacccaggtgaaccaccttcacctccatcacaacaacaagatcaagaactatcatcaccagagtctactccaagacgagtaagatctttggtggacatatatgaaacctgtaacttggccatacttacctggaagctgtgaagaagcctcanagcaggaagtatgggctcaggcaatggaagaagagatacagatgatcgagaaaagccacacatgggagttagtaaatcgttcccatggaaaa

SEQ ID NO: 130575 - DNA, 439 bp, Glycine max
  unsure (1)..(439): unsure at all n locations
aaagggctatttcaccttctcgctaagtttatctactggcttagcgagcatccgctaagcgcaacactcctgggctaagcacgaggaagaatccagaaaaagatgagctgtacaggttcgctaagcgcaccgctttatctctctaagtgcaccgcttcagttcatccgctaagcgagaaaggcactaagccaaaaatcattaacgtgcgttaagcggtccatacgtgcactaagcgcacgagcacgaacaaggccacctatttaagcctgaaatcagattttgtgaagggagtttggactgggattcagagctttgcatgtctagggtttctagagagagaaaggtccaagttctagagagttttgagagattntgctgtgtgaagatctgcagagaccagagcttgaagcaggagccggtttgagagcttcagatgag

SEQ ID NO: 130576 - DNA, 167 bp, Glycine max
ccctaaagaatctagaagcagaggttctaccacaccttttatagtaactcacccctgacaaaaactggatgtacataaaaggcttactcaaaactactcaatgcgcgaatcagggttaaccctatactactgaatggccaaaacagggccccgatggaaaccttttt

SEQ ID NO: 130577 - DNA, 369 bp, Glycine max
  unsure (1)..(369): unsure at all n locations
cataaaaatgaacccgcttgccaatcatggaggggaggcggttaatgccatcgaggtgagtaggtcacacgggccaaagcttttgaaggacgtaacgacccncggaaggtttatcaacaaagtcttgcaaaaggcgggcatgattccctgcggcgggcgcaaagaagattcttgcttaatgcatccgggtgtactccatgacatggaaacatgttcggcgataagagatctattacaacagatgataaaccaaggccggcttgaggtcggcagtaagagggaggaggaacaacatgtatgcatgcagtcggtggatgaagaanngacctaaatgcctaaacccttggtaatacacttcaccagggacac

SEQ ID NO: 130578 - DNA, 480 bp, Glycine max
  unsure (1)..(480): unsure at all n locations
agctnttaagaaaataggtatcaaagtaaaatgttgtatcaagtctttggntctagcactattgattatatttaaatattttcctcaattatcaattagccttgtattttctcatagcctacttagggatgcgtaatacttagggatacgtaagggtgagcatcggtcgggttcggtcagtttcgggaaaaaaatgttcattcaattcaaactgattatacttatttcttggaccaattttgaccttctagcctttatgtttggagtgaataggcaatttagtccctgagattgtaaccagtttgcatattagtccctgacttaaattntaattcataataggccctaactttacataagnttttcaaaatagtccctgtcgttaaattctcaggtgacggcgttagtgaggtgtataggtggcaattcaatgccacatagactgcccaacgtggcactgaggtctgcatctataaattc

SEQ ID NO: 130579 - DNA, 347 bp, Glycine max
  unsure (1)..(347): unsure at all n locations
agcttgttggaatatataggatcatgtttctacctntacttactcttcattctgagatcacaatagaatacgcccagttacctacgagtcaaaagacatctttacttggaagaatgaacatagttaaggtaaaaatgaactcatttcacctgaagcaagcaagtccttccatctattagaaggtgagtttcagctgcttcttccttcgcatatatttatagaaagaaagtgaagtataaaaactcaggcagaattcagcatcttatacctttcgccgtgttccgccattgattacttaccactgaaacatatatgccttgtcaaaattgtgaagcataacattcacg

SEQ ID NO: 130580 - DNA, 321 bp, Glycine max
  unsure (1)..(321): unsure at all n locations
acaacaaagcaaaaatgaagattggagaaatagtacacgccattaaggtcatcctctccttgatgaaggattttattgtaatcttaagatttaacaacgcaacgattagcatgaaattcaaagaaaacatgattatctttagcaaaattggttacactaggtatagtcttagtgaattgaggaacaagaagcatatntttaagaacaagctaaggattatgactgaaaggcgaaataatattggatgaccagaggttgtatattataccttgtcataccaatgagatctgattagaacctaaaggagaatttgtggatttt

SEQ ID NO: 130581 - DNA, 482 bp, Glycine max
  unsure (1)..(482): unsure at all n locations
agctttcagtctttaaggcacanattattctctattatttgaagaaaaactcacttcatgcaaagcatcaactagatcttctcttgttgggccatctaagtcttcaataccaagtaatcttcttctctcaacttctctggcgtcctcaatcattatggttaatttgacctgaaagtaggatacagaaagaatcattggatcttcataggcaaagacaatatgattgggagatgcagtggtgtagcaagaacatagcataaatctgaattctaaagagacaaaatggccatacgacaattcaacttagttcttctactcaaatattccaaattatgacctttcacttttctaatatctcctttagaaatagtcttaaaaggagaagataaggttaatgaaatcatcacaattcacaacctcagtacctgtcttaagaacaagcactacatactcgtctattttcacttcacacttttacactt

SEQ ID NO: 130582 - DNA, 272 bp, Glycine max
  unsure (1)..(272): unsure at all n locations
agctntagagaggagaagagaagggttatcctgattatagagatagatccggtggtgggaagagcgaggcaaaacgagatcgtaccagagtctcatggaggtgcaacgaggggtgagaatggtgctgttttggatgggagggggaggaaagagaangagaatgatggtggtgagaggaaagttggtttcaatgggaatgggaatgggcatggagtgtctgcagttgctcctgtgaatgaggaaaaggagggggaggagggaaatggggatgt

SEQ ID NO: 130583 - DNA, 242 bp, Glycine max
tttttatataaagaataatataatttataaaattttgtttttaattagttaagtataatttattaaaagcttagtattatggttatataaaattattaaaattattgtttgatattttatatttatattatttaggttctttttaatgttattgatatttttaagtatgtttttattatacttttattaaatttattttttttatgattaaattttttaatatttgagtgtttttaaattta

SEQ ID NO: 130584 - DNA, 495 bp, Glycine max
  unsure (1)..(495): unsure at all n locations
acctgcngcatgcaagcttatgcactggattcaggctaacttgngttcaatgctngggtatcccgcttcaagcttgggatacgaaacacatcaagaagatattggtcgccatgggagaaacagtggatgtggacgatgatgtcgaggaaaaacggaggctggataaagcaagggtgctcattaagaccccatggaggcctacaatccagcataccgtcaacgtccacatcgacggcaaaacgttcaaggtgtaagtggtcaaggagtgtggtgacgacagccacgactgccatagaagatgatgcagcttcatgggatcgtcggaggagatcgactcctacgaaagatacctcggcattctctctccaagaccgacaacctcgatggagaacaaaggtgacatgcacgacctggtggcatcggaatcgctaactgcaccatgcaggaaccaccccaatcccatcgncgacaacgacgaccacgggataaccttat

SEQ ID NO: 130585 - DNA, 200 bp, Glycine max
cagccacttgacttctcttgggagttttgctttcctactcgctttgagagctcggactttttgcctcttcggtgcttcaaatctcttggtaacgactttaactggcgagcaatctaaactcgatgcgaacttcagccattctggacccaccatgatgccatacaatgccttaagctttgatctctcttaacggggttcca

SEQ ID NO: 130586 - DNA, 444 bp, Glycine max
  unsure (1)..(444): unsure at all n locations
agcttgaagtgagaaagtgtgattattcattcttcctacttttattcgntgaccacagagtggtacctggagatatgtcgcgggggtcaggagaccttggggacgtcaggtggggtgctatttcccaaaactaagcttgaccaatcccgacccaacccgggcatagtcagtcagtgagaacctgtgacgtacctaaacaggcgagctcttggcagtcaaccgataaaagaacaaagaccacaaagcaaggaggcttgtgtggtggctggccaactatggatcttgagtgatatttggaatatgaccactggtaatcaattaccaagggtgtgtaatcaattacaaggcttaaaaatgaagacaggaagttaagatggtctcgggtaatcgattaccaagggtgtgtaattgattaccaggcctaanaatggggtcaggaagttg

SEQ ID NO: 130587 - DNA, 181 bp, Glycine max
aagggacatataggaagatgaaaggttacacaagactgataagtgaaggagtatgagaaaaaggagaagaaagggagaatgagaaaagaaaatattatgtttacaattatttaataacggtaaagtttttaagattctaagttttaaatttgagtttaaaatttgaatagtatcaacttta

SEQ ID NO: 130588 - DNA, 457 bp, Glycine max
caagcttaggttgctcaattgttcctgttgttgcatggaagggcaaaggtctgtatggtggtcagcataggagcacaaaccacaaacccttgcgacaggtacagaattctgattcaaggccagctgggttaccaagttgaccaacgcatccagtttgccttcaagcttcttagtttcagatgatgcagatgggtttgtagctacctcatgcactcctctaatgactatggcatcatttttggcgctaaactgctgggagttggaggccatcttctcaattaaatttctggcttcagcaggggtcatgtctccaagggctccaccactggcagcatctatcatacttctctccatattactgagtccttcataaaaatattggagaagaagctcgtctgatatctgatggtgggggcaacttgcacatagtttcttaaatctcttccagtactcatac

SEQ ID NO: 130589 - DNA, 348 bp, Glycine max
ttctcgcacaggaattggaccggggaaagcaagtcgaaaatggagtggttggagtaccaagaaaatgtttggaagcaaaggtgagaaccttggcaagtcaagaagaatgggccccgttcatggatgtcctggcgctcttgatcttcggagtggtcctctttccaaatgtggatgggttggtggactgggcagtgattgatgcttttctcgccttttacaaccacaaggaaagcccggttgtcgctatcttagccaatctatatgacacattcgaccgaagatgtgagaagaactgtgcaaggatcgtttgctatacaccggccctctacgtatggttggtttcacacc

SEQ ID NO: 130590 - DNA, 321 bp, Glycine max
  unsure (1)..(321): unsure at all n locations
tttttttnaaagnnnaaggggggtttgttgttttaaaaacccccccccccccccccngggggaaactaacagtaaatgataaaattatgtttttaataaaataaaaagggtggaaaaaatttggtagccaaaaaaaggaggttcccttaaaagacacataaagaaaaatatcatttatattggagggaccaacaaatgatggagaaaaaatacaatcaataaattcccacagaaaggggttttattggaacaaaaagaaaagatgcttcatatataaatcaattcttctgtttaaaaggtttagagaaaaacgaatttgaa

SEQ ID NO: 130591 - DNA, 493 bp, Glycine max
  unsure (1)..(493): unsure at all n locations
tgcagcttaacattcaattttagcgtctcgatttattattgtactcaatcagacatccgagtaagaagttattgtcgtttgaattagctcagagcttcaacattcnaatttgagagtctcgttatattacgggacacaatcagacatccgagtaaaaagttattgtcttttggattggctcagagatttaacattcaatttcgagcgtctcgatatatgacgggactcaatcagacatccgagtaaaaagttattgtcgtttgaatttgctcagagcttcaacattcaatttcgagcgtctcgatatatgacaggactcaatcagacatccgagtaaaaagttattgtcgtttgaattagctcagagcttcaacattcaatttcgagcgtctcgatatattacgggactcaatcagacatccgagcaaaaagttatggtcgtttgaatttgctcaaagcatcaacattcaacttcgagcgtctcgatatatta

SEQ ID NO: 130592 - DNA, 428 bp, Glycine max
  unsure (1)..(428): unsure at all n locations
atgtctaccaattaaagacgatctttatagtataaccgtcattgtctctcttggcttcaaagatgatgcatgtccgcatcgtcttaaataattntaagtaaatntcaaaaatgtcattggctntatgatatatagctttctaggacggggttgcagtaccagtcgttgaagaagtaatttgaagacgggtttaagtaacactgtctttgtataacagcttcaaattacgaaaatgtgatcgcctattttcaagacggtttcgtaacgactgtcgtagaaacccctctttttagtagtgattaatggtcatattgatggaggtggtaatagtcatagtgatgatgatgggaatatgttaacgataattaagatattttacgatatacattatctgatgaatctcttagaaacttaatgactatattata

SEQ ID NO: 130593 - DNA, 465 bp, Glycine max
  unsure (1)..(465): unsure at all n locations
atgtcattcaagcgtgaaaggagatgttcttttgtagtacatctgaaaacccaaatcacctcatctagggcagacgaaaggcaacgtgaaatgcgagtctattgataaaatgtttttttttttattcatttcagaattgttggttgctatggtaataaaatattgtcttttggaaaaaaatttagagggaggatattaacactgttcattcggattcgtgggctatatccattgaaattttttattaaaggaaaataatacgtatttaatgttttgattaatgaaataaagattgaaagatcttgcaaatcaaagtataaggtgtattcatttgcattatgacgtctgtatgttatttttaaagagtatatttaaaataaaatttattgtatctaattagaaaacatttaaatattcttaaagaatattttttttgtacaaacattgncatttaacttctactat

SEQ ID NO: 130594 - DNA, 485 bp, Glycine max
tcttcagtcacctgaggcatgcaacgctctagcctttactgtgtagtgtgcacatcttttctaattgtggaacccctttctattataattgttaatgcaatatattttttatggaccaatatgacttcagtttaatacttcttgtttattgataatcaatgtttctgaaactattatgtttgtattagatattgtttgactgtcttgtggattttcctttatctgttacaaagtgggacatcatgtattcatttccaatgtatcgaagatactaatcaaagccaaccactattctgcaacctcaaaagcaagtaaatgcttggcctgtgcaagaaagttatggtattttctcccttatactattatttgtttcacatgagaaataaaaaatttgctatctagtgtcatgctccctttaaatcaaatcaaatataccctttgccccatgttgcatcataatttatataccatggtccacactctac

SEQ ID NO: 130595 - DNA, 487 bp, Glycine max
  unsure (1)..(487): unsure at all n locations
taagccacgcagctgcagcttgatccacttttaattttgtttgcttacncaactgannnatgtgccattcttttagtccccccccnccccccaaccagttacagaatttttcatcctgcagtcctgcactactttcttgaatgatttatcctcaagccagcaatcaaaaacccgaaatggcttcggccttcaatcagcactaaaggattgcaacaagcaatgattagaaaattacggtccaagattagctgaatgctgtctagccatttggaagaccactctgccgagacaaggatcctatcaattttgcttttagttgtctcatttagtttgcaccacgtaaattttcaccccacactaggcacgccctcaacctccaagtcagctatccagtcattaaattctttcaagctacccncccatcctttgacacactccaactctttctgatggcctctaatgcaatcgaaatctcctaaaatacacc

SEQ ID NO: 130596 - DNA, 328 bp, Glycine max
actcccaaaatatgacattgttggatcacaactaatagcgagctgaccaggttgcagagagctccagaaaatagtgtcctgcctagcagatttcacacaatgttgaggaagaatttttaacagatcaatgtttctcctataggccttcgcaggaaaacatgtatatggatatataagtgttggacccaatatatctggagcatgtgccaacgctattcaatttccaccatattataatcaaaattgaaccaatctactgttattcattgatttgttcagattatactcgaatatgattaattaattcaaccaattctttaatcttatc

SEQ ID NO: 130597 - DNA, 427 bp, Glycine max
  unsure (1)..(427): unsure at all n locations
gctgcaagctatttattcattgatgtatcttcatgntttggattgcccaaggtattttccttgctcaattgccacactacggtaaaaagagttatttttaatttagttttcattttgtaataaaaatgttgtttttaatgatttatcatcttttcaaaaaaatatgtgaaaaaactattacaatgaacttattttgtttattgagaaattctacgtgaaagaacttccacagctagcttatctcttatatccttatcagaattaaaaaaaaaaaaatctttcagaagtgcttatcattttcattactatacactaatagcattacaccagttaataattagaattaaatatttatgcaaaaattacgtaatgcacatatttttttaataaatttcaattttgcaattgataagaattttctcaacta

SEQ ID NO: 130598 - DNA, 483 bp, Glycine max
  unsure (1)..(483): unsure at all n locations
agcttattaagtatatatatatatatataatatatatatatatatatatatatatatatatatatatatataacaaatcagaaatttatatagttatattgatatacatggaaaacatgcatacctatatcctaaacatatatcaacaagtcattgacatcaagcaaatgcctaattacaatgtgaataaagctttagtcaatttcttcaaatggctgtagtcaattcaattatccaataaccactgcacatatgaatttcatgatgagaagtcacgtacgcaaaagaaaatatatattttgtgaaataaaagtgtcaatatgtgtatgtgtatacattgcggcgtcgaaaatttaaaaaaaaaaagaaatcaacaagattgaaaggccaataaatctggtataaacaacaacactaccacacacattttatgcttattatanagaatcccattttttagatacacactccacacaagaacac

SEQ ID NO: 130599 - DNA, 260 bp, Glycine max
  unsure (1)..(260): unsure at all n locations
ataagggtggtgtgtgttttttgacacaatatctaaccttatacttgatttttgaggaggcttgattaataattcatgagccttatttggttctaanttcaaatcacctgatgatatctaaacagcgatcgtgagtgcacttcacatttgaattggcttaccagttacttattgttaccaaatagttacactagatttttgattggtttacaagaattggcttaccagtcataccattcattattatagcacacgtcact

SEQ ID NO: 130600 - DNA, 443 bp, Glycine max
  unsure (1)..(443): unsure at all n locations
agctntgagggattggtctttgccagttaattgatctatgtgggtctgaaaaaaggaaaatttagtcatcctgcttggacgaatgagaaaactggggcaaatgaagagggtgagaaagagggagaaacccatgctgtgactgccattcctatacggccaagtttcccaccaacccaacaatgtcattactcagccaataacaaacctcctccttacccaccgcccagttatccacaaaggccatccctaaatcaaccacaaagcctgtctaccgcacttccaatgacgaagaccacctttagcacaaaccaaaaaacaccaacaaaaaggatatttgcagcaaaaagcctgtagggttcaccccaaattccgttgtcatatgctcgaacgcaacgtgtgcttataatggaggagccccggngcattccattgagcattgtatg

SEQ ID NO: 130601 - DNA, 408 bp, Glycine max
  unsure (1)..(408): unsure at all n locations
agtaccgataatgggtctaccatcacgattatcgtctccctttccattattgggggtaccacctgngccgccagatccctccaccttttgggcgtgttctttgaaagatccgtccccctttttgcacatgttctgtagttgcatcctattcagaaccatatcaaaattgtactgatactgcctaacacaggcaaccattgggtccttccaagaatggactcgggaaggttcctaagttagtataccaggcgacagttgtcctagtaagactttctcaggaaaaatgtatcagcagtttctcatcttttgcgtatgcccccatcttccgacagtacatctttagatggttcttggagcgagtagtcccccttgacttgtcaagggccagcacccttgacttgggaatga

SEQ ID NO: 130602 - DNA, 147 bp, Glycine max
cttgttggtctaattgggctaacccctatgcaattttacaactctggcctaattcccttctttatgtatcaaagatatgtcaagtgggaggggaatgatgtctaatggtgttaatggattgaacccatatacaaccttaagagggga

SEQ ID NO: 130603 - DNA, 487 bp, Glycine max
  unsure (1)..(487): unsure at all n locations
agcttcagcttcatgagcaanacatnnntcattctctaataatattaacagnagnagtaaaagaatacctcaaaanaatccaagatatctcgaaacaagttcctctgactattaagatctttctttgcagaaccttttccaccagcctctgtagaaagatttttgcattgatttatcacctttcctttcaatccttgtaaaaatatgtagctttcaagtggtttactcccttgcgttgtatcacttgcactgtctaactcagcagaaaatttatctataactccaatttcaaaaattagagctagtgcttcaccagcagcaattcgtacagacctatcttccttgtctagaagactagataaataggatattgaactgcatcaacaacaaaatagtaagttggatcccaggcattgctaaatggaatacaattctctataataaggatatatattggcactggcaataaaacatagatataatttaa

SEQ ID NO: 130604 - DNA, 169 bp, Glycine max
atcccacatcacaaaacggataaggttcataatcattttttatactaggggaaggcttataaggttgcaagacacttatattataagacaccattatgtagtcgcatttgaagctactgaaggccattctaagtatggtgcttctaggaaaatgaatgggaattgggct

SEQ ID NO: 130605 - DNA, 482 bp, Glycine max
  unsure (1)..(482): unsure at all n locations
gcttctttgagaaaacttccttgagaagcttttttgttataacttccttgagaagctagagcttagctacacacacccctctaataactaagctcacctccttgagaagcttccttgaaaagattcttaaagaagctagagcttagctacacacacctctctaatagctaagctcacctccttgagatgagaagctagaacttagctacacaccccctataatagctaagctcacccccatgacaaaatacatgaaaatacaaaaaaagtccatactacaaagactactcaaaatgcctcgaaatacaaggctaaaaccctatactactagaatggccaaaatacaaggcccaaacgaaggaaaaacctattctaatatttacaaagataagcgggcttatacttagcccatgggctcgaaatctaccctaaggctcatgagaaccctanggccttcccttggatctctagcccaatctact

SEQ ID NO: 130606 - DNA, 500 bp, Glycine max
  unsure (1)..(500): unsure at all n locations
tgatccttagagacacctgcggcatgcaagctggtgtattcaaaacacatgtgtgtgtgtgtgtgtgatttggattcatnctggcaaaatcttaaatatttaaaatacaacacanacatatcaaatgctttattgcatntggcatctcacttgtacaacccatcgttctgtttgatgcttcaagcattntaaacagtcctgtactatagatcgagctggtttaaattcattatcaatcattatatgcctaatttgttgttgttagattagaaaccaccaatatatatacaactggtatcaagagcaaaagagaagtgcaggtgtgtacagctctgtgttttgcccctaactgataaaattccacacaattgtagcctgtaggttcaattntcagcataaagttgtttgtcatgtaattggttactcctcttgttggagatttataattaaactaggtaactcgtcataagataatggcatgtctgggaggatatcatata

SEQ ID NO: 130607 - DNA, 474 bp, Glycine max
  unsure (1)..(474): unsure at all n locations
cgataatggtgtctaccagtgcacgatcattcgtcttcccttttccactcacttggggggtacacacctgngcgccgccagataccctctcaccttttggggcgtgtgtctttgaaaagatccgctccccctcttttgcacaatggttctgtatgttgcattcctatctcggannaccatatcaaaattgtacctgatactcgcgctaacaaaggcgaaccattattgtcccttccaagaaatggactctgggaagaattccacagttagtgtacccaggtaaccagctacccccagtaatgactttcttggagaggaatgtattagcaattcctcatcttttgcgtattcccccatcttctgacaatacatctttagatgggtcttgggacaagtagtccccttgtacttgtcaaggtccagcacctttgactagggaggggtgatgatattgggttctacgaacaactcttt

SEQ ID NO: 130608 - DNA, 182 bp, Glycine max
gggtttgttggggttgtttttttgccaaaggtgtttgtgtttaaacaaccctattattttatttagggaaaaaaatatatatttgcagaaagtctaaaacttaagaatattaaatattacaacgtacaattatttagattagaaattagttgaaaagaattattgttttaaaaaacatatta

SEQ ID NO: 130609 - DNA, 437 bp, Glycine max
  unsure (1)..(437): unsure at all n locations
agcttgaagtgagaaagtgtggaatattctttctttctacttttattcgttgaccacagagtggtacctggagatatgtcgcgagggtcaggagaccttggggatgtcaagtggggtgctattgccaaaaaccaagcttgaccaatcccaacccaacccgggcatagtcagtcagtgagaacctgtgacgtacctaaacaggcgagctcctggtagtcaaccaataaaagaacaaagaccacaaagcaaggaggcttgtgtggtggctggccagctatggattntgagtgatatctagaatatggcctatggtaatcgattaccaagggtgtgtaatcgattaccaagggtgtgtaatcgattacaaggcttaaaaatgaagacatgaagttaatatggcctctggtaatcgattaccaacggtgtgtaatcgatta

SEQ ID NO: 130610 - DNA, 475 bp, Glycine max
  unsure (1)..(475): unsure at all n locations
agcttatgcaatatacaattgtaggctttgtttcaattttcagatgcagaaactgctacctccgcaaaggatgctttggatggaagaagcatacctaggtgacagntgtattatttgtctgacatggtatttagttcaactgtgatggacatattggctgtggatgtggtgcatatcctcagattggtcaactatagactgttgtaacttgtatattcacactctcactttggtttatttattatgtagtttatatgctgtttttgaaattgtaattatgaatcattgaatgtgtaaaatacggttagctatatcattccaactggaccaatcataagaataaatgtgttgagttcaagttctttctactaattagtagttattagcacattcattggctctgctgatatgggtatataccttatgcattattattgcttaactggtggtcggtattatgattgatctttgactt

SEQ ID NO: 130611 - DNA, 431 bp, Glycine max
  unsure (1)..(431): unsure at all n locations
tctgngancacccgggcccttccgctcatatcatgggatcccccaagcgcttaattagaattgaacctgaaccaactttccctaaatttgctgcgtttgaaaacattcatgcatacacatacgcatacgcatgcatattgttgtggtaaaacaggggcaggatcatcttgggctaccttctggggtagagacaaaacatgaacggcagaaaccaatcaaggtaagataatgacgcggtcaagattggccatacccggttgtttattacttgcaggtacttaaggacggatgcaagtggggatggggtcacggcctactccagaccagatcagggcagaggttgcatggcctcgagaatggcccganggcccaacatgagaggcaccccagaagctcctcgcgatggagaagaagccacgatgatgaggaga

SEQ ID NO: 130612 - DNA, 274 bp, Glycine max
  unsure (1)..(274): unsure at all n locations
ggttttttttttaagaaggnatcacaggttggtttttatgaagtcatttccgccccatttgagaggtttgggacaggcgtcctttatcctgttaatccgcactctaactcgggggatacaacatcggctcttgcaaaatccgtctgttggaacagattttcccaacctttctagccctaattttcttaggagacgccttctactttctcagtgtcggggcagccttataacaaactatgcgagctgtaagtgctggggcactgccgggccgcct

SEQ ID NO: 130613 - DNA, 472 bp, Glycine max
  unsure (1)..(472): unsure at all n locations
agcttgctaacccatggaagctcctatatatcttccacactttttgnggtgggccattctttgatgacctagattntcttagggtcaacttggaccccatttctaccaactacaaaccccatttctacacagaaggtacacttctctatattttcatagagggtgtttttcctaaggactaaaagaacttgcctgagatgtcctaagtgatcatttangctcttattgtacactaaaatattatcaaaataaacaactacaaatctacctatgaaatcccttaagagatgatacataagcctcacaaagatgcttggtgcattagtgagctcaaaaggcatcactagccattcatacaaaccaaactcgatcttgaaagaaggttccactcatcaccctctntcatactaatttggtgataaccacttataagaatcaattttgaaaagatgttggcaccatgcaactcatc

SEQ ID NO: 130614 - DNA, 395 bp, Glycine max
  unsure (1)..(395): unsure at all n locations
cttatcaagatgttgctctgatccacttgttttacttgtcagnggcctcagatatcttaagaaggggggttgaattaaaatatcccaaactacttccccaattaaaaatctatttcactttntattcaagttataaattcccttaataatgaacttcttaaatattgattcaaataaaaaaatctgaatatgaatataaagcaataataaacaaaggagattaagggaagaaaaagtgcaaactcagatttatactggttcggccacacccttgtgcctacgttcagtccccaagcaacccgcttgagagttccactatctctgtaattccttttacaagttctaaacacacaaggacaatcctttctttgtgtttagaattcctctacaacaag

SEQ ID NO: 130615 - DNA, 388 bp, Glycine max
  unsure (1)..(388): unsure at all n locations
cctcaatcaaacatggcgagtgtaaaagtatattgtcgtcttgaatctcgcatcacacgcttcannacattcaatttcgagcccgttttgatattatgtacgggcactcacatcaagaccatcnncgagtannaaaagtatattggtcgtcttgaaattggcatcagaatctttcaacacttcacatattctgagcgctctccgatattgtgaccgagcacgtcaatcacgacacttcgatgtaaaaaaagttatttggtcgtttggaaattggcttcagaagcttcaacccattcaatttcgagccgtctcgatatgtgacgggactcaatcagacatccgagntaaaagttattgtcgttcgaattggctcagagcttcaacattc

SEQ ID NO: 130616 - DNA, 339 bp, Glycine max
  unsure (1)..(339): unsure at all n locations
atggttaggtttggtaatatcctcattccttctacaaggaaagatgaaaaccatcttttctaaactgggttgttctcaacagcttaatggaaaaagtttttgacttgattatcgctttcttttgggacaacgaataaagaagtgcttcaacttactaggtatatgcagtngtatgtaccacgtggagatggctcatctttgtgcactataaaggctactgttactcccctatgggtaatttggcaaaagatctcaaccaccacttctgtaggatttataaattcttcccaacaacataagctatgttcaccaacatggattgcacccttttatattaac

SEQ ID NO: 130617 - DNA, 289 bp, Glycine max
taaacaatcatgttccaacccttttgtttttgctcatcactttacccgtcagataacaacctttggttagcgccatggccacgaaccaaggtgttctctcaacacttgacaatgctcagacacacagctaccacttcaaggcaattgtgatagccgggatggggttcttcaccgatgcatatgatctcttctgattactgcagtaataagctcataagtcgcttgtactactatgatcccaatagtcatagtccaagaaagctttcaaagaatgttaacaatgcaatac

SEQ ID NO: 130618 - DNA, 472 bp, Glycine max
  unsure (1)..(472): unsure at all n locations
catgcaagcttaatgcaatcatccatactaccagtatttgattgggtgactccagcagngaacctgacgtacaagtagaaatggttagtccaatttacatcatgaattgattatcataataaatacaagaaaaaatgcacttaaatacttaagttacggtcttgtatattaagcacaaaaataagggtaaacgagataaaaaacctcaaggttatttatttcttatttgcaagtaacctcaacgttgcactgttctgatggatattaaaccccatatatctatctttctctaaattcctgaagttgaaagcagaataacatagcctagggtggaaattatactgtcttaacaatccacacaattaaattcatttcccaatataatacaatgatcagctaaccataaggcacattaaagaagaatgatttgaatagtcaatttcaaaataatgagatccagcaatcacacctg

SEQ ID NO: 130619 - DNA, 419 bp, Glycine max
  unsure (1)..(419): unsure at all n locations
gcaagctnggatattcagcctgacgagggatcgattgtttattaatttaggctacaacatagaacacaagaacacgattgattagagaaatatatttctatgcattagcttgtttgttagaaagacccaacatatctacctactgttgtcattttatttaccttgcatttgatagtttttagcatataagtttagtttaaattttgtttgaatttatcacttatacatgttctctcaacaatgcttcgattatgaacttaattcaggctaacattagttccctgtgtttgatactcagattcatccgttttaattttaaatacttgacgacccggtgtgctttccggtgagaaaactccccattgaaaattccctgagacatttatgcacaaaaagtaactgcagtggggagcgaacag

SEQ ID NO: 130620 - DNA, 200 bp, Glycine max
  unsure (1)..(200): unsure at all n locations
cataaccgttccccaacataacttgggccatcattaccgctgcatcggacagacaaggctgcccaaagagggagtccacggaggaaatgctgaccacctcaaaagactggaaagtagtttctaacgattcttctgcggctttcacataagccatggaggatgggcagcttaccaagatatcttnctcgcctgacacgatg

SEQ ID NO: 130621 - DNA, 459 bp, Glycine max
  unsure (1)..(459): unsure at all n locations
agctngaaggcatgtaacccaccatcttcttatttataataccggtaacgngtctactatcattgttatcatctccttctccatcctttggggcgctacttgagctgctagatccctccatccttgggcgtattctttaaaagattcatgctccttcttacacatgttctatagttgcattctatctggagccatatcagaattatactaaaactacctaatgaaggcactcactatgtccttccaagaatggacttaggaaggttccagattagtataccaggtgacggctgtcccaataagaatttcctgggagaaatgcatcaacaatttttcatttttctagtatgcccccatattcctgttgtacatcttcaggtgattcttggagcangtagtccncttgtatttatcaaaatccggcaccttgaacttcagagggataatgacatctggcac

SEQ ID NO: 130622 - DNA, 298 bp, Glycine max
tggaacgtgaaaatctttgaaacttttcaaatcatttggtatggtatcgatacaccatctgggatcgataccaagagaaaaactctttggcaacatgtttgaaaaaatccatgtgctctcagtttttgaaaaaccttctatacttatcttgatcttgatcttgaatctgatcttgacttgatcttgaacttgcccttgaatctgatcctgaattcactctctctcgaatcttaagcgtcttaactctctcttgaatctgaatctcctgatcatctgaccattgaccatattgttgacc

SEQ ID NO: 130623 - DNA, 491 bp, Glycine max
  unsure (1)..(491): unsure at all n locations
catgcacgcctaaggattaaatctttaataataaacgtaatttcacacttatcctataacaaacaaggtgctcctttgtgaaacacatgttcataattgcaataggacaccattgatattcgtcgtagagcaaggacatgtgtataaattattgtttttgaggccaccagatgatggaagctgatgggaatctaagagggttccacaaacaaagccacaaagtatattgtgtctcgatttcagctactgacacatacaaaactacaacagaaaggttctngaaccgcccatatcttacctcaataatgacaatgatatcactgttgcctcttctgcatcgtgcgcacgactgataatggctntaggagggcattgcactatttatttatatcacggatgtaacatggactaatccttctgttaaaaaatggactaatccaaccaactcctatttatatgtggggttgagagtcccaactcaactcatcata

SEQ ID NO: 130624 - DNA, 411 bp, Glycine max
  unsure (1)..(411): unsure at all n locations
cttctagaagnacaagtatcctttcttcataacatattttcatgtgaatgaaataatatcaggtgaaaaatgtttaaacatctctatactacaattgtggatgatgtaagtaatttcaatttcatagtctcctttcattatgtaataattaattttttttatgttttatttgattaacaatttacattaaaactattcaaaataggtttatggatgactggagtacaagtttgggtcatattttggtgtatggattctttgagcctcaatccatgcacaatggaaaggatagatgcaaccaatgtcaacattacattgtaacatgggtcatggaatcacaacgacacgtctacctaagagcttacttgaatcagttagttaaatgtatcatatgctttaagagaatgattg

SEQ ID NO: 130625 - DNA, 480 bp, Glycine max
  unsure (1)..(480): unsure at all n locations
ctgcagcttgaccattgaacgaaatttcttttactctgatgnccganngagtcccgtaatatatcgacacgctcgaaattgaatgttgaagctctgagccaattcaaacaataataactttttactcggatgtccgattcagtctcgtaatacatcgggacgctcgaaatttaatgttgaacctctgagccaactcaaacgacaataactctttactcggatgtctgattgagtcccgtcatatatcgaggcgctcgaaattgaatgttgaacctatgagccatttcaaacgacaataactttttactcagatgtctgattgagtcctgtaatataacgagacgctctgaaatgaatgttgaacctcagagccaattcagacggcaataaccgtttactcggatgtctgattgagtccngtaatatatcgagacgctcgaaatcgaatgttgaccttttgacaattcaacgacattactt

SEQ ID NO: 130626 - DNA, 301 bp, Glycine max
catcacgctatctaaaaatcttgaggtggatccaagtgctccgatcattcattaacatattcatgttttggtggcatactcaccactgtttgtttctttttggaactcacaatactaataaagcgcggaggcacccctattacactcgatccacaaaaatagattatgaagagggagtgcgagaacaaatgaaggcccgcctattggccttaaaagaaaaaatggcttctatcacagaggctatgcttaagcttcagaaaactatatatgataatgccacggcgaccgcctccaatacaac

SEQ ID NO: 130627 - DNA, 205 bp, Glycine max
ctgcaaagggatctttaataaaaatatgaccatgtcctataactgatggaacatcatagacttattatgatgtgaggaacaaatacgtcattattgataaattacctcttgtttaaacaatctggtatttaaaaggacgaagactgagaaacagaagattttgtttctgatacatcgatgatacaattgctgactatataatact

SEQ ID NO: 130628 - DNA, 474 bp, Glycine max
  unsure (1)..(474): unsure at all n locations
agctngcatcttgatggattctagttactcatcattatgaaatatatcaatagctacaactgacactaggaaagtagaaactgataaatttgttttcaaaagtattaccatttaatatagcatcaagatttggtcactgtcttaatggggcagaggataattaacgtgttgctttaaatntatcaacatttgacctacacnaccaaaagttaaattaatggctagattagtgacatagatttgttaaactgaatttttctcacataaaatgtcacatataaaccagtgatgatggatgagcaaaaggaatctgaagctgttgatgagctcaccaaggccataaatntcaaacctgacttgcanatgcttcatctccgagcagcattttatgaaggcataggggaactatcatcagctcttcaagattgcaggcagctctatgcttagaccctaccatacagacacacttgatct

SEQ ID NO: 130629 - DNA, 472 bp, Glycine max
  unsure (1)..(472): unsure at all n locations
cgccagcttaagaaagatctaagagattcatctctattgtttattataatgactgttacagacaatattaagacaactctccctaagactgataatgctaaagagtttatgagattagtgggagagcattcttaaacagttgataagtctcttgttgggacattaatgagtacattgaccaccatgaagtttgatggttcacatactatgcatgaacatgtcattgaaatgaaagacattgcagcaagacttaagaccttgggaatggcagtgaatgagaacttcattgttcagtttattctaaactcattatcgtctgagtatggctgtgaatgagatcttgctatattggaaaagaagcttactactattactgatgctagtagcaataaagagaaagcccattataaagcttaagaaatatctaagagaatcagcctaatgtntatgagaatgactgtacaaacaatat

SEQ ID NO: 130630 - DNA, 433 bp, Glycine max
  unsure (1)..(433): unsure at all n locations
ctatgcgcctataatattcagagtgctttgcttatctatatcgcacaaattcaaacgtgagggttgttcacacgtnaattcatcattaacatccttgtccaatgtctcaaaaaaagaaacaatccatattgcaccaactaaatcaacaatgcagataacatcgattgttcacacgacaatgaatcattacgtcctctattgaagtgtaagttatctattaaaagctctcatagaaaaaaatgggttatttaaaaaacataaaaaaatcacatttttaaggtgtattgttcaaaaaatcacaacgaaattgtatctttgtatggtatttctagaaactacataacgaanatgaaactctgttgtgtaattntgaaaaaatatcctacaanaactttgtttcattttgttttttttctcacggaataatatttca

SEQ ID NO: 130631 - DNA, 399 bp, Glycine max
  unsure (1)..(399): unsure at all n locations
agctntatgaccataagatttctcttaaacttctttccattcctagacatgaagtctcatggacattttgttcagtttaagatgataaaagggtttcccaacatcatttacatcccaaaattgtcccatgggtgaccaatccacaacaagcattaagcaaaggcacaaaatgctaacatagagcataaacatgtgaaatatatatatcattcatataaaaagatacacgagagttcagaagtgactacatctacaccttacaacaatagaaatggaaatgagtagcttgaaattacacatggaaagggatgaagaacatgtgaacacttgagagctttctctccctcaaaatagtacaaaaacctgcaattgataccaacgatgataaaaagagagggg

SEQ ID NO: 130632 - DNA, 351 bp, Glycine max
  unsure (1)..(351): unsure at all n locations
gacatgcttancaaagtgagctggccggtgagtataatgttagttccaccttcaatgtctctgatttacctctttttgatgcagatggagaatccgatttgaggacaaatccttctcaagagggagagaatgatgaggacatgaccaagagcaagggcaaggatccacttgaaggacttggaggacctatgacaagggctagagcaaggaaagccaaggaagctcttcaacaagtgctgtccatactatntgaatacaagcctaagtttcaaggagaaaagtccaagggtgtgagttgtatcatggcccaaatggaggaggactaaatgacaccacttttgtctcaatttt

SEQ ID NO: 130633 - DNA, 457 bp, Glycine max
  unsure (1)..(457): unsure at all n locations
attctttngtaatttaatgtttgttctatgcttaataagggtggtgagaaatgttgatgattaaccaaggttcaataagactcaaatgcaaattaatgattgagaaatatccaataaggtccaagtttaacaccaatgattgatctaggtccaataaggcttaagtgcaatcttgatgtttaaccaaagtccaagtttaaaactaatgtttgtccaaggtccgatagacctaactataacaataataatgattattttacggttgtaccctcctttccagaaaatatattcccaaatgccccctttntcacattatgtaccaacctaccncccccccccctccctttatttaggtgtgaatntggtccccttcactgaatcacaccgtgtttttatgttcgtcttaaaaccatgaaacttggttgtaatgggttttatttctttctatttatattaa

SEQ ID NO: 130634 - DNA, 413 bp, Glycine max
  unsure (1)..(413): unsure at all n locations
gcttctaagtatattctattaagattctagattatgcttaatgaacactatatatatatatatatatatatatatatatatatatatatatatatatncataagacttacaaatttggtatgtcatgattaaaacagaaaggattttaacctcacaacacacacttccctttatcttggtattcgtcttattggaacttaaacataaaaacacatgcattttgtttcttcaattgcataatcaaagtcatagtggaaaaagccaaagctttagaggaaaatcaaatgtaaaaacaagttaagcttcgtgtcgataagaactacatcaattaaaaatgaacatagtgcattaaacattgagtgaatgacacatgctacatatcctaacttgttgaaggctacacataattggaa

SEQ ID NO: 130635 - DNA, 485 bp, Glycine max
  unsure (1)..(485): unsure at all n locations
agcttagtagcagttacagaagtcaatatttctgcctatgactatgatcatttctaccttacctattttccattatggccttggtttgtgtgtctagattgacaccagagtcctaaatagacaatatctttcattgcaagcttagcaacagtcccaaaacccaatttttcccgaaaccaagtgtcatgatttctatattaccaattttactagctgttaatgttgcatcatagttttgctatgtcatctacctttggtctcatctctgtaccttacaatttagtcaattctatcattaccctntttcaatatacagaattagcaacatgcaaacatatctaatccaggaaattccaccactaatagtcagcctataatccataaccaatgaaatgcctcatatccgatttattccatcnttctaatttattggtagttctgtagatataaaataagcgtgtggttcctccgttcaacataaatct

SEQ ID NO: 130636 - DNA, 417 bp, Glycine max
  unsure (1)..(417): unsure at all n locations
gcaaaggttcgtgtgggggtcggcataggagcataaaccacagagtctggcgacaagtacagattttttattcatggccagttgggttaccaggttaaccaaggcatctagtttaccttcaagcttcttagtctcggctgatgaagatgaattcgtggctacttgatgcactcctctaatgacaatagcatcacttctggcactaaattgttgggagtttgaagccatcttctcaattaaatttatggcttcagcaggggtcatgtctccaagggctccaccactggtagcatctatcatactctccatgttactgagtccttcataaaaatattggaggagaagctgctcanaaatcttgtggtgagggcaactcgcacatagtttcttaaatctcttccagtatttatataagct

SEQ ID NO: 130637 - DNA, 493 bp, Glycine max
  unsure (1)..(493): unsure at all n locations
agcttagaacgataatgcaagcaattttggtttatatatatatacttcatatctctntgtcaaaaagagttgtttgtttataaagactaagtggaaaggtttaattttaaaagtgtttgtaagggttgtttttgttgaatccatctccttggttttaattatgacaaaccattatgaatgcaaattgaaaagatgataggtttcagtgatgactaacattcttcttaactactttattgtttattaatgtaggatgtagacatgttcattcattctaaagtactcagaatgatgctcaaaaaggctcaaaacaactgtcaaagttaagaactatgaagatttcttgaagcccgttagaataatgaagtttacttccctctaagtacttgggtcctagcaagatactaaacaagaaaggccttacatagatgacttgtcaaagactagatgaaagcattcaaagtcagcatgaagctctagcagagtcaacatt

SEQ ID NO: 130638 - DNA, 265 bp, Glycine max
cttgccacttgatcaaccagaaacgaacaacaatcctctttttctgcctcttactggactactaaaatctattcagggaagatactgtcaaacacttccacttccaaacctgcagataagtttgtacgcgttatgtaggttccaatgccaacaacctttttgagttgagaaatatgaacaatacggtgatttatggactgtagaggaagctccaactgatatgctactgtcatatcttctcattttggaggggaccataaaactg

SEQ ID NO: 130639 - DNA, 438 bp, Glycine max
actggttatgaactatataacttctctttgatatcacaaaagacaatgggtgtgcttaagggaactttcaatccagtcaaaagggtctgaattcaagatatttgtgcagtagtctacgctaaacttcgatattctgcctctgtactggaccttgcaataacctgctgcttgtgggaccaccatgatatgacattaggactaaagtagatagctgcaccagaagtaaatcttttgtcatcagtatcagatgcccaatctgcatcacagggctctaagagtgtatggttgccccaaaacagcatgttcaagatgaagaccatgcaacattgtacctttcaagtatcttgagatttgttcgctgccatccagtgagaatctaaggattggcataaattgcaaactttgtcactgaatagctatctacgcctatgaagtcaa

SEQ ID NO: 130640 - DNA, 367 bp, Glycine max
  unsure (1)..(367): unsure at all n locations
aatatattggacgcgaaaataaaagtttacttgtttatgggtaccttcatatcttggtcccaaagtgaatattgacaatttttgagaattgtcggatgtcttgacaagagatntcaaggcaattcttttaatggcatcatctttcaaattgaattctttaacagaattgtaagtaccactactagctcctttgggtattgttgaattatgaaaactaatattttatgatgatataaatgtacgagaataagtggtttatctaatgggagccttgcaatagaatatgtaaggaatatgaaatctttgactttcttgttagggcccaactttgctaatgatcattactcactctaccatgcatattgaa

SEQ ID NO: 130641 - DNA, 211 bp, Glycine max
  unsure (1)..(211): unsure at all n locations
cctatatttattnaaaagaacctacaactcatttgggtcttgcatgaccttaacgcctaggggttttcgtgcatatccacatgattacgttgaacttaccatatcacaaaccttctaaagttatatgaaatgtgtgtactatgcttgatgcatgaggatctgtgtattgatatgattaaagcatttgaatacaaggtaaattccgagtatg

SEQ ID NO: 130642 - DNA, 330 bp, Glycine max
  unsure (1)..(330): unsure at all n locations
acccctacgtggattganaagtgcacaatcaccagcacgaatattgcgtcatcctacatggacaatacagtgattaaataaaaaaatctacaacattctagggtattaaagtaatccattctgaatgtggttgaagcaaattcattaagagaaaattaagtaaataagcggaacaatatagacacacaattgtctgagttttcaatgcagaagctactattgcagccaaaaaaacttctaaaccggaaaaaattatccttatactctgcttgaagtttaatcggttccaggaacaacttcacaacaggattacatactgttaaataattt

SEQ ID NO: 130643 - DNA, 356 bp, Glycine max
  unsure (1)..(356): unsure at all n locations
agctgggagcgctaaccggagacttatcagtatgtgagngggaaagagatcagactacgtgcacgaatcttatacccagcgggttatagataggaccaagagctttggcctaccctaccgcttacctagatacctatcgtccaccatcccaccatcattcttgcctatccccttcgacaccaaggaagagtggcatgaacaattaaccaaagaaaggcgtgaaaaagagacttggaagaggagatgccaggagctctagccagagaatgagactttgaaagggaagatagcccaacagagccgtgagcttgttatgcagaaccagaggatgaatgagaatgacgacttgcttcgtc

SEQ ID NO: 130644 - DNA, 314 bp, Glycine max
aatggcagaacatgccatcaactcagccctcgtccaagaggatggaaagcaccacatacccatctattctgttattcgtgtccttcatgatgctgagaaactgtaccaaatgaccaaaaaggtagcatcggcactcataacctatgctcgatggtctcgctctatactagacacatactttagaatgtcatactctcaatttctcctccaacttcataaatgtggaggtccataaaaatggtttcccatcttggaatctcacaagattctatggctctcttgagtgggataggagaaaggaatatggcatctca

SEQ ID NO: 130645 - DNA, 341 bp, Glycine max
  unsure (1)..(341): unsure at all n locations
agcttgtgctcaaagagtttcttcttccaacttctatgatcggtctagtggtaggagaatttggaaaattcaaacaaagtcctagactcttgtacaccaaaacagtttctttggcctctatgtatagtacccaaaaaaaaggtaaatatgaaagcgatcaagtcttacaatgattcatctactaaggtacaatgagatcatatccttaatgacattaatgttgtccacatccaaagcttgcttcaaattaccagaatttctaggcanaattcatgagaaatatattngatgtgctctaactcatatatatatatatatatatatatatatatatatatata

SEQ ID NO: 130646 - DNA, 368 bp, Glycine max
caagatagtcaattgcgcataagtttagtttacaaaaagtgaaattttttattttatgaattgaatcgataatataaaaatcatgcaaggaaacaaattagaaattaggtcacataattttagaaaaaacatagaatggttcatcaaataattgtaaagttgatataattaaagaattttaaccttaaagaatggtgtagtaataacaattgatgagttgattgtcttgtgtatcgtgtgtgtgtaagaaagtaaagttaaataaatatcaactctttctagacaatgaataaataagagctgataaaacatagccaaactagctgataagctagttgaagcgaccagttgaacaactataagttagc

SEQ ID NO: 130647 - DNA, 463 bp, Glycine max
  unsure (1)..(463): unsure at all n locations
tagtattctgttgtttgtttattgagaattatacctgttctgtcagggcagtgggatcttttctggaattcactcatgacgagattgaagtggtgagtcagtgctgtttcagtagttaaataaaaggcaaaaaaaaaatgtattgctattcgttttcatttttttagtgttagcaaactatgttaattttatcactagttagtgaaggatttccatattggctgtaataagttcataactcggaaattttaatgcatagtgtatcaatgagaattaatctactgcaatcaactcccagattagaatntagaaccttcagagagaggggcaaaggaagaaatacgcaataacaatntcaacttgtccaggcaaccaaatcaccattactntanaatatcaatgctatgtaatgcttctattataaccgcctttaaatctctggttttgttgtactatacgagct

SEQ ID NO: 130648 - DNA, 417 bp, Glycine max
  unsure (1)..(417): unsure at all n locations
ggatggcataataggcttgctttcaatcaaacaaatngagatcagttccaagcttggtaacaggtcccatgcaagtaacttggatttgagatgaaaaatcatcattgtaccagcaatcactgttgtattatctataccattctatattagggtagaatatgtgccttgtaaactnttaatagagatggagggcgggacagaactcactnttctgtgctctcagctggaaggttgtcggttgtggtgtccttcattggtgtaatttcagctgccttctcaagttcagggaaaagagtgtactccacaatactgctgattgaaccttcagtttcggttcccattgaaagaccaccatcagatatgtcacttaatctctcctctgaatccgatctncaaatttaagaagcaatgtcttca

SEQ ID NO: 130649 - DNA, 310 bp, Glycine max
ctcgacacgcgccgtgggttatttatgagagacgcttcgaccatgtacctataagaatcacacgtttactctataaagaaatgatgtaacctgcggtgatatgtctttcgttctgctgtctgcctcttaatatgttgcccgaaaacctcatataaggaggtagtaccagatcaggctactcaatccgactgtgaagatgtgcaacaagtgttgcaatacctgcatacagcagtggagagcaacccctcaagaagtgcatcacattcactgagacttgttctgaatcctgactgtgctgggcagtacattg

SEQ ID NO: 130650 - DNA, 488 bp, Glycine max
  unsure (1)..(488): unsure at all n locations
agcttcatgtntgagatgagggggtgtnggttattctacattgactagggatatggccaaaatagagtatataagtgggaggtaatcctcaccttacacatttgttntgtaggattgagttaggcccgaacttaatttctaagatcatgctgcgctttggcatactataacccttccagaccctccatttcttttgggcctggatccaacaattgatccttgttttgttaaacccaatgattgggcttaggcccaaaatccagtatcccatcagatttacagatcagtgtccttttgttctgttgcatttttagttnttaccctgttgaanaactagaaagtagagagagaaaataagagtttgccaaaatgggagagagatggagatcaaataganaaactgtatgctgaagcacaatgtgtgttaattgcccctaacccatatctgatatctcaacttatactagatgctagacaaatattatgat

SEQ ID NO: 130651 - DNA, 103 bp, Glycine max
atttatatatttatatatgtttataaatggatatggaaggatggataaggcaattaaggaagatggtcgttcaatgtccaaaaaaaattttatttccgttatg

SEQ ID NO: 130652 - DNA, 424 bp, Glycine max
  unsure (1)..(424): unsure at all n locations
ctgcagctttacttatgggagggcgggctttcttatctttcttgtctcaaccgcgagctntgaccaccgcccttccttcccgtgatgcttctctttatatctgcctgagtgggcttatagcctaacccatacttcccacgatttcctttggcatttattaggatagttatgccgccgttgtctttgcctaaacccattccgggttcgtaaccgttccccaacataacccgggccatcattactgctgcatcggataggcaaggctgcccagcgaaggagtccacggaggaaatgcttaccacctcacaagactggaaagtggtttctaatgactcctctgcggcttccacataaggcatagaggatgggcagctcactaagatgtcttcctcgcctgatacgatgaccagatgcgcttccacta

SEQ ID NO: 130653 - DNA, 344 bp, Glycine max
  unsure (1)..(344): unsure at all n locations
atggggtacccatcacatgtggttctgtgtggcggtcgggcgatggtgcaaaacaattcttcatatccacaaatcacgtataaacccaccatcccctgttgcccacctccaactgagctcacgtactcccacgtagcccttatcctcgttcctctcaacaccgggtccccatttaatccttccaagctttcacaacatccaggtaattccacatccaatcatcatggactcacaaaaccaagcaaaatagggcaaagacgagaaactctgtcccaaacacaactcanaatcacagcttttcacatacaaataccccagtaacattntctttggtccaattcgta

SEQ ID NO: 130654 - DNA, 400 bp, Glycine max
  unsure (1)..(400): unsure at all n locations
cctaacgtacaaaatagcttagattgtataatatatatgaaataccaaataaagttccagaataggtaattgaaaaacatattcaacactaaataataatttaatttacaaagtccaagttcattgactagcactagctccacctcctcctgtacacgcatcttcaggcacagaaggcgactccgaaaccaagtccaacgcgtcatgagacggcgacacgtggatcccactcaagtcctcgatcattttcgctacgtggctcatcctgngtcgttgatcaggcgccgccacagtgcacgccatagcaatctgcacagcgccaccatcttctcctcaatgtccttgtacctcatcagctcgagatcgaacaacctccgcgtccattcctccctcaccactg

SEQ ID NO: 130655 - DNA, 411 bp, Glycine max
  unsure (1)..(411): unsure at all n locations
atggggcctatgcaagttgagagcctttgaggaaagaggtatgcctatgctgttgtggatgatttctccagatttacctgggtcaactttatcagagagaaaacagacaccttcgaagttttcaaagagttgagtctaagacttcaaagagaaaaagactgtgtcatcaagagaattatgagtgaccatggcagagagtttgaaaacagcaagtttactgaattctgcacatctgaaggcatcactcatgagttctctgcagccatcacaccacaacaaaatggcatagttgaaaggaaaaacaggactttgcaagaagctgctanggtcatgccttatgccanagaactccctataatctctgggctgaagccatgaacacagcatgctatatccacaacagagtcacac

SEQ ID NO: 130656 - DNA, 427 bp, Glycine max
  unsure (1)..(427): unsure at all n locations
tggaagnggaggaggcaatagtggaaaggttcatgtcgaaaggttgaatactacaagacaaattcttatcacaaatgttacgagactattcaatctgacgacctcattcagagagatggacacttccaaaataacgaagttaatgattttttagttttaagcccattatgatttaagactctggtcgaatgagttagaaaataactagcaacttagagtgtgttttatttccctaagacaaaatcgttcttttactttgtagttatgatgtatgtagaaccttattaagtattctagtctaatgtttatttctcctctttgtgtcgtgcaagactctgtttcttggaaaacgatgttatattctaaacttattctggggcaacttcctatacatcatgcttacatatgaaatttgatcctttcaccc

SEQ ID NO: 130657 - DNA, 459 bp, Glycine max
agcttcccgtcaatggtatttgaggttttattattccattgcttcctttagatttaaggcaaatactgtttatcagtgtatgtatttgaaggtcagtgggagtaaggttattttctaattctgcatattgatgatatcttgcttgtagctaacaatcttggtctccttcatgagactaagaaatttctctctagaaactttgaagtgaaagatatgggtgaggtaagctatgtgatagggatagaaatattccataatagatcacaaggattgttaggcttatctcacaaagtatatatatcgataaagtgctagagagattcaagatggaaaggtgtctaacatcgcctattctaatttagaaatgagactgagttagtctcgcacaatgtcctatacatgatatggaaccgaaaccaatgaaagtaattttgtatgcatcagttgttggtgcatctg

SEQ ID NO: 130658 - DNA, 470 bp, Glycine max
tagagccacccgcggcatgcaagcttggagaggatgcttaatggatttattttgatttatagaaagagggaggggggagcacgaaattgaaggaagaaaaagggagagaagttgaactttgagttgtgtctcacaagactctcattcatcaaagttacaacaagtgttacacgtgcttctatttatagactaggtagcttccttgagaagctttctttacaaaacttccttgagaagctttctttagaaaacttccttgagaagcttctttgagaaaacttccttgagaagctagagcttagctacacacacccctctcataactaagctcacctccttgagaagcttccttaagaagaatcctaaagaagctagagcttagctacacacacctctctaatagctaagctcacccccatgacaaagaaaacatgaaaatacaaaaaaaaagtccttactacaaagactac

SEQ ID NO: 130659 - DNA, 151 bp, Glycine max
cgtctgccttattaattgatctactccacacattgatgtccattaacaagccaggaatctatgctcatataagaggattaatgggggacctatttccccaattctatatgctagacgatctctaactggttccagcctgacacgcttttca

SEQ ID NO: 130660 - DNA, 186 bp, Glycine max
ctaccggatttgtatttcttatgggtgattgtgtgtttacatggagttctaagaagcaagacattgtgacactttttcttgtgaagccgagtatgtagctgcaacttcttgcacatgtcatgccatttggcttagaagaattgtggaggaacttcaattggtgcaaaaggaaagcaccaagatcta

SEQ ID NO: 130661 - DNA, 374 bp, Glycine max
  unsure (1)..(374): unsure at all n locations
cattatccaaaccaattaacatgtgattatnctaaaaactggagttcctacagaccatcatagtttgcttatggcaaagccaaatgagaagtaacaaagtaaactactagtcatgccaacattgctgctaaaccagatacactataagagtcaccttctagcttgttgtgacataagcttgtagtggttggcttttcccaagcctagatatctgttagcactccttattctattgnntgtgaatttcatgcaagtttcactaaataaccttaactcaatcttgatttatggggggtaaaattgctaacaattaaagagtcaatgggtaaaaaatgcanataagccaatttcttattcccaaagtaagatgagca

SEQ ID NO: 130662 - DNA, 310 bp, Glycine max
tcaatttgtttatcagattcgaaaagcttcagctgaacaactgtaccttgtcctcttggaaaatgggaatcttgtggctgaagacaaaattgataaagcacttgaaattatttctgagacttgctgggatggcgatatggattcagctaaacaccaaagattaaaattgtatgagattgtaggtctggaggtggggtcacttggcaataatagtgatggaacatcaaggaaaaccagcagtaagaagcctgcaaacttagatgaaaatgcttcatattcctcattagttgagtcatccgggttctaaatt

SEQ ID NO: 130663 - DNA, 395 bp, Glycine max
  unsure (1)..(395): unsure at all n locations
cagctgatatttgagatggtgaaaatactctctttttagctcagcccattaaactcacaggtgaaacgagcttatntgccggtcacgtgggtcccacaaactttttttttcttacttaaagaataataatgaaataagaatgacttattttagttaaaataaataaaaaaaataaagaaaccagtctataagtgggtgtgtctcgtgcattagcttaataaaaataaaaagtaaaattaagtagtttttatatgataggtgatacaatattttgatttagtagtgatttaactaagggcaaatgatntttttagacaattcacaattattcttaaaatgatttaacatagattaaatntagaatttttttttgggatgcaagccagcccgtgcgg

SEQ ID NO: 130664 - DNA, 368 bp, Glycine max
ttcattggtcatcaattatctcatcacttaagccaagaaaaaaaaaatagtagtgctacttttaagttctggtatatgtgaagtaccgacaccgtcccaaacaggggtgtccccatttctgacacgccgcacgcacaccgaacacacattggacatgtgtcggacacgcatttgtcttgtccaggcgtaaaaaaaaaacctttcatacggtttttgaagccggaagccaacaaacacaacaagacttttctattttgttttttcaaactatatttttaaaatcttaaagaaaaagatatatttaaatataataatgatagatttttattattcttttacgcttctcttacatcgctacgctttttttt

SEQ ID NO: 130665 - DNA, 454 bp, Glycine max
  unsure (1)..(454): unsure at all n locations
gcttgcataattntgtgaaaaatgattttctttgntaaaattattggtactggaaattacatcattttccaaattttgataattttggggttgttggtttgaaaaatgttttgtttttagttttaattgtaatttttttattttattttctgttttataaacttgatatagaaagataaaaacaaactttattgtttttttttataaatattcaaaaaccaaaaaaatgtgaaaataaaatcattttttgattaaaaataaaaatagaaaacgtttttttaagtgaaattctgtataacctctccacttaatttccctcacttcttcnaatttatagtggccaaattaatactctaccaattntgcttaattggaagttaaacggagtaatcaccataccacaatcacaatgtctcttgttttacacgggattgttctagtttngtttgtctgt

SEQ ID NO: 130666 - DNA, 354 bp, Glycine max
  unsure (1)..(354): unsure at all n locations
gtggctcattttaaaaccattccggccttgtaataaccaattttaaatggtggctatattccctattataaagaaaaaaaanataaaaggcttaaaaaagacagtggcanggtaaaaaaatctatttgacaaataaaataacaagtttcagaattatttgatgttaaacagtgaagtngacanaaattgtctcgttaaatatgtattgcaactagtatttgcaatttgtatataaactataatagtttaattgtannnttgaaatgcaactntgtattataattttgtgtaacgcttgttaataatttatatgtatatatggggcgaatttaatttttatactattaataacta

SEQ ID NO: 130667 - DNA, 467 bp, Glycine max
  unsure (1)..(467): unsure at all n locations
gcaagcttcttagggttagatccttaagaagcttacatataactngatccgtaagtttcttcaacagcttacggatcgagttgatccgtaagtttcttacggatcatcttgatccgtaagaagcttatagatcaacttgatccgtagtcttcaatatattgttgaaaaatacatatatttttataatttgatttgctttcccagttgaatatattgcctatcaaggatcaactctcctgaaagccatcattggagtgcatattaaaatttaaatgaggacaatgcgcaggcttattgtgcctcattntaaaattcaaatttaattagtagaatctagctgacaagaataaagctcttgagtcttgaccgcttagtgatgcagatgttttaatattatgtccaagacctacacttaanagttaagctgaagggtcaagattagtcttatatcttctattattaccaat

SEQ ID NO: 130668 - DNA, 249 bp, Glycine max
  unsure (1)..(249): unsure at all n locations
gattacgcacggcttattatgaatcacaactgtattagctgaagttaatcaagagtggccactgtgaaacgattacatcctctggctgtcgaataccctagagtctaattctttgtaaatactttttaactgtataatctcggccaacccttatgctacttcaataggaaatccttcctattaatataccctntctaatacctaaagactgtctagacatccatctagaatgaactaaattgcattgtc

SEQ ID NO: 130669 - DNA, 493 bp, Glycine max
  unsure (1)..(493): unsure at all n locations
gcaagcttcatatgcaagctcaaagganatattattatcgtttagaaacaacaaacacttgaggatgaaaacctataaatactagatgctctgaagaaatgagtaacgaacctacacgctatcattcaaattctttatgtagaaaactctttgtatattcttataaagtttgaaaagctctcaaaacatcttgaatactctaagacaaaaaactaaatgcttagatttcacatttgtttgtaagatgattaagatttaatcagttagcaaatcaaacaacatatcttctgatttgtatagaaccaacagtggcttggtaggacaaagaatattcggttggtaaagcttgacgataaactntgttgtgagagctaanagtaaccgtgacaaatacttgtaacttttgtganattagtgaaacttgattggctaaccaaaaattgaacttagtctgaatggtagagaccaaccaatataaatatgtgtcttactt

SEQ ID NO: 130670 - DNA, 369 bp, Glycine max
tgacccaaacaacaatcaaactctcgagttttgtgttattagcacaacactctaaccaactaaactaataaatcaattatattataaaataattaatgtcactatatgtaacactacaaattttaatatttaatgcgcatgaaaatttagataataaatcttgtaacaattaattatgatctaacaattaatttgtttacacatgttcgtagaaaaacaaccactagaccacatgtcattcacttattggataattcaacactgcagaaagtgagtgttgactagcaacatagtaacaatgaggtgaaacaagagccctaaagaaatagagaacataaacaacaaccgttgcgagtcggagctgccggt

SEQ ID NO: 130671 - DNA, 417 bp, Glycine max
  unsure (1)..(417): unsure at all n locations
agctntaggtgtgtattagagtgctatgagtttcatntgtgtctcttctccttgactggactcactntttatagttgctggagtggacttgggcctgcgcactcatgctaagcctgtgctgctcgcttagcgcgggtgcctattttcgcgcataacactagtgcttgttttcacgctgtgtgctgcgcatgacttgggttgggcctttcctcacgcttagcctgtgcttctcgctgagtgggttgcacgctgagcaagctcttctcgctaagcctaatgccacaatcttcctttttcatattattggtattttatgcatctttttgccttttaatccttcatttttatagatgcaagccatacaaaagaataacatttattcttaatcattgagcataaataacttgtaattaaata

SEQ ID NO: 130672 - DNA, 363 bp, Glycine max
atatctttttgaagacaattatcttacgaattctcactctacatggctccatgtgactatgtgaattttttctacctggccaccccgttctcaactttgggaacacaagtacacaacactgcaagcaccaacttgaaattcttattcggatatgcatatagactgttaaaattcatttctgttacttcatattcttttgtgacgttatagttttatttcctaagttctattatgactgcttctgaaaataatgcacaagtagcacaaggtagttcacgtaaatacttgtcaccaaacatgtaataatatatatcgatcacacaccaccactacaagaattagtatcatacattacatacacct

SEQ ID NO: 130673 - DNA, 446 bp, Glycine max
  unsure (1)..(446): unsure at all n locations
agctntccctctatgaacaaatacccttctgttaaatagaatccatcttgggcctttntcccacaactctcataaatgggagagaaatgttcatctaaagcatacaagtccctaatattatcaaatcctaaaattngagctcctagggagcaaaacaatgtgtgtctcctagagagggcatcagctaccacatttgtttttccctttttgtatttgataacatatggaaattgctctaggtactctacccattttgcatgcctcttgtttaacttgctttgccctctaatgtacttaagtgattgatgatcactatgaatgacaaattccttggaaacaaggtaatgttcccaagtttggagggctcttattaaggcataaagctctttatcataggtggggtagttgagggtggcactatgaagttnttcactaaaataagcaat

SEQ ID NO: 130674 - DNA, 395 bp, Glycine max
  unsure (1)..(395): unsure at all n locations
agctntggtagaacttagtgtgttgtttggtttgtaattacaagttgtattaaggcttgttttggtagtaatgaacaatattgctcacgtggaattggccattaattntaatttgatctaattttaaattgtcaatattacattttaaaatgatatattattattattaaaataaaatttaatattgaaataaatgtttgcaatagtacaaatagctaagaaatggtaatttacgatgacgacattttgttattaagaaaaaaattataataattaatgtgactaaaaaaatattttatcataatcactctagttgtttagaagataatttttttagcatacaaaaattgttaaaatatttaaaatatgagaacaatagttactacaaattatta

SEQ ID NO: 130675 - DNA, 415 bp, Glycine max
  unsure (1)..(415): unsure at all n locations
agctggaggagcggaagagtacccttgttttgttataaaccaacaagcaacttattcatggctttgaacattgcaatgcattaacttatatcttagttaagggatactgccaagtggtgtgctctaactctaagtattgattnttgggatatgagaagtatgtaggggaaaaaacttcatattggttttgctgacatgggcacaagacagatatgagagagacaaacttcaacatgttacttgttgtgttaatgtccataagtaagttgtactaataacatatcctaacctaacgattaacttaagtgacaaaatgtagaatataccattttgctatnttcaaataaaacctatgacttgtgattcaaaataatatatcttctttcctcactcctactaacttaaaactagattt

SEQ ID NO: 130676 - DNA, 362 bp, Glycine max
  unsure (1)..(362): unsure at all n locations
ctatntaannattcaatttcagctgttaggagaattntgtctcctaaattctttgtcctattttcaaaatactaaaccaaaaaacaaaaataataaacacacacaaaccagcttcattaggaagagaatggcatgccttgattctacatgtccctcataatcaagcataatgtcacacaaanttgacatgacaatgtcacacatatcataagtgacaatgtcacacatatcatgagaacatcatgtccaagaaacatagaaaacttaatttgaccaaattagtaagaaacatacaaaacatgtgtttgaacaaatttgtaatgacaaagctttgtgaccaattatttgaatatttaatttga

SEQ ID NO: 130677 - DNA, 448 bp, Glycine max
agcttcaatggaggaagagattgatggagatatagagagagagagaggcgtggatagttgaaggaagaaagggagagaagttgaactttgaagtgtgtctcacaagactctcatttatcaaagttatgacaagtgttatacatgtttctatttatatcctaggtcactaactaaatgaaagcttccttgagaagctttcttgagaaacttccttgataagcttccttgagaagctagagcttagctacacacacccctctaatagctacgctcacccccatgccaaaatacattaaaatacaaaaaagtctctactacaaagattacacaaaatgctatataatacaaggctaaaaccctatactactagaatggccaaaatacaagggccacaagaaggatacctattctaatattacaaagaaaaatgggtcatacttaacccatg

SEQ ID NO: 130678 - DNA, 410 bp, Glycine max
ctcataatgtgggcgtgtacttattacagatagtccaaaaagtaccagcatttgtatgttgaggatgaatggagggtgtattcggatgtggatgtgcccgagcatcattatttcctgttctcatgcttgaagttgcattcttggtaaattttatataaccattcttgttgggagcattattctgaaatccttccaatctcctgttctgggtatatgctaggctcttgaccatatctgatagtaaactccacgcctctgaaacaagcttgaatgcaccttctgcacctggagacttgttctgttatggtgaagagtagagcccagcttctggactgcttactaactgtcgtctcatccgcatatggatacactctcagtttaccataccaaatcatctttccatgtattta

SEQ ID NO: 130679 - DNA, 490 bp, Glycine max
gctttataatgcacaccttccatctacatcttagtttattctaacacctgcaatattcctaccacatgaaatctacactataaagtgcatcatctcctcttgttgtcaccaaataggttattagacccagaggtccaagaccgactttgtccacactttataattattttttatcttgtttgtatctttttgtgtatgctagatccatgagccaagaaacataaccccattcatggacctccattgcagatctactcagatggaattcgttgaccatgtctcatatttctttgccctctcttttatgctttgccgcatcgtttgttctcaccatggtcaataaacatcttcaacgaccatgatttctttgattaactatataaggtaaaatatctacctctttttgtattgtaaataactcattattaataacaattacatgatttaattgtatcgtcactaaaagacatggtgaatacgcacactaatc

SEQ ID NO: 130680 - DNA, 150 bp, Glycine max
gaaaaagaatattcaagaaacttacatgaactatctctgcaaaagcgtttttcgacgtcacggtatctacgtcgattatcaaaaaccggtgcagtacataatgctgtggcatttttgtaattaatgccaattatattatgctgttaacga

SEQ ID NO: 130681 - DNA, 293 bp, Glycine max
ccacgccgtcgacgaccagacttgtagaagcccttcttcttaccgaattctttgtgtttgaagaccacattataacataagtgtttaagacaaattataacttcaacttttgtattggaagtgcttgaaaaaccttgagaaattgctgacctatctaaaaattgaacatctgtataacagcatcagcttcaactttgcattttatttgaatggctgaaaaccttttagaactcattatcatgcttagagattgaacatccatatctttttcggattagccgagattctagctt

SEQ ID NO: 130682 - DNA, 419 bp, Glycine max
  unsure (1)..(419): unsure at all n locations
accagtgggacactactcttaaaacaaaaatggcgtacaacctcctcccataaatacaaacatcaatgtaaatntagagcaagcttatgcacatatttccttacgaacgttcacttgcacaagacatcctatcaactaagaaaaatgcacccatatacaatcaaggtagcttcattacctagattatttacatgtacttccaaggtgtatttgttatttacatcacacacgcctccttggctgaatttacatacatgcatactcaaagcattgtggggtaccaaaaactgcacatgcgctcatcttggtatttctaatacccatacatatacaaacttcacgatgaatcttgactacctacacaataaggtgctacatttcatgctnntttttcaagttttgctacctaaagccacatg

SEQ ID NO: 130683 - DNA, 428 bp, Glycine max
gctttagtcgtcatagacctactcattgttacgttccagcaaacgttgcatctgtgcattcatcgcatccagtaacagacgttgagcgccgtccaactgatgatactcgtcaccaccaccacctgctccagccataattcaacaggaaaaaaaaatgtgcaataaatattattaaggttttaggacctcacaacactctcctcacgtgtttaactcttagatggtagtacactcgtgtttaatgctctcaataggcttttgtgtaatgtattccctcttgccttttaccactcgtgtttcctcttaagttcctggatggaccaaattagacacacaaggtaatataaaataaaaggaaagacaatataatgatcacaaacagatctgatctgcgataacaacttggacttgatttgataataatatat

SEQ ID NO: 130684 - DNA, 274 bp, Glycine max
tataccttctcaagggccaattcgggttgcttgccatgcattatgatatgcaacggtgtatccgaactcttgtctaatgaatgcgatgaatgtagaaatggttaggtgctccgtttggtcaaccatcacaagggatattctgcctataagttttgaatccattctgttgtgtgtaaagggtggcatgatgcacatgtgaaggccctttatcattctaatttcccaacttttagatttttctttttacgctctagttttcttggcaccctaaatt

SEQ ID NO: 130685 - DNA, 411 bp, Glycine max
  unsure (1)..(411): unsure at all n locations
ctgcagctagcatttatgacttaagtttcgataatntgtggcaatatcaagntattgggatgataataaatgaaactgctcccttcgacaataaaatttgggatgatcttttaaattgacgatacaaaggaatattaatggtacttggccaagaatacgtagggaaactatgcaacgttctcattcctatctacagcaaaatgtaggtataattaaagttcattttcaatgccctttttttcatatgtgatttatcttatacccacgttatatcttttttgttcgcattacatcttntcaatttttatttttctcttcttatctcatatttcttcttctttggatggtatacacatccacttagaatgtgtttgtgacagctaaaattattacgtctcagttttttttttt

SEQ ID NO: 130686 - DNA, 474 bp, Glycine max
agcgacgcagctgcagctttttgtcggattgctatttaattgttattgttttcggctaggtttcttcgtgcgagctcaaccgaagttgtatttcggccgacgccggcattttgtcggccaggaaaacattagcccacctcggcaaaaaaaaaacatgattcaccggtattgacagaaaaaaatgctggccttagtcggccaggaaagatgaccgatcgaggtctaaaaaagaagcatgaccggattacgccgatcgaacgtttcctaatagatatcctccaagtattattcagggattgaatggaaaaaacaatagccgacatcggtagttaaatagccgtgactgatatttttcagccaacatggcgcaacttctttcacaaacgctggccgataatatttctttacggaaaggatgctttcgctgtgggtgtccctataaatttcaggtaggtcgctggtttttctggactc

SEQ ID NO: 130687 - DNA, 360 bp, Glycine max
  unsure (1)..(360): unsure at all n locations
agcttcctcggggccatttcttgctgtgtatatcaaaggcgcanaacggaatcaaanaatgcgaataatgaggaccctatggctgcaaactcatcaatcccgtgggtatggcttttgaaaggggggaaaagaagtttttgaatgcaaaaacgtcccccctttcgtcattcttataatttggtgcaggggtggctcgcccaggcgagctaacttgcantttttttttgaggggaacattaaccatgtcccctcctttctcatggattagcgtcttgcctaacttgaacttacttaggttagaattaggcgttgattacttatttttactctttaaaacaaacaaatagtaaaagaaaactg

SEQ ID NO: 130688 - DNA, 416 bp, Glycine max
  unsure (1)..(416): unsure at all n locations
tgatatatagcagtggccgtcttgaaacttgctagaccgcatacaaatcgctgattatagtaaagctcctagggaggcatgctacgtaaaccactactacaagaaagcactttaaaatatagtattaaggagtaatttctgcatttgtgttgaacatggtcgccctcacataactgacaggtgccctcactttaatattccaattggccggtgccacattgaagcttgtcacagttctaccatcacagggtatgatttctctggcaatnttgcccncaattccttgacatgggttggcaactagttttggaccctttgatggacactgaattgacatcagcagctncacccacgttggtgagtatgagtgggcattgattgtgaaccttattaccttatttgaagtagttaaccat

SEQ ID NO: 130689 - DNA, 479 bp, Glycine max
  unsure (1)..(479): unsure at all n locations
agcttaacttttatatgatataaaatatgttattganaaaaggttggtgtgttganctataaatttaaatcattattaagaagtgtgactctacaatattaaattggttttatagtttcatttgtgaccaattatgcagtctttaacgagagactaataaatatatataatgtaaaaattggaagaaaaaaaaataaggatcctctntttttatttcatatccctaaatggctaatgaagcctaaattgaattaaccaagtaacctcaataactcaatagggatgaattgagttcttttaaatatatttcacgctcaaacctaaatgcctaagaattataaagatgaagaaaattgatttaaatcccaaaaccncaaccgcatttaagtacaaataataaaaacaagtgactaaagagtttggggataaaaagagtgtaacaatantttattttggcctagtcaagtngacctacatat

SEQ ID NO: 130690 - DNA, 354 bp, Glycine max
  unsure (1)..(354): unsure at all n locations
gaacgaggatgagggctacgtatgagtgcgggagctcacttgaaaggtgggcaactggggatggtatgtttatgtttgacttgtgaaagtgggagagttgatttgcgccatcgctcgatcgccacctagtaccacatataatgggtgccccataatccaacaagcttaatgtgagaaagcgtggaagagtcagtcttcctacttttgtttgttgaccacagagtggtacctagagatatgtcgcgggggtcaggagaccttggggacgtcaggtggggtgctattgcccaanaccaagcttgaccaatcccgacccaacccgggcatagtcagtcagtgagaacctgtgacgta

SEQ ID NO: 130691 - DNA, 186 bp, Glycine max
tgtgagaattattgcataagagggttgtaataggaaaatttttaaattactaagatgggatatttatgatgcataaatataaaaactgagatttgttatgagaacttttaaaattaaagattgtaagatgtataggtgtcatggaaggaagttattacaagcaaatgattgagacaagaaaatctt

SEQ ID NO: 130692 - DNA, 404 bp, Glycine max
tagatgcctggttatttgtaacccaactggccatgaataaaaaatctgcacctgtcgtcagactctgtggtttatgctcctctgccgaccaccacacagacctttgcccttttgtgcaacaatctgaaccaattgaacagcctgaagcttatgctgcaaacatctacaatagacctcctcaacctcagcagcaaaatcagccacaacagaacaattatgacctctccagcaacaggtacaatcccaagtggaggaatcatcccaaccttagatgggtgaatccttcacaacaacagcaacaacaacaacaaccttatttttagaatgttgctggcccaagcagaccatacgttcctcaccaatccagcaacacaacaccaacacaacaccccagaacaacaaca

SEQ ID NO: 130693 - DNA, 476 bp, Glycine max
  unsure (1)..(476): unsure at all n locations
ggactaggcgagttgattntagccttagtttcactttagttataagtcaattcaattaagaaagagaaatcccaaagagaaaacgtccgattgattttccgctttattttactaaaagacgtctttttttattattatattattattatacctcttttttttatttccaacgtggttacggcacgaccgaacggtcggaattcattttaaccgaagttaacagataatacaattcaaacgatcggtgaaaatttattttatttttaggttaagcgagaaatgacttaaataaaatggcttaagcacgtcaaaagggggtataaaaagtaaatgaaacgagaataaaaatacacganacacaatgtggaccaccacgggtacatagaatgaatcgaaaagcttggttcgaggtacttacccgttgaagatcgaagaacgatgaagaacgaatgaagaacgtcgaagaacgatcgaaa

SEQ ID NO: 130694 - DNA, 358 bp, Glycine max
  unsure (1)..(358): unsure at all n locations
cgatggtgcacaacaagttttccacatccaaaatgcgcgcataaacccaccatcccctggtgcccacctncatctgagctcacgtactcccacgtagcccatatcctcgtttctctcaacaccgggtcccaatcaatcctcccaagcttccacaacatccaagcaaaacaacattcaaatagcacaagctatcacagccaagcaaaacagagaaaagacagaaaactctgccaaaacaccaacgaaaatcacagcttttctcacttaaagaccccagtaacaattccttcgttccaattcgttaaccggtggatcgactcgaaaatttactggaagctctagcacttaacctacattt

SEQ ID NO: 130695 - DNA, 495 bp, Glycine max
  unsure (1)..(495): unsure at all n locations
ctctgaatcatctatttctctcgcatcatcttcattcttcttgctctgttcactgttgttttttcctttctctagcacaaatttcatggcttttccattggtgatgagcatggaaggctaaacacttaatcaatccaaggatccactcatagcaaggttgaatttgagttctggttttgtatttctaagctttgagaatgttcatctttttcttcaatcctatttttgattgtcatgattatgattatgcttaggattgaaaatggattatgctatggattcataagtgaatctgagttctagttttgattttcttcaatcctggtgtgtataagtgaattgtggtatgaaccatattgtattgcattatcgagttgacctacgttagtcctgtattacagaatttcctagttctatttgtanttagaatgattcgatagtcgctatcatatatggcgccgctgtcatggatactatacatagtgtgccaatctt

SEQ ID NO: 130696 - DNA, 466 bp, Glycine max
  unsure (1)..(466): unsure at all n locations
gcttgtggaagaatgtggaaacctctgttttattctggagatgtgnggaaccttctggaaccttatgaaagagtatggaagggagtagaagagtgtagagactcctagaatgtgtgcagcattctagagaattaatatccaccctaggatacaagtaatctccaccattcattgtggaggtggagtaatataaataagggtaggagtcttcattcctaaccattcaagacaaagagtaaatccacttcttagagtgagaaaaagcctctttgagagataagataaatagcttgggaagtctctatcctcaagcttgagtgaaccaccatagagtgagtcaattntgtanacacatcctttgaaccctactatcattttgtatagtggaagaatcttcatatttgagaaatataatcgtgtgatctcattactaactntagatactaagtgcctatcttaacttcac

SEQ ID NO: 130697 - DNA, 426 bp, Glycine max
ctaagctgacaaatttggacaatgcttgcttaggggttattatgctctcttgatgaaactgaactccctggtgaaaaaaaaaatcaatatgtgaagagaagagaagggagacaaagtgcaagttcaaagataataataataacaataacaacagaaaaaaggcatgaacttcagatcagcagaatcttttactgctaactaggaataaatgaggtaaaaggtttaaatttgattgtaaagcaccttcacgagtagctaagtttcctaatttttaaacacagcatacaatataaagattttgccctgtaaaagtataaacactaaaaaagataggtgacatagacaagatatagggggttgcatcaatccaggagtagaaaaacatggactgatggtgaaataaatcacatttactatgtaattcta

SEQ ID NO: 130698 - DNA, 448 bp, Glycine max
  unsure (1)..(448): unsure at all n locations
tttcttactggttatctattacaataatctggtaatcgattaccagagagtaaaaactctttggtaaaaggttttgagaaaaattcatgtgctactcagtttttgaaaaaacattttcatacttatcttgattaagtcttctcttgattcttgaatcttgagtcttgaatcttgatcttgattcttggaagcttgaaccttgaatcttgattcttgattcttgaaatcaaatttcctcttgaatcttgaagtgttcttgattcaatcttgaacatcataaacatcttgaacatcttgaactcattctttgattatcatgaattgacctttgagccttttgtcatcacctttgttatcatcaaaacatctttgaatcaatctagattcatcatgaagctntgcttctacacttagcggataggaggaatctggaaagggatctgtcatg

SEQ ID NO: 130699 - DNA, 497 bp, Glycine max
ttcctaagttctgtaacaagcttagaacattatactttttcttcttttaatcgtctttgggctagaggaccacaatcaacaaagtactttcggcacctactatatgttgacttgaccaatgctgttattggaatgttgcggcaatctttcaacaccttattcacacattctgatatggttgttgtcatgtgaccatatcttcatccagatgtatcgtatgccatgctccatttttcctttgaaatgcgatcaatccatgttgctatggctggactcaattgacgaaatttttctaagttctgatcaaacacatgcttgcaaggagtgtacgctgcatcaaatttgttaccatcaaaagttgtatgtagatatgaaactcaaatctacttaatgtataaaatagaccttaagcaatttcttgaaacttctctgtatagttcgccgtgttgaatctgtgattgaaattgctcgtatgtgtcgaacgcagtatacatgat

SEQ ID NO: 130700 - DNA, 452 bp, Glycine max
  unsure (1)..(452): unsure at all n locations
agcnttttcacaccaacattaatccatattatctcacatggccatccagtcaaggtaaaaaaataaggaaaccgatataacttactgtatgtggtccaataacagaattaacataaaatgtgtcaaggtaagatggatttttcacatttgttgaagcccacatcaacctctgcttcttggcacctctattctccaagcgttcccatcttggaccagaaaattttttctggtaaagttggtatgctaagactgcttgagcaaccgcaccctataagaattgatatatatatttaggcaaatgttaactagtgcccttagggcattggttaagaaaactaanaggggaaaggttntaaaggcagaatgcttcacattacctttcctttgagatcaagagcctcagtagtaccaatttgctcaagttcttgtcaagtgtaacantcactctactg

SEQ ID NO: 130701 - DNA, 471 bp, Glycine max
  unsure (1)..(471): unsure at all n locations
actcagcttatgctgcnacatttatatagaccncatcagcagcatttccaacaacaacagaataattatgatctttcaagcaacagattcaatacaagttggaggaaacatccaaatctgagatgggcaagtgatgtgtcattattttctcctatttcttaaccctttttgtcaccattttaattactgattagccttacttgtcaaattaattatgcagttttatcatttgggcctacttgactaattttgtgtttttaatttaattttaggagaattataagcaattgggcttgaattcggaattgggcttggacttgaagagaatagaataatttattttatcaaatcttatcttatccagattttatttcatctagaatttatttcgtccagaatttatttcatccaatcttatcttatcttgtccagaatttaaatttatttgtttatgggcttggacttgaaaca

SEQ ID NO: 130702 - DNA, 366 bp, Glycine max
  unsure (1)..(366): unsure at all n locations
cttgttttttcttgtatcccgacaggacatgaattganaatctggacctgtcgtcagactctgtggtttatgctcctctgccgaccaccacacagaccttttgccttgtgtgcaacaatctgaaccaattgaacagcctgaagcttatgctgcgaacataagaatatacctcctcttgtcagctgataaaagacaacacaacacaatatgacctttgcgcaacatgacaaacacctgtggggaagatccaaccttgatggttgtatcttacacaacaccacactacacaacttcattttaatgttccggccaacaacatagttctcactgtcacgcaaaaacgcagcacacgcaaacacaacatga

SEQ ID NO: 130703 - DNA, 436 bp, Glycine max
  unsure (1)..(436): unsure at all n locations
cctcatcagcgctcaggatgccacacatgacgccactttcatacatggtcatgatacgagtactagatcagagaataacacatgacttgtcttgtaaaatgcattctcagtcttttatattttcttattagatggataaacactagatttatcataaatgtttagaacagatacgctgttggaatgcaacaacgtctgtggcgctaacgtctctcttgcgacggaatgagatgacagccatgagacagctntcgtacgtggtcataccaagagtgatcagtatacattacggacttttcttataataattcctaatcttctacataagttttgctattagtgagatgtcaatgttggatctattctacacatgaacttttcgcatatcacatgcgttaataaaatgtcaactcatcataatgttgaattacatgag

SEQ ID NO: 130704 - DNA, 455 bp, Glycine max
  unsure (1)..(455): unsure at all n locations
gctccttcttttctggcttattccctagtggatggcgcctcctctcccctcttctcctttgtcttccgctgcatctccatggtggaaaaccaccattaaaggacctcattgaagctcaaagatccagcctccatgaagctccacaagcaagtttccatcagatatagtttattcagagttgagaccaaagagtacttgtgcggtgggctggtggtggtgtgcgagcangggagtgcacgagtggcggcatggtgagaagcaagatgccagtaccggtgcgtgaacaacagtatagtgtgatgtgtgcggtaacggtctgctagtggtggtgtgtaaccgacaaacgatagtgcgtgaccgtgagagaaaatgagtgaagtaaagttntcatgacatgagtgagtggtgtgagagagaagctagatgagaactcacaatcacaatgagagtgagaa

SEQ ID NO: 130705 - DNA, 409 bp, Glycine max
taaagccacctgctgctgcagctgatggctttataaaagttcttttgtggaattcaatagggtgacttttactacatgtgaactggtctccgatgagtactccacttgagcccaaaggaaatactcccttggtgaatctcgggtctccttgttgagccttggaatccggggatcaaagcttcatgtagtacctcgtggctgaacgtcttgaccagcatgagcctgaccatgacaccccaacaaatgctgatcctcactaggcaggtagaagaggtgcactgctgtattgttgggaagatacttaaatggtataaatgctccaagtctggcagagctgtttgaccacacacatcttgaaatgactcagagacttctttttgggtgttgctgacacggggaggatgacatt

SEQ ID NO: 130706 - DNA, 369 bp, Glycine max
  unsure (1)..(369): unsure at all n locations
tagtnaattacttaataaatttgtacaatggtctatgatattgtgccacgaaggggattactaatattgagaataagcaaggtgttggtagtgatagaggtgcaaccaatccgcctaatgattctttntcaggagattgaaagtcttatgataaagtttaagattaagaggatgaaacaaacattgcaggttgatgctaagatcaaagaaaagaaaccaattaattaaggtgacctaatgggtcacttctataaatgtaaatcttaagcactgagatattgaataattaagacactctatgactctataataaattaaactgaaatatttatcagtaaaacattattcattaaaatatttatgttacat

SEQ ID NO: 130707 - DNA, 414 bp, Glycine max
gaaggccttgaagactgcaaaagttatttgcatagcaggattcttttggcaaagggtgtccctcctccaagagtttctgatttgcaagccaaagctttggcatcctttgggacgttgacatatggtcccaattggaaaaggctattgcatttcttctttctccttagttcaagatttacgtaaggtgtggtggtagggatttggaacctaaaccctagcactctgaggcttttcaactgaaccccgaactttaaccctaatttggtgaaacaaaccagtacccagtgttgtatttgaattctagggttaccacaaaagtatagagacaagctatcctattctccatcgcaataggtggtgggatcccctctacacagatgatgcaatgaatagtcgtgcatttggacgctatgc

SEQ ID NO: 130708 - DNA, 466 bp, Glycine max
  unsure (1)..(466): unsure at all n locations
agctagcttatggagcttctatggattctttatctttgagcttcaatgaggtcctttaatggtgattntccaccatggagatgcagcggaagacaaaggagaagaggtgagaggaggcgccatccactagggaataagccatggaagaaggagcttcaccacaaagatgagccttggataagaagcttggagaggatgcttcaatggaggaaaagaaagagggagagaaagagagaggggggagcacgaaattgaaggaagaaaaagggagagaagttgaactttgagttgtgtctcacaagactctcattcatcaaagttaccacaagtattacacatgcttcntattatagactagggtagcttcttgagaagctntcttgagaaaacttcctttagaagcgttcttgagaaaacttccttgagaagctagaactagctaatacacctcttaataactaactac

SEQ ID NO: 130709 - DNA, 449 bp, Glycine max
  unsure (1)..(449): unsure at all n locations
ctatactccaaagaatctattaaggtctcaccttcctgattcaggtccaacccctaaaataatttttacacacagacactgctcatgaattatacaatacccacgaccccacactcgtgtttcaaacacgtttaacacattgcgttataatttaacattttaggttcctaactaagaatcctacactttccctttaacactatgcataaacacttttctcaaggtaaacgctagtcgagttattgtataattcacaactcacaacacaagtattgtcacatcaagtgttaaccacacgagtgggagaaagcaagaacacaaaagaaaaaaaattcctgatcaaggatcggaagaaaacataagaaatatgcagaaaggtctttggaccagacaacatctgaacaatacanaattatcaccaagtaaacacaaaaagaaaggaaatcacg

SEQ ID NO: 130710 - DNA, 301 bp, Glycine max
ccatatgctcacgggactttacaactttaagttgggcttacacaaggctatgctaagtgcttgtgttttaaaatcaaacgtcatgtgggcacgctaagcgcatctgtgcgctaagcgcgccatacgaatttcagtgtttaaaaatcaaaagtagaggcactttgggtgctacctttgcacctaaacctctgccccttcctaaccttgagcaattgtgtactttctgctgcgagcgggtactgttcatctacacaatctttgctatatttcatcacagctcaagtacgtggttcaatctcat

SEQ ID NO: 130711 - DNA, 389 bp, Glycine max
  unsure (1)..(389): unsure at all n locations
tgccgcatgcaagctagatagtacgctaagcctgacatctgtattttatctcatattgcagaanacttatgtgttgcagaaagcgctaagacccatatgctcaccggactttacaacttcaagttgggcttaacacaaggctaggctaagtgcttgggttttaaaatcaaacgtcatgtgggcacgctaagcgcagctgtgcgctaagcgcgccatactaatttcagtttttaaaaatcaaaggtagaggcactttgggtgctacctttgcacctaaacctctgccccttcctaaccttgagcaattgtgtactttctgctgcgtgcgtgtactgaatcactacacattctttgctttatttcaaacacaactcaagtaggtggataca

SEQ ID NO: 130712 - DNA, 511 bp, Glycine max
  unsure (1)..(511): unsure at all n locations
atactcaagctggtgtagcactatccactacataagtaggatacattgctattggaatttgttntgctcaaagtctcttgatgaaacaatagttggaagactttggagtaatctgatagagggttatccaaagagcataagaacctagaagtacttcatgagttgaagggtccaatgacaaggttcaaagccaagtttctataagaagagatggccaataggatcaaggatggactactcatcaaaggcaaggaaggaaaagatcacaagaggctgaattagagcacattgaagattattgaacaacccgcttagcttccccaactctccaagcacaattccaacaattaggcttagcacgagtgcctggcttcctgtaattccaacccgaggagaaattgggcttagagtgagatgtctggcttagtgtaattccaatgtcacatcctagaatttctacccggaattttgtaagtgttacattttaaataatgatatatatatatatgta

SEQ ID NO: 130713 - DNA, 382 bp, Glycine max
  unsure (1)..(382): unsure at all n locations
gggcgatggggcacaacaagntttccacatccaaaatgcgcgcataaacccaccatcccctgttggccacctncatctgagctcacgtactcccacgtagcccatatactcgtttctctcaacaccgggtcccaatcaatcctcccaagcttccacaacatccaagcaaaacaacattcaaatagcacaagctatcacagccaagcaaaacagagaaaagacagaaaactctgccaaaacaccaacgaaaatcacagcttttctcacttaaagaccccagtaacaattccttcgttccaattcgttaaccggtggatcgactcgaaaaatntactggaagtctctagcacttaagcctacatttggaccgttgggatctact

SEQ ID NO: 130714 - DNA, 469 bp, Glycine max
actcagcttaggatccactcttgttctctgttctctcatttctctcattctcttcctctattcacttttgttatttcctttctctagcacaaatttcatggcttttccattggtgatgatcatggaaggctaaacacttaatcaatccaaggatccactcatagcaaggttgaatttgagttctggttttgtatttctaatctttgtgaatgttcatctttttcttcaatcctatttttgattttcatgattatgattatgcttacgattgaaaatggattacgttatggattcataagtgaatttgagttctagttttgattttcttcaatcctggtgtttataagtgaattgtggtatgaaccaaattgtattgcatctttgagttgacctatgttagtcctgtattacagaatctcctagatttatttgtttttagaatgattcgatagtcgttatcaaaattggc

SEQ ID NO: 130715 - DNA, 401 bp, Glycine max
  unsure (1)..(401): unsure at all n locations
gcagaggtctgtatggtggtcaacagaggagcataaaccacagactcttgcgacaggtatagatttctgattcaaagccagttgggttaccaagttaaccaatgcatctagtttgccttttagcttcttagtttcagatgatgcagatgagtttgtagctacctcatgcactcctctaatgactatggcatcatttctggcgctaaactactgggagttggaagccatcttctcaatcaagtttctggcttcagcaggagtcatgtctccaagggctccaccactggcagcatctatcatacttctctccatattactgagtccttcataaanatattggagaagaagctacnttcgaatctgatggtgagggcaactggcacatnagttttaaatctctc

SEQ ID NO: 130716 - DNA, 493 bp, Glycine max
  unsure (1)..(493): unsure at all n locations
actatgctaactccttcaggttctgtataatgagcttcctgtctttatcccttcaccaattaacccacatgcattctgttaatctgtgcacgcttcgtgttcgattaattgcctctgtgcttaaattgcgattgtgcttaatgaacaaggggttaattggtgtatgtgttgcttaatcacatattgacagccctaaattgattttcgcttagtaaattaaaatagggttggattaagtggttaactgttagggacaaattcttcataacctaggacaagagaatggcttctaaatcagaggaaacaacacgtttttactattattaattttgtattccagtttccttgttctttaattcacacaacanacaacccccccattgttactgttactgcaagtatattatgaacatttggtttatcatcgctcgntgggaaacgacctacgatcacttctanagtactgcattttaatgtatatttgattcgggta

SEQ ID NO: 130717 - DNA, 358 bp, Glycine max
  unsure (1)..(358): unsure at all n locations
tacacacttgtcaatgatttctctattggtaagcaacaattcttaaaaacacatggtggaattggggttgagcctttcagggagagttcccagtacaagacatagtggccagggattgttgtggtgtctgcatagctggtgtactcggacactgatgcatcaaagggcaccaagtgtgtcacggcattcttcattgcgttctggagctcaacctcatcggtcttgtctgagtctatgctcaacaacacgttctttctgcacacaaagttgaatnggggtgccttgttcttgaatccaccaccctcagcacatcaccaactcttgtacgattcaaaccctgaaaacanaaaaaaaaaaa

SEQ ID NO: 130718 - DNA, 455 bp, Glycine max
  unsure (1)..(455): unsure at all n locations
actacacanaaacaaagtgagtaggagtgccatcaacatcggtcaccttggaatccaaaattgccaaaggtgaaacaatggggtcattacccaaagtaagtggcggtgaagagtctaatttagcataaagagtccccttatgtagctttagcaagaaattaaaacatggaagacatatcaattttgcttgtaagaggaggatctaatctattagccacaactctaatacgctccaagacacaaaataagccgtaataacattttgaaagctttgtgtatttggagtcagataccgtagtttgacgatgagggcaaagcttgacatacacccacaaatcaactgatataatgcaaacacaatggtgtttattagaagaatcattcatagtaacctgagctttcctaagattattgtaaagtatgacaaagatctcatcgcgagttagaagaacaaa

SEQ ID NO: 130719 - DNA, 403 bp, Glycine max
  unsure (1)..(403): unsure at all n locations
atgcaagcttanaattatgccaacatgatagagtcgtattatttaatcagcaagggaagatgtctctagcctaaattacatgtttttaagctcaagctattatcctcaaanttggaatgattgaacaaaagaattgttgagagttggttcagtatgagaccttagctacactatactacactntcttgatttgtttttctgaagagtaacttttctaagcattttggcggcaagtgcaaaacatcacggtgcctgatatgaagagataaaagccaatggtttgattatcatttacagataattttcataaactgaagttntgaatgttnttcatttttctgatagttggatatcagatggtttagccaggatatattttttgcctgtcaatgtgttaaaaaat

SEQ ID NO: 130720 - DNA, 376 bp, Glycine max
  unsure (1)..(376): unsure at all n locations
actcaagcctttctgagaacaaccctttgatgtttgaagcattcaccagtgntatgttagtacttattangagtgatagatggtggcagtgtgtgcagtggcagggacatgacccagcctggctttggtacacatgcttattcatgtagcccccaccgtagagggaagatggaaataggcgtaaaaaggaaaggggtggtgatggaatggggaatggggaagtgggattataccctgattcattcctccggccggaagccgtacgtgcacccaagcttctttgaacgttaccttcattattgtatatgatgaacgaatatacttacaaatccgtatcctttggatctgcctgcaacttttcaaaaggtgctctcag

SEQ ID NO: 130721 - DNA, 423 bp, Glycine max
  unsure (1)..(423): unsure at all n locations
gctgattattggttgattcaagtgtggacaatgaatgatgctgtgaaagtgtttacagagtatccaaaacaagacgtggttntatggacttcaataattactgggtatgagcagaatggaagtcctgaacttgcacttgcatttttctcccgaatggttgtgttggagcaagtaagtcctgatccagtaacacttgttagtgctgcttctgcttgtgcccagttatctgattttaaccttggaagaagtgtacatggatttgtaaaacgaaggggttttgatactaagttatgtttggccaattctattctaaatntatatggaaaaactggttccatcangagtgcagctaatttgttcaaggaaatgccatataaagatattatatcttggagctcaatggttgcctgttatgcggataat

SEQ ID NO: 130722 - DNA, 398 bp, Glycine max
agaagagggaatgatggtgttcctagacaaaaccgaattgatggtattaagctcaacatgccttctttttaaggaaatgatgaatcggaggcctacttggagtgggagatgacaatagagcgtgtcttctcatgccacaactatgaggaggaccaaatagtgaagcgtgccttcacggagctgtccgaccatgctattgtgttgaggaacttgctacaaaaggagagagcctgaggtgaacagccaccggatgatacatggacggagatgataaagatcatgatgaaacggtatgtgccagctagttactcaaggggacttgaaattttaactgcggggactaacctcacggcgcttgggggttgatgagtatttcaaggaaatggatgtgctcatga

SEQ ID NO: 130723 - DNA, 280 bp, Glycine max
  unsure (1)..(280): unsure at all n locations
agaacgggtgcaacccctgcgaaattcttcacggaaaacgttaccggaaacgttnngaagcgcctctgcttagattttcttcacggaaacgatttcttcaagcaaattcgaaagagagagaagtgccaaaggggctgaacccttttcttcttcacttcctcccctatttatagcaaaataggggagggggtngccgcccagctcgcccaggcgagctcagctcgcccaggcgagccaggttgcttcctccagaagcaacagccttttggaggaatattct

SEQ ID NO: 130724 - DNA, 422 bp, Glycine max
  unsure (1)..(422): unsure at all n locations
gagggagagggagagagagagcttctgaaaatgtggggctgagtgaggagagagagggttgctttntggttttaataaaaagggttttctctttttctattattttatttaagcaatgccacatgtctccatttgagtggagcaagaagggcccactttctcttttttgactgtgacccatactcagtcacaaaagtgaggaaaatctgacctttgaaacgctaaaaatcctgcctcggtttgcgtgccgtttctctggttccagtttctcgcgtttctctgcgtccgtcggggccagttttcgaaagcaagcaatatatatatcaaaacgctcagaataaaaccccgagcgtggttcagaggttggtttcgttaaattctaagttgcacgccaaacgatgatttttaactaattaattaag

SEQ ID NO: 130725 - DNA, 445 bp, Glycine max
  unsure (1)..(445): unsure at all n locations
gcatgcaagctttaactgaatgtgcaacatncctaatatttttaaanggnngaancgatgacaatatattggtaatcaattactagcgtatctgaacgntgaaattcaaattcaattgtgaagagtcacatcttttcataaaatgctttgtgtaatcgattacatggttatggtaatcgattaccagtgataagttctgaataaaaagtcaagagatgtaactcttccaatggttctctcaaagattttctcaaggctataactcttccaatggttttcttgaccagacatgaagagtctataaaagcaagaccttgacttgcatttcaacatcttcatataactattgaacttctttaaaaacttttagaaatcttgaacctttcctactcatctttcttcttcttcttctttgcccaaagcttctaagtttctaatttcaacc

SEQ ID NO: 130726 - DNA, 393 bp, Glycine max
aaccgaagcattagaacgagatatgaagagggcccgaagagaagaatggtgctgaaacaagttccgatgggctctatggtgcagaaacaacaaactcaagcttcaaagggccgaaagggacaagtcgagggtagaaagtatgatattagaggacaagttgaaggcttgtcaaaggtcaaaaaggagcttgaccgaacagttggttatgatggaagagaacatgtggacaattattaatcagtataaagagaagctaaatctagctgctagccatgaggcgaagactagaggacgagcatgcaaaaagtatcggatttgctagtggaaaagggaaacacgagagagagtgatatattcattacacggagaagctatgatgtggatggatatgtg

SEQ ID NO: 130727 - DNA, 443 bp, Glycine max
  unsure (1)..(443): unsure at all n locations
agctntgagccaaaatcctaactcattaaaaccttgacccagggtgagaatgtcaatccttaccctcgaaagcaaaaagaagagaaggaaaatttccaatcaaagaaaaaaaaaaagagaaggaaaatttccaatcaaagagaaagcaaaaaaaaaaggagagaaggaaaatttccaatcaaaggaaaaagagaggaaaggaaattcccaatcaaagagtgggagaaagcgaaaagaaaagaaagaaaattcccaaccaaagagtgggagaaagtaaaaggaaggaaagaaagctcctgatcaaggatcgaaagaaatcagaagaaatgtgcagaaaggtctttggaccggacaatatctgaataatacagaattgtcaccaaatgaactaaaggaaggaaaggaaaccacgaccttgaagtggtcttctccctttgattacc

SEQ ID NO: 130728 - DNA, 427 bp, Glycine max
  unsure (1)..(427): unsure at all n locations
ttctttagttcctaaatgtacaaccttcaaattgttgcttgttcccctctttgttttctgcaaaaaagaaaatcaatatcaaagaaaacatggagagaattgtcatggttattattactcgaacctgaaggaataacatctaaacaagtcattttattcttagaatgtgaaaactctgcatatttatggaaaacatggggtatggaggcaagtaagcatgtgaataccacaagtcattttctccaattcaagggcttgattaattgctctaggaaaaaagcatacatctggtatattggttggtttgcagctggttggagcatttggcagaacagaaatttcggtttacgttgggttgaccatgttcactggntaacctaattgcacttatactcttatttatgctngaagataacacctatcagta

SEQ ID NO: 130729 - DNA, 424 bp, Glycine max
  unsure (1)..(424): unsure at all n locations
gatgatgacaaaaagttcaaaagtcaagaacacttcatgttaacaaagatgatgacttcaagaatcaaagaatgagttcaagattgaatcaagaacacttcaaggttcaaaaggaaatttgatttcaagaatgaagaatcaagtttcaagattcaagttccaagaatcaagaccaagattcaagaatcaagagaagactcaatcaagataagtattaaaaagttttttcaaaaaactgagtagcacatgaatttttctcaaaaccttntaccaaagagtatttactctctggtaatcgattaccagattattgtaatcgattaccaatagcaaaatggttttcaaaaagctttcaactgaatttacaatgttccagttgctttcaaaatgttgtaatcgattacaatgattnggtaatcgatta

SEQ ID NO: 130730 - DNA, 344 bp, Glycine max
  unsure (1)..(344): unsure at all n locations
agaatacccggaatgggtctactatcattgtcatcatttnttctcggtcattgaggtgccacttgagctgccaggtctctccacctttgggtgtattctttgaaagatctgtgcccctttttgcacatgttctgttgttgcatcctatccagaaccatatcaaaattgtactgatactgcctaacgaaggcaaccattaggtccttccaagaatggactcgggaaggttccaagttagtgtaccaggtaacagctaccccagtaagactntctttggaaggaatgtatcaacaattcctcatcttttgcgtatgcccccatcttccgacaatacatctttagat

SEQ ID NO: 130731 - DNA, 343 bp, Glycine max
  unsure (1)..(343): unsure at all n locations
tcccgacgctctgtttaggctctccanaatatagtggtaaacctaggatctctatcaaacactatgctagatggcacaccatgtaatctgacaatctcactgatatacagagaggtcaacttccacaaggaaaatctgatattactgggaataaagtgagcagacttggtcagtttgtcaacaataacccagatagaatcaaaacctttgggggttctaggtagtcctacaacaaaatgttggatcgagtggcctcagaataattaagaaggggggggggttgaattaatcattcctaaacctntactaattaaaaaatgactctctcaaagctctcactatg

SEQ ID NO: 130732 - DNA, 357 bp, Glycine max
aatatgtttcggtggttaccatatggctgtgatagaattgacgagcctattattccagattggaaggaccatagcgttgatgataattttgtttgttttacttacccaaatagacgagctcgcaaagactgaactcttgtttatgaacgtagttgctattctaaggaagactgagtcatcaataacagcataagtaaatttgacatttcattctaatccacaatcttaagaattagtatcatggagctttctcttattatgtgacgggaatcttatactacatgatgagaattcatctgtttctaaccaccttacaactgatatgtaaacatgaaaacaggctattattaatctcag

SEQ ID NO: 130733 - DNA, 421 bp, Glycine max
tgggatagatctgctgcattggctgacttgataccaattagaccaagtggtgcccccagggctgttttagcactcagaggaacattactcaaaagccctacaatgcgaagagatatcgaagatgacctccgttttgatgcttgggaaagcttgaagggctctgtgaggtttaaagcagctttggaggtactaaaattgatttgtggtaaatacggaagcaataatgtatgcattgcagggcattccttgggggctggttatgctcttcaagtgggaaaataactatccgaagaacggacttatgtggaggcacattagtttaatccaccttctgtttctctagccatgagtctcaaaactattggagaacaggctgcgtttgagaggaatagacctaaatccatgcttccttatattggtg

SEQ ID NO: 130734 - DNA, 434 bp, Glycine max
  unsure (1)..(434): unsure at all n locations
gatagcccttttgagccttggttccctttccttattntgaagctcactacaagccttaagtgaaaaaccatgatattaccatatccttaaggaatnttggagctttggaattgttttgggaataagtgtggggggtttttgtttcattggacaactngttttgttggctatgcttcatgatgtattntgggccatacttgatgtacattgtatattggttaaatgttggacatgctgaatgaaatgttgtttctcaaaggctaaagagtaaaaaaaaaaaaaaatatcgaaaaaaagaaaaagaacagcaataaagttgagtgaataagatcttaaatggcacaagaatgatgaaactcttggtctactcttcatgtataaatttatccttacttcttttatttcttatnttttcttatatgcacttattcccc

SEQ ID NO: 130735 - DNA, 469 bp, Glycine max
agcatactatacatcacagacaggaaagcaatattgcctctacttagacccttttctgacctttcgctaacaaacactaaatctgcgaagcttgaaagcatgtaacccaccatcttctcatagtagaacaccgatgatgtgtccactatcagtgttatcatctgcatcatcatcattgggggcgctactggagatggcagatccctctacctttgggcgtagtctttgaaagactcatgatccctcttacacatgttctgaagctacattctatatggagccatatcagaatagtactgatacggcctaataaaagaaaccattaggtctttctaggaacggacccgggatgacttcaaattgctgcaccacgagatggctgccctagtaagactttcctagaagagatgcatcaacggattttcatctgtgcggatgcccgcattttcctacactacatgttcaagag

SEQ ID NO: 130736 - DNA, 429 bp, Glycine max
  unsure (1)..(429): unsure at all n locations
gcttctcggggccatngtctacgagatttatcttttttattttagctctacaagataatgcttatcttaacncnnaccccgccatgctcatctctctagattcagaacgaactgacccttcacccagaaacagctgaaacacgtatgtggggaatatcctactatttatatcaacatagaggccatccaacacattttaattggtatacatatatgcatttgaaaagaacatgcattctcacgcctcaggcatagcgtcaaaactcacacttaatttatattctacacatttgctatatacaaactacctacttatgtgtgaagtatatatcatacaattctctatgtgtttactcacattaatccattatggcgagctatttacattatgctcacacttgcattctgaaaggaatccctattatcata

SEQ ID NO: 130737 - DNA, 427 bp, Glycine max
  unsure (1)..(427): unsure at all n locations
tgccgctgcaagctttgctgcaaattcctttctgttggtgtttnttggnttgagctaaaggaggtcttcgtcattggaagtgcggtagacaggctttgtggttgatttanggatggcctttgtggataactgggcggtgggtaaggaggaggtttgttattggctgaataatgacattgttgggttggtgggaaacttggccgtatatgaatggcagtcacagcatgggtttctacctctttctcaccctcttcatttgccccagttctctcagtcgtgctagtaggatgatcaaaattgcctcttttcggacccacatcgatccttgtgctggcgaagaccaaatctgtaaaacttgaaggtgtgtaacccaccattcttctcataagataacaccggtcacgtgtttactatcattgtgagaatc

SEQ ID NO: 130738 - DNA, 371 bp, Glycine max
  unsure (1)..(371): unsure at all n locations
tataatacaacattcatacagaaatcatgtgtagcttatagcaaatatcaagggaatattcagtttgtacagctatntgtctgcacagtctctgtcagagtgtggcagctggaggcatgttagggttttccttgtatgtattatgatcaaagtatgtgaaaactatttgtcggcagctttttttgttggtaatctgagatgttttttttagtggagtaatctgattgtcacttgtgtttccttcttcaatgataattaaagagccatatgtggacacacctcctacttagtaggagctatatctttccctaccttcatgttttccccatcaataagtcatagattaggaactagcatattggataagcttc

SEQ ID NO: 130739 - DNA, 496 bp, Glycine max
  unsure (1)..(496): unsure at all n locations
ctaagctgatagtctggcaggtaaattttacaatcttaattatatattgtagtaaaactatgttntgatcttattgcacgtggcatgcctatgtcgtatttgcaagggttttacatcacatgcatgatcattcactggtgtttgttacaggtttatctcacaatacgtcaatgcaaggaaggcatagtattttgtatatgtacggaagacttaatgccccacgacactttgggaatgataatagaaattatttgccatcatctgtgtttatggaacaaacaccctatgaaatcagcgctcatggctcttcaaggtaaagaaaagaaaactagccagtgggaaatcaactataatgcatgtattaaaacatggataaaattttgatatatctttaatgttattctgtgtagattacacacgacagcactcttcaatagtaaaatgatgataagatcaagttcacggtgggacagagatatatataattctcagtcgt

SEQ ID NO: 130740 - DNA, 484 bp, Glycine max
  unsure (1)..(484): unsure at all n locations
atccttaagcacctgcggcatgcaagcttcttggacgcttacttcggatttatttctattacatgcacgttccagacaagaagaanatgacattcatcactcaaagatgccaacttttgctatagggtcatgccctttggccttaaaaatacaggcgctacataccagagatggatggatcgaactttcaaacaacaaatttgacgaaatgtcaaggtctatgtagacgacatggtggttaaatcccaacacatggcagacctagaataggtctttagagagttctataaatatgactggcacctcaacctgaaaaaatgtacatttgggatcagtagaggcaagttttgggcttcatgatcacacattggggatagaatcacctcgacaatgcacatcatatagagatgatagcctactacatcangaagtcaaagctgatgtagactgatctcgtcaagtctcctaactgcaaaaggaagtg

SEQ ID NO: 130741 - DNA, 462 bp, Glycine max
  unsure (1)..(462): unsure at all n locations
gctggttggaatataatcaatgaatcaatcatgtcactgaaatttgaaacataaatgaacttctcccttactatcattctctttctctattttttctctctctctagctgccttgttatgttatatatctatctacatatacaaatgatactctctttttacttcatggtgaataattaacctacctaggtctagaatgagggactgaaagttccaagagaagagtttgaatccagagaatatcagttgtggcagcaactaaacttctatattttgctacatgggccacttctatatcagttgtggctctgtatctattgatattgccatcagaattaataatgatcaagcaaaaaagagaaaagatgttatttcatatacattgacctanagattgatctactaaccggtgtgcttaaggaccatacacactacattggttaaaagaaaatgttgcatagt

SEQ ID NO: 130742 - DNA, 450 bp, Glycine max
  unsure (1)..(450): unsure at all n locations
agcttcaacaatgaagcaaggctcacctcnatgtctgagtatttcactcgnctacgcgtaatttgtgatgagatcgagaactttagacctgatcccatctgttcctgtaatatcaggtgctcctgcaatgccttcaccattatcgcgcaacgaaagctcgaggatagagctatgcagttcctgcgaggcttgaacgaacaatacgctaacattcgctctcacgttcttctcatggatcccataccctccatatccaaaatattatcctatgtagctcaacaggaaaggcaactgctaggtaacaccggaccaagtatcaacttcgaacccaaagatatctccattaacgccgcaaagaccacttgcgatnnttgtggacgtattggtcatgtggaaagtgcgtgtataagaagctgaagtgcctctattcnatgcaagaataagagtaca

SEQ ID NO: 130743 - DNA, 445 bp, Glycine max
  unsure (1)..(445): unsure at all n locations
aatgaacaccttttctcatttatcatatcccatgtgttcaggaagctcatgcaatcatttcaataacaaatcttaacctttctgaagcatttgtttacaagaaccataacatgagttattgctgttggtaggttgtggaggttccaaatgtttcctgngatgatattggaggcttagagaatgtcaagagggagcttcaggaggttcaaacttgcttttgatattccataccttanatatgttgtacatgtacattntaatttagtaagttttcatatttgcaaacaaatgttagaagtcttttgctgcttgtagactgttcaatacccagtggaacatcctgagaagtttgagaaatttggcatgtcaccttccanaggtgttctctnttatgtgacctcctgctgtggtaaaaccctgcttgcaaagcaattgctaatgagtg

SEQ ID NO: 130744 - DNA, 472 bp, Glycine max
  unsure (1)..(472): unsure at all n locations
agcttgactaggcgagtagatnttttccttattttcactntagntatntaatcaattcggttaagaatgaganatcccaaagagaaaacgtccgattgattgtccgttttattttactaaaagatggctttttgattattatattatttgttacctctttttgatttccaacgtggttacggcacgaccgaacggtcggaatttattttaaccgaagttaatggataatacaattcaaacgttcggcggaaatttattntattcttaagttaagcgagaaacgacttatgtaaaatggcttaagcacgtcaacagggggtataaaaagtgaacaaaacgagaataataggcacgaacacaatgtggaccactctgtacatagaatgaatcgaaagcttgttcgaggtactacccgttgagatcgaggacatgaaaacaatgaagacgtcgagaacggtgaagcttgcagatt

SEQ ID NO: 130745 - DNA, 404 bp, Glycine max
  unsure (1)..(404): unsure at all n locations
ngagatgaggaagtgttgaatggtgaaacttcctgctnnattttgtgaccacagagtggtacctggagatatgtcgcggnggtcatgagatcttggggacgttaggtggggtgctattgcccaaaaccaagcttgaccaatcccgacccaacccgggcatagtcggtcagtgagaacctgtgatgtacctaagcaggcgagctcctggcagtcaacagataaaaggaaaacaagaccacaaagcaaggaggcttgtggtggctggccagctgtgaattttgtgtaatatgtggattgtggcctctggtaatcgattaccaacggtgggtaatcgattacaaggcttaaaattgaagacaggaggctaagatggtctctggtaatcgattaccaaggggtgtaat

SEQ ID NO: 130746 - DNA, 308 bp, Glycine max
taagcaccgcgctgcacagatgggctgggttttattttgatagaggacgattatatccccttgtaagataattgaggaatccttgcgtcttatatgatgaactgacttctggttttgcttgtctcttaaggagaaactttcatgaaatcattctgaaacagacttgaattaaatgactttatgatattgttcatgatgagttttttgttggcaagggccatacaattgcctatatcttgtctgtgaatatgtacctatcagcatcatgccattaatattttgtgttttcctttaaatgatgttatttc

SEQ ID NO: 130747 - DNA, 462 bp, Glycine max
  unsure (1)..(462): unsure at all n locations
ngacanagcacctctgtgggaagaaagaaacccttagcttatctctaaataaaaaatggaagagtaatgctgaaactaatcctagggcttcaatgtcagccccagtgccctcaaatcatactctaacacacaatgaactgaagaattacgtgcagcgtctttctacatcataatattaacccaaaaataaactactgaggaaaaatgataaatataaaagctgaccccgccactaattaattattaaaagtcgtaagcagtgactattttacatatccagatgattctactcagtcaattttaacccccaaagcatcatgtcagcaagtaaagatgatattccagagcaattctgtactcaaaggataatatttcaacaatatcatactatanttttcatcttgtcattataaagaggtagccgaagactcagaaattatggacacaaccaaaaatataata

SEQ ID NO: 130748 - DNA, 365 bp, Glycine max
  unsure (1)..(365): unsure at all n locations
aaatcagcctcaggcgggtattgtttgtgcatgtacctgccgaatccccaaaacaaaaaagaccagctagtattgcaactgagcatgaaaaattaaaataaaataaaattgaagtgaaacaggagaggaacactnaatttttaaatacgaatcacgggaatatcctatcacttaataatagtgagaataagtactataataattataatgatgataataataataataatgataataataataataataatcctaggcaaccacgctgtgccttatcatgaacaatatatgtagtacttatattgtcataaatattagagcacagtgtcacgcagcgacatgactatttatataggaggttattg

SEQ ID NO: 130749 - DNA, 177 bp, Glycine max
accataacagtgagatgtattgtgtctattgttatttaattagcaccgactggcagcatgcgtggctctagtatagagtacacactattcgctcaaatgagacgtgatcatacgtcaaggagtgttttcatataatataatgtatcgaggaacaaataagaagataaataaaaatac

SEQ ID NO: 130750 - DNA, 328 bp, Glycine max
ctttcatctcaaactctatatttaaaaaatgtatggcgctctcaaattcttcacgagtttcacaaatatttatgtcatccacataaacaacaactatgacaaatctatttttgtatctttttataaaaatacatggacaaatgggatcattcttatattcttcctttaacaaatactcactaagatgattgcaccacatgcatcttgattgctttagtacataaagacacttattcaatgtgatggagtattctttctagataatgattgatgggcaaattgatctcttttgggagtctcattaaatgtcattatcaagagactcata

SEQ ID NO: 130751 - DNA, 484 bp, Glycine max
  unsure (1)..(484): unsure at all n locations
tgtctattaccctccttgagaataagatgagtagagtttatgctgctcctccaaaggaaagattaaaggcattctataacacccctccctccaagtatgaaaccattgatcaggttagaatgattaacaaagtgtaccctctaaccgaacatccaaattttgttgggtaaaatatgttttcggtaccaaaaaatattttgaaattcaagcttagttagttataaaaatttaatagtttagtcctaacatttgagggcaagcaaagttgtgcttgattactagttggtcatgcgtttgaatctagaaatacgtaaggataagactgttaaaaatattcgatttatgttaaaatgtaaggactaaaaacttactatatataggaactaaatataacattttgagaatatttgggggacaaacatattctatccaagaatttagttcatgcanccaaattagtgaaagcttttattgaaaagattct

SEQ ID NO: 130752 - DNA, 408 bp, Glycine max
  unsure (1)..(408): unsure at all n locations
aaagcacttgtacaacgtctcctaaaacaaccaccatcagtatctagacgctataactacaaataatcaaaacattngctctaaagggtattgattgaatgtaaacttaccccatctaggtactcgctggctgtaattgaagctctcagaatagaatattgctgtgggaatagttcatgaaatgcaaagataagggcagctgctgcaacagttgaaggtttatactctaaaagcttaatgtctgcagccataagagagatgcaattcagagttcgtgctggttgaaattgaagatataatcaagctagatgtgaatagaaacaattacttaccattttgagcattgaagatatctctgaactctactttaagtgttgcttagtgattggcttaattcagctaaagaat

SEQ ID NO: 130753 - DNA, 456 bp, Glycine max
ttgcagcgtaattgttgaagccctgaaggtggacagtctgcagaaactttgttcatcactggagcctattcttcgtagagttgtaagaaaattaagttcattgtggtattgatttgcttctgggaggactatattgattatttgaaattatcacttgtaccgatcaatcaattgattatcccttgaaacagaaaccatgggttacaggcccatttgagaaaaccttctgccctttaggatggtaggccttggctagatatgtcagtcacgtcactgctgtgaggcttaagataaaattgggtagaggactatagatctcatattcaaaccttaacaagctgaacaaaggttaagtctttttttttttaaaaaaaaaagaaatttgtccttgtgagaaaggctttcgggaataacatatttaattacctcactcaggcgctagcgatatagtctcca

SEQ ID NO: 130754 - DNA, 473 bp, Glycine max
  unsure (1)..(473): unsure at all n locations
gatcttaagtcactgagctgcagctttcgccagctacggaaaatcttttcctatccatggtagaagtctccacagagtccatggcctccctcgcccaatattatgatcagccgttgaggtgcttcacttctgggaacttccagctatcacccatggtggaagaattcgaagaaatcctaggatgtcctctagggggaaggaaaccatacctcttctcagggttctatccctcattagctagaattcctaaaatagtccaaatcttggcgcatgaattagaccgccaaaaacaagtcgaaaatggggtggtcgggataccgagaaaatgtttggaggtaaaagcaagaatcttggcaggtagtagcgaatgggcctcgttcatagacattctcgcactgtagatcttaggaggaaccctctntcaaatatggatgggttggtggacctagcaacgataaacgcttttcttgcta

SEQ ID NO: 130755 - DNA, 444 bp, Glycine max
  unsure (1)..(444): unsure at all n locations
ggtgcacaacaagttntccacatccacaatgcgcgcataaacccaccatcccctgttgcccacctccaactgagctcacgtactcccacgtagcccatatcctcgtttctctcaataccgggcctccatcaatcctcccaagctttcacaacatccaagcaaaacaacatacatacagcacaagctatcacagccaagcaaaacagagcaaggcagagaactctgctcaacacaccaactaaaatcacagcttttctcacttaaagaccccagtaacaattccttcgatccaattcactaaccgttggatcgactccaaaattttactggaagtctatagtgcataagcctacattttgaccggtgggatctacaagcaaacatccagaactcactctgcactgttcttttcacacccagtaaatacatagcatttttctgcac

SEQ ID NO: 130756 - DNA, 409 bp, Glycine max
  unsure (1)..(409): unsure at all n locations
tccagtagtggggatgtttcctncacctctaagacctcacaatcactcacaaacttatgtgaagctttcaggacgacttcctcttcaagctctggtctctgcagatcttcacacaacaaaatctctcaaactttctagaacttggacctttctctctctagaactctctagacatgcagaagcttcaagaaaaggccaaactcccttccacaatctgatttcaagcttaaataggtggctttgttcgtgctcgtgcgcttaacgcaattctgaacctcttagtgcgcattattgaatttcggcttagcgcgggaatttctagctcagcgaatggactgaaggggtgngcttagcgcgatggcccttcctcagtgaacatgcttagctcatccttcttcagattcttcct

SEQ ID NO: 130757 - DNA, 384 bp, Glycine max
tgtccctatacatataagacagtgccacaatcccaagcttacaaaaccatgcccatatgtcattgaggcatttcaccgagcacttggtgggcgcatgttttggcatgaatagcaagagaatgggggcaatgtggcatgccccattactccagaatgcaacataagcctaaggccatcccttacaaccccttaatttagcgaaaacaagcatggattcacatgtgaattgcttcacgaatttcgcacaagatgagcaactaatgcactaaaacacatcaagggagagctaaataaccagcggaaagtgcacttactcgtggtgagtgaaataaagcatgacaacggaagcaaaaactcaacaatggaagcttgggagctgctgtc

SEQ ID NO: 130758 - DNA, 431 bp, Glycine max
  unsure (1)..(431): unsure at all n locations
aatatacaagtcatgttgttgcttatgtaatttaatttcttaataaaatagtaccatgaaacacatggattaattgatccaatattatttgaacttaactaatggtcttaaattcaaatcataaatacatagatataaaaacaatttaattagagggaaagctttcctcccatttatgtgtaaattcaaaatcactggttatactacaaataatttaatggtgattaattcatgtgttgggagtctttctattgtgtctatgcatatactaccataaaaaaattacttcttttatttattataatagtattttaatttntcgatatacattaactatctgtctcacttatatttatcatactattatgatatgataccgaacaaaagaaaatgaattaagatgattaattaatttgtaagatattctcttt

SEQ ID NO: 130759 - DNA, 453 bp, Glycine max
  unsure (1)..(453): unsure at all n locations
aagttaaatattgttatgcttaaagntaagtaagtgatgttgtacttaaagacgtcttgaaatctaaattttaattcattctgaattattaatgagataattgcatacttcatttgttctaaaataatagtcttttaaggttgtgatacactaattaagagaaattaattgatatttactctgaactcatatnttaattaagcaaaaaagtatcttgtatcttaaacttaaatataaataaatctgattaatttcacccctactttacaactctattttcaagaactatatttttttcatgatatcaaattacaactaatgacattttaggaatacccttatattttatttgagattattaaaattaaatgatctcaactttcttaaataatataaagatatctatttttaattatcagtctagaggaaatacaaatttagactaaaacattc

SEQ ID NO: 130760 - DNA, 349 bp, Glycine max
  unsure (1)..(349): unsure at all n locations
gcgtgtatgatatccactcgacaaggtttgaagtagacgagaccttcaatcctataacgcaacgtggcggacaaaaatgggcagttaactngaatggccattactggcaatgcggaaggtattctgcgcttcactatccatgttcacacattattgcagcttgtggttacgtgagcatgaactactaccaatatatagatgttgtttacaccaatgagcacatcttataagcatactccgcacagtggtggcctcttgggaatgaaacggcaattcctccttctgatgaggcatggacactaatctctgacccaactacaattcgtgcgaaaggtctgccaaaatcaac

SEQ ID NO: 130761 - DNA, 359 bp, Glycine max
  unsure (1)..(359): unsure at all n locations
gcccagatggattattctggtcagaggtgtatgaagggtgcatatctggctatgataactgcgtggaacgacgaccctaccaccgtaactgtggctgtgcactccataacacgtcacttattaatcgcacgcacaagcttccgaggtgtaacaatgtgtcataccctatgaggagggcatggagtgaaggaagcttggtcttggcaacttcttcttcatcatctccttctcaagttgcaactgggggaaggccacaaccaagtttggcaaacgttgaggaggaaaagaagaattgctctaattatttgaagtttgacaagaattaatctgtttgataaaactctgtnttggctctttta

SEQ ID NO: 130762 - DNA, 487 bp, Glycine max
  unsure (1)..(487): unsure at all n locations
agcttgtaagattatggagtacccttcttatgtggtactaggnggcggncgggcgatggtgcacaacaagtgtccacatccacaatgcgcgcataaacccaccatcccctgttgcccacctccaactgagctcacgtatacccacgtagcccatatcctcgtttctctcaacaccgggtccccatcaatccttccaagcttgcacaacatccaagcaaaacaacattcaaacagcacaagctatcacagccaagcaaaacagggcaaaggcagaaaactctgctcaacacaccaaccaaaaatcacagcttttctcacttaaagaccccagtaacaattcctatgatccaattcgttaaccgtggatcgactccaaattgtactggaagtctatagtgcataaagctacattgngaccgctgggatctactanaaaacatccagaactcattgtgactactctttcacaggcaccacacacaagcat

SEQ ID NO: 130763 - DNA, 441 bp, Glycine max
  unsure (1)..(441): unsure at all n locations
atagatgggctgaagctcttatgaacaagcctcagattagcaaacctggagtaggcaggcaagctctccccttcctctatgacccctggtgtcttcaagaaagtgttgagggcgtcaacatcaaatttaattaggtgccctcgcatcctcacctgcttaggcgatttgtcttcaaggtcacagaggttagcataaaattctttaacaatagcaacatcaatgcttccctctgagaagttagtgagctccttatgtcagttcctcctctcaatctttctcctgaattcatcaaattctgtgatatacaacttcacattcctttccagaaggatctttgggccaaggacattatctgcatagcggtcccatgcatnttgggatacaaatcttgatctgtcatatcaagcctgggacactgtagctagtgcttttctctaacga

SEQ ID NO: 130764 - DNA, 476 bp, Glycine max
  unsure (1)..(476): unsure at all n locations
agcttccatgaccactaatgccatctttttctatatatatgcgtgagggaggatgagtaaaggttccaaattgcgacgctaccaaattgcgactgtaatcaacttctacatcattcnttcgttggtgttctttgttcgtcatccggttagtttttgttttaaggatttgaatgcgatctatgcaccctttggggtcctctttcttgttttgtgcatcttcatcttcttctatcatcagtaatctcatttccttcttgtaaagtaagttttaatcgatcattaatattgtacattatctttaaaaaatattgaaggtttataagcaaaagcaaaataaaaccaactcataaacttcttcatttcatcaaatatcgcttgagatcgttcaaggcccaatgtcttaaacgactctcttctctattcaacaatcaaagatcgttctcggtccaacaccttaacgactttctccgttttca

SEQ ID NO: 130765 - DNA, 487 bp, Glycine max
  unsure (1)..(487): unsure at all n locations
ttatgggtaatggttggactacatcgtgagatacactgcaagttgtctataacaatagtttttgtaagtataatataatattaatgtgatgatatgaagaataataataatctataaatgaattacaaattacaaatttgtattaagtattaccattagtagctgaacgttgtcttttacgttcttgtaaaatagttttcctacgcttccttcgttcaacatatgtccatgagtagttgatttctgcaacaactggcttataattgccaaacaacaggaaaatcaaatgttgaaactgagttaaataagttgctgtagtaggctgactctaaaatgataccaacattatagttattngcatttgtttcaccgagtaaagggatatgtatttgcaatagaaaaagcagaataacattaaacaatagaaacatttgtattcaaaacacattaaatntcatactcaatggtttagtgcagcacgaatgat

SEQ ID NO: 130766 - DNA, 469 bp, Glycine max
  unsure (1)..(469): unsure at all n locations
agcttggaatgagatatgtcgaccatgataggattatggattgagagccaccagcagcatgaaacatggaacatatggatgaagaagctgaagctccacaggagcctgtaaattaatggagtccgtntgagtctcttatgattcaaaggatggacgttatgcttcaccactatcaagagcacttagctagagttcacaactcactagagaacatcactacttaactggaaaacatagaaacaaagctgacccttagcaaccaccttaaccttgatgaggatgaggcttagtcatgtctaagcgcttggttctgttgtttgttggtctgttctgcttatgttctattggtctttgtttgttttaaaagttatgatatcatctagtaggttgatgattatgttgtaaaattnttatatgaatgaaatgctagtgtctttttccttcatattctgctngttatgattctatg

SEQ ID NO: 130767 - DNA, 503 bp, Glycine max
  unsure (1)..(503): unsure at all n locations
ctcttacggccttaaactacttggctatgctcatctgttatcccacatataatcgaccaggtgctgcaagattttaaaggcatgggtagagcattgacattatcggtgaaggcctggcacttgtggcatctcctcacatggatgcaacaatcgttntccatattaagccagtaataccctaccctcagaatctttcgggccatggcatgtccgttggcatgtgttcgaaaggatcccttatgcaattctacttgcattttcttaggctctctggcatccacacatcgaagcaaagccatatcatggttcctcttgtataggatatttccacataggaaaaagttggttgccaaccttcataacgatcttttgtcgttgtcagaggcctcccgtgggtattccttgtcttcaatgtatcgtntgatatcaaagtaccaaggtttaccatcttgcttttcttctatcaagcagtagtgtgcaggcttgctacgacatctgaattc

SEQ ID NO: 130768 - DNA, 374 bp, Glycine max
agcttaagctccttcaactgcacattgcattatatatttgaagagtatccttggggaaccttcacccgacgaagacactgacaaaaacttatcttctccttcttggacaaagtatggcaggctgggggcaagtaaattttcttcccatcagaccttggatgcaactgtgatcatatacccatatcagctagatcttgacgggtattcaagccatcattcctcttgccctgaatgttaaggagtgtcctaatcacactgtcacaaacaattttcttcacatgcataacatcaatacaatgtctaacgtcaagatcacaccagtacggaagataaaaaaaatggacctcttcttccatatgcaactctgactatta

SEQ ID NO: 130769 - DNA, 411 bp, Glycine max
  unsure (1)..(411): unsure at all n locations
aatggngatttccaccatggagatgcagcggaagacaaaggataggaggtgagaggaggcgccatccattaaggaataagccatggaagaaggagcttcaccaccaagatgagccttggataagaagcttggagaggatacttcaatggaggaaaagaaagagggagagaaagagggaggggggagcacgaaattgaatgaagaaaaaggaagagaagttgaactttgagttgtgtctcacaagactctcattcatcanagttacaacaagtgttacacatgcttctatttatagactaggtagctgtcttgagaagctatcttgagagaacttccttgagaagcttcttttagaaaacttccttgagaagctagagcttatctacacacacccctctcataactaagctc

SEQ ID NO: 130770 - DNA, 269 bp, Glycine max
  unsure (1)..(269): unsure at all n locations
cttgacacacacacgcgcacatttatatttttatatntatagtgctatatgaaaagatgcgcatcttgtttcaaatctccagatgcaccattagccatatattagccttaaagtacaagcaagggctattaggatacccatgttggacatttatgatgtcaatattatctcagggacgctcctcttatttcaaagccacgtaccaccgccaaccccaaaacatagagggaaatgatgctgctatacgaatgctcagccccaaagaagct

SEQ ID NO: 130771 - DNA, 501 bp, Glycine max
  unsure (1)..(501): unsure at all n locations
gctaatctccagctagtgtctgccanagcctgttaattcatgtcatttgtaatggtagatcctatcttccctcgaaatcaagtggatacattacctatgactcttaagtcaattagattgcacctatccatgagggataaaaggaggagagccctactattggaaaattttccaccacgaactttagaaggattggtgatttcattgaagtctcccaacaaaagccaaggaatgtcaatgctactatgaaggttaacaagatactcctaaaataaagctcactgatcaaagtgaaggcttgcatagattgttgagcaagcacacttcattgaagctttcttaatcaagaagtatattatgtattcatgaacatccaacttctcaatgatcaagtcgtaacaacagtcaaccagtacccatatgatcctcacgtgtcctcaagcttcaaaggaaagggtgagctgatagnttcgagacttccagaactgatttattgcacta

SEQ ID NO: 130772 - DNA, 450 bp, Glycine max
gggtcattaaagctaattttgttttccaaattaaataagctcaggtcttttgaaaacattctttttttctttgaagtaaaatataagaatcgaaagatatgcctcatgcctgtgggaagcctttgagaactgaaagatggagagcggtgttgcctgcttcatcttgccaatttaaaacccttttttcccggtcctcagcaagtctttggcaatttctctgaagccatccaaccaagacctccaaggccttaaactgatcatatttcacagcaatgtgtaacgcagtctcacttcggacggtcacatcttcaatggaaccagggcaagccgacaagaacttatccacaagatcagttctcccagtttgagtagcaatatgcaaaggagtgagaccttcccttcctttgactctaacaagggtccttggtgatgttcacaaagcgacacacc

SEQ ID NO: 130773 - DNA, 471 bp, Glycine max
ccgaggctgtggtcaatatgtttaatgagtttatgagcaactcaggattcaaaagatgtgacatggaccattgctgctatgttaaaaaatatactaatagttatgttatccttgttgtgtatgttgatgacatgttgattgcaggatctagtatggcagaaattaacaggttgaagcagcagttggcagaaaactttgaaatgaaggatcttggtccagctaaacaaatccttggtatgagaattctcagaaacatatcagaaggaattttgaagctgtctcaggagaaatatatacacaagttgcttgacaggttttaccttggagattctaagaccaggaatacccctttgggatctcatttgaagttttcaaagaagcaatctttgcagacagatgaagaaaaatgttacatgtcaagagtaccatatgcatcagcagttgggaagttgatgtatgctatggtgtgta

SEQ ID NO: 130774 - DNA, 195 bp, Glycine max
catgaattgcacttgagttccatcctgaaatgacaaatttatgtcagttactaagggactaggaattaagttcaactatagacaaataacttaatcctgggaatagaaagcattgcccaaagattgaaataggataggaaattattaatgaataataagtgattgagatgatcaaacataccaaaagatctttgt

SEQ ID NO: 130775 - DNA, 474 bp, Glycine max
agaggattggagtgcttcaacatgatgtctcataagtatggcataaaccctggtatagatcattattcttgtatggttgatcttcttggtcgtaaaggacatctcagagaagctttagaaattattaaaagtatgcctgttgaacctgattctggaatatggagtgcattgctctctgcttgcaaacttcatggtaagatggagatgggcaagtatgtgtctgaacagctatttgaattggagccccaagtggcagttccatacgtggagatggctaacatatatgcatcagctgaaatgtgggaaggagttgctgctattataagaaatatgaaatatcttcaagtcacgaaatctcccgggcaaagtattattcaagtaaatggaaaacctactatatgtacagttgaggatagggatcaccctgataccttgacatatatgatatgctatactgtctgacttccgttctaa

SEQ ID NO: 130776 - DNA, 416 bp, Glycine max
  unsure (1)..(416): unsure at all n locations
tggatctgagaataggcaaatttgattatcctgctttgatgaataagaagcctgnggaaaattgagagaataagaaggagagaggaacccatgatgtgactgtcgttcctacttggccaaatttcccaccaactcaacaatatcaatactcggccaatatcagcccctctcattacccaccaccctatcatccaagaacacccaatcatccacaaaggccacctttaaatcagccacgaaacccgcctgctacgcatccgataccaaacaccacccttaacacgaaccaaaacaccaaccagggaaggaattttccataaaagaagcctatagaattcactccaatttcgatgtcatatgctaacttactcctatatctactcaataatgcaatggtagtcataatcccaacaaag

SEQ ID NO: 130777 - DNA, 461 bp, Glycine max
  unsure (1)..(461): unsure at all n locations
ctaagcttgcatctgcatctgaagttagagcttangcagattagtctgctaaagctggaagtggggctgaagtagaggatgcacggatgccagctattggtgcaaaggaagagggaacatcaattgctctgagcttggtcttccttgcctctggataattaactgtttggtcattcgcattccaacagttccttatgatataagctaagtaaatggttggccttaagttttcataggaggtaagggcatcagatcccactcccctcgatctacacaaggttgtgactaaagctggaaagcctaagcgagaagagttagactgagccatcatggtcatttgtccagagatcaaaccgccaatgttcatgtccatccttgtgattaagccatagaccaacctagncttgtctgtgttcaaatctgaagtgcgggaggtaggagctatgtttaagtatgagaag

SEQ ID NO: 130778 - DNA, 417 bp, Glycine max
  unsure (1)..(417): unsure at all n locations
atccttagagtcacctgcggcattgcaagcttggaagaaagtgatgaggtacatgttcttttgcagagcttgaaagagcctggatagtcgaagagaagttcaagtccatagccatcaaagtctgaaaagagtatgatgaactaagggatgtcaatatggccatcgatgaagccttggaatgagaaaccaagaaggcccgaaaggaagaacacgaccaaagcaaagttttgaggggctttatagggcagcaatagtgagctcaagctccgaagaggtgaaaggaatcatcacgggtcaaaggcatgatcttgaaggacgagctaaaggtttgccttangtcgaaaagaaatttgtcccaacagttaagcgaggctgaagggaatatgtgggccatcatcgataagtgcaaagagaagc

SEQ ID NO: 130779 - DNA, 480 bp, Glycine max
  unsure (1)..(480): unsure at all n locations
ctgtcgaagacattatcaatggagcactgatggaagttccctttctttttcaacagccctgacctcccccatatggaagctcaagtgcacgaaatccattctctcagcacaaaatgcatccattactgttgtgtttcagtgatattggtgatgttggggttgataggactgactatgcatgcatgatataaaaaatttcttaaaatgataataaaatacctctttgtcctctatcttgttttgtggcaaattcgtgcatctgcatacaactatggggaattcaatgaagaattggacatgaagatcaccttttatcccattatttttggggtttggcattccttgacctttgataaccttctcatatcctgngtatatgacattattctcgaatgacaaacccatattttcccctcctaatagagggattgatatggagcagcctattagtgcatctactataggaatctgaacacatat

SEQ ID NO: 130780 - DNA, 361 bp, Glycine max
gagaacagccaaccccttattgtagccccacaaccccttattgtagccccacagtatgaattattgcatgaataacaacgaaacttatagaagaaaaacacttgataaaagatatcatcaacaaggaaatcacataatttaaagaagacggataaacgctgaattcaaacaaataatcaagaaaaaaatatcttaataatgaaaggtacctaaaggtgattcttgctgtttttcactgggctctgaagagttattagtgggtggtgaaactacaggaattgattgcttcttcattcataattgtggcttgaatatataagacaaaacatcatgttgtggtcatttgatgtgtttcaacttc

SEQ ID NO: 130781 - DNA, 467 bp, Glycine max
ttaagagtcatttattaattctttatcttcaaaatattattatttaaatgttacttaaagtaaaacttcattaatgtaaaaaatataaatctatttaattttattatgtttattatactaatactccctcattttatttaataaaactttaaatttgctaaaagatcaaataaatcttaaaaacagtagtgacgcgttcttaaatttttagcaaagaaactattattgacccatgcttattaatttaagttattaaatggaccgattaacaaacttaaaagagtaattgggagcaatggttgattactttgattcattaatttgtcatataatacgggtcaatctttcaaagtatttgtgttaaagggtatgggtatggtaatctgatagactgatagaactaacttatatacactaacttgttaatgagccttttaatttctctatgtagtcgatgtaagggatct

SEQ ID NO: 130782 - DNA, 409 bp, Glycine max
  unsure (1)..(409): unsure at all n locations
agctnntgcagattggtcttcgccatgtattgnctatgntggtccgaaaagaggcaaatttgatcatcctactatgacgactgagaaaactggggcaaataaagagggtgagaaagagggagaaacccatgctgtgactgccattcctatacggccaagtttcccaccaacccaaaaatgtcattactcagccaataacaaacctccttacccaccacccagttatccacaaaggccatccctaaatcaaccacaaagcctgtctaccgcacttccaatgacgaagaccacctttagcacaaaccaaaaaacaccaacaaataggaattttgcagcaaaaagcctgtagggttcaccccacattccgttgtcatatgctaaacttgatcccatatccactcgataattc

SEQ ID NO: 130783 - DNA, 433 bp, Glycine max
  unsure (1)..(433): unsure at all n locations
cagatttagtaatgacccactgacctagaattttataaacttaatggctgagtgtaactaaaattgtggcaaccaaaagtcacccccaacagccaacaagtcagccaccatttggtctcccaaaaggctgatgcctangttgccaattgggcccttattacaacttgaactagacctactaaagcccttttagtggattaacccaaaacatatttttggtcagccgactttacaaggattgggccattatttagacaaactaaaaactctaaaattgagacaaagtggtgccatttagtcctcctccatttgggccatgatacaactcacaaccttggacttttctccttgaaacttgggcttgtattcaaatagtatggacaacactcgttgaagagcttccttggctttccttgctctagcccttgtcata

SEQ ID NO: 130784 - DNA, 175 bp, Glycine max
ctatcacctaggaaactgatcctccctagattgggctgatgttggatattttggttggggggacatatttgttgatttatgtatagggaatgacactcccagattgggtatcccaaagaggttcccctttcacattcaatacagtgggaagaattttttcaacttgcttaggaag

SEQ ID NO: 130785 - DNA, 351 bp, Glycine max
  unsure (1)..(351): unsure at all n locations
ctatgaatctcagctgntaaaggggtacggaanataaacttaatgaaaataatagtacacaaaanaagtatggaccactaagggtgcatagaatgaattgaaagattcgatttcgggaacttaccagttgaagaccgaaggacgacgaagaacgaacgaagaacggtgaagaacaatgaagaacggtgaagaatctccacgaaatcgcttacggaaacgtctcgaaagcattatggaaccacctcggcttggatttttttcacggaaacaatttttctcactaatttcgagagatttctcgataccagatgggctgaacccatttgctctaccctccttcccctatttata

SEQ ID NO: 130786 - DNA, 417 bp, Glycine max
  unsure (1)..(417): unsure at all n locations
acattcttgggatggaaacattatcaccaaccatttttcctgaaatgatttcagctgcaatgacatgtatagctagtctagtaactattaatctagtaccattacagagcccttggcgttggtctaagtttcttagcaacattataggactacctgattttagcttgatacgatgatttggcaaaccagatgtgtttagtgaaattgagaaattcagttgtgattgattggaaatgccaactgtcaatggtctttgacttctctatataatcatagcttaagtattccatttgttcacctattatatntatttgaggtaccatacanagttaaatagagaataaatactgagtagaccttacgttttgtaatttcatatgtgcataaatacctgggatcaaagaaagtatataatca

SEQ ID NO: 130787 - DNA, 442 bp, Glycine max
tcaagaaacgcctgatgaagctcatatcatctcaaagcctaatgatatgagtgttcatcccatcaaagcgagtatccatcacatcaaaatgttcacccacaaatgctcgaagatcgtggagctctgtgaggacttcaatcagcagagaagaagaagtatccctttgtggtggaggagatggggtacgttcatcatgaataggcgatggcaagtcttgtttgtgaacccattgaccatcaacatccttccggtaaccacaggaggtaacagcaccgacaccaatggagaaagaccttttaaccttgacatatgggtcatcatccaaaggaacattgaaatgatgaagaacaagagtaacaaggtggggatacaagagaagtgcattggcctgtaatgccttatgtatccgacaccgaactatatgggcctagtcgatctgatg

SEQ ID NO: 130788 - DNA, 490 bp, Glycine max
  unsure (1)..(490): unsure at all n locations
agcttgtaggattatggagtacccatcatatgtggtactaggtggcggncgggcaatggtgcacaacaagttttccacatccacaaattgcgcataaacccaccatcccctgttgcccacctccaactgagctcacgtactcccacgtagcccatatccttgtttctctcaacaccgggtccccatcaatcctcccaagcttccccaacatccaggtaaaacaaaattcaaacagcacaaactatcacagccaagaaaacagggcaaaggcagaaaactctgcccaaaacaccaaccaaaatcacagcttttcccacttaaagaccccagtaacatttccttcgtttcaatttgttaaccgttggatcaactcgaaaattntactggaagtctctagtacataagcctacattnntgaccgtgggatctgctagaaaacatacagaactcattctgactactctttcacaaccagcaaacatagtatttt

SEQ ID NO: 130789 - DNA, 471 bp, Glycine max
  unsure (1)..(471): unsure at all n locations
gcttcttgggccattcctgcaaggcaaacttttggaaagttagttntaccagtgggacactactcttaaaacaaaaatggcatacaacctcttcccataaacatcaatgtaaatttagagcaagcttatgcgcatatttccttacgaacgttcgcttgcacaagacattctttcaactaagaaaaaaaatgcacccatatacaatcaaggcagcttcattacctagattatttacatgtacttccaaggtgtatttgttacttacatcacacacatctccttggctaaatttacatacatgcatactcaaagcattntggggtaccaaaaattgcacatgtgcacatcttggtatttctaatacctatacaaacttcatgatgaatattgactatctacacaataaagtgctacatttcatgctcttttcaagtatttgctacctaaagccgcatgcaaattcaagtatat

SEQ ID NO: 130790 - DNA, 187 bp, Glycine max
  unsure (1)..(187): unsure at all n locations
aatcttagtatgagaagttggaatacatcataccgattttactcctctctttatacgtttatacttcgctcgttctatttcacagcattttctgattgagtccaatacctttttttatgttctgttctggtnttccaacaaataagatccaaaattgctttgtctctattgtagagtgttaatttca

SEQ ID NO: 130791 - DNA, 399 bp, Glycine max
tatcccatgccttcttggccgtcgatgtgttggatatcttctcaaatgtatcttcatccaccgattgataaataagaaagagagctttcttgtctctctttcttgactccttcaacgtctcctttacaccttggcttagcgaggcttcatcttgctcctcgaagccattctctacgatatcccacacatcttgagctcctagtagcgccttcatcttgatactccaattatcataattgttctttgcaaagcatgctcaagagcaagaagatgccgaaggagttttgggctgaagcagtggcatgtgcagtttacctaacaaatcattctccaacaagaagcgtgcatgagaagacaccacaagaagcatataatggaatgaagcccgggttctctcac

SEQ ID NO: 130792 - DNA, 449 bp, Glycine max
  unsure (1)..(449): unsure at all n locations
gaaagttctaaaataaatcaatgttgtatcaattaatagaaaccatatatttgctattaaattcctttttatatttactgtatcaattagcatattttctcccaaagtgcttttattttatttccctgtaacagcagttcctctatataatgaggttgtaacttgttagttggaataataagaaatacataatccttttgattcctttttctacactcctattgtatgccatccattgtctctggtactactagtaccaatatctatttatatataatgatcttttttggctgataaaaaaattagattgattaatatagtatagtaatgaacataaaaattgaaaatatatattaaggaataataatatgtctttttaattgatacacttnaantaattaattattatgagatgatgccatggtgctnggatgtatgaatatatttac

SEQ ID NO: 130793 - DNA, 484 bp, Glycine max
  unsure (1)..(484): unsure at all n locations
actaagcttagcctgctgtgaattaatcaattagggctgttcactngtttttaatagtagcaaaaccctccctttatggtgggaatcaatgtcctgtgttaatcttatcactgtaatgccacaaaatcatagggaccatttctgcaacatggaatggaggtagcagatgtagtcaggtccaaaaccttganatgctggtggattgctttaacttggacaatatggcaccatagaaataaggtggtgttccaagatacaacttttcatagaaccaaactgttagaagatgccttattcctactatggtcgtggatcaaagcaatggacaaggattttactcttcattttaaccaatggtcctctaatcttaaggaaggttttaggaactatgaggcgttaactcttaaactcttaaacttgtacaagaacataataatgaatatcctatcttataacattaaacgcgtgggtataggtgttatat

SEQ ID NO: 130794 - DNA, 433 bp, Glycine max
  unsure (1)..(433): unsure at all n locations
agctatacagcagaatttagtaatgacccattattctctataattaaaataacttaatgccattaacctagggaattaaaaaaaaaacttaatggctgagtgtaactgaaattgtggcaaccaaaagtcacccccaacagccaacaagtcagccaccatttggtctcccaaaaggctgatgcctaggttgccaattgggcccttattacaacttaaactaaacctaactaaagcccttttagttgattcaacccaaaacatattttggtcagccaactttacaaggattgggccattatttagacaaactaaacactctaaaattgagacanaagtggtgtcattagtcctcctccatttgggccatgatacaactcacaaccttggacttttctccttgaaacttgggcttgtattcaaatagtatggacaa

SEQ ID NO: 130795 - DNA, 436 bp, Glycine max
  unsure (1)..(436): unsure at all n locations
gctcaaccgaagttgtatttcggccgacgccggcattttgtcggccaggaaaacattagcccacctcggcaaaaaaaaacatgattcaccggtattgacagaaaaaaatgctggccttagtcggccaggaaagatgaccgatcgaggtctaaaaaagaagcatgaccggattacgccgatcgaacatttcctaatagatatcctccaagcattattcagggattgaatggaaaaaacaatagccgacatcggtagttaaatagccgtgactgataattttcagccaacactgcgcaacttctttcacaaacgctggccgataatatttctttacgggaaaggatgctttcgttgttgggtgtcgcctataaaatnttcaatgtaagtcggctaggttttttcgtgcgagctcaaccaaattgtgtttcggccgaca

SEQ ID NO: 130796 - DNA, 383 bp, Glycine max
  unsure (1)..(383): unsure at all n locations
cactgnnaatgctatcatcattttatggttatgaaaaccacattcttcataactctccatcctatggttctcataaacctctttcttaatttaaaagaacacccacatttttttattccagtggacttgtgcactaactctgttctttattggatgtacttctttctccccttttcgcaatccaatataaccattttttttacttacttgtgacttatgaatcacaaccacaaacttgtattcctctccacacgtcaaacccaatttaacaattcagtgtgctcttaataaacctaagagaatctgaaaaaaattcaatacaaaacattaggctttaccaaacatagatatatgaaagtaatgaaatatatctcattaatcat

SEQ ID NO: 130797 - DNA, 376 bp, Glycine max
  unsure (1)..(376): unsure at all n locations
taactacattcacgactacataccatataaagggtgtttaagnattcttggggnntacacatcaagaaaagacacactcatccaagatatatatatggtccaaaaggttcttgcaacactaatccacgcatcaaaagagaaataagctaactaacaacatatacacaagatgataaaggttcattaacacattatcaatcaatatcaagactacttgcatcacccaatggcttgcataatgccaaccgcacttgcaatataaagaggcagtcataactatgactacaggatcatggatacaaataggagcagcttcagctatatagctataacatgagactgggccaaactaaaagaagtaaagaaaaacaccata

SEQ ID NO: 130798 - DNA, 187 bp, Glycine max
ctctgaagtcccagtggcgaatccacatggactatgtggtatctagattaatgcatacccacttttaaagccctagatagattagttaaaatgaagaatcccaatctctggtagatgagatgaaaatgttattcctcatcatagagtgtgtgaatgcgaagatgataaatatataatctccagacaa

SEQ ID NO: 130799 - DNA, 488 bp, Glycine max
ttcctgttaagttggttttctttgtgcatcttctttggtttgtttaatatttcattttatatgcaaaatagcttacgaaacaagttgaagtataattagtcgtgccaccttccctttttattatttgattgttattcggctttgttatgcatttaccttctctctctttttttcatttgatcgtgtgtgttttatacaagttttgcatactactggcagtaatttcttttttacacgagagaaagaaagaataaacagcaacagtacaaatttcaaggcctggaaataaacttcttgatgcatactaactacttatcaacccactctatatttgttaccctaacttgctactactttcgggtgtattcttctggttttttctacttctccatcgacgcttgtatgctagttacacttgttggtaagtactctttatactcaatacaaatgtatctatattttactccaaagaatatttgggatatatt

SEQ ID NO: 130800 - DNA, 149 bp, Glycine max
  unsure (1)..(149): unsure at all n locations
ggggggaaaggaaatcctccccccggcccagattacctgacgcggcnanacgcgcgagcacagaaaaaaaaaggtattgaaaggaagagccgggaagaaaacgaacccccccaatcgagggcacaaaacaaggaacagagagcgagggc

SEQ ID NO: 130801 - DNA, 175 bp, Glycine max
aaagaggagaggtttttattaaaaaaaaacgaagccgagccaggaaaaaaaaccacggcgagcgactgaatgggcaaaaagggcccagagccaaaagcagcgcaatgggcccaaaagcgggccagtgcaagggcccaacacacagacaaacaacaagccagtgagacaccaaaca

SEQ ID NO: 130802 - DNA, 300 bp, Glycine max
atttgagcgtcatatttttggacttttcttacatccgagtaacaagctattgtcgtctgaatttgctcatagcttctgtattccatttcaagcgtctcaatatattactggactcaatccgacatctcgataaataggttattgtcacttgaagttgctcatagtttcaacatgcactttcgagcaatccggatatattacggtacctaatccaacttccgagttaaaaggatattgctcctcgatatagcttacagcttcaacattcttttacgagcgttctcgatttttaccggactc

SEQ ID NO: 130803 - DNA, 347 bp, Glycine max
caaagagcgaggaacctctggagaaaaagacagaacgacagaggccgcgagagaaaggaaatgttgtctattagagtactcgccacccgtcaacatgctcaccaacgcgccacataacacaaggctaggcccaagggagactgcagagcacccacgactagctaaagttagaataccccctcgcctaagcaacgatgcggctagcaagaatctcaggtctgccaacttactcgcgctagggacaacaacctaacaggctatcgagactaattcagacacacccgcggtgatattcacatactttattactgagagtgatacaacctcagactaagagtaatctccct

SEQ ID NO: 130804 - DNA, 418 bp, Glycine max
  unsure (1)..(418): unsure at all n locations
tctttcatggtttattccttagtggatggcacctcctcttacctcttctcctttgtcttccactgcatctccatggtggaaaatcaccattaaaggaactcattgaagctcaaagatccatcctccatagaagtcccacaagcaagcttccatcaagtggtaattagagcacaagagcttcaagtaggtgctccttaaacctccattaatttttttgctttaccttatcttccattgttgtttcttcatttttctccatgtatctcctcacatgtcttgtgctaaatgttgttaacatgattctctagagtttccaccaattaaacttgctatagaagcttgagttgattttctatggttcaaatttcttgttcttgttcttgaaccatgaattgngttgaagttaggggtcctttga

SEQ ID NO: 130805 - DNA, 358 bp, Glycine max
ctacatgaagcgcccgatgcggacattcgagcgactcgatatattattcgcctgaatcgaacctcagtgttaaaagatatgaccatttgaatatctgtgaagcatccgatgttcattttcgagcgtctctatatgtgatgaaccttaatcggacatccgtgtgaaaagatatgaccatgtgaatttctcgagagcttccgatgttcaatttcgagcgtctagacatattatgcgcccgaatcggacatccatgggagaagctatgaccatgtgaatttctcgagagctcccgatgttcaatttcgagcgactcgacatgttatgcgcccgaatcggacatccgtgggagaagattgac

SEQ ID NO: 130806 - DNA, 317 bp, Glycine max
  unsure (1)..(317): unsure at all n locations
cttagaatatttagcgctcgactcttcggccaataaggttgttcttaatacatgtgcgaattgatgggatctatttgtatgaaccatgatattatatcaatgaatttcccatttcattgaatgttggncaatattcttttcttatattacttttacaatagtgctcaagggatcgtcatggaaatggctcacaaacaaatagaacctttctttttgaataatatgttggtggaatgaccctatgacatgattgcagcatgttgaatataacttacgtgggtcactaatgatatttgctgttgcatatgttcaattat

SEQ ID NO: 130807 - DNA, 242 bp, Glycine max
tataaactgtcagctggtgacactagtcacaatatagataagcattagatagccatgattgcacgagagaaagaacgtgcgtggataatgttcaaatgcagtcacatgacccttttaatgaagaattgtatcttgaccgtgaaattaaatctaacagatatttttaattcttctcctctctctctcgtaataaaactttttcttacatgatatgacaccctctctgtatatataacatacac

SEQ ID NO: 130808 - DNA, 423 bp, Glycine max
  unsure (1)..(423): unsure at all n locations
agcttggttcccaatgctctgttaagctcttccaaaacctagaggtaaatctaggatctctatcagatactatgctagatggcacaccatgtaacctgacaacctcacttatatacaaggtggccaacttttccaaggaaaatcttatattaataggaatgaagtgagcagacttagtcaatctgtcaacaataacccagatagaatctaaacctctaggggttctaggtagtcctaccacaaaatccatggaaatactgtcccacttccacggnggtatctctaaaggttgtaacttccttgaaggtctctgatgttctatcttaaccttctcacagactaggcatgcatacacaaactcactaacctttttcttcatggtgggccacccaaacatggtctntaaatcatgatacatcttgg

SEQ ID NO: 130809 - DNA, 397 bp, Glycine max
  unsure (1)..(397): unsure at all n locations
tgcctattatttanatgattattataaggagaaagtgcaacaaccagagcagngctcgcaagtacacactcaacaagaaaataatctttaagttaacacgtttcctcatcaactgattgtcaaagaagaaaggcatgatgaccatgaggtttcaatcattctatgacaaccctgtttgtcaaatgctagttgtccatttgacatggataatggtaaactggaactaagtgtagaggattagaagatctcttttaacttagatgaagcaataaaatacccagatgatagtgaggcctgttttgaagaagaaacattggagcaagagatagaattaacagcctcagccatggtatcatagtcttctttggaggaagaatttcacaatgtgacagaatgt

SEQ ID NO: 130810 - DNA, 234 bp, Glycine max
agagatatgatctatacaagaagctcaccaggttttatgatggccactcttcatttttagaaaaactacttcagctatctaattcggtctgaattatattttcactgtgcactttgagttattaccagctaccacaatcaatcttagatcttaccttgagaaggagactaaagtacccaaccctcgggtggtttgtgaataagagccctatatacacctactcttagcccatac

SEQ ID NO: 130811 - DNA, 446 bp, Glycine max
  unsure (1)..(446): unsure at all n locations
tcatgatgttgagtcaagatagattctatgtggtttgatgataacaagagatgatgaanaaagcctaatagaatgatttcaagattgagtcaacaattcaagaatcaagaganagattcaagagaagtntcaagtttcaagttttcaagaatcaagaataatcaagatcaagattcaagaatcaagagaaggctcaatcaagatatgtacaaaaaactttttcaaaacattgagtagcacatgaagtttgcacaaaagcttttaccacagagttgttactctctggtgatcgattaccaggttactggaatcgattaccagtggcatattttgttttcaaaaaggctttcaactgaatatcaacgttcaattattttaaatgggtatcgatacatatatggataatacagtggtggacatgaatcaattaatggagagccatcttc

SEQ ID NO: 130812 - DNA, 367 bp, Glycine max
  unsure (1)..(367): unsure at all n locations
aaatcggattgggtttctcatcctatttctccattttccttttagaaaaaaaaagtgtggaaggtaatcaaggaaaagtattccgaatggacattgtagggtaaattaaaactttagaaattactaaaacttttattcaactggattatatctatatattattaaaattatgttaaacttcattaaaataaaataataataataaaataatcaaatgatcagtattttaatatattttgaaaattctatgaataatataaaattcaacgattaattaattntaagaaatctttatctaattaaaagttattgaatggcatgataattggtcacaattacataaatataatttgatcatatcatatag

SEQ ID NO: 130813 - DNA, 350 bp, Glycine max
  unsure (1)..(350): unsure at all n locations
tttagatgatattataacttaaccaaatccattgttgggccacttgcattgccacactctatccctagatgtgaaggggtgtgtntgaaaggtgccttatttgttgtcacccggaagctgtggtgtctcagaaaaggctttctaaggaggggatgaccagaatggttgagtgaagcactatagccaccaagatgttggctcttagggagttgagatccaacattgactagagataaggtctaactgatacttataaaacttggacaatccccaccttacaaaattgtttctagtggtgagttacgtcctaacccatattctatgtgttaaacaacatgaaacatagcatt

SEQ ID NO: 130814 - DNA, 354 bp, Glycine max
  unsure (1)..(354): unsure at all n locations
tactcaagctttatggacgagttgaatttgtgaaagtaagnatagttttgtaatattgagttagagcttacactaataatattaatgtttgttttaagtttgttagctggatctgagcaactcttatattcaattaactaataaattcatttgtgcctagaaaaaaaaatacttacgcttgagtgcatttagctagctaggtgtaatatgttattccatctagctgaatctttcttgtaatgctgcaattttaaaaatacaccgataaggacgaatcaattaattaaacataaacgtacatgggcgcaaatatggaattattaatgcacgtaaacacaattgtatttaaccgca

SEQ ID NO: 130815 - DNA, 388 bp, Glycine max
gctgtgaaaataaaaactacgattattcactcatacaatacgccctgaataagcctagattgaccactcaaatgtcttttacatcttttgactggtgtttctttcaacagggccaagcaaagaggggaagggcaccgtgggaaggggtatgtgtgattctttcctaccacaacaatggtttaatgatgtgctttgtattattttaacaaatattgaccttagaagttttttgggcattaatgctgaatttacatccatatattaattcgagactttgctctcgcatcaggtgagagagaggtgtaataaagaatggacaatattccaagagcgtatggctgaagctgagagggactattttcaaacaagggaagctattccccttaac

SEQ ID NO: 130816 - DNA, 513 bp, Glycine max
  unsure (1)..(513): unsure at all n locations
cactaagcttataggcacaaaacatctgtgtatctntcccaagcctcttgtgaagtgaatatggatctgtcaaatctgacttgggtaggtgtagagggtgcctttcttttcctagaatccatttgcaaaatataagacaaaacacacaagattagcatagctttattctcaagaaaacaaaaaaaattaaaactgaaaatagagctgggcacttagtgcagcaatctggtgattagccccttcacaaaattaatcaaaggctaagcgcaacaagcttgtgcttagcctaaaaactcagaaaatatttttctctgcagattaggcttagtgcagcaagctgggcttagcctaaacctacaatgttaaagacagtaaaggatttgagcttagcgcagcaaggcgcgcttatctcagcccctctgaactcaactgaggcttagcgcgacaaggcatgcttagccttattccaaaaggaaagaaatagaacctaattggtgcttagctcaacatgct

SEQ ID NO: 130817 - DNA, 457 bp, Glycine max
  unsure (1)..(457): unsure at all n locations
ctgcagcttacctgattataattgtatcctttgcatcncttgtanagctaaatacattttcaaaattgaaccctgaacttgaatgaatatctccagataccttgtttagattcttggagagtagatagttcaaggcaaattaccccaaatttggaggagttgattgggatctaaagtaaaaggtaaagcatcagcacacacaacaaataagttgtgtgttaaaaaaaagagcaatcaaagaaaatgtgtgttgttgtaataaggtcaaagacaaattaaagtaaaaggctagtgagtaagctagttgtatgaaaagattacttggataagtctacgatttgtgctctcttagaatctatgcctttgaatcctagaaaaaccaattattntttgtacccagcctcactacaagcctatgaaagaacttctgattctatttatgcatttctgactttat

SEQ ID NO: 130818 - DNA, 432 bp, Glycine max
  unsure (1)..(432): unsure at all n locations
gtgtctaatgatgttcgtcttatctttatccgctggataaaaaaagttcttgaattcgaatgtacttgagtttattcatttgatcaaatgcttttcttttctttttacttggtttgatgattgattttagattaacagaaattaggatatctaagaatcacgaagaagatagtggtactgtcactactgtggtttagcaaaaaataaggaagaacataaaaaaatggaaacaatatcaaaccttgttttaattgacaaaacctgattcaatttattttattttattagttataaaaatcgaattgattgtgcataaaaataatgtattgcgtttgtgtctacccagaatntatctggaatcaaatcttctttgcttacaccatatanagaagtgtccggactcattattactcgtttctctctcctctctcc

SEQ ID NO: 130819 - DNA, 361 bp, Glycine max
  unsure (1)..(361): unsure at all n locations
gcagatgaaatgatgcttcttggcagccgagttcttgttagccctgtagtgcaatgggatgagcaggttattggtgatggtaagtgcttttactacttgcagcaaaaaatgatatgatttaatatatgcactcaagttaactgtaccaaaaaaatatgcactcaagtaaattctgtgtatgcttttcaaagttttttttaaggcttgagttaactcaaatgataggaacttcttaccggagtttagacaatctgattctctttgttttgtcattctgatctttaaaatagtgactgagatgcatattctttcctgtcagtattttatagaccgacttgtnttcatcgtactgctaatttgg

SEQ ID NO: 130820 - DNA, 435 bp, Glycine max
  unsure (1)..(435): unsure at all n locations
tatccttatggcctgcctccgaacttcacctttcgtgcctccccggaagatntaagccaagccccgacctttgaggggcaactcccaccttatgaagactatcccgggcaagacgatggggaaggagatacccatcttggccccctgctccacctcaaagatccatccccgcatgaactaccccagccgaacatagtccgccacatcccggcctcacccacacccgtaaaagaatctgttcccttcgcggaagataagggaaagattgaggcgcttgaagagaggttgagagtagtcgagggcctcggcaattacccattctcagaattggcagaattatgtcttgtgcccaacatcgtcatccctcccaagttcaaagtaccggactctgataagtacaaagggacgacatgtccaaaagggcatctccggatg

SEQ ID NO: 130821 - DNA, 371 bp, Glycine max
catcaaaaagggggagaatgtgaatgtatgtatacatgatctttgatcgatgtcaaaagaataatcatacaaggctcattttgcttcaagattaatacaagattgtttcaacaaacaaagccttgattcaagatttcttcaagatcaagccttgcctcacaatgaatggtttcaagtcattcaaggcacatgtaatcgattaccaatacatgtaatcgattaccaatggtttgaaagtgtgtaatcgattacacatcatatgtaatcgattaccagagactctgaacgttgggaattcaaattttaaatgaagggtcacaactgttcaagataacaaactgtgtaatcgactacactacatctgtaatcga

SEQ ID NO: 130822 - DNA, 502 bp, Glycine max
ctaagctggactatgactgatcctagtcctcttttgacttatttaaatattggtgggctgatcattagaatggatgaactcagtgataatctccttggacaatagtttctctcgaatgaaatgacaatcaatctctatgtgcttagccctctcatgaaagactggatttgaggcaatgtgaagagctgcctgattatcacagtataacttcatttgcaccacttcacaaaatctcaactcttggagaaattgtttaatccacataagttcgcatgtaaccatagtcatagatcaatattcaacctctgcactagatcaagcaacaacagtttgtttcttgctgttccaagagataatatttcccccaacaaaaacacaatatcctgaggtagatctcctatccatgggacaaccagcccaatccgcatcacaatatccagagacatgagtgctacccttgtcttcatacaacaattctaggcctggagctttctctacatat

SEQ ID NO: 130823 - DNA, 481 bp, Glycine max
  unsure (1)..(481): unsure at all n locations
tccaatgtacaccaccatcacataggactttatctataaatgattctggacattgctcanaaagacatatagtcaatgtttcttccatccagagaaatttgatgtcatcttatgacaatcgaaaaaatagaacaactgcttctacatccacatgccaagccagtaatcgttattccaatatgacacagtctcacattcatataggtaatttttattgttatgctattatcatatatctacatacacacattgtatttattattacatccttttcaaatttaattctacagtcaacttatatataggatgtcaaattgtctgtttattatgcagataaacatcagacaacaactaacactacacaggataatcaaattggtatgatcaattctattatataactgcctggaccacccctgcacantttgtattcgggcttacactcctatacgatntccttttgaactttcacttagtctac

SEQ ID NO: 130824 - DNA, 467 bp, Glycine max
  unsure (1)..(467): unsure at all n locations
ttaagcaccgcagctgcagcttcatgttatgacccttcttcttttttntancnggactagagcgggttagtgagttgaaccatacctgacattcactaatcataatnagtgaaatttttggctccaaatttggcttcacaaattcaaattcaaggtcaagtgaaatctgaatagaaattcaaatttccttccaatcttgtgtgacacttaggctataaataaaagccttgtgtgtgcattatttcaactttgatcattagagaaattacacctcaaggtttagaccttatttgaggcatataatgtcggcccccctctttcctttccctccactccttctaccttaagctttatccatgggctctatgaagggagcttgttttgactcatcatcccttgagtggcaatccatcacgtatcttctatcattcactgcattgtcttcataacaaaggactcttgtgaaa

SEQ ID NO: 130825 - DNA, 455 bp, Glycine max
  unsure (1)..(455): unsure at all n locations
ctcagcttccagntatggagagctaaatcctctgttggtcttccttgtagtgtagaagcaaagactctgcctttgatgatgccatatgatcgtgatgttttgatgccttatgaaaatgcgcttctcaagtttaattcaagacaaaaattcaagaatacaagatacaacatcaagaagatctctagtggttttatgaagggaattccaaattgaaactgctaaaggtttggccaagaaatttaagcaaaaatgtctttttcaagagatttactctctggtaatcgattaccagaggatgtaatcaattaccaatggccaaaatgaattattacaactattagaaatttgaattcaaattttacactgtgtaatcgattacacatggatggtaatcgattaccagcagctactgaacagtttgattcacaatttaaagcctgtaatcgattacacaa

SEQ ID NO: 130826 - DNA, 413 bp, Glycine max
  unsure (1)..(413): unsure at all n locations
ctgaggcatgcatgcttaagaaaaaaggcatactttatttttatntccagaaagaaagtcaatcaatatacctccaatctttaatggagaggagtaccactactggaaaacctgaatgcaaatttttattgaagcaatagacctaaatatttgggaagccataaaaatagggccttatatacccaccacagtagaatgaattacaatagatggaagcacatcaagtgaaagcataacaatataaaaacctatagatagatggtctgaagaggatataagacgagttcaatacaatttaatagccaaatacataataacatctgccctgagaatggatgaatatttcacggtttcaaactgtaagaatgctaatgaaatgtcggacactctcaattaacacatatagtaaatca

SEQ ID NO: 130827 - DNA, 417 bp, Glycine max
cactactatggagctcgttaaaagaagagaatggtggtctcttcctccttgaaggtctcgtgcaagttggggaggatgaaagggtctacgttgtgatctttgagagcaaatggtgagagatggtgggaaatgatgcaaagctagtgatgtgttcaattaactagcttgaatgagcattgtatatgccatgggggatgtacaccagctttccataagtaggtggttgtgcttttacaatttatccaaaaatggctaaagtagacataggcaaaaatggtaaaaattgatttttgccaaaactggtaaattctatcttaaatgtatagaataatctactaacttcctagactatattgttaatcttcctattgatatgtgtacttagtgtggccgccctaattaatgactggtttggtg

SEQ ID NO: 130828 - DNA, 94 bp, Glycine max
agcttgaatcggacatactgtgtatattgttttgaccatctcgaatatcacgagaagctatcgttgcgtcaatattcgagcgccgactataatg

SEQ ID NO: 130829 - DNA, 384 bp, Glycine max
tggcataactattcacacgaatgtccgattccggcgcataatatgtcgagaggctcaaaattgaacgatagaagctcttgagaaattcaaatggtcataacttttaacacggatgttcgatccaggcttataatatatcgatacgctcgaaattaaacatcgaaaactctcgagaaattcaaatggtcataacttttcacacggatgtccgattctggcgcataatatgtcgagaggctcgaaattaaacatcgagaactctcgagacattcgaatggccataacttttaacacggacgttcgattcaggctataatatattgatacgctcgatatttaacatctgaagccttgagaaatcacatggcataattttacacggag

SEQ ID NO: 130830 - DNA, 470 bp, Glycine max
cggaagcttgcgtctaatcataaattgctgaacaaacatgtgcctgttatgcttctctctcgtgagaaatgctacctggtaagagttctatgtgtatacattttgtactaaaaatagcatctaaataaaaaatagttcgtactaaaagaacagaagttgattaatgagaaatctctaactcctaatacttttttaaaatcactttttaattattttttaaaaaatttaaacaaactgaatcaatatggtgaaatatcacaaaatttgattaatgctaatccctaactcttaactaggagggctttacttaacagcccaggcaaaagttggagtgaaaatgagatataaatggagacaaacaaaagaaaaagtacttcttttctatttgattaaggagacagaataaaagctctccataagaatcagatctaatacgagaatttgttgagatgttcatctattcatcggta

SEQ ID NO: 130831 - DNA, 379 bp, Glycine max
  unsure (1)..(379): unsure at all n locations
aaacatgaaatntatttgtacctaatattcgtcttgctctcgcttatnttaattgttgaaatctcgtttacttatgaggtgtttgacaaaatatttctaatagaatcaaggtcttttccggtttaatttcttagctctagtttttgcatatcgttcctttttcgcgataaggctcgacttagctgcatatccgtgtttcatttgaacatgaccttattgagcttgaacgacccgataagcttcttcacaatagtttctatcatacacatcggattgtacaaacattatatttatgtttacctaaaatcagtctagatttcgctcatctcactcgttgaaattcgttctcatatgacgtgtctgacaaaatcgtcaattt

SEQ ID NO: 130832 - DNA, 349 bp, Glycine max
catccgagaaaaagttaattgtcgttgaattggctcataggttcaacattcaatttttgagcatcttcgatatattacgggactcaatcagacatccgagtaaaaagttattggcgtttgaattggctcagaacttaacattcaatttcgagcgtctcgatatattacgggactcaatcagacatccgagtaaaaagatattgtcgtttgaattggctcagaggctcaacatataatttggagcgtctcgatatattatgggacttaatcagacatccgagtagaaagtattttcgttgaattggccatacgttaacattcaatttcgacctctcgattattatgggac

SEQ ID NO: 130833 - DNA, 443 bp, Glycine max
  unsure (1)..(443): unsure at all n locations
acgacacgctcgaaattgaatgtttaagctttgagccaattctaacgataataacttcttactcggatgtccgattgagtctcgtaatatatcgacacgctcgaaattgaatgttgaagctctaggcctattcaaacaacaataacgttttactcggatgtccgattcagtgacgtaatatatcgggacgctcgaaattgaatgttgaacctctgagccaactcaaacgacaataactttttactcggatgtctgattgagtcccgtattatatcgagacgctcgagattgaatgttgaacctctgagccaattcaaacgacgatgactttttactctgatgtctgatngagtcccgtaatatatcgagacgctcgaaattgaatgttgaacctatgagcctttcaagcgacgatgactttttactcgatgtctcaatgagtc

SEQ ID NO: 130834 - DNA, 427 bp, Glycine max
  unsure (1)..(427): unsure at all n locations
gcttgtcatcgtgagacatcagaggctattattttatttttgtgggtaggaaaaattcaccatattgattgagaaaaatctaatatcatacatcttaggcaaataaggcatgctagcccccaacattattgcattttgattccatctttggacattcaaattgttgnttatttttcctgttatcttttcctttgccttagtctaaatttcaaacttacaattcggtatctctttcttcttttgtttctcctcatttcttaataattggattngcatcacttaagtacaaccaaagtccctctggattcaacagttgaacttcaatttcaatctttactacttgtgataaaattangacactcgtcaatctattaacatngttttggcactgttgatggggacttctggtttcgtactttgggtgtac

SEQ ID NO: 130835 - DNA, 388 bp, Glycine max
  unsure (1)..(388): unsure at all n locations
gtgaagttctagtcattatttacgtttcaacattgttccatatattntcggtattntctattntattctcttaaaaaaatcccaaataacaataactacacatttattcatattaaaagtgaattgaggtgtttgtagaattaattttgaattaacatggttctatagaattgattgtaagtaaacataagtntgtagtatataatatgatcattgtttggaaatatgctaccaaaactgattttgtgggcaattactaaaatgacttgagttcaagagtacacattgaacaaatagcatgacttataatactactcaagttagtgttgattcaaaagctatttctaagagcttcatattcaatgaaaagtctataacttagaatcat

SEQ ID NO: 130836 - DNA, 343 bp, Glycine max
taaaataacttaatgccattaacctagggaattaaaaaacacttactggctgagtgtaactgaaattgtggccaccaaaagtcaccctcaatagccaacaagtcagccaccatttggtctcccaaaaggctgatgcctatgttgccaattgggcccttatttcaacttgaactaaacctaactaaagcccttttagttgattaacccaaaacatatttttggtcagccaactctacaaggattgggccattatttagacaaactaaacactctataattgagacaaagtggtgtcatttagtcctcctccatttgggccatgatacaactcacaaccttggac

SEQ ID NO: 130837 - DNA, 469 bp, Glycine max
gcttactctaatttgacttgatcttaggcgaaaccttactccttttgtccatgagactatactatcttccatcactccactcaatcaacataggggatggggtcttagtgagtaaaacaagaaggaagacaagtagggaatttagagggagcaaagtgagtgaacaatatctaatcaaagagtaaattcctaggaataggacctcatcctctttctctttccatagacttcctaaaggatgatctagttgtggatgatgtccagctcgagaggtcaaccttgtaatttaaatgtctgccccttcttctttcctctagtgggctgtgtctcatatcacattcattcttctatgttagaagcctctggctactctcaatacctcttactccataatggtcacgcttcccagtctatcaatgagcttgaaggcaattgacgagttttttaatcaatatctactattctgtat

SEQ ID NO: 130838 - DNA, 431 bp, Glycine max
  unsure (1)..(431): unsure at all n locations
agctatganataaaaagattattttatgttatatttncaccaaaatacaaaggtcgcgtgatatctgatgatgggtgtaatggaacaaaaagggatgtgatgggacagaatggaataaaatttgacacattaacatcctttcaagtataatccccactccccacccaaaaaaaaataaaaattgtagtaaactttccatggatataccagtacatcactgtcagaaaagtaatcaacatgccggacttcataagccaaccaccatatggaggctggagaaaaataatgcataacctaaatagtgatgatgaccattatgataaaacaactattcctccacatacattgatgatntaaaccattgaaagtacagatttagacaaactaccangacacagaatgaggttcacatcaccaaattgcaattcgag

SEQ ID NO: 130839 - DNA, 329 bp, Glycine max
  unsure (1)..(329): unsure at all n locations
ttgtacactaatatgatattcagaataaatatcatcgatattttgaaaacaattttctatctatattttttactttttaaaaataaaatacaaaataaaaatctaccgtgacatttataacagttaaaaggtaaaatagccttaaaatgtttgacaacaacaatatattaacagtagccttaataaaatattaacagtaatttatgccgcgtgaataaatttacaagtctacataaaatgtattttataaatataagtcattaatctaagactaaatagagcatgcattgctagtggatnnnttttttacattattgtcaattatatac

SEQ ID NO: 130840 - DNA, 217 bp, Glycine max
  unsure (1)..(217): unsure at all n locations
gacttaaatcactagaggctgccgagccacatgttangatgattgctgtgcgacaacatatagattaccaaatcagcggcctataggatgatggtggtgaaagcgataataatgatgatggaaatgaatctgacatcattgaaggtggtgagnagatgtttgactacagagcaaataagcaagggccatatattgtgtccacatcaccgaacacagc

SEQ ID NO: 130841 - DNA, 388 bp, Glycine max
  unsure (1)..(388): unsure at all n locations
gagccgcatgagggcgcgttcgaggtccttgcctcttggatcctcgtccagctcgtgcacggttgggttcacacccatgccgcagaagagcctcttgatggcgtggcacatgcagcacgtgctcacgctgaatatcaccaccgcgctctccgacgccagcctctctatgcgctccagcgggtcccccactaccgccgccgccgcgttccgaggggccgccacgtagctcccccaccacgccgtcgccgctgcttggtaatgcattctcagaagaattntatgtgatgaaagaatgacacgcaaaatgtatgaaaatgagagtgagaatgtagtgggtttggcttgggttggttgtgtggggaatgacggggtggaagggtctcttctt

SEQ ID NO: 130842 - DNA, 426 bp, Glycine max
  unsure (1)..(426): unsure at all n locations
gtgaagaagnnctaggtggaatatgtaatgataaaatgttgcctgtgatcaaattngatggagggaaatttgtgacaattaagccagcatacatgacatgttatggatggacctgaactaaaagaaaaggtggccacagaagttacagtgctgtctcaagaaaagtttgtaatagtcgaacaaagtacaagacttggtttaccaaaaggaaaatggataaggttgctgaatgctttgttgtaattctttgtcttattgcaaatgtcatattatataaactgaacttgaggagggaaagtaaattttcctcagagggtgtataatagactaatgccgacatgaagagtaagcttgtaccactatattgttatctgatcttaagtgttattgtatgattgtcaagtgtttctactatgatatctaatg

SEQ ID NO: 130843 - DNA, 486 bp, Glycine max
tcatcgcccatggacgttagaatgtattgactgttgccgttatacgacaagaacaccttggagccagtgctacaatcaaacaatactttggaccggcttcaaggaactcccacacgtctacgtccatggctcccaaagacctagagcagttgacacaaaaaatcagggaccagctagagaagtcgatcatagaaaaagtgactcgacaactgatgttgtccttcagtcagatgcagtcgcagatgcaatcacagggactcgcactgcctcctaagcctgaggttggtccttctgttgctcgtgtcaacacaaaggaaaggtgtgtcgatccctcagggtgggacccaaacatgggtgactcagagaaatgtgggttgtatgtccatgaaaatcctcctcgcttggttgcccttggaagagtttatgaggggctgaccaccgtccacaacatccctttgtgcaatgaccaagtcaagttcggtgttg

SEQ ID NO: 130844 - DNA, 322 bp, Glycine max
gcgctgctgtttagggtaccccttttttttataacgaaagggcaccatcatatctctccttcatacgggggccactggccctatcctcactttgggggtcttaaaaccccccctttggaagtctgagtgctctatcgaccaataaaatgacgtctgctacaagcaccttagtcttcagaaggccgaagatcagtatgacagaaagtcccagagactttgaagatgttatatccctcttgcgttcccttttacatcattaatggctggacagatccttgctgtaagcacattactggagggaattatgcagacacttttgtac

SEQ ID NO: 130845 - DNA, 478 bp, Glycine max
  unsure (1)..(478): unsure at all n locations
gatcttaagcaccgcggctgcagcttcacaaggagcttaatggatagcttacagcttcgacagagacatgagtaagagaggatgctaagagactctggtgtgagctagtgagacaaagtgaggcatcgagaaaaggagagtctaaaagccaaaacacttgaccttcaaaaaatcgtctttgaattagcgatttcaatgatgttctccaaagaaccttctttgctttgatattgttttttttaaggtttaaatatattttttattcctaataaatatctaatttttatgtttgttcgctaataaatttttgttttggattgagtctctaataaaataacaactttacttcttatcattgatattttggtgtagtccccgataattagaaaattttgatgtattttctataaattacacaaatttgtttaattgtattataaaaatgtggatattatcatggagaaacatatnattgata

SEQ ID NO: 130846 - DNA, 476 bp, Glycine max
  unsure (1)..(476): unsure at all n locations
cttaaactagctgtactggagctatattttactatcttattatttanatgaaatagtgatcatcaagacaaagggaaaaataaatgagagcgaagaagaagatctagagctacctttgtttgattttgagacaatagcatttgctactagtgacttctcaagtgacaacatgcttgggcaaggtggttttggccctgtatacaaagtacgtatgcaactagtttctttgcaattaatagctaagaacaaacaaagaacatagcctgaccttttctgtttgtcatttaccttctttgtaaatgtgaatntttaaaggcacgttaccatacggacataatattgcagtcaaaaggctttcaatacatcggcacaaggttagatgaattaagaacaggtatatttgttcagacttcacatcgaatcttgcaatgccttggctatgattgaaacagacaatactcatttgatactgccac

SEQ ID NO: 130847 - DNA, 351 bp, Glycine max
acatccacaaagcgcgcataaacccaccattccctggttgccacctccaactgagctcacgtactcccacatagcccatatcctcgtttctctcaacaccaggtccccatcaatcctcccaagcttccccaacatcaaagtaatacaacattcaaacagcacaagctatcacagcctagttaaacagagcaaaggcagaaaactctgccataacaccaaccaaaatcacagcttttctactcagagacccagtaacaatgccttcgttctaatcgttaaccgtggatcgactccaaatttactggaagtttagtcatgacctacatctgaccgtgggatctatagaaacat

SEQ ID NO: 130848 - DNA, 321 bp, Glycine max
gctatgaaacaccgattttactctttccacgaatatatgtcaaacacatcagattcaacttagacatgagcgtcgatgtcgagtcgatgtcggtatcgtgtcagatactgtacacaacataaaactgaagaactgaaatgtccgtgcttcatagttgaagagtcaccaccacccaactcaattcatttcactgcttatatgggccaaaagagatttatgtgtgcaatgtatgcagagagaaaatcaaataaagagctaagaaaatgatgtttgttgatttgatgcacctgtgggactgagcaagtcacaattaaacccctt

SEQ ID NO: 130849 - DNA, 278 bp, Glycine max
atctgtgggaatcacaaccatgaattggcccagtccttagttggaccatcatacgttgggcgattgactaaggatgaaaacaatattattgctgatatgacaaagtccatggtgaaaccaaaaaacatcctgctaacgttgaaggagcacaatgccaacagttgcaccacaatcaaaccaaattacaatgcaagaagtgcatatcgctcttccattagaggaagtgatactgaaatgcaacatctaatgaaacttcttgaacgtgatcaatatattca

SEQ ID NO: 130850 - DNA, 468 bp, Glycine max
  unsure (1)..(468): unsure at all n locations
atacgaaagaaggcccagganatttttaaatttatgactgccctcacgtactgtctcgtgnggggtatgaactgcttgacaagaaacttatggaggagaagagcaagcgtggacatgaggaacattcgtgtactgaaagcccaacactcaacgtcgacccaccatccctagttgcaagacacttgaagtggaagatcgcccgcactaagcggcatggccaaatgacgtctgaagtggcacaagaaattgcagacaaaattgtcagttcatatatttttttggttactatcattggcaaataatggttagctaacctagtcaaatntgttntattcaaattcaacaattgtatatgcatgcaggattcattacaggaacaagcaacacaggggagttttgttctgcatgggcgacaggacatactcaacacgggccttgaccgacctgagcatccatgccgtgttcgcg

SEQ ID NO: 130851 - DNA, 310 bp, Glycine max
cggcattaataaaatcatttccagggctcatttttctgctatttcctcgaatgcatatttgtttctatctttcatctccttggcgtttatcactatcccaatttccaattagctctatttcattgtacaactcaggttcattgtgtgttaagaaattgagataattacccttatttgtgattgcactctattaacaatctctatatacatatcatttaactgagtgtgctaagtgtgattgaccattcaagaatattcacacgaaatcaatcctcattttatcttcaactatatatttcacgcctcactt

SEQ ID NO: 130852 - DNA, 403 bp, Glycine max
  unsure (1)..(403): unsure at all n locations
tactctctttttgcctctaaagaactatntatggagcattctctctatttaaggccaattgtaaattgaattaggtggtaaggttgtaaaccatgtgaatgcattcttagtaagggaattcgggaaatactccattttcaaatattcatttgttgctatatcaccatattccatttggtatctaactatgtgttatggtgttgattgtccaattttgcctaaaaatttggagaattttgagactttgtagcctataggcaattcagtatgtaatatagcatcaggaaaagccaacacaaaatagggttgattcatatatcccatctcacaaccttgtcaactaagcacacgttngatttcctcctatcattacattatcttgaagccttngcaacataaatct

SEQ ID NO: 130853 - DNA, 314 bp, Glycine max
  unsure (1)..(314): unsure at all n locations
cactggcatttttttccatcaatatcggtgaataatatttttttttccgtgaagggctaatgtnttgctggcccaataaatgggaacatgccagtttcggcccgaacaaaaagacggttgagatcgcacaaaaaaacctaaccgacctacattggtaatttcttatgccacaccaaaataagaaaacttcctctgccgtaaaaaaacaattatctgccagcgagactttttaaaaaaattgctcaatgtcagctgagaaatatcagtcggggctatttcacgaccgatgtcggctattgagttttaaaatttat

SEQ ID NO: 130854 - DNA, 483 bp, Glycine max
  unsure (1)..(483): unsure at all n locations
actcaagcttctcccctatnttgctataaatagggggagaagtgaagattttagtgtttatccctttaggcacttctctctctctcgagattgctgaggaaaattatttccgtgaagaaaatccaagctgaggcgcttccgtaacgtttccgtaacgtttccgtgagtaattacgcgaagattctcgaccgttcttcaagattcatcgttcgttcttcgttttcttcagtcttcaacgggtaagtacctcanaccaagcttntcaattcattctatgtacccgtggtggtccacatattgtttcatgtatttttattctcgttttcatttactttntatacccncttttgacgtgcttaagaccattatttaagtcatttctcgcttaatctagaaataaaataaatntccaccgatcgttcgaattgtgtcattcgtacatttggttaaatgaattcaaccgtcggtcgtgcgtaccacgtt

SEQ ID NO: 130855 - DNA, 222 bp, Glycine max
ccatggcaactttatactgtctttggattttattgggcccaatgagaaaagctgatagcttctggaggtgttgcacagaaaaaatcctattcccactccaattgaaagtggcccagaattttcaaaacctagttggggtgaatttcgatagcgcatatttaagttgcatttggattaatctttttaataactcgaaaaatgacattcctaagtgtacctaac

SEQ ID NO: 130856 - DNA, 325 bp, Glycine max
tactctttatatgcagctagtgagagaacaccacctacccgtgtgtggactgacatgtcaagtactccacgcgtgcccgacgaggtttttactgacagggaccgcatagcatatacgactgactcttactacatttgctgcataatgcttgtgtctagatccatactgattgaccgacgggtattgagttcagatcctcgagcacaaggacgatgtgaaaatgtgcgccaagtgtactgctgaaatgcaatgatcacaacaagcggcggaaagatgagagctgtagcagacgaacttgcgttgcatttctatcatatatatatat

SEQ ID NO: 130857 - DNA, 374 bp, Glycine max
  unsure (1)..(374): unsure at all n locations
atcctcagagtcacctgcggctgcagctgtgtcagctgattgatttagattctatagaatctcttataactttataagcagtgagggtggcattaaatggcataaagaaaataattaatgcagtaatcatggttagaaaccaacgaatcagtaacagaagacataagatgacaaaccaaaatcaaggaaagctaaagagaaagaggacagtgttcaataaaatcaaaatttccatagcaaattngcaactgttgaagtcacagctacacatggctctatcaaaatttaaaggggtcgagaccaactaacactttcactgttaaactagggatggaatcagaagcagttaccagaaattgtgattggtaatgcag

SEQ ID NO: 130858 - DNA, 490 bp, Glycine max
  unsure (1)..(490): unsure at all n locations
cctcggctacattcccggagagccgagagttgaagtattactgtcatgttcaataaatcaatactttgttggtgttagcctcatttgtttccatcatatataaatgtcacacacagacttgaagtgtcactttagtttaattatttattattttccctatagctagtttagggatcaatgccaagttctataacaagaaactatagcctcttaataaatgcaaggaaaacgaaattgggttctatggaaagttgggtcaccttagcgtcaaaggaacagtgtcagcctcaacttgaagggaacaaaccccccatcataaaattaaggagtcctaaccaatagaaatgatgaaatctctcccatataaacatagtgactgcttgttctctctgaaactntacaaggatntagatccatttccatgtgccactntgtggtcctaaggctatagatgataacccgcaatagcatatatggggttgaatgacac

SEQ ID NO: 130859 - DNA, 312 bp, Glycine max
attacacatggcctggaatcgattactagtgatttggaacgttttaaaacagccagaagaaatttgaatttaaatttcaaagttgtggaatcgattacaggaagttggtaatcgattaccagtgtttaaaattcaattaaaatgagaagagtcataactcttcagaagtaactgtgtactcgattacaccattatggtgatttgatagcagtaaggattttcgaaaataattcccaacaatcacatcttttcatttaaattttgaatggccataaaaggcctatatatatgtgacttgggcatgaaattctc

SEQ ID NO: 130860 - DNA, 473 bp, Glycine max
  unsure (1)..(473): unsure at all n locations
gtgtcatacacaattggagggttatntnttatttctattcaaatctcacttgaatctgaaattaaatttgtggagccaacatttggagccaaaatttcactaattatgattagtgaattttagctatggttcagcccactaatccaagatcgagtccaagattctccactaagtgtgcttacgtgtcatgaggcatgtaaagcatgaaggacatgcacaaagtgtgactatatgatgtgacaatggggtgtagcaagcgaatgctcacctccccctctaaaatttaataagattgggcttctcccaattcaattaaatttatttctcaacacacacatcaaatatttactcaatgcatgtgaaattacaaaaatacccttaatacaaaaactagtctaggtgccctagaatacaagggatgacaaatcctacatttctatggtactctacctacattatagagccctaaatac

SEQ ID NO: 130861 - DNA, 348 bp, Glycine max
atcttaagtcaccgcggctgcagcttgttagcgtttatttatacagagttcaacatgttagctatcatcgccaagtacgaagaagagttatgtctagccaccgcccacgagcatagaatcgcggatgagtatgctcaagtatatgcggaaaaagaggctagaggaagggtgatcgactctttacaccgagaggcaaccatgtgggtgggtcggtttgctcttaccttgaacgggagtcaagaactctcccgattgttagccaaggccaaggcgatggcagacacctactccgcccccgaagagatccatgggcttctcggctattgtcagcatatgatagacttaatg

SEQ ID NO: 130862 - DNA, 488 bp, Glycine max
  unsure (1)..(488): unsure at all n locations
cgcttgtggggcttctatggaggctggatctttgatcttttatggtgattntccaccatggagatgcaacggaagacaaaggagaagaggtgagaggaggcgtcatccactagggaataagccatggaagaaggagcttcaccaccaagatgagccttggataagaagcttggagaggatgcttcaatggagaaaaagaaagagggagagaaagagagaggggggagcacgaaattgaaggaagaaaaagggagagaagttgaactctgagttgtgtctcacaagactctcattcatcaaagttacaacaagtgttacacatacttctatttatagactangtagcttccttaagaagctttcttgaaaaaacttcctagagaagcttctttgagaaaacttccttgagaagctagagcttagctacacacacccatctgaaaactaagctcacctccttgagaagcttccttgagaagctaaagctt

SEQ ID NO: 130863 - DNA, 411 bp, Glycine max
  unsure (1)..(411): unsure at all n locations
agcttctaaggaagctntctcccttcatgtatnttggcataggggtgagtttagtgttagcggtcgtttacgactaacttttgtatagaaaagttttccaaaatgtatataaatctcccaatttatggttctttttggtaggattgtaaataaaacttctttgttttgatctctgcttagtagaagcctctttacatggaattaatgttaaattttctttaatttcaagcaaaaaagagctattttgaagaagtgccaaaggagtcatcgcgctaagcgagctcaatgcgcttagcgtgcattgacggctaagcccagcaccagcatgcttagcgagtaaaagggaatctggaaaggcatctgctgtgcaagcacatgtttaacgcattatcagctcgctaagcgagtcgt

SEQ ID NO: 130864 - DNA, 463 bp, Glycine max
caacaaacttcaccaaacttctcttaatattacttgagccaccatcaaggaggcaccagataaacgtggttgcaccggaggagcctccacataagcattgttcataatttctagtgcttgaaacgatgttaccaatgactcttccgaggcttcctggtcgacggccgtcaagtgcaccagatcgtgcaagtagtttaaaacgataagaaccaagtattgaactctcggggaacttattttacttggtaaagctatggttcggtaaataagcatctttttataaaaggtttatgtgtagtatggacacgtgtgtaaactaattaaacaaaggtaaataaaaggtgagtagtggtcggtgcgaaggtagatgatcaacgtgttggtcttcctactgggcgactgatgctactaaagatgttctctacctaacaacgttcctgtgttctatgttgtctcctggaat

SEQ ID NO: 130865 - DNA, 473 bp, Glycine max
atcctctgagtcacctgctggctgcaagcttgaaatgactgattatctataattttgttcataattccattggcttttaatctattgggaaatatgtggagaatgttttaattaactctgaatataaattaaataatttaaagacacttttcttcgagatttggttatataactttacttttgatatttgagaataatatatgtaattattggatttggtttaaaatataaaagaaataggccaacgctaaataattatatattaaaaatttgcaagatatattgtatattccttcggaaaaaaaatcagcaaattttgaaaattataatagtaaaatcaagtttcacaacataattggacttttactgtagttgtaaggtaatatgaaagagacaaataatgatcaaatgaatgatttcaaagaggtacatagaggttgatatcacactaacgtgtaatgtggtgatcgata

SEQ ID NO: 130866 - DNA, 328 bp, Glycine max
  unsure (1)..(328): unsure at all n locations
agctggatatcctcaggtgtctattcagttgtctccccttttcacccctttggttgtcttgtaaattggacttttcaaattgattcttcaagttggtgtcaaaacatcttcatcaatttgtaagagagtaattcaattagatacaacctttaattcacattgattntctttctttgatctttagaatcaggacttataatgcttacttcattctcttagttttggacctagtcataagactttcaattacatgtaaaggatcattagataanatggtgcatctncatcaacaattctataaatttatgaaaaaattattattattatt

SEQ ID NO: 130867 - DNA, 484 bp, Glycine max
  unsure (1)..(484): unsure at all n locations
tgttatctcattagttgaggaacatggagcgctttcttgttcttccttgacaccaaccaaacttaagttccttatctgcttcagctttcccaaatctcttattaactctattccatcgtcaacttttattataaatngtaagcctaaactgtaatgtttagaactttgcgtccttaatatattatagaacatgaattntcagggttcactatgaaccatttaatttgttgctaggaagaagatcaaccaatttgcttatgtgaaatgaagtgcatgccatgtagtgggtatatattatttaattgttttgaaaaatacccttttcattccaaaatgattgatgttttaaagaaattcatattgaccaatgtttttttcaatgagatattaaaaactctatttcacaattgccctaaataaattatatcaatctaatgaattttntaggaatatgtgccttcaattnttcaaccactatcattag

SEQ ID NO: 130868 - DNA, 414 bp, Glycine max
  unsure (1)..(414): unsure at all n locations
agctntgagccanaatcctgactcaccattattcttaccctcggaagcaaaaaataatagaagggaaatttccaatcaaagaaaaagagaaggaaaatttccaatgaaagcaaaaaaagaaaagaaggaaaattccccaatcaaagagtgggagaaagcaaaaagaaaagaaaggaaattcccaatcaaagaatgggagaaagtaaaaaaggaagaagaagaaggaaagaaagctcctgatcagggatcgaaggaaaaacagaagaaatgtgcagaaaggtctttggaccggacaatatctgaacaatacagaattgtcaccaaatgaacaaaaaagaaggagaggaaaccaccgacctaaatggtcttctccctttgattacccaaccaaaatcccgtgcgctagccactttt

SEQ ID NO: 130869 - DNA, 468 bp, Glycine max
  unsure (1)..(468): unsure at all n locations
tgcaccaacattcattagtccaatacacactcaacatatattcatcatccatccacaattccaatcattcatgctcaatatgatgcatgcacctgacctcaactctcatatgcaatgtggtaccatccccaaggaaatagcctaagcgtgtccacacgacactctcacttaggaaaactaggcagtaagtgtcgaggtcaccctgccgtgcacagacaactcccccccccctcacgttgattagcctgagtctcaagagagttccaaaccgagtgacataccccctagtataagtattcctcatcacaagaaactacaagtacttactgacaaagtttatactatttccatgtcatatgaagtatgaaacatgggcaccatcaaatgcactgaccatggataattaaagattcaaagccatccccctccagagatgcttanaactcnttaaccactatatttccccca

SEQ ID NO: 130870 - DNA, 362 bp, Glycine max
cgtgtgtagctcaccatctttttatatagaataccggtattgtgtctactatcattgtcatcacttttttctccgtcattgaggtgccacttgagctgctaagtctctccacctttgggcgtattctttgaaagatctgtgcccccttttttgcacatgttttgtagttgcatcctatccgaagccattataccgacactacctagcgaaggcaaccattaggtcctcccaggaatagactcgggaaggttccaagttagtgtaccaggtaacaactaccctagtaagactttcttggaaggaatgtatcaacaattcctcatcttttgcgtatgcccccatcttccgacaatacatcttta

SEQ ID NO: 130871 - DNA, 501 bp, Glycine max
  unsure (1)..(501): unsure at all n locations
tactcaagcttaggacacggtccagtatacttcaactattatccaaacattacggtgagtctgattgacagaaacattcttgactctctanttttaaatatccactttcatggccttgacattaaagaaggatcaattccagcagctttgatctataggattcagtacaaagtaatgaatacttgtgcatctagagtcctgttaaaacctcaaagaggagaaacaactttgtttatcactgatatgacaaaggctaacatttctctcccgagaaaaataaaatgggatgaagtaactcttcccgaaagatgggtcatggataaggccacaccatctattccctgacccgctccaaccatagagcanattaagcaagataactccggtaaggtagaaataaccttcaataacaaaaattctttttcatcaagaatagaagcctctaggtctgaatatgagtcagccagaaggtctttttcagttagaacccattcaattcta

SEQ ID NO: 130872 - DNA, 418 bp, Glycine max
ctaagctatgctcaaacatttatatagacctcctcagcagcatttccaactacaatagaataattatgacctctcaagcaatagatacaatccaggttggaggaatcatacaaatctgagatggacaagtcctccacaacaacaacaacctatccctccatttcagaatgctgctggtccaagcaagccatatgttcctcctccaatacatcagcagcaacgacaatagtcataacaaagacaacaagcaactgaggttcctcctgaaccttccttagatgagttagtgagacaaatgaccatccagaatatgcaatttcagcaagagacaagagcctccattcagagtctgacaaatcagatggggcagatgactacttagataaaccaagcttgtcgcaacattgccctttgcgga

SEQ ID NO: 130873 - DNA, 419 bp, Glycine max
  unsure (1)..(419): unsure at all n locations
ggagaatgtgactgtatgtatacatgattttgatgatgtcaaagaagaatctaacaaggcttgcttcaatgataagcatttgcttcaagaataattcaagattgcttcaacaaacaaagccttgtttcaagattcactaaagaccaagccttgccttaaaacaaagtgctttcaagacatgcaaggctctggtaatcgattaccaggaagagtaatcgattaccaaaagacagggttgagaaatagctgttgaaaaaggtntttgaatttgaatttcaacatgtaatcgattaccatatgtctgtnatcgattaccagaaacgaaactcctgaaattcaaattcaaaagtcatgacccttcaaattatactgtgtaatcgatacacacacattgttatcgattactaatggagaatttc

SEQ ID NO: 130874 - DNA, 442 bp, Glycine max
  unsure (1)..(442): unsure at all n locations
tgacagctctagcttactngattatacaatccatcttgctcatcctttatggtttcatcctatagttcctaagaatggaactcttgtaagcttgatcaatttgtaatttagttgagtaacatatccttgtccattatataaaataaaatctaatntatttatgcatttgcgccaatgtcccattctcttttttatgtttgtgttcgcaagagtttaatatcattatgagacctagtcggtttcttgataaaattggtctttgttaaaaatcatcttatggatgatntatcgctngcaaggcatagtaggtttccttgttctctaataaaatcagtccttactaaaatcaacttgtggaanaattattgcttatgagacatagttagtttcctcgttctctaataaaattggtccttactanaatcaacttgtgaatgaatta

SEQ ID NO: 130875 - DNA, 360 bp, Glycine max
gcatagaaacatgaagggctgaagcagaactagctgggaattaagcgagtgacaaaactgacccgtaccaggcaagcaacaagggaccaagctttggtgaccaggaagtgattgatgagctgcgtcttccctgcaacaacaacaacaaccacattggtacaccgtaaaatgtcgggtataggcctaactcaaccctacaaactgggatctccaacattacccaaatggtacactattttatgctcatcactagtcgaagacgcgggatcttcaacattacgcaagttgtgcgaaatcaatttatagaaaaggagaaggcacaacaaaagaaagaagaacgtaacctaccaaggaactact

SEQ ID NO: 130876 - DNA, 481 bp, Glycine max
ttacatctagatatgattcatcacgtgattttttgttttattctgcagcaatcgatctgcctcccatgtaacacaatatgttaagcattacactcatgccagcatttttgagaaatttactgtataacgaggaagagtgcttctgggtgctagaatttggctgttatatatatattaaattttggcattttctcatgtttaaccaaacccaactttatgaatatataccaaccaaaaattgcctagcatctatacttgcttgaaacattgatagttgagttggtattattagtatgttttgtaactctataagtctggcttttacccccccgagagggaaatcaattactcctgtcatcatggtgcattggtatgatgggtccatacttcatcactcctctttcaatttggtattgtgtgtaactgggtaatatttgagtcgttggtcagaatattaccctggccaatctacagtgtgtac

SEQ ID NO: 130877 - DNA, 452 bp, Glycine max
aatcttcttaatgtagcttctatatgaggggagccttattatgagaggggtgtgtgtagctaagctctagcttctcaaggaagctatctcaaagaagcttctcaaggaagttttctcaagaaagcttctcaaggaagctacctattctataaatagaagcatgtgtaacacttgttgtaactttgatgaatgagagtcttgtgagacacaactcaaaattcaacttctctccctttttcttccttcaatttcgtgctcccccctctctctttctctccctctttcttttcctccattgaagcatccttccaagcttcttatccaaggctcatcttggtggtgaagctccttcttccatggcttattccctagtggatggcacctcctctcacctcttctccattgtcttacgctgcatctccatggtggaaaatcaccatttaaggacctca

SEQ ID NO: 130878 - DNA, 342 bp, Glycine max
ttgacacaagtcgctcaattctattcttagaaatgtgacctaagcgcttatgccataatgctcctgaatttgtattatcaattctacgcttagtaccatgcaatttcacattaaaggattcaccataggaagctacaatatcaagtaaatatagattatcattaaccaagagtgaaccagctcccacaatatctgaattaaaaagaaaacctgaacatattgtttccaaatgaacacaaataaaccaatttgtgcaaaataaaaaatgaaaccaaatttttttctacatgacggttcaacaatagtgtctttcttatccacataaaaccagttcatattaaa

SEQ ID NO: 130879 - DNA, 454 bp, Glycine max
  unsure (1)..(454): unsure at all n locations
tgatgatgaagcaagcaattgtgttgatgtcttaagtccatgtgattgattcaagacttcaagatcaagcatcaagaatccaatccaagattcaagattcaagagaagaaatcaagaagcaacaagacaagacttcatataggataagtactaaaagagtttttatcaaaaaccaaatagcacagttttgtttacaaaataattttctcaaattttctaagttaccagagtgattactctctggtaatcaattaccagttattagtaatcgattaccagtgaccagcttggttntcaaatattttcaaatggttcgaacgttcaaaatgatttcaaacagtgaatcgatacactatattagaatcgatacaagggaattgaacgtgaaatcaaatcattggaaggtcacactttcataaatgattggtatcgatataccttgggaatcgatact

SEQ ID NO: 130880 - DNA, 471 bp, Glycine max
cctagtgccctaatataaagcttagaccatattcgttatatgtctatgtttaaattctatatgtgacctaaaagtttattttatagtgaagtcttttaagtaaattaatgagatcttgtttgataaatattttcattagataagaaagaatagaataagcttctcccaagagctaaaattagcttatggacaaattaaaattgattaacttgtatataaagatagattttgctgttggagtaaattgatttcattttttttcctatgagtacttatggaaaaattatccaaacactactcctactactaaaacaatctgttagattctttgatccagccttaacaaagcttgtatatatatatatataatcagaactgtgggagaatctacaattttttacacatctgtcgagggatttatgacccttatcatacaagctgctgattttcaaagatatcaagacttgtcct

SEQ ID NO: 130881 - DNA, 441 bp, Glycine max
  unsure (1)..(441): unsure at all n locations
agcttgaagaagtgtgtacttattgggatattgtatggttcagcagcaattgtgcagtgtatttattatgaatacgaaatcattggagtaattttaatttggcagtggataagttgtatttattcgtagactaagtggaagttgaaaaggcaatcgtataggagtgtaagcacgaatacaaaatgtgcagggttggtccagggacttggaaaatattttcattaaatcacattgaataacaaaaggattgaagttgtaattatttgtagactaagtggaagttgagaaagcaatcgtatatgagtgtaagcacgaatacaaaatgtgcgggggtggtccaggggagtcgaaaacattntctctaaatcacattatataaaacaggatttcaatctacataaccataatatggatttgtatgtgttctccgaaatattctat

SEQ ID NO: 130882 - DNA, 469 bp, Glycine max
  unsure (1)..(469): unsure at all n locations
catatagtctcttcatgtctggccaagtatgaccatttataagagcnataacgtttagaagaacttaaaaccaatttgaaaaagtcaaaacctttctgaagagttacatcttttgatctattcagaatcaaacactggtaatcgattaccaaattagtgtaatcgattacacaaagcttttgtgtgaaaggatgtgactcttcacatttgaatttgaatttgaatttcaacattcaaaggcactggtaatcgaatagcaaaacatngtaatcgattaaaactttttgaaaataattggaacgttgtaaattcaatttgaaaaatatttcaaaacaattttgctactggtaatcgatcaccagagagtaataactctttggtaaaagggtttgtcaataactcatgtgctattcaaagtgtngaaatacttattaatacttatcttgattgagtcttctcttcattcttg

SEQ ID NO: 130883 - DNA, 474 bp, Glycine max
  unsure (1)..(474): unsure at all n locations
agcttcatgataaatcatttatgattcatatgtgttntgatgataacaatgatgacaacaaaaaatgatgacaaaagtgatgaacaaaatgaactatgacaattgaggaatcaatacatgttacttttgatgaaactaacatagtaaagcatttagaatatacaacaaaagaactatgacaattgaggaatcaatacatgttacttttgatgaaactaacattacctccccgagaaaggagtttgttgatgatattacagatactttggaagatactcaaaatgaagaaagaaatctaaaaagaaagagagatgatgaagacaaggatgatcaagatgacacagcacaagagaatgataatcttcctaaagaatggaaaactncgagaaatcatcttcttgataacatcatcggtgatatctcagaagggggtacaactagacattctcttatagatatatagcaatatatggg

SEQ ID NO: 130884 - DNA, 408 bp, Glycine max
  unsure (1)..(408): unsure at all n locations
tagatacgatggatgtatagnttttttatactttataaatgagacaaaaagaaagaaagaaagacctcgaaggtcggcatgttatggtcataggaagcataaatcattcgtagagagcaaacatatcttttggaaacaagggactgacgctaagagtttattttccggaataaccgagataagaatggatggattcattgaaccgatgaaagaacataatttggaaatattgggtctacttgtgtaaatcccaagccttagtatcacaatgccataaactggatgcttgagtatccaccgagctgtagccatgactaattttgcacgttggttccaaatcatcattgttacgcgtgcctcatggaaataatatggaaattcaacccgaaaccgacaccttgacacacg

SEQ ID NO: 130885 - DNA, 323 bp, Glycine max
tgcaagcttatatctggtcgagtgcaggtctgatcatacataatactcccaacaactgatgcataccaaaatgcttccacttgtttccgttccagatcatttttaggacattgtgcgagactaaatttgtctcatttctgaattggaacgggagatgctgagcacttttccatcctaaatctctctagtactttattgatatatgctttctgagacaagcctaacaatccttgtgatctatttcggaatatttctatccttatcacataacttgcctcacccatatccttcattttcaagttactagaaagaaacttcttagt

SEQ ID NO: 130886 - DNA, 419 bp, Glycine max
ccgcttagtgcaaagaaggcccatcgagaagtccataggcacgttaccaccttactcagcctagacattgtgacgctcaacgcatgatcacctcgctaagccctgaagaggtgtgcttagcgcaaggtccattggattttaagctaccttgggcttatgggaaagacacactgagacctagaacactctaatgaatacatccaaagtctgagcatctctaataaggggaatcttcttgtttttagccattctccccctcttcctttatccatcccttttacaacatactcttgttgtgcaggatcctcatcacttttccaagatgatacagatctttctataccagtttatatgttcgatcctattttcattctcggaatatgtgtatcacccggataatcaaaactctgcgataaaac

SEQ ID NO: 130887 - DNA, 427 bp, Glycine max
taactaagacatactttacgatgattgtctgattggctgacaatgtaatgtatagacatttacatctatatatgccctgagcccctgacttattggccatgaaaatgttaatttgctgtgtgctgttcttcctcttattctgccttttagtcaattcattattgagatatgcttggtggttgagtggatgacacgttgcatgatgtagtacacagtgagaagcgatcgtatcttggttctgagtatctggacttggatctaaagacacatatggattcatctccagagtttgtgaaagatccacggcaagtaaaggtgagtgacctgcggtattcttttcctcggattatacatatgtgtaacatgagttatagctatgggagtgaataagaaacttaatctgccaagccaatatatgggttcttat

SEQ ID NO: 130888 - DNA, 237 bp, Glycine max
  unsure (1)..(237): unsure at all n locations
tgatttcaaacacacaagtgtgtgtgcttattggattagtcaacatatgagaaagtttctaaaatcctaaagtgacttaaccatgctttcatgatttaatcactcactcaaccatgctttcaataattttaatcattctcatttgtcatctagctttggtgggtgtgtgagactcacgcatgaaatttgagagaattgaaatagtgatggattttgcggtgctcattngcagatcat

SEQ ID NO: 130889 - DNA, 465 bp, Glycine max
  unsure (1)..(465): unsure at all n locations
gactcgngatcactatggatgacttactctttgtgtaataggtaatgcttccaagtttgtaaagccctaaccaaagcatacaattccttatcataagttgaatagttaagggcagcggctcctaacttttcactaaaataagctatcggatgtccctcttgcaacaaaacagccccaatacccacatttgacgcatcacactcaatttcaaatgattttgcaaaattaggcacagcaagaatgggtgcattagttaacctatgtttgagggcagcaaaggcctcttcttgtttcttaccccatntgaaacccacattcttcttaacaacttcagttagaggtgcagccaatgtactaaaatccttaacaaatctcctatagaaacttgcaaaaccatgagatcccctcacctcactcanggtcttaggtggtggccattcttggatggccttaacctttttcaca

SEQ ID NO: 130890 - DNA, 370 bp, Glycine max
  unsure (1)..(370): unsure at all n locations
ttcattcatccactcgcttaacacgtgctatgtgctaagcgaatcattcttcatgcgctgagcgagtaatcactcacgttgagcacgccaacccctacccattggctgaaggggtctcgctaagcgagacagttgcactaagcccaaaaaaatctctggaattacatntaatggaaatgggctaagtgagccaactcgctaagcgcaacactgagtctcgctaagtgcatctatgcactaagcgctaatcactctctgcctagacccctatgtcaattgggccaagcagatcatacctgctaagcccaaatccctctctggaatggcattgattgagcgagaccatctcgctaagcgtgaccccactact

SEQ ID NO: 130891 - DNA, 469 bp, Glycine max
  unsure (1)..(469): unsure at all n locations
atgtctcgtatagccacgactatttatntttgcatcaagacatgacaattgtaagactntaagcctaccaacttaagatctttcaactacacaagacttttaatatttgaagagtatccttatgggactntgacacgacgtagacactgacaaaaactcatcttttcctttctagacaaagtatgacaagttggatgcaagcttatttttttaccatcaaaccttggctcgtatacctatctcaactagatcttgatgagtatttaaaccatttttcatctttccttgaatgttaaagagcgtcctaatgacactatcacaaacatttttctctacatgcaaatggcaagaattgttccacgccttcctcatacgcggggctcatgcgactttcgttcatctaacttcgatccatctaaataataactccgtgatactcacaaagntattcgatgcatgaaaatctcac

SEQ ID NO: 130892 - DNA, 445 bp, Glycine max
  unsure (1)..(445): unsure at all n locations
gaatcncaccgttttaaatgaatggtgaatacatgtgtttcagtttatatacaatcaagtttgggcgccaatctaactaacagaaaatacaactaacgataactacttttaattgtcataacagaaaatagttagtgcataactaattctatatgctgagacaaagccagaacatccaattcaaaattntcaaaaaggattctatntctatgtttctagataccatagataattgcacactaaagtactcgtactatttcctgtttggctttcgaatccagtgcttctaacatntgcttcacatgtccctccatgtttccatggtaatgcaatgacaaagaaggagatatccaatagtaacacatcttctagactttcaaaacaaattcataagataaaaatagatggtccaaagtctctctttgttgattacataaacaacaag

SEQ ID NO: 130893 - DNA, 481 bp, Glycine max
  unsure (1)..(481): unsure at all n locations
catatgtattattaagagaaaagcttttccttctatatttcttggatagaantaataatctaataaaagttcttccaagtaaaacacgagatactgcttcaaaagatactttanaaagattaaattcttgttattatagatttcaatctatgtcttttctagagaaccatagacgttgcttctgatctttaaaatatntagtaaaatcattaagaaatatatcaaagatatgctgttgtaaaacatggttttccaatacttaatacaagtatctaacatgtataagtatatgagaagcagttaagaatggcataaccacccacaaaattataccagttcacccacaactctttgactatgtctagtcctacgcctatatgatgtccaaacacaataacttataacaagtagcctttctcctagatcctgctcgtgctttcaatgtattctataagcatatgcaggttccccacaagtattc

SEQ ID NO: 130894 - DNA, 364 bp, Glycine max
  unsure (1)..(364): unsure at all n locations
ttatctgaanagaagcaaaataaatcatcctgcttggacgaatgagaaaactggggccaataaagagggtgaggatgagggagaaacccatgttgtgactgccatccctgtacggccaagtttcccaccaacccaacaatgtcattactcagccaataacaaacctcctccttaccccaccacccagttattcacaaaggccatccctaaatctaccacaaagcctgtctaccgcacttccaatgacgaagaccacctttagcacaaaccaaaaaacaccaaccaagaagtgaattttgcagcgagaaagcctgtagaattcaccccaaatctagtgtcctatgctgacttgctcccatatcta

SEQ ID NO: 130895 - DNA, 242 bp, Glycine max
actaagctcaagaaaggccaaacttccttccaagtctgatttctgtgtctatatatgtggctttgtgttagtcgatgaatacgactatattttgtgtatacaacctgtgtaaattgtaccaaactttcccagtgtatggttattttgtagagtgataactacttcacgttcagtttagggtataatatacttagtactttcattttgcgcgtaatataatcatttcctctctatcttcggtt

SEQ ID NO: 130896 - DNA, 416 bp, Glycine max
  unsure (1)..(416): unsure at all n locations
ttgagaagctagagcttanctactcacccnctataatagctaagctcacccccattctagaaatacatgaaaatacaaaaaaagtccctactacaaagactactcaaaatgcccttaaatataaggctaaaaccctatactactagaatggccaaaatacaaggcctaaaagaaagaaaaacatattttaatatttacaaagaagagtggacccaaccttgacccttgggctcaaaaatcaaccctaaggttcatgagaaccctagggtcttntttagttgctctagcccaatcctcttggagcctcttgctcatggctctggtagctggtcccttcctagagaggattgcatcatgaaatttcttcaccaaccaacataattaaacaactcttttatatatcacttattttttga

SEQ ID NO: 130897 - DNA, 454 bp, Glycine max
  unsure (1)..(454): unsure at all n locations
ctaagcttcaaagtttaggtnagatgatcaatggaacagtgattattaatgttatatagaataaggaaagatcagaagaaattttcataaaaaacaaaagtagattcaagcaacaaatttgagtagacaacaattaaaagaacttgtactcgaacaattaatgtgcaatgatagtaaaggagcagatggaaataacgagttgggggaaatagaagcttaaacacaattaaatgaattaatgctggttttgctaaaagccgaagcctacaaatggaagagaagttttgaactttgacacaagatgatctgcttcattatttgatagtagtactggcccaactacaagtactgagggtgggagttgctacgtgcacccagcaatattgctggggcactcagcaaaaagtgaatgaacaattttattcttccgcgaaattatctncgaaagatcatt

SEQ ID NO: 130898 - DNA, 477 bp, Glycine max
  unsure (1)..(477): unsure at all n locations
tacggacactatgacactaagctntataagtgaaatcaagtgcatccatctcccttatagttctctcacgaagaggaggttgagccatgttcttagtatgaaaattaacagctgaatgctcgaaatcagaatattcagaatcaccagcaacagaatgctcaaaatgatcaggatgctcaaaatgcacaaaatgactatgatgcacactatgcctaactaatctatgaaaggttctatctatttcatgatcaaagggttgtaaatcacctgtattgcccctcgtcatgcactatacgcagcaaataatgtgtatctcaataagcacctaacaaggggttaaaactacagctatactcaaacgatatccaaatgagctgaaatnttgtgagatacaccatataatcatgaaaagatagcacaaaagatttcagactaataatcagagtctaactataaaaactgcctagggaaatttag

SEQ ID NO: 130899 - DNA, 467 bp, Glycine max
  unsure (1)..(467): unsure at all n locations
actaagcttaccacccaaattgaataaaaggcttctattcttttaaaacagataatagaacaagtctgcttctgccataaatgtatacttcactcatcaccacanattgcacaactatagcacaggagaaaatattgcaagttctcaccggaatcctgtctgggtatttctccctaatcctagcagcctcagctcttctcttctctgcatacaaaaatattaattngtataatacttagcagtcctcgtacacaacataagttacaagtaattgtgggggtaaaaggcaaaaggtacataccaagatcatgttcttgtttgaagtagttccttgccattccaactgaaggtatgtataacaaaattcaattaaaatgaaaaataaactatccattgtctgacaaagaaaatataattcggcaatactctaaaatcaaaatcgatatcaatcatttttctaaaaaact

SEQ ID NO: 130900 - DNA, 153 bp, Glycine max
aaagcggcatcagccgagacgagaaagacggaggaacagcgcaagacaacaactccaaaacacaaagaagggaagaaaaggcagggacaattgcgaaaagaaaaaagaaggggacagaaaaaccaagacaccacacgacaagcaaaaggagag

SEQ ID NO: 130901 - DNA, 227 bp, Glycine max
  unsure (1)..(227): unsure at all n locations
gcaacagatccaaaagaactagaagtattttggtggtccttgttgcagaaatacttgaaccattagaatgattaatctgttggttgccaccctaagttattttatcccctctagtagtgacagacccagttgggttcatgtcaaaaccctgctgatggttagnggcatacaaaccactccagctgncatctaccggctgacgtataattccctggattccataatta

SEQ ID NO: 130902 - DNA, 472 bp, Glycine max
actaagctctgaattaaactggctactccatttctcaccatgtatttgtgaagcaaatgaaagaattgaaggaaggatacatcattgttggactttcccaggtaaagcatgagaattatgattttcttcatctttgcctactatgttcatgcaatttgtcattatttttattctttagagtgcaagtaggttctagtgggatgagactcttgttgttagagtgcaagtgggtgccgtttattgctctattagatagcatttgatcattacaaattttttgatataatcttataagttagatggcgtcaacaaggtagggaaaatatgttgatagaactatgttcatttgtggtaaaaactgatgttgaacaaagcttcttaagttttactatatttccaagttttcaatgaagttatatactatatcttggtcaccattcagcttcatcaatgatcttgtgaatacacagtt

SEQ ID NO: 130903 - DNA, 334 bp, Glycine max
acgaactcatgcgcacgtcttaagtaacacatttatgcacgtggagtatgtgtaacatatcctactatttatgtcaatggacaaggacatccaacacattcttgttaccatacacatatatgtatttttgaaaagaacacacattctcatgctcaaggcactgcgtcaaaattcacacctaatcacatgctatatattttgctatcacaaactacctacacatatgcgaagcacatatcataagattttcattgtttcactcacatatatttatatgcatattggaaaactaattacgtcatgcacatacttgcatttaaaagggaattccatg

SEQ ID NO: 130904 - DNA, 380 bp, Glycine max
  unsure (1)..(380): unsure at all n locations
aaaactaactggtgagactacccgtgaaactgttaatatttttaacgaacgatgaatcttgaataacggtcgacaatcttcgcgtaattactcactgaaaacgtnacggaaacattacgganacgcctcggcttgaatattcttcaccgaactatatttcctcagcaattttgagggagagagaagtgccaaaggggctgaacactattcttcttcacttcttcccctaattatagcaaaatatgggagaagcttgcctgccagcttgctcaagcaagcaaagttgcttcctccataagcaacagccttctggaggaatctcctagagggccaagtgggcctagatgctattctgcacacccctttttactaaatgcacc

SEQ ID NO: 130905 - DNA, 337 bp, Glycine max
agcttcctttcatccaagcttaacaacattctaacagcagaagctatcacagccaagcaaaaacagagcaaaggcagataactctgctcaaacaccaaccaaaatcacagcttttctcacttaaagaccacagtaacaattccttcgatccaattcgttaaccggtggatcgactccaaaattttactggaagtctatagtgcataagcctacattgtgaccggtgggatctactagcaaacatccagaactcattctgtactactctttccacagccaaccacacacaagcattttctgcaccaagctaaaatcctgctgcacctattttgacagc

SEQ ID NO: 130906 - DNA, 424 bp, Glycine max
  unsure (1)..(424): unsure at all n locations
tactctatggtaaatggtatgttgagaagatctcattacttcttataaatcctaagagaaacaactaagttttaatttgtgtatccatatgtaagagcataaggttagtctatgtgcaaacaaacatcaacaaatctgttgatttgttagagccaaaagtggcttgatagtcaaagaatactttggttgtaaaagcttggggatgagctttgttgtaagagccaaagtgacagtgaacaatacttacaactttgtaaaagttagtggaaacctaatggtttgtaaagaactagacataatctcaacggtaaagaccagtgtggatgcctccatgtctaatatgtntctcttatgtgttcctcgtgagcagagtttttccaaaactctgttaagtatcatctgatattatctatctgtaaaaatc

SEQ ID NO: 130907 - DNA, 408 bp, Glycine max
aatatatcaagacgcttgaaattgattatcgaatctctgagcaaattcaaacgacaataactttttacttggatgtctgattgagtcccgtaatatatcaagacgctcgaaattgattatcgaagctctcagcaaattcaaacgacaataacttttcactcggttgtttgactgagtcccgtaatatttcgagacgctcgaaattgattatcgaagctctgagcaaattcaaacgacaataacgttttactcggatgtctgattgagtcccgtaatgtatcgagacgctcgaaatggaataccgaagctctgagcaaattccaacgacaataacttttcacttggttgtctgactgagtccccgaatatatcgagacgctcgaattgattatcgaagctctgagcaaa

SEQ ID NO: 130908 - DNA, 377 bp, Glycine max
  unsure (1)..(377): unsure at all n locations
tcggtattccatttcgagcgtctcgatatattatgagactcaatcggacagccgaataanaagttattgtcgttagaatntgctcanggcttcggtattcaatttcgagcatctcgatatattacgggactgaatcagacatccgagtaaagagttattatcgttggaatattctcagagcttcggtattcaatttcgagcgtctcgatatattacgggactcaatcagacgtccgagttaaaacttattgtcngttgaatttgctcagagcttcataatcaattccgagcgtctcgatacattatgggactcagtcagacattcgagtnaaaagttatgcatttgaattgctcaagcttcgtcttaattcgagcat

SEQ ID NO: 130909 - DNA, 456 bp, Glycine max
  unsure (1)..(456): unsure at all n locations
attacctgaactgagagtttatgatcattttttacncacnacggaagngctaattagttattacctatactcaacagaaaatacttataatgctacataataaccataatattgaatgagtttaatacaatttatacaagttttatacacaaaagttagtctgattcaccgactaacactgcggcatttctatcggcaagaatgcaaatgttggcaaacgatcgtcctcggatgaaattatgcgatgaaaactagtactaaatatatagcatgtcatgtcccttgtatccatagctaatgcagaaaattaaggtctatgaatggtgtttatataaaaaaacattaatggtgaataatcataataccataaatggatgcttcctataaagtgacataaattgcccacactgtgtcgaccatcttgtaaatcagaagatattagagagaggaaactat

SEQ ID NO: 130910 - DNA, 380 bp, Glycine max
cattactcttaaagcaaaattggtatataacctcctcccataaatacaaacatcaatgtaaagttagagcaagcttatgcgcatgtatccttacgaacgttcacttgcggaagatatcctattaaccgaagaaatgcacacatgtaccatcaaggcagctttgttacctagattatttacacgtactctcaaggtgtatttgttacttacatcacacacatctacatggctaaatacacatacatgcatactccaagcatttggggtaccaaaaattgcacatgtgcacatcttggtattctaatacctatacatacacgaactacatgatgaagcttgactatctacacaataaggtgccacatttcatgctcttattc

SEQ ID NO: 130911 - DNA, 422 bp, Glycine max
  unsure (1)..(422): unsure at all n locations
gcttgggttttggttcaagacaataaaattaatcctacgtggacaaaacaaattaataaacaacgtaaattggttaattgaacataacatcacggcaatagggattaattctattaggcacatctttgtttcttgaaagagaaaggagattaccatagattcatttgccattgaaagagatttagaaataacctttaattattagattagttgaacaagagtcttggtgtgaaactttgatcccaaacttctcaaatctgaatcttatccaaatattttcacttatttcttatctttatcttttatctacattntatctttggattaaattntctaattaaatcttttcccaaataaatttaatcttttcccaattatttagtttatanttttaattgtgatagttactaagttcaaaaaca

SEQ ID NO: 130912 - DNA, 466 bp, Glycine max
  unsure (1)..(466): unsure at all n locations
acttgaaactagcttattctttatatacaaatcagcgaggttatttatttcttgtcaaaaaanataaagacaacaatattnttattatatctatataaatttctaataatattaattntattatgtctataaagaaaataatacttttttattttttatttttctaaaaaaatacattctaagacggttctctgaaaaatcatcttagaatcctcaattttntttataaaaaaaattctaagaagattctctgaagaaccatttgactttctaagacgatttttcagagaattggtcttagaatcttcaattttctaattnttgtttagaagtgatatgttaagatggttttcaagtcaaaatcctcttataaaagatgtcactttaagatgattatgacttgaaaactatcttagaacgatactcttctaaaacggttatttgtctganaatcgtcttaaaatga

SEQ ID NO: 130913 - DNA, 396 bp, Glycine max
  unsure (1)..(396): unsure at all n locations
atctacatgcangcttcactgttaaaaaagagagagaattttgaatgtgtggtatagatctcagtccataaagtaatggggagtccattcagttgtcttttatttaaggagattcagcatattaatataggcaaaacaaaattcttgtgttgttcaaccaattattatgcttattttcctcctttttccatgtctgtangagagctaaaggaaacaaatgcctacaagatatgggcaaagataatattataaacctagccgcgcgctagtgcctcaagatgatgggcaaagttaatttgcagggtgtgggttatggtatctagttaagctgtaattacgaatttcgatgttaaatcttctacagatatcaataggcaattggaaacaatattctca

SEQ ID NO: 130914 - DNA, 354 bp, Glycine max
  unsure (1)..(354): unsure at all n locations
gctggaaactttattctcatgcagtcatgcctaacagattgactattggtgttggacatcagttgatgacacgagtatctttcttttcacttgcattttgaaataattcttaaaaaatattctttaattcttgatattcttggaaatgaaaaatataataatatatntatgaatggtgcaggaagccatgtgcattccacgtctgtgctagaggttccagtcttttggttcatttacagtgaaccactattactagacaaatatttttaagcaaaaacactgtctgacatgattattgtcgtacaatcagagccctcttcctgtgaaggcatctacattgtaatgggcattcac

SEQ ID NO: 130915 - DNA, 387 bp, Glycine max
  unsure (1)..(387): unsure at all n locations
ctttggtttagttattttataatggaatatagatcgagcaatnttatgtcagtacatctttcatcatgcttaaatagtatacttttcagttgcaacttgcaaactctaatcatctataaagacaaacctataagaatctatgtgtgactatatttgaaaattgacttggagaataatttgtgaaatcaggattttacttcctatggcatttcaaaattgaattaattttgtcactaagatagaagctaagatgcttaatacatgctgcatagaaggagtactactctttatgtagtggtaaaaaatggtgttgattcttaactgcaacataatattggatgaagtttgctctatgctaagattatgaaaggcaaaacagcttatatt

SEQ ID NO: 130916 - DNA, 386 bp, Glycine max
  unsure (1)..(386): unsure at all n locations
tttggtgaagaaaacctttcagagaatccatactaaccgaaagagaagtgggtatttcatgcaaatatcgttggggagtgaatccatcccacaagcgcgtntgttccttttgaagcaaaacagaggaattgaaaacaggggagagtcatgcaaactctgatttcacctttgaaaattttgcactaaaaaagaatgagactttgcacccgaaaggacaaagatgtacgtgcaaactctttagaagatgaagttttacatgcgagtccgattcagcacagagggtgaagtgtacctaattggtgagaatcacacagagtgaaaagagaaaaaaagatgtgtgaagaaaagaacatgtcagcgacttgttgtgttgagtaatctttcgg

SEQ ID NO: 130917 - DNA, 486 bp, Glycine max
ttttattaaatcttgtagatcttataaaaatactagtgatcaaccatatgcacatgcaatttccatttactaattaaaagctaaatctagcatcaaggaaaatatcatggcaatatgtgtggattttgacaatgatgaggaaatgtaatgttacagatttatatgtcaactacattatatcataccactaataatctagctaatttattacttttcatatttccctaatgagtagtagtggtagcttgcccatcatacaaatcaatttaaattcctccaaggtcagaagtgtgcccgccttcatttaaaaccagaaatattgataagtgggaaagatttcttacttaaaaacacagttgctccagcgctccatcatgtcaccaagattcactatgaatgctctgcaacataaacaatcagtcaaataatgtaataattcatgagaagggcatgacaaatgtaacgaagttaagatctagtagcata

SEQ ID NO: 130918 - DNA, 364 bp, Glycine max
gcttgtgcatatggatcttatcttcctgtttgtacatatgtagaggagcctatgacttggtgaagatgttcgcccattgattcttaaaactcactaaagaagtcttgatgttcctacgagaatgctattgttaaaatatgaggaaatttttctgaatattattctatgattcccaaaaggtacaagttctaacaagaatatattggtttatcataataactttaagaataaaggagatatgtagatttgtgctaactatagtggtataaaactctcaggtaacaccatgaaattatggaaaaaggtgattgagcataatttaagagaagggatgaggattatcgggaattaatttggttttata

SEQ ID NO: 130919 - DNA, 444 bp, Glycine max
  unsure (1)..(444): unsure at all n locations
agccatgcatattaaagtattattaaaggattattaatactaattatgaaaattctccatcacctaataataataatgtatcatgttagtgaccctcttcttgctgaacgtaattaacttggctcacgtaaactctttggtggtccaagttcaacgctgcgccaccactcacgaggctgcttttgaaacaattgaaaatacaaaatcgaatcaaatagcaattaacacaaacatcagttacagaaatattttagtaagcatgcgtacacttgataatgaatntgattttttaaattntattttgctttaaagaaaaagtaaatatgtggattatgtttagaaatntttctctaaaaaaatatgttggtagttaaatttacttttagtatagttttttaagttattgtaaaagttataatttataatatgtaccttaattaaatt

SEQ ID NO: 130920 - DNA, 471 bp, Glycine max
  unsure (1)..(471): unsure at all n locations
tgcttgtggagcttctatgtaggctggatcttttagcttgtatgangtcctntaatggtgagtttacaccatggagatgctacggaagacaaaggagaagaggtgagaggaggcgccatccactacggaataagccatggaagaaagagcttcaccaccaagatgagccttggataagaagcttggagaggatgcttcaatggaggaaaagaaagagagagagatagagagaggggggagcacgaaattgaaggaagataaagggagagaagttgaactttgagttgtgtctcacaagactctcattcatcanagttaccacaggtgttacacatgcnttctattatagactangtatcttccttgagagactgtcttgagaaaacttccttgagaaacttctttgagaaaacttccttgagaagctagagcttagctacacacaaccctctaataactaagctcacctcc

SEQ ID NO: 130921 - DNA, 431 bp, Glycine max
  unsure (1)..(431): unsure at all n locations
ctataagttctaaatgacagttttatgctaggattaactccacttaagctccagtgaccacagaatttagagttaaccttacaactctcaaagcctcactctttttacactcataacatcacattctcactttctaaccctaggttagatctacccttgatttctaacagatgtccatcagcaatttcagcttatatacatcacaaacatcatcacaaaaaccctaaaacagaagggggatgtttaactcatccaaacatggcaattgcaacaagctctttacaagagtcttcacaaataaccatcatgaagcagataactaacaaaactacccatcatatntcccaaaaccccatacccacgaaaattaagagagagagaagtccacccaaaccttgaatttcgaagtaccactcgtagcacgcacttac

SEQ ID NO: 130922 - DNA, 471 bp, Glycine max
tgaataatgcgtaccacattattttaccccgcgcgaatgacatgagggagaccttgatctggagaagacgccccacacgattagagataatcgatgcaagagaggcccaaccactaaggccctttcatagtcacaatgagtttgtgcgaaagagccctgttgctataccagcatattttggatcgaggatcctataacaacgaactactaatgctgaaaggcattctacgctacaatatttgagcaattgaggattgcgaccacataaattatatatatgtgaagcctcgacccaaagtggccctgtctctttgattgcgaaccataattcagtgcgctctcttctttattgacacgcactagtcagacacacatcatgaataggctaaaacactcatgagcaaattgcccacctacaaaccattcctataataagtcctattgagccatcatcacgcatgtaatctttga

SEQ ID NO: 130923 - DNA, 440 bp, Glycine max
  unsure (1)..(440): unsure at all n locations
gctttatacttatcttgattagccttctcttgttcttgtatcttgagtnctgaatcttgatcatgattcttgggatcttgaaccttgaatcttgattctttactctntaactttcctcttgagacttgaattgttcttgattctatcttgatcactcgagttgttctttgattctatcttgatcacttgagttgttctttgattgatctttgagctctttgtcatcacctttgtcatcatctttggttatcatcattgntatcatcaaaacatctttgaatgaatcttgattcaccatgaagctntgcttctacatctagccaaatgagcctaccttgaattaattcctttgatagcccctttgagcctatgttcccctctctttgtttngaagctcattacaagccttaagtgagaaaccatgatctcacnctaccctt

SEQ ID NO: 130924 - DNA, 358 bp, Glycine max
  unsure (1)..(358): unsure at all n locations
catgcaagctggtctgtctgatgcagcagtaatgatggtccgagtgatgttggggaacagntacgaacccggaatgggttnatgcaaagacaacgacggcataactagcctgattaatgccaaaggaaatcgtgggaagtatgggttaggctataagcccacttaggcagatataaagagaagcatcacgggaaggaagagcggttgtcaaagctcgcggttgagacaagaatgtgaatgaagcccaccctgccacataagtaggagctttataagcgcgggtcttggggacgaaagtcaagtggtcgcgatatacgaagatgatgttccgagtacattggatttggtacgaccatgc

SEQ ID NO: 130925 - DNA, 427 bp, Glycine max
  unsure (1)..(427): unsure at all n locations
agttgttaaatgtgaggaagagccatgtgtttacaaaaaggtcagtgggagtgcaattattttcttagttatatgtagatgacatattactaattgaaaatgacataccaatattgcaaggcacaaagaattggctatcagaacaattctccatgaaggatntgggagaagcagtctatattcaaggtataaagatttttagagatagatctaaaaggttgcttggactttcctaatctatgtacattgatactatcttaaagagatataacatggataattccaaacgaggctattttcctgtaggtgttggaattactcttagtanggagaattgtctaacaacttctgaacaaagagaatgcatgagtagagtaccatatgctagtgcagtgggagctatcatgtacaccatgatgtatacacg

SEQ ID NO: 130926 - DNA, 385 bp, Glycine max
  unsure (1)..(385): unsure at all n locations
atgctactcttaaaacaaaaatggcatacaacctcctccaataaacacaaacatcaatgtaaatttagaagaaactcatgcaatacttcctcatgaacattcactcgcacaagatattcttctacctaagaaaaatgcacccatgcacaatcgaggcaccttcgttacctagattatttatatgtacttccaaggtgtatttgctacctacatcacatgcacttccttgggtaaatttacatacatgcatanctcaaagcatttggctaccaaaaattgcacacgtgcacattctggtattgcatatacctatgcatatacaaactttgtgatgaatcttggctatctacacaataaggtgctacatttcatgctttattcaagt

SEQ ID NO: 130927 - DNA, 467 bp, Glycine max
  unsure (1)..(467): unsure at all n locations
tccttgagaagattccttgagaagctagagcttagctacacacacctctctaataactaagctcacctccttgagatgagaagctagagcttagctacacaccccttataatagctaagctcaccctggtgccaaaatacaaaaaaaaagtctctactacaaagactactcaaaatgcccttaaatacaaggctaaaaccctatattactagaatggccataatacaagcccaaaagaataaaaaacctattctaatatttacaaaaaagagtggacccaaccttggcccatgggttcaaaaaatctacccttgggttcatgagaaccctagggtcttctttagcagctctagcccaatcctcttggagtcttctatccaataccctnggggggtaggatngcatcatccnctccaccttggaaaggattngacctcaaatcctgaggttctntatactctggactc

SEQ ID NO: 130928 - DNA, 402 bp, Glycine max
atcatcatacatccttaacttatgattggtcgtgcctattagtactttgcttacatatattataagtgctcaacctgagcccttaaactgagacttatctgtctttgatgaaattaataagatacgtgcagagatattgtgcctgagtactgaacataaggaatggcacttgcttctactttgtctgagttactgtcagaggctcttggccttgatcgctttcaccttaaagaaacgggtagtgatgaacggcttcttcatctgtggcactattacccaacatgccctgatccagaacttactatgggcactagcaggctcacagacgggaacgtcatgacagtactattgcaagacgaatgggtggcgttctattctcatgaaaataatggatgatgtgct

SEQ ID NO: 130929 - DNA, 466 bp, Glycine max
  unsure (1)..(466): unsure at all n locations
tcgagcggagaagntggagcgatgaagtcgaagagctgattgagcttctatggaagaaggggtagaagcttcaatggaagaacatgtgaaggagcttcaatggaagaaggagcaagcagaaaccgaatatcagtagggttcatgcaagcagaaagcgaaaatcaatatggttcaaacacaaaggtctaggattcaaagcagaaaacgaatgagcaagcacaaaggtctagggttcaaagcagcgcaatctcgaaagctagcagaaacgtgcacacccgtgaggtctaggagcaatttcccttatttgtttttacaactacgacggtntttttctaaaaaccggcttaagatttataaaacataacattctaaggcggttntcaataaccgccttagaaagtgcgtcgtaaaatgaaatttgttacacaataattacaaatatgccaccgcaccactttctaaagcg

SEQ ID NO: 130930 - DNA, 414 bp, Glycine max
  unsure (1)..(414): unsure at all n locations
tctactcttctgttttatttatacatgcaataccctatgctttggtgtnggtgattcactaacaactgatcgtaactactaatggcgatctaacgcacatcattgagagccctgtcagtagaaacgatagactttcaagttttctgctcagtgtgtggctgtttactccttgctaaattctgacttcagattntggatttgaaaatacataaaaaaaaagtaataatatagttatattcaatcagccaactgttgatatgcaacgtgatacaattctggcagtttcataaataatttccactccatgctgtaagtgagcagcangtctcatgcaatatgatttcttacatngcatctaatggcaaaatatatgtagacaggtgcacaacagcagcactcgatcttgtgattctt

SEQ ID NO: 130931 - DNA, 450 bp, Glycine max
  unsure (1)..(450): unsure at all n locations
tactacattcttcacttttctcactntctgctatgcatgatgcctntattaaaaagngaatgtggttttctgatatgaatgcacagtacagctgagaagaacaacataccttggaggaaaatggcacaagagatttagagtcagaagtctatagggagctgaacagcattcaaaaccagtctttagtgtatcctgattgtaagtttctgacttttcttcttttaccttntgtcttacccttctactcattgttgtcttttcttttgcgtgtccgtgtaaatgatggggtgactgcttaattaacttcatagattatttgaatccattccgtgcatatgaagagggcaatcttacatggctgttatgtggtaattctgaaatttctcattgtcaatggaaggtttaatttggcagcttctctctttgttaatcagacataacatgttcctg

SEQ ID NO: 130932 - DNA, 415 bp, Glycine max
  unsure (1)..(415): unsure at all n locations
attagaaatactaagataacttactaaaaagttaaaactttatacaactagattaaattgaggttaacaagactcccattaagaagaaaaatgagaaaattgcccctaaattcattcacaaattaagtatcttaagcaattatcacacaaaacctaaaaaatttactctaacttggttcattttaccaaggaggacacaatatcagcacatgtattggaaggtgtgacttttcctccaatacaagatagtagttaccatccagtattacattntctgaaacgaaaaaggctgtcatattactaaaaagcagtagagaaggaagaatggataaaatacaatcaagtggcatctgaacatagagacacattaaatagatgaggttatgaaacagataccttaatatgtttatatcat

SEQ ID NO: 130933 - DNA, 484 bp, Glycine max
  unsure (1)..(484): unsure at all n locations
cactggagcaaacaatttcccctcattctctaactcttctaaaatgaccactttgacattgttcacccgctttctcataaataaaaaacagaaatgctaattggtaacaaatatttttgtaaaaaaataatggaaaaaattattagaccgtctgagattatcatggttctcactaattntcaagttgaaatacttggctatatataataaagtgttattaattaaatttgaatacacatcagataaagatacatattaatacttggcagaattattaatactatctttaataattntatattatatataatcaagtattattaattaaacttgaatacatgcatgtcacagaatgtgaacacggatacatagtgatctgaaactacttatctaataatttttccttctctaccggcattntacaagntgtacgtgcatattngatatatatatatatatatatatatatatatatatatatata

SEQ ID NO: 130934 - DNA, 435 bp, Glycine max
  unsure (1)..(435): unsure at all n locations
tctgtgttctgacattgccaaatagatgcaattctgtattcatccttctttcagncatagcttcaggccgcgataagactcactgatctgaccctgattcctcttgcagactttatagaccaattaaaatgcagtttctgcaggtcaacgtctgaccatcattgtcatcactctggccattagagtaaccttctgcattcatccttttgtaaaaagtttatattagtatcagcaattaaccggacctgatactgatatgagtcttaccgcatatacggtcaatttcagcaattaattacattatccacgccaaagtatttgtcatcacaatgatggtaccttctttcagacaccattttttcaactccgttttccacggaccgcactactatgtcaagagtgcggtccgcggatacaaccagagaccgactgaca

SEQ ID NO: 130935 - DNA, 268 bp, Glycine max
atctataatttatagcttggaattgcaggaggtattattgagctcatcacctcacgaaccaattctattaattattttaatgcgggtaattctttggacataaaacataataacttgcatttgaaggatcaaatcaatataaagtaaaataaaggaggtaaataaggagaaatttgttacctttgaagggcataatgagaaattgttaagaaaataatcaaatactacttgccagttagatactttgacttggtgcccaacagcaatt

SEQ ID NO: 130936 - DNA, 416 bp, Glycine max
  unsure (1)..(416): unsure at all n locations
tcgcaagtgtattgactgtatattgaggagttctttttttttatttntttatctttctgtcaggggagtttcactatgtcccatgtcaaccctctaacatggcaactaaaaaatatgagttacgtaaggataggtcattcaagtctttnttctaattgaatccagctagtatcactttcgtacagtatccttcttatcacggtaatgcgaagtgatgaataaacttggagagggccaagcatgggtcagattcggtttctctgcagtgtggcgattgggctcgacggtgctgtttcggtaggtgttgctgtttctttccatggaggggtttgtgtgggatatgatgttgggtgattatacatcggcaaaaggagatgatggaagtgggggaggttggtggatgaacgtgtcctttt

SEQ ID NO: 130937 - DNA, 418 bp, Glycine max
  unsure (1)..(418): unsure at all n locations
agcttagacttgaangatttttagaactttctcctattntaatcgaccacacctcatgttaattgattacatacgaatattgtgttctttgtttgaattcaagttgttgctttaatctattacacatcgaaataaccgattacaatggtttggtaattaattattcttgtgcaatttaattttttataaatagtcaccttgtgactctcttcatatttctctttccaaaaacccacttttacatatgatagaagagagacctcagaggagtgttatgcatagctntgatcagcaaacaacacattttggatatctaatcaaagataaaggctatgacattactatggagcactctagagcttaagtgatggatnnttgcataactaggtgtactctaatccatattctttgtgatatt

SEQ ID NO: 130938 - DNA, 483 bp, Glycine max
  unsure (1)..(483): unsure at all n locations
actctagtttaattactgtgcaataatatttcactttggttgcaggtgtgcgtatgtgagagaanaagagacagtactatgattggtggggttttatatgcagacaccatgtggaaaccaacatggtttggttggtgttcctttggctacccttggcctgcacaaacaatagatttcattcgagttaaactaatatttattccaatttcattttataatgtgtgaatgcaatctttntaattaatcctagccatcatatttaccatttattcaatcaattaatgagcatcagcttaattgatagaatcgaaaaatgtcaagaagaaaaatgtcttggatttcatcatgttagtttattattgctagaatgcttgtgattctgttaccaagttntgcttaaagtttatgttataccatagccgtaattaaaatggtctgcgttcattcttctattttttttttctaaataaanatataatctat

SEQ ID NO: 130939 - DNA, 398 bp, Glycine max
agcttgtggactataccttctaccaaacatatctgtgtttctgtctcggcccggatttaaagcgggttgcagcaccggctctgcttccctaaccgtactggaggcggttgccgtggctttatcctctatggttttctagagttttaacatgacctccgagatggaagccatttgatcttttaaagccgatagatcggccttcatctgttcctgcacgccctcttcattatccatttttctggatcgagtgttataggggtgccttgatgttttcttagttatgatgaaattcctaaagaaataagcaacggtgagtatgccaccaaaacatgagtatgcaaatggatgatcggaacacttggatccaccccaaggtttttagataacatgatgaagtc

SEQ ID NO: 130940 - DNA, 436 bp, Glycine max
  unsure (1)..(436): unsure at all n locations
ttatatataaaatataaagttattcctanntttcaccctttgaaatatgaatacgaattcaagcactaaattgagtcttgatatcatagcaaagggtgtttccctttntttttctctctctctctttgctttcacaacaaaagaactcgagaagtaaacaaatatatgcaattgaagttttctttggagntntatttctggtttttttttcttttgttcccttttattaccaaaaaacaaatatatgcaatgtttttatctttgaatgcaatgttttccattttgtgaatatccaccaacgcggaataagaatgtggtatcagaacgaccttgagaccaatttaaaaaaaaacgcanaaatcaattataagaaaaagggggaatngatataataaanataacattgaggggaanaattcagatggaacttggaata

SEQ ID NO: 130941 - DNA, 327 bp, Glycine max
aatgacggatctttggagaacactattttgatggatggtaaaaagcattacattcgttcctatggatgtctttacttctggacctagttctagcccgtaaacataaagcctgtcacccgcccttccacaatacacaatgcgtgcttcaagaatttgtcaccttgaggctactataattatatatacttcgataccacaaacatttctacgtgtccttttgtgcctgcatgaatatatatattaacagctacaaatgatgtttaacacagtcccacatggcaactctttgtgttcttggtgtggatggcatactgaccaccgctcact

SEQ ID NO: 130942 - DNA, 463 bp, Glycine max
  unsure (1)..(463): unsure at all n locations
cgcttntacttactgctatgatgttntagttgacttctcattatttttcatgagatatagggcccatccggtctccaaacatcactatgaagtcaagcaaatggactagatttttttaaaggttaaggagaataagaggaatgatgatgctttgcaagttgacaaacttcataagagaatatatttagttttttaatcttaagaagtctagtcaataaatgtttcaagtagacctagcctacaatgccatagcaataccttttcatcttcacgaacaaaaatcgactacataaagttactgagttnttaccttaaaaaaacttcatcctctacgagatatagagtccatcaacctcattagtgctgacaatcatcctccttgaactcaactcctgagagcgagtagtgaattaaaaaatagccaaacaatttagatcatgtgttcaattactgatgaaatgac

SEQ ID NO: 130943 - DNA, 264 bp, Glycine max
ataaagcgactaacaaactcccccaaatttatagttttgcttgccctcaaaaaaaagaaaaacagttcacttgtcctcaagtgacaccgacagtggccaatcaaaagagaatggtgtttgattcatcaaagacctcaaccatatgaactgaatatcatggaatgcttaaatcaattacttctcacaagcatgcctttttcaaaaataagagcaccagtattagagtcacagctgatataagctagtcagcatgacagaaatcaa

SEQ ID NO: 130944 - DNA, 482 bp, Glycine max
  unsure (1)..(482): unsure at all n locations
attggaatctctnggtattatactgagcttgttttctanaagcagngcttttccttttcctagatgccatctgtaaaaagaacccaaaattcacattagaccaaaatntattcaagttcaaaaacaaaaaataaaagttgaaattaactatgtgtgcttagtgggatactgctcgcttagtgcgccctcagagatattgatggaagcttgcttgtggagcttctatggaggctggatctttgagcttcaatgaggtcctttaatggtgattttccaccatggagatgcagcggaagacaaaggagaagaggtgagaggaggcgccatccactatggaataagccatggaagaaggagcttcaccaccaagatgagcattggataagaagctcggaaggatgcttcaatggaggaaaagaaagagggagagaaagagagaggtgggagcacgaaatngaacgaataaaagagggagagaagtt

SEQ ID NO: 130945 - DNA, 431 bp, Glycine max
  unsure (1)..(431): unsure at all n locations
gacgatgtacgagagactggtgaagccaatgaggagttgggattgccagctgactccagggagtatggcattggcgcacaggtattaattatatcagtagtactcacatagtatttggcttttctttaatagatgatgatttactaaaatggttatggaagttaactggaatgatttttattgtatttgaaattctctactcgcagatgttgagagacttgggtgtacgatctatgaagctgatgacaaacaatccagcaaaatatattgngctcaaaggttatggtttgacagtttcgggtaggatcccatttgtaactcttatcacttcggagaacacgagatnattagagaccaaacgtgtgaaaatgggtcacatatacgccatggaatttaacggccaattgagcactcatgacagtggtaatgat

SEQ ID NO: 130946 - DNA, 479 bp, Glycine max
  unsure (1)..(479): unsure at all n locations
ctacttattacataattgatatgtatatattccttgttatttttcatctctcctatgtctccaataatattcctatatttgcctttttagttaattatgactagattaaggcagttagcgtctttctttttatgttttactaaataatataaataacattaattttcgtattatcattatacaaaagagtntaacaagcttaaaacttaataagctttaacttagagagtgtgttaaaacatatttagttattgagcgaggaaaaacagagaacagataatgaatatacacaaattaatatagattgttgtttagctagagtcaaaatgttgttcccctttaatatcaatactactattattttgattccttatttgtaactaggaagaaagatgtactacagtcaccagtgataaaaatgagaacttgaacaaggcattgncaacacttacactacagaagattcatcgcatattaat

SEQ ID NO: 130947 - DNA, 348 bp, Glycine max
gacctgttcctttctgtttaagctcactacagccttagtgaaaaccttgattcccatatcttaagaatttggagttttggaatgtttggaatagtggggggggggggtgtctataaacctcttgaataatctgttcatcatgaagcttgctctcaaccctccaaattttggaaaagacctgcttttgcaattaaaatataatcccgacctggtataaactagatttcgttggaattccaacaaatgatgtaaaccactaaatccctttggactaaagtatagttctagcctttcctataaagtctgctttttgttataacttccaacaaaatagataactatggttcc

SEQ ID NO: 130948 - DNA, 382 bp, Glycine max
aagtgtcttgtgtgtgtgtgctatgttttctctgctccttcccttatttgcatcgtcggtggtcctgatggcatgacaacaaacaatggtgtttcgtggttgtcatttttctttgatttctccttgtgcgttgaagacgaaaggcaactctgtaaggtaaggtgttttttatttgtttagccagaatttgctgatggccttcattttcgttacatttctccccatggccatcattttcgttagatttcttcttgttcttttgttattgcagacaagggattaatcatgtgttagggtttgttgatgatgctctatttcgggtatcaacatgaataaatgtattactaattcaatgatgcttaccttccttcttcttgtgaca

SEQ ID NO: 130949 - DNA, 466 bp, Glycine max
  unsure (1)..(466): unsure at all n locations
tggaattgcgaaagccccacttcatcattatgtatttgtcctgacatctcaaacaaacaaatcaaacgttacaagacaattatagttgctgtttgaatacctcacccactcaagtgtatcacacaattatggcttttctctaatgaaacactcttgccttttaccactctaattccccttgagttcttaggcaattcaagagattatggccacaacaaagaacaattcaccaatatgtgtaaggtaaggctagacaaggaaaaggttaaccaagaaaaaggctaacaatgtttttaggcacaaatgaaggaaataaaattcagaatttaggaattcaagtacaatccttcatgcaaccaatatattaccttagagagtnntttttttaagttcttcaagcatgaaccattcagnccaatntttttttttttaattttgctatacgaaatctgctctttnttttttt

SEQ ID NO: 130950 - DNA, 456 bp, Glycine max
  unsure (1)..(456): unsure at all n locations
tctataaatatggtgagaagtgaagttttaattgtttagccctctangcacttctctctctttcgaatatgcttggaaaaattgtttccgtgaagaatatctaagccgaggcgcttccgaaacgtttccgtgaggaatttcgcgaaggtttcgaccgtacttcgacgttcttcattcgctcttcatcgttcttcgatcttcaacgggtaagtacctcgaaccaagcttttcgattcattctatgtacccgtggtggtccacattgtgtttcgtgtatttttattctcgtttcatttactttntatacccccttttgacgtgcttaagctcatttatttaagtcatntctcgcttaacctagaaataaaataaatatccaccgatcgtttgaattgtattatccgttaacttcggttaaaatgaattccgaccgttcgatcgtgccgtaaccacctt

SEQ ID NO: 130951 - DNA, 428 bp, Glycine max
  unsure (1)..(428): unsure at all n locations
aaccggggtaccactggaattcgggagctcaaaaccatcattatcatcacccatggggtcacatcaaggcaatacatgcacttgcatagtcttatgcctgccatgaatagcattttgccttgagacctgcaacgctagctgaaaggaccaactaatcatcacttaaggctaagaccttaaaatgaaccaagataaaaactccttaaaccacataaactacctatgcaatctaacatactagtattgttattttgttcaaatctaacttgactgttagagtccttacaaatatgcctctcctcaatcacaaacttgaatcatgatgaaaaccattgagtcattaagaagcttacccacgagagaagatcattccactagacaccatagcatttatanatggtaatataggttagctcaactcatttagt

SEQ ID NO: 130952 - DNA, 468 bp, Glycine max
  unsure (1)..(468): unsure at all n locations
actattcttagcccccatcattttattacaaaaggaacttttcattgtatcatccttaaaatataatgtcagatcttatcaaatctttactacatctcttatntttaaccttttaaaactatgttaattaaaaagtaaacaaaaaacaaatttattaagtaaaacaacttaatcaattaaaaaatattgttgaaattttgatgaatcaacaaaacttaaccattgttattagatttttagatcatgtaactttggtaatcaaaatataaccacagtttaacttttgatgatgattttaatttaattaattntctataaatttgaaacaatagtgttagtcttatagcatctccagcacatatacttcattagtggtctaaaattaagcacagttgttagtgtaacttttgcaatcaaaatatcaccacaatnntaactttgatggtgatttcaattaattaattttca

SEQ ID NO: 130953 - DNA, 370 bp, Glycine max
  unsure (1)..(370): unsure at all n locations
tgtctaggaacaatttctcgtattatttggatgtattggcattttgctttgctctgcttgtttattagattgtatgttcctcccataccatcttttgaatgttggaatttttctggtaggggaaagattggaaatacttctcatgtaaggattccaccatatttgttgtgtgtgttgttaaagacaagcaaaaattagtccaacaaaatcttgtcctaccctaaatccttgctcaccatgtgcaataatatatntggtgttaaatatgtagttgttttggttgtctcttaacttggcttggacttccttcangtatcgggtggttggaggcatagtatggcactgacgtctactggactactatatggat

SEQ ID NO: 130954 - DNA, 360 bp, Glycine max
  unsure (1)..(360): unsure at all n locations
tgtgtaacccaccatttttttatttagaacacaggtcacgtatctactatcattgtgataatctctttctctggttttggggtgctacttgagttgcaaagattcgtgcccccctttttgcacactttttgtagttgcatcctatccggagccatatcaaaattgtactgacaccggctaacgaaggcaaccattangtccttccaagaatggactcaagaagctcctaagttagtataccacgcgacagttgtcctagtaagactttctcaggaaaaatgtatcagcagtttctcatcttttgcgtatgcccccatcttccgacagtacatctttagatggttcttggagcgagtagtc

SEQ ID NO: 130955 - DNA, 434 bp, Glycine max
  unsure (1)..(434): unsure at all n locations
atcaaacgacaataactgttgactcggatgtctgtttgttttccgtaatatatcgagaccctcgtaattgaaaacagaagctctgagcaaattcaaacgacaatatacttttactcggatgtccgactgagtcccgtgatatatcgagacgctcgtaattgaaaacagaagctctgagcagatttcaacgacaataactttttactcggatgtccgattgagtcccgtaatatatcgagacgctcgtgattgaaaatagaagctctgagcaaattcaaacgacaataacttttaactcgggtgtccgattgtgtctcgtagtatatcgagacgctcgtaattgaaaacagaagctctgagcacattcagacgacaataacttnttactcggatgtccgattgagtcgcgtaatatattgagacgctcataattg

SEQ ID NO: 130956 - DNA, 488 bp, Glycine max
  unsure (1)..(488): unsure at all n locations
aactcataaacaaagggggagaattatgtgtgtgatcttttataagaaagagcttgtatgcgtttcttgattttaggtttgtcatcatcaaaaagggggagattgtagaagcaagcttcatgatgatgaaccaagcaattttgatgatgccaaaagcccaagtgattgattcaagacttcaagatcaagcatcaagaatccaatccaagattcaagattaaagagaagaaatcaagaagcaacaagtcaagacttcatatgggataagtattaaaagattttttcaaaaaaacaaatagcagagttttgttttacaaaagaattttctcaaactttcaaagttaccagagtgattactctctggtaatcgattaccagttggctgtaatcaattaccagtgaccaatttgtgtttcaaaatggtttcaaatggtttgcaatgttccaaaatgattntcaaatagtggtatcgattacactatattagt

SEQ ID NO: 130957 - DNA, 257 bp, Glycine max
catgctatgtgctcgcgactggtccctctctttccttcgcagcttgagttcactattgctaccccatagagcttcgcgaaatttattctggccatactcttccttgcgagccctcttggtctcttgttcaagggctcttgcggtaatagcattctctttctgtaacccggcacactccttccgaatgtgtgttgtgggcaacttgaacttctccttggcaagtttcgcctttcctaactcacttttgagagcttgga

SEQ ID NO: 130958 - DNA, 460 bp, Glycine max
  unsure (1)..(460): unsure at all n locations
agcttcaactccacacacttttcctctcttagtttatgaagccgncggggtcggcatattaatcaagttcgtaattacattgtccctttcgtcatgcctaagccatttgagtattttttatatacattttacagctatgcacatgcaatggaagtagaaaaaagaaagcttaaactttgagaatagacacaacagacagagagagaaacattnttctatcattacactctctctctctctctctctctggcgggcaatttttttcgatccgggtctcttttattcagttctgaaccttggggagtgttgtctcattccttgatgggaattgctgaattggggtgctcctgattctggctcttcctctctcactttctttgagtttcatgtgatcccagtatggacttcattggccaggaatatcatctggggttgcacaatctgagtgatcatctacttt

SEQ ID NO: 130959 - DNA, 453 bp, Glycine max
tatcaaatgttgttatttgttatttcattacacagagagctcctatagttgttaggcgcaatgtaatctgctatgaaatgtggtaatctattatctcgaacctagagacttctttatgatgaaattggcttaggtaatcaattaattcgataaaacttatcaatatttcaagagaagtgagtcttgatgcttgttctaacactttgtaattgattgctaaacttggtaatcaattacacaatgtcgaactcattgcttctaagaaactttgagatcaataaatttatcttgtcatgtttgattaccactaagcatggataataaaagtctaaaacactcaacatgcctagtctaataacatataatacaaatgtcacatctctacagacatgtttggcattgtaagattattaagaccaacagatcctaagactagtcttcatgtcttccatc

SEQ ID NO: 130960 - DNA, 356 bp, Glycine max
  unsure (1)..(356): unsure at all n locations
gcggcatgcaagcttcttatatgcttcattacatggattgtgatagtgaagntnatcaaaaggaaatagatttgtcgctatagcgtgccaagcaagataataacttataaagtcaccaacctaaacaacaagatgatgacaaaactatatgctgaattcaaaatccaacatcataattcttctccataccacccaaagttgaatggggttgttgaagcggcaaacaagaatctcgagaagataatccaaaagatggtggtgacatacaaaaattggcacgagatggctttacatggatatcgtaccttatnttgcacttcaataagtgtaactccattttccttaatatactagat

SEQ ID NO: 130961 - DNA, 448 bp, Glycine max
  unsure (1)..(448): unsure at all n locations
ctaagctcgttaanagcggtgatttacgtcatcttccgtgctcatcttatctgtcatactgactttngagtcacgctgacgggcggaaatacccgagtggttatccgtattaaacttttgcattctgtaagatgaaaagcctaatagcacgcagagactaacgtcgtattctgcccccttcgtcaatcgcgatcgacaagcccggtggcacgcggagattntcgtcatgttccgcgctcacaagatctgtcatactgactnttgagtcacgctgacgggcggaaatacgtgagtggttattcatttaaactttntgctgtctgtaagacgaaaagcctgctagcacgcagagactaacgtcgtcttctgcgccattctgcaatcgcggccgacagcccgttgacacgtggagaattacttatcttccgcgctcacagatctgcatact

SEQ ID NO: 130962 - DNA, 393 bp, Glycine max
  unsure (1)..(393): unsure at all n locations
agctntatcaatctttgagcaaggacaactttcaattcataattggatgcatcacatattagctcgaatggggcattccaatcaggtgcatgaatgataggtgtggtagtcaccgcacgcttgaggcaatcaaaagcctctttgcactgatcatcaaaatcaaactccacctccttttgcagcaaattggatagtggaagggctaccttgctaaattccttgataaagcgcctataaaaccctgcatgaccaagaaaagaacgaacctctcgcacgcaagaggagtaaggcaattgtgaaataacatctatttttgcagggtctacctttatacccctactggaaatgatatgccctaaaattataccttgttctaccatgaagtgacatttt

SEQ ID NO: 130963 - DNA, 428 bp, Glycine max
  unsure (1)..(428): unsure at all n locations
tgggccatttcctgcgaaggcaaacatttggaatgttatttntaccagtgggatactattcttaaaacaaaaatgacatacaacctcctcccataaatacaaacatcaatgtaaatttagagcaagcttatgcgcatatttccttacaaacgttctcttgcacaagacattctattaaccgaaaaaaatgcacccatatacaatcaaggcagcttcgttacctagattatttacacgtacttccaaggtgtatttgttacttacatcacacacctccttggctaaattcacatacatgcatactcaaagcatnttggggtaccaaaaattgcacatgtgcacatcttggtatttctaatacctatacatacacaaacttcatgatgaatcttgactatctacacaataaggtgctacattttatgctc

SEQ ID NO: 130964 - DNA, 483 bp, Glycine max
  unsure (1)..(483): unsure at all n locations
tacctggattgttgaaagtagttgcgaataggaagtatatccaggcactacaggaatgtgagcaaaatgcagatgaatgcaaagagtgagaaagatgctttgtaagagtgaaatggtaactgcctaaggcaattgtgccttattatttttagcagttttgtatggctcgcttagcacacagccgcgcttagcgattccatatgaagtttgagttttaaaggcccatacacttagcacgtctgctcactaagcccaatttaaaataaaaacaatctagagaagtntttgggcttagcgcgatgatatgcgattagcgcattctgcagctctgattggtcttgcaactctcgcttagcgggccgaggcacgcttagtgaatagaatgctccttaattgcagtgatcaccgcacttatcgcatataggctcacttagcacaattcgaaagaattaaattctatagaggttctgcgctagcgagttg

SEQ ID NO: 130965 - DNA, 344 bp, Glycine max
  unsure (1)..(344): unsure at all n locations
aagtgatgtcgaatctgacgtacaaataaaactatttggaggtgtggtgtctttataagttacaaatatagacagtaagacaacacagctattaaaatagcctatgagtncaacttcttcttcttagtattattgtcatacaagcatgttgaaggccttggtaacaattattatattcttgatgatggccttgtgttgtgaaaagtatggcacaacacactatgaaaggtgcttgaagaagaaatgaaaggaatgcttttctctctctctcactataattcaataatggaacaggttatatacaagagttatttcataacttactgaacacaacagttcatctt

SEQ ID NO: 130966 - DNA, 394 bp, Glycine max
aaagaaagaagtcgtatctattcaaggtctgagagaccatacaagtttcctaatgatttctaattatgtgggccattaagtctatcatatgctgacaatagccgacaagcccttgaatctcttcgggggtggagtaggtgtctgccattgccttggccttggctaacaagcggggaagttcttgactcccgttcaaggtaagagcaaaccggtccatccacatggttgcctcttggtgtaaagagtcgatcacccttcctctagcctctttttccgcatatacttgagcatactcatccgcgattctatgctcgtgggccatggctagacctaactcttcttggtactcggcgaagatagctaacatgctggtctccgtctcgcataaatgctg

SEQ ID NO: 130967 - DNA, 410 bp, Glycine max
  unsure (1)..(410): unsure at all n locations
ggtgtagcactnttcactacagaagccgaatatatagctgtttgaagttgttgtgctcaaagcctctatatgaaggaacaacttgaagactttggagtaaaccttgatcacgtttctctaaaatatgacaacacaagtgctattgatgcaatcctacccccaagggcattggatagaagactccaagaggagtgggccaaagatgcaagagtaagccctaggattctcatgagccttatggtagattttgggcccatgggctaaatatgagcccacttatctcttgacatattatattaggatttcattatttttgggccttgtatttaaggctccataatgtatgtaggataccctagacatgtaggacttttcatccctcgtattttanggcacctaaactatagtta

SEQ ID NO: 130968 - DNA, 495 bp, Glycine max
  unsure (1)..(495): unsure at all n locations
tctgtgttctgacattgccaaattgttgcaattctgtatctcagccttctttcagtcatagcttcgggccgcgataagactcactgatctgaccctgattcctcttgcagactttatagaccaattaaaatgcagtttctgcaggtcaacgtctgaccatcattgtcatcactctggccattagagtaaccttctgcattcatccttttgtaaaaagtttatattagtatcagcaattaaccggacctgatactgatatgagtcttaccgcatatacggtcaatttcagcaattaattacattatccacgccaaagtatttgtcatcacaatgatggtaccttctttcagacaccatnttttcaactccgttttccacggaccgcactcttatgtcaagagtgcggtccgtggatacaaccagagaccgactgacacgagtcagaggatacgacggatatgttcagtcgtaaaatatctatcatacacatgatta

SEQ ID NO: 130969 - DNA, 405 bp, Glycine max
  unsure (1)..(405): unsure at all n locations
agggttaaccaagaagtcaaaggtgggttcaaaggaggctccaaacccgaacctctcttctggctactgcaactgcattttttaaaattgtaatgctgatacaatcattgatttaagtggctcacagcaactattaagtgggtcttcattgccgttgaggtagttcatgcaaggagaaagcttgtttaggcaagagctatcttgagcactctctcttgggatacatgttagtagcacaagaaatacgcacaatgcatcaaagttccctcagcaaagcatggtttccattnttgttcgtaatgagtatagtctatgcccttagtgccattatgcctaataattatgtgagtgaagagtaacatgttaactaaaaacacngaaattttttgatatgattgatatgct

SEQ ID NO: 130970 - DNA, 424 bp, Glycine max
  unsure (1)..(424): unsure at all n locations
gtaaagngtagtattagatttatgtatatggttgctcatgacccattgatgaaaatattnttcatgtttatctcctcaattgcacaatttagtatcagaatcgatggctcgacgtggtgaccgactcacatgagtaaaatgatggttgtggatccatatacaaataaacttcttgtattgaaaaatcttcttgaccagtgactctatgcacaaaagtactagaaacatgttgataacaatgactatgtggactatggtagccatggttatgctctaagagccatcatgaaatatcatagataaagatgattttcgcttaaaggataaactatcgtgtgagagagacccatattngagcggagagttgttgggaagtgtgatgtgaaatccacatcaaataaaaatgaaatacttgcacgacata

SEQ ID NO: 130971 - DNA, 461 bp, Glycine max
  unsure (1)..(461): unsure at all n locations
taaatcactcctacgtttcatctctagtatgcattttctttctttctttacccactcctcacgtttggttttttaaggaaaaacaccataactaaacgcgccacaaggcatccctatctcaccagatccaaatctataacgatgggtgatcaagaggagacacacgaacagatgaaagccgacatgtctgctctgaaagaacaaatggcctccatgatggaggccatgttatgaatgaggcagctcatggaaaagaatacggccaccgctgccgcgttcagttcggctgccgaagcaaacccaactctcttggcaactgcgcaccatcctccctctaacataataagacggcgaagggacacgctgtggcatgatggcaaccctcacctgtgatacaaccgagcggcttacccttatggatntgccgccaactactcaccacccgtcttgcaagacgatgc

SEQ ID NO: 130972 - DNA, 490 bp, Glycine max
  unsure (1)..(490): unsure at all n locations
agcttatgcctctgctaaactagaagagttgttcctagtaccctatatcttttattcctcccaagttcaaggtgtcagactctgacaagtacaaggggactacttgccccaagaaccatctatagatgtattgtcggaagatgggggcgtacacaaaagatgaggaactgctgatacatatcttccaagaaagtcttactggggtagctgttacctggtacactaacttggaaccttctcgagtacattcttggaaggacctaatggttgccttcgttaggcagtatcagtacaatttcgatatggctctagataggatgcaactacagaacatgtgcaaaaaggggcacgaatctttcanagaatacacccacaggcggagggatttggcagcccaagtagcacccccaatgatggaaagggagatgataatggtgatggtagacacattaccaatattcaactatgataagatggtgggctacacacc

SEQ ID NO: 130973 - DNA, 358 bp, Glycine max
  unsure (1)..(358): unsure at all n locations
agcttatnacctagttgatttaatgaaagttgttggtaaaactaaatgataagttaactgaaatagctaaattattattttcctttattttatgctcatcttatttttctttattntgtatcacaccatattttatttatttcgtctagacaataagtatcctctgccaaatataatatttagtgtaaatagtcatttttattcttgaatgtgtaaatcactgacaaattcacccctgaagattaaaattcaataaaaaattactgacatntacgtctaataaaaaaactaccgacatttatttgtccaatgaaaacctattgacattttgatccaaatnaataataatgacattttc

SEQ ID NO: 130974 - DNA, 505 bp, Glycine max
  unsure (1)..(505): unsure at all n locations
ggaccttgaaactcagcttgtgtttaactgctgacagaaactaccaaattcttatatactatcaaaataacatgagtagccaaagtcaaagaacttcataattgcacaacccaagactctttctgtacattcaaatatcttgattccacaaagaaagattgcaattaaatttttaaaaagggagaatactaactaaccaatggtctacattaaatttcaaacataagtaataatattnttttcagccaattttgctaaccggcaagtttgatttgtgattntaacgggctggcccgcagaacactataatttgaaagaaaaatgggaattgagaattaactaatgaataagcatttaaaatttatacttgaaagttaagacattatatacgactttcatanttagtcactgtatttagttgagaatgtntttggtagtattttggtgagacttttaacattaaaatcaccaaaatggcccncaacataaatcttaaacaatgcag

SEQ ID NO: 130975 - DNA, 429 bp, Glycine max
cagccttacacgcggaatatgttcaccattatcttgatcatcacaattctaattcattcaccaaatagttcttcgccccttctttgaccccattctttctctttaatatactttgtccatatattcctctttctcttcctatcaaacatccatggcttccttgtcttctagtacaaaacagagcaataataaccaagagggtaaccgattttttttacccttttgtgtttttatttattatttattttatacacttttgttgtattgatcgtaatttagttactatacattctttttgtacccactcttaatactttttcgtgaacttaatgtgcagttgatgagaaaccaataccacacgatccatacgttctgcacagctcgttgcgtcttcgacagaaccacatggatttataccggggagacttc

SEQ ID NO: 130976 - DNA, 463 bp, Glycine max
  unsure (1)..(463): unsure at all n locations
tgcgtagcccaccatcttttcatagtagagtattgtttatgtgtctaccatcacgattatcgtctccctttccatcattgggggtaccacttgggccgccagatccctccaccttttgggcatgttctttgaaagatccgtccccctttctgcaaatgttctgtagttgcatcctatccggaaccatatcataaatgtactgatactgcctaacaaaggcaaccattangtccttccaagaatggactcgggaagattccaagttagtgtaccaggtaacagctaccccagtaagactttcatggaaggaatgtatcaacaattcctcatcttctgcgtattcccccatcttctgacaatacatctttagatggttcttgggacaagtagtccccttgtacttgtcatagtccagcaccttgaacangtgaggtgtgatgatattgngtactatgaacaactc

SEQ ID NO: 130977 - DNA, 299 bp, Glycine max
atgtagagatcaacaatcatagttggtgatagatgtatgtgatgaacataaagcacatgactcatgaatgatgaaataactattggacgcgctctcatattactcataaagacgctgtaagtcagggaaaatgatcggacctatatatagctgatgtagcatcctaagtcatatactagaatacgtgaactctcgagtgatctcttcatagaacgatgtgcctcgtgcatggagtgagggacaaattcaggcgtgaccttaagcggtgcaacatatatcatataggcatgcatgcataa

SEQ ID NO: 130978 - DNA, 422 bp, Glycine max
gttagccggaacaggagtgagtatgagcagctacgttctgagaatgctgccctcaaggtgattttgaaatgttgatatgttttgattattggcttttttgctaattggcaaacactggtgcccataccaagttatacctactatcaataacactcatatttgaaccctggtttggagagaaggaaaaggcctaaatggactaatatgaccattctagttttcaaattccgctcctactaccataaaaggttcattcaaagactgagccagctatctgattacaggatagacttggggagatacctggtgtcacgacacctgggaaggaggatcttatgtctggccagaatgatcagcatgtgagtaatgacactcaacaaagtggtcagacagatgttgtgcatggtgttcattaagatctt

SEQ ID NO: 130979 - DNA, 372 bp, Glycine max
  unsure (1)..(372): unsure at all n locations
ttggagaggttaatgaaacattgagacgtcgctctccatgagaggatggatcaaatggagaatctagatcataatgaagaagaaaggatgagaagagggaatgatggtgctcctacacaaaaccgaattgatggtattaaactcaacattcctccatttaaaggaaaaaatgatccggaggcctacttggagtgggagatgaanatatagcatgttttctcatgcaacaactatgaggaggaccaaaaggtgaagcttgccgccacggagttttccgactatgctcttgtgtggtggaacaagctacaaaaggagagagcatgacatgaagagccaatggttgatacatggacggagatgaataagatcatg

SEQ ID NO: 130980 - DNA, 387 bp, Glycine max
gcttttggagtataaacatgggaccaatctcattttatttcaaaaaggaagtcatatctagtcaaggtctgagagaccatacaagtttcctaacgatttctaattatgtgggccattaagtctatcatatgctgacaatagccgagaagcccatgaatctcttcgggggcggagtaggtgtctgccatcgccttggccttggctaacaatcggggaagttcttgactcccgttcaaggtaagagcaaaccgatccatccacatggttgcctcttggtgtaaagagtcgatcacccttcctctagcctctttttccgcgtatacttgggcatactcatccgcgattctatgctcgtgggccgaggctagacctaactcttcttggtac

SEQ ID NO: 130981 - DNA, 440 bp, Glycine max
actcagcttaagtatgcccgagtcattcatacgtatgagatgttgttttagtattggcgatcagaattgacattccttggattatatggttgaaccaaactcatgcttttacaaaaaggttcatcaagtcaagttgaaatatggaagtaaccgtcctgcaaaattggggcaaaagatgaattgagtcacatcactgcttcgtctactgccaaacatatttaggattgttgatgtccttgttacttccagtttcaccttgacaaagatgtcatggatcatgttgaaaatctaaattgattcaaccccatatcctgcgtaaaaattcgcaatacttcaactatacatcattcgcatacatccatgcttttcattggttgcattgctcattgcattctttccttgaaaaatataataaaataaaatgaacttaatcattgtta

SEQ ID NO: 130982 - DNA, 295 bp, Glycine max
aatgacctatgtcggtgaatagtgtgaaacttatttaaaaagaacttaattgggtaagtgttaccaggaagtttattggactaataaattgagttttatgaaatgcataataagctacttgcacaagtcttaataagcctcgataaatgctgcattatgcaagtatgcaataaaggagaagtttgaaaattgaaacaacggtttctgggggagcttgatcaatgcatcttctttgttacagataacatgggcttagtctgcagctgaagtcgtcggtttcctgaaactgatgctg

SEQ ID NO: 130983 - DNA, 417 bp, Glycine max
  unsure (1)..(417): unsure at all n locations
tgctcatgcgnttggagctgaattcctggaagaggcgctctacggattcgaatgcgaccttggagacggcgtctgagcggtcgagcatgttggagccgacgcgggcccaccaggcagagacgcggtcgaggaggttgacgttgttttcgcagagggtaacgagatcgtcgcgggcgaggacgcagcctatggtttcggtggccgagaagcggagggagtcgctgggggagtcgaagcagtcggagatttccttgttgcagtcggagatgagcttggagaggcggtatgaggggatggcggcaaggatggagactgcggcggcagcgacgtctgtgtcggtgaagtggaggtcggtgcggatgccgccgcatactgtgtcccagagatcgggagtgaggcgggtggagcggatgatgt

SEQ ID NO: 130984 - DNA, 442 bp, Glycine max
catgctatctatcatctccaagtaccaagaagagttaggtctagccgcggcccacgagcatagaatcgcggatgagtatgctcaagtatatgcggaaaaagaggcttgaggaagggtgatcgactctttacaccaagaggcaaccatgtggatggaccggtttgctcttaccttgaacgggagtcaagaacttccccgcttgttagccaaggccaaggcgatggcagacacctactccacccccgaagagattcatgggcttctcggctattgtcagcatatgatagacttaatggcccacataattagaaatcgttaggaaacttgtatggtctctcagaccttgactggatacgacttcttttttgaaataaaatgagttggtcccatgtttctactccaaaaagcttgtgcaatcaaatactcctccatttatctctag

SEQ ID NO: 130985 - DNA, 455 bp, Glycine max
  unsure (1)..(455): unsure at all n locations
gctttgaatgcttccgtaaaattcctaanactntgagtaatcctatttcacctaatattggtgaaatagaagaggaaaaagagggaaatcaagtcctatatgcttgcttaaagctttcgtaaaattcctaaaaccctaaataacatatttcacttcatatgggtgagaaggaagagaaaaaagaagaaagtcaagtcctatatgcttctgtaaagcttccgtaacttttccgtaaaattacgaaagaagggggtgaacttatcaaaagggggggtgcaaataacaattttcaaaatttcgaatttggacccttctagaatatttttgaagcagggttgcttcctgaggaagcaacccagctcgcctgggcgagccgggtggcaacttcctccgcctttntcctatacantaggcgaaaaagggtgttctaaatatccctcagcccnctggctatg

SEQ ID NO: 130986 - DNA, 438 bp, Glycine max
  unsure (1)..(438): unsure at all n locations
cgagctgcactacgggcagctattgaacattttatctnaattttttcccannaaggagcctcttttgaagctaccatgtgcaaacattaacacactgcacgagaatcataaatggaagtcatgtgcaagcttcacgagtgctaaatattgttggtttttgcactttcattggtgcacattgattgaacaacacacttgattatttcagcttcatgtaaaatgccaaaatggtggcagtttattcagcattttctagcactttaactgcattctctgcacctaatgtttgtgcattaaacaagatttttgcaaattgcaatgaaaatgcgaagcaaaatggaaaaacaaatgcagcttgaagtgcatgtngaagtcaagaagattcaaacgactttaaagtcgttgaactgcctatgacttcactattcatggatgaat

SEQ ID NO: 130987 - DNA, 466 bp, Glycine max
  unsure (1)..(466): unsure at all n locations
tctgaaagccatgggagggttggtctgttatacttttctacaaangctgacaagaggaggatttctttataaaggaaagaaagaaggttggctcgtttacaagggcgaggaccacaggtggagagggtccctatttgtcacatcaacaagagctttgtcagcgcatggtggatgcatgaagatcaagctgctatgctggacgaagaaaccaatcaagatcaaccaaattgggtgcatccatgttcctcgagctttgaatagaaaaattggcagatcataaagcgacccaagatttctgtgtcaaatccaatgtaatcaagtagtttggaccctattgttgggcctaggctntanggtctgcttctcttgatagcatactttcttaatgtcatagcgaatataatatacaacattttattgatatgttccctgtccaccttatacgttcattttctacatattattt

SEQ ID NO: 130988 - DNA, 359 bp, Glycine max
  unsure (1)..(359): unsure at all n locations
ctaactaattctagaatattctacaatctctaacagaagtagttatatgcttcccactccatgcatagctctacccgattcgcacgtaatcttccatgtacgttggagctttcgttatcctcttaggcctctcttcatgttgctgcccacttactacctgcaaccccactccattcataagtttaaccaagttgtcatggctagggtctgcagtttttttntttttttttttgcatatatgaatactttntttaaaagagggatgtatgcacaaaatggtaagcgacaaataagacgtctgaactgaagtatgatgagacggtcgagagctcatcacagaggaagatgatagagcaact

SEQ ID NO: 130989 - DNA, 494 bp, Glycine max
  unsure (1)..(494): unsure at all n locations
tagagagacatctnttatgatctaaatccaatatatagacttccccaataatctaacaagtagagcatactaccaaggagcacataattattagagcaatgaagactctatcctcaatttagacaagacatggttacctctcgtacttaacatgaataagttttaggattatcagatcaactttaagacataacgagaaaaacaaatgtatacttatcactctttgtagcggtaaatattaattattaatttattaatttttgtagttaaaaaaattaaatccacggtttttctcttacttatctctaaaagaaatcagatagttaatatcagatgacttttctaaacatgcagatatttgaatgaaggagaatgagatatccattaatcctagcataatactcattctattctcattattgtagtctaacataaattgtaatgttataatttaaaatacattaaattagataatgctagatcaccatataatc

SEQ ID NO: 130990 - DNA, 444 bp, Glycine max
tcaatggagaatgaagaagaagaaagctacgtgagagatgtgagagtttatgcttctgaatttctgctctggctgagtgatgagagagaaaagctctttggttgtaaaaataaaaagggttttcccttttttccattattttattcaagctctgccacatgtccctattcgattggagcaaaagggcccactttctctttttgactgtgacccatactcagtcacaaaagtgagaaaaatctgaccttcgaaacgctaaaatcctgcctcggtttgcgtgtcgtttctctgattccagtttctcgcgtttctctgcgtccgccggggccagttttcgaaagcaagcaatatatatatcataacgctcagaatgaaaccccgagtgtggtttaaaggttgttttcgttaactttaagtcgcacgcaacacgatgatttctaacta

SEQ ID NO: 130991 - DNA, 396 bp, Glycine max
  unsure (1)..(396): unsure at all n locations
agcttatactatgaagctgtacaattattttacattaaccatacattatttttttctcaaataattatgaaactaatntgtnaatgtaaaataacatanagagacgtttttgtttataaaagatattcaaaaaaattattgaacataaaaatgaaaaaaatctaataatttataaagtattttattntaataagttaattagttgaagaagtttatgagaataaattagaatttactaaacatattttattttgtatcaaacaagtttagttggttaaacaagcttataaaaacctccaaaggtgactngacttattagttactattaaacacatctgtcattggtttgtatatgttaatattaataaatccacgtatctgaattagtcgcatttt

SEQ ID NO: 130992 - DNA, 474 bp, Glycine max
  unsure (1)..(474): unsure at all n locations
taagctccttcaactgcacaaggctctttattttgtttatttccttgnggaaccttcacccgacgaagacactgacaaaaacttatcttctccttcttggacaaagtatggcaggctgggggcaagtaaattttcttcccatcagaccttggatgcaactgtgatctttatacccatatcagctagatcttgacgggtattcaagccatccgtcgtcttgccttgaatgttaaggagcgtcccaatcacactgtcacaaacattattctccacatgcataacatcaatacaatgtctaacgtcaagatcacatcagtacggaagatcaaagaaaatggacctcttcttgcatatgcaactctgcctcttatccttctttagggtcttcccaaatacagtgttcaggtgtagaacccactgatatacctgctcaccagtcaacggtatttgcgcaatatcatgctcttgacttcc

SEQ ID NO: 130993 - DNA, 292 bp, Glycine max
taaaccgaggcccaccaaggctgtgtcaaatacacctttcgaattattcaacggatgggacaccacggttgcgacatatacgccgctggggatgcccgtctgaagcaacaatctataatccacaagagaagaaactagaccccaagactatgactggggatttcataggatatgccgaaaggctaacggggataagtactattgtccatacaacaacactatgattgtggaatcaacgaatgcaaagtgtcttgaaaatgacttgatcagtgagagcgaacaattcagaaca

SEQ ID NO: 130994 - DNA, 247 bp, Glycine max
caattgtgaacatctagatatattatgcacctgaatcgggcatctgagtgaaaagttatggcatatgagttagccgagagcttcgttgttcgatattgagcatctcgacatattattggcctgaatccgacattccagtcaaaaattatggcgaattaaaatctccatgcgctgccgtgtgtaattgctagcctctcgatatattatgcacctgaatcggacatctgcgtgaaaagttatgccatat

SEQ ID NO: 130995 - DNA, 407 bp, Glycine max
  unsure (1)..(407): unsure at all n locations
catgccagcttgttatctggtggaggagaatcttctctttcatgttatatagtagatggngcctcttctcacctattctcctttatcttccactgcaactccatggctgaaaatcaccattgaaggacctcatcgaagcttaaagatccagcctcatagaagcttctcaagcaagcttccatcaagtggtatcagagcacaagaacttcaagtaggttgctccttaaacctccattaatttttagctttaccttctcctccattggtggttcttcattttctccatgtatctcctcacatgtcttgagttgaatgttgctaacatgaatttttagaatttccactgattaaactcgctatagaagctagatctgattntctatggtacaaatttcttgttcttgttc

SEQ ID NO: 130996 - DNA, 332 bp, Glycine max
agcgagaattaacaacggaagctctcagaaatcaaatgttatactttatttctgaggaccgattcacgcgcgtaatatatcgagacgctcgaaattgaacaatggaagctattgagcaattcaaatggtcataacttttcacttggaggtctgtttcacgcacataatatatcgagactctcgaaattgaacaacggaagctctcgagaaattcaaatggtcataacttttcactcggaggtcagattcacgcgcataatatatcgagacgctcgaaattgaacaacggaagctctccagaaaatcaaatggtcataacttttcacacggag

SEQ ID NO: 130997 - DNA, 446 bp, Glycine max
  unsure (1)..(446): unsure at all n locations
acctgcggcatgcaagcttctggtgggacatcttgactngcttttcaatctgactttcaccacatattctgccttcttctattttcagattgggaatgcctctaacagcacctttgtcaatgattttcttcatgcctcttaagtgcagatgtccaaatctttgatgccatattctgacttcatcttctttggaggatagacatgtggaggagtaactggtttcttgaggtgtccataggtagcagttgtcctttgatctgctgcccttcattagaacttcactcttctcatttgtcaccaagcattctgactntgtgaagtttacattgaatccttcatcacacagctgactgatgctgatcaagtttgcagtcagtcccttcaccagcagtactttgtccagactaggaagtccatcatggactagctttcccattccagtgatc

SEQ ID NO: 130998 - DNA, 478 bp, Glycine max
tgattacattctccccctttctcaagcaaattctttattcttcttgacatcatcaaaatcttgatgatttacacttaccgaatgcatgctagagctagagtaatgagtgaaatagaggaggtgcaagagcagatgaaggccgacatggaggccatgaaagagaaaatggcgacaatgatggaagccatgatgagtatgaaaaaaataatggagatcaatgcaactacagctgttgatgcaagtatcgccacagaagtggacccgactcacccatctggcctcaatcaagtaaatcctctcgtctctgatatagtaggacagggaggcgaagcgttaggaagtacggatgacccctattttgtgcaggttcagaacaagcattccttcccacaatatggcttgccttctaactatacactgcccaatgttgcaccactcccaatgagaatgtcgacaactccactcccatactcattga

SEQ ID NO: 130999 - DNA, 245 bp, Glycine max
  unsure (1)..(245): unsure at all n locations
gctctctctcgaataagccgangaacattatatccgtgaagaaaatgcaagctgatgcgccttcctcacgatctcgtcacgtctgcgagagtatatacgcgaagatactcgagcgatctttaagatttatcgtacagacttccttctattcagactatctctcggtgagaactctcaaaccaagcttatcaattcattctctgttcccgcggagagcgcacatcatgaacatgaccttagattct

SEQ ID NO: 131000 - DNA, 465 bp, Glycine max
  unsure (1)..(465): unsure at all n locations
agcttcccattccagagtcaaaggtctcctttcgtgttgttacagagacagctntaccaatgggggtaaaaggattggagttcttctgccttcagagaatctagtgtatctacaaagttctgcactcgacgcacctgttgacgggtgaaaaagctgatgttcaagccttcaaagataatttgaaaagataatacaactatgaatgattatcaaaatggtatgttcatcactcaccaccatgcacaaaattaagcaaaaaaaataaaattatttcactccatgcaaaattaagcaaaaattatatttcataatttcaagtttcaactcccaatgcacatcaatatggctaactagacatgatttatggtcatattgatgatgtagcacgatctatgttacagaaaaacaatgatgacaacagagaagtgtaagacacgaagacatgantagatgatccacatactt

SEQ ID NO: 131001 - DNA, 488 bp, Glycine max
  unsure (1)..(488): unsure at all n locations
actcaagcttgaattgccagagggtgccctattgatcatgtnnaacatttctcattgtttaaacccttccaccaatatgcagatgaggcctacataccattgcctttatcagaaaccattattgataatcaacccgttgtcattcccttggtcatttttgggacacgacaagactcggtgagtgttgattctaaagtataggttctggtctagcgaaagggctttaagtctatgactatgataattgtctctaagtctataactatggtgtatggtgttcctcgaaggatcatgaattggattaagggttgcataacatggagataaggttcttgcctatctagagaaagtgtcattgccaaactttgactatatactctgttcatatccaaccaaagtttctttgttatgttgtgctttgtggctattatgctntttctttgttttaatctgcgtaagattctagatatcgattaatgaagaatcta

SEQ ID NO: 131002 - DNA, 434 bp, Glycine max
  unsure (1)..(434): unsure at all n locations
agcttaagcagaatattatgactacttatttacctaggcatagaaacagnaaagccatgaaaagccaaagaaaagtatagccttacttattcacctacctagcttctacttctaccaaagcaatagtaaaaacactaacaacatacaaacactgtatcagcaagaccaagattgatcaatgaaatactcaggggagtgaaataccaacttactatttggttgtaaaggtttatcttcaccagaaaagtcattcccgtggaattagcactagcaaacagtatttacctctgcatcacttcatttctcctacttgcctaaaaataacacaaagtagtttgtggtattttcacttcaaaacagttcgaatataaaataatcaacttcacgaacatccaattgtcataatttcaacaaacatcacacaaagtactttg

SEQ ID NO: 131003 - DNA, 284 bp, Glycine max
  unsure (1)..(284): unsure at all n locations
agaagcttaagattgatatggtatgtctcttaacccatatntctaaatgtgcatctccatgtatcatgtatgttattaaatattagcatgcaacattcttgtattactaaactacttgccttattggaaaaattgtttatactacttangctattgtgttctatgaacttgccttccacttcaatccgcattgtgcggaagcttgtaacaatctaggtgttatatataaagatcgtgacaaccttgacaaagcagtggaatgttaccaggtaatgacaatcatg

SEQ ID NO: 131004 - DNA, 352 bp, Glycine max
  unsure (1)..(352): unsure at all n locations
ctgcagcttgcaaggtgaaagcttcaatttctttgttaagtattgattatcngntctgtttcaatggttaatatgcataatggtggccacattgcacatggaaaatagtcgagtcatctgaatttttatgttaacctagcaaggaactactgatttctgtgtaacattctatattagtattaggtacaactttaatagcaatttttgttatagcatcatgtaatgtatcgagatttaatgatgccaagtttttaatgccatacagagttcaaagttgatgaatgacttgaaggaaaagtgctatcaattggcaaaaaataatgatgcagatcacatgaactgaagatgagat

SEQ ID NO: 131005 - DNA, 176 bp, Glycine max
actcagctttgaaattcagattatagcaaaagtaaaatctttaaaggatgtttcagcttggtcaacaagtattattatttgattctcgattaagattgtttccaggtaagttgaaatccaagtggtctggaccattcatcatcaaagaagttatgccacatggataggggtgggta

SEQ ID NO: 131006 - DNA, 302 bp, Glycine max
  unsure (1)..(302): unsure at all n locations
aacagcctttataggtttagactgacttaaactaagtttcgtcctcagatccctcttggtggactagacttagatcaaacaacattattgtaacaacatatttgaaaccaaaacttaatctgtagatccctcatttaagactaagtttcaatcctgcttcaatcaagttctaaggcaacagtacatttcccaatgctaaagtcacctaactatgcacacaaatggatgatcagaccaagagcatacnaaaattaagtactgaaagaagcattgaacacaataaacacaacccattagatatt

SEQ ID NO: 131007 - DNA, 427 bp, Glycine max
ttgcagaattggtcttcgccagtgaaaggttatttgtttgtccgaaaagaggcaaatttgatcattctactatgacgactgagaaaactggggcaaatgaagagggtgagaaagagggagaaacccatgctgtgactgccattcctatacggccaagtttcctaccaacccaacaatgccattactcagccaataacaaacctcctccttacccaccacccagttatccacaaaggccatccctaaatcaaccacaaagcctgtctaccgcactttcaatggcgaagaccacctttagcacaaaccaaaaaacaccaacaaaaaggaattttgcagcaaaaagcctgtagggttcaccccacatttcgttgtcatatgctaaacttgatcccatatccactcgataattcaatggtagccataaccc

SEQ ID NO: 131008 - DNA, 409 bp, Glycine max
gatctctagcaccgcggctgcagctggaaggggcttaatggggatttttagagtatagggggagcacgaaattgaaggaataaaagagggagagaagtggaactttgaagtgtgtctcataagactttcattcatcaaagttacaacaagtgttacacatgcttctatttatagactaagtagcttccttgggaagctttcttgtgaaaacttccttgagaagctttcttgtgaaaacttccttgagaagattctttgagaaaaattccttgagacgttatagcttagctacacacacctctctaatagctaagctctcctccttgagatgagaagctagagcttagctacacaccccctataataagaaagctcacccccattccaaaaatacatgaaaatacaaaaa

SEQ ID NO: 131009 - DNA, 470 bp, Glycine max
  unsure (1)..(470): unsure at all n locations
tgttagagatttaggttcttcanagattgtgtatgccattttacatgggttaactntntcttcatcttcattggacttgtagtacttcttcttgtcctgagacttctccagttttggacattcaaatttgaagtgtccatgtttcttatattcatagcaaattatggagctattttatttgtctattttccttgaacaccttttttgaggaattcttctatctggatccacctttgcttttccacatcttgcggatctttcatgagatgaaggcgagctcatattcatcagacaattcctcatattctttatcaagggattntttagctntaatggctttggatgagcttttgaatcctttctctctggatgatgaagcctttttggtcttctgactgttgagagcccgagattntcctttctttagtctttcatctagctgaatttcttattcattaaccttgagagta

SEQ ID NO: 131010 - DNA, 420 bp, Glycine max
  unsure (1)..(420): unsure at all n locations
agcttatntacagtaaggatctttaggcatctttgttgntgagttgagataatttgtggcaaattgcctaagggatagcccgaggactaaagtacttgcataagggatgcaacactcgaattttacattntgacataaagccacaacattcttttggatgagaagttctgcctcaagatatctgattttgggctagcaaagccttgtcctagaaatgaaagtattatttccaggtctgatgccagaggaacattagggtatgtagctccagaaaatttggcagaatttcacacaaatctgatgtaatcttccactttaaatttaaaccacctaaaccttaatggtaaaaatttaattntcattatgcattaaatgcatcttatctttgacttgaaactctacaatntgaagggtctgggg

SEQ ID NO: 131011 - DNA, 458 bp, Glycine max
  unsure (1)..(458): unsure at all n locations
cgagggaatttagggaactattagagacactgctatctcttgttaactacacacataaaccctcttagaggtaagggatgaattcatcgcaattggggatagaatgaacataaatagggatccttagaggattaaattgaggcttattttacgatgtttattgaattataattttcctttacaattataaatacaatattgttttgtttggcggaccaattgatgtcctgatgcaaattggttgataaaattgagtgttcttgttgttttcgtatttttgaactatgattttgattcatttattttaatatgattgtgaaaaattgtttgaggggttttactctccatgttgtgaaaaacattnnttgtataaattttatattgagattatggaatggtgattcaaattgtgagtaagtgacanatngaactcgtgatgaatggtgagatacatgtgt

SEQ ID NO: 131012 - DNA, 379 bp, Glycine max
  unsure (1)..(379): unsure at all n locations
tgtatctattagtgagttatggacgcttcttgttttcttgcaccaaccaacttaagtcttatctgcttcagcattcccaatctctataactctattcatgcaacttttatataattgtagcctaaactgtatgttataactttgcgccttaatatatatgaacatgaatttcanggtcactataaccattaatttgctgctaggaagaagatcaccaatttgttatgtgaaatgaatgcatgccatgtagcggtatatattatttaattgtttgaaaaaacccttttcattccaaatgatgatgtttaagaaattatattgccatgtcttttcatgaatataaaacttatttcaatttgcctaataaaatataatctat

SEQ ID NO: 131013 - DNA, 490 bp, Glycine max
  unsure (1)..(490): unsure at all n locations
ctacgcttaacatgctaacataaacgagagaaatgcaagtcctaattgattntcattaaatatgaactttccttcacaaaatgctcatttcaattgaagtatgtgaatagatttttttccccaaccttttctatatgttttatggttactgattacatattcaaattatacagctatgacttggacagtacaaaagaagaaagagatgctataagaactcaaaataggtaaacatatatattggatccccaaattcatgctcgatccatcatgtttctccagcatttaaaacttaatttgtgtgtacttccctcttctgtttgttgagtttagcataatgttgcttttatgctaaatccttaaatgcataaaggagtatgagaaactccgcagacaatgccgccaactactaaagcacnaacaatgggagcttagttaaatgaaattggtgaatcagctatgaacgagatagtgcaagttntatcatgtg

SEQ ID NO: 131014 - DNA, 360 bp, Glycine max
  unsure (1)..(360): unsure at all n locations
agctntatgttccatctccacaggtaagtgtttagacttgtcataaaccatttgaaatggcgataagcctatcggagtcttaaatgcagttctatatgcccataaagcatcatccagtttgagtgaccaatccttcctagtagaggccatagtcttttctaaaatcttcttcaattccctatttgacacttccgcttagccattggtctaagggtgatagggtgatgctaccttgtgtgttacattatattgcttcaacaccttctgtaactgattattgcagaaatgtgtgcctccatcacttattaaaattctgggtaccccaaatcgtgaaaagatgtttttctttagaaacttcac

SEQ ID NO: 131015 - DNA, 467 bp, Glycine max
  unsure (1)..(467): unsure at all n locations
tcatgatgatgattcaagtatgaatcaaggtagtttgattatgacaaattgcctaaaagaatgatttcaagattgagtcaacaagttcaagatcaagattaatttcaagtttcatgagaagaaatcaagaagattcaagattcaagagaagtttgatttcaagattcaagagaagataaatgcaagattcaagagaagaaatcaagaagacttcaaaagggaagtattcaaaagatttttcaaaaaccaaacatagcacaattttgtttttcaaaagagtttttctcaaaattttctaagttaccaaagtatttactctctggtaatcgattaccaattacctgtaatcgattaccagtggtaaagtttgatttcaaaagcttttaactgaatntgcaacgttccaaatgtttttntaaatgatgtaatcgattacaatatattggtaatcgattactagtgtatct

SEQ ID NO: 131016 - DNA, 417 bp, Glycine max
  unsure (1)..(417): unsure at all n locations
ttgacattctcccatatagacatattcaattattattgacatgaccatgttactgattcatcttgatgatgataccttgatgagtgcatatgctgcatcatatgtgtccatgcttgaatttatcatagatttctgctaggnggatgtggactagacaacttctgtgttcttttacacaaaaaaaaaactattgattcttatctagagatcactatcatgtatctcaagagacatattgagtcgagaacaggcttagaattctatgcccagtaaaaccaagcgactgtgcagatgatggtaataacacgagtgaatctctatagtagccctcacgattattaaaggagatgagttactactattcccgagcttataaaccatcagttagttcctgatttacaaaattgatagatgact

SEQ ID NO: 131017 - DNA, 363 bp, Glycine max
  unsure (1)..(363): unsure at all n locations
cgtgtgtagctcaccatcggtttatatagatatattgggactgngnctaccaacattgacaacatttttttctccgtcattgacgtgccacttgagctgctaggtcttttcacctttgggcgtattctatgaaagatctgtgcccccttttttgcacatgtttagtagttgcatcctatccgaagccattataccgacactacctagcgaaggcaaccattaagtccttccaggaatagactcgggaaggttccaagttagtgttccaggtaacaactaccctaataagagctttttggaaggaatgtatcaaacaattcttatctattgcgtatgcccccattttacacaatacatttttat

SEQ ID NO: 131018 - DNA, 450 bp, Glycine max
  unsure (1)..(450): unsure at all n locations
ctaagctaggacaggtccgttacttaactatatccaacttttcgtgtttctgatagacagaaacattcttgactctctattnttaaatatccactttcatggccttgacattaaagaaggatcaattccagcagctttgatctataggattcagtacaaagtaatgaatacttgtgcatctagagtcctgtttaaacctcacagaggagaaacaactttgtttatcactgatatgacaaaggctaacatttctctcccgagaaaaataaaatgggatgaagtaactcttcccgaaagatgggtcatggataaggccacaccatctattccctgacccgctccaaccatagagcanattaagcaagataactccggtaaggtagaaataaccttcaataactaaaattctttttcatcaagaatagaagcctctacgtctgaatatgagtc

SEQ ID NO: 131019 - DNA, 464 bp, Glycine max
  unsure (1)..(464): unsure at all n locations
agctntacaagccacttttacatgatcggtctcgtgggatctttgaaaagatgtatggcgtgtgctcgaagcttccattcccgagagcatttcttatttaagcatttcagcctttgctttcatgtagcttaggaaaaacgccatttcttcttctttctctttcaaatccatttctaacatcccaagcactttatccatcacccacagccaccattagccaccataaaccatcgttgttctccattgaaaccccacaccgagaggaacccttcaaccaaagcggaatcttccaacttagcttgcggtttcggtagagaacaaaaccctaatctgacctttcgttttctttcgaggtaaccatggttctacacttgtttctgtagaagcaaagcttcaagcaaggcttcatggtgaatgtgattcaaaggtggtttgatgatnacaatgatgacaacaaaagatga

SEQ ID NO: 131020 - DNA, 498 bp, Glycine max
  unsure (1)..(498): unsure at all n locations
actaagcctctgtggattggtctntgagggcgaaatgatcgaagtggttctgattagaggcaaatctgatcatcatgttntgataaatgcaaaaactggggcaaatgaagagggtgagaatgagggagaaacccatgctatgactgccattcctatacggccaagtttcccaccaacccaacaatatcattactcagccaataacaacccttctccttactcaccacccaattatctacaaaggccatccctaaatcaaccacaaaatccacctaccacacaacgaatgctaaacaccacctttagcacgaaccaaaacaccaaccaaggaaggaattttgcagcaaaaagcctgtagaattcaccccaattctggtgtcctatgctaacttgctcccttacctacttgataatgcaatggtagccataacccctgctaggtttcctaacccttcattnttccgaggatacgactcgaatgcaacatgtgcatatcat

SEQ ID NO: 131021 - DNA, 353 bp, Glycine max
  unsure (1)..(353): unsure at all n locations
agcttcatggtgaatcgattgtgattcatttgtgtnttgatgataacaatgatgataacaaaagatgatgccaaaggtgatgacaaanagctcaaagatcaatcaaagaacaactcaagtgaatcaaaggtcaatcaaagaacaactcaagtgaatcaagaacaattcaagagttcaagataagaatcaagaagacttcaagactcaagaagaaagtctagagtcaagaatccagattcaaggttcaagatctcaacaatcaagatcaagattcaagaatggagagaagaattaatntagataagtttaaaaagtttttcaaaccttgaatagcacatgagtttttgacaaaa

SEQ ID NO: 131022 - DNA, 438 bp, Glycine max
  unsure (1)..(438): unsure at all n locations
tnctcggggccatttcctgcgaaggcaaacttttggaatgttagttntaccaagaaatgctactcttaaaacaaaaatggcatacaacctcctccaataaacacaaacatcgatgtaaatttagagcaaacttatacacatacttctttacgaacgttcacttgcacaagacattcttataactaagaaaaatgcacccatgtacaatcagggcaccttcgttacctagattattcatatgtacttccaaggtgtatttgctacctacatcacatgcacttccttggctaaattacatacatgcatactcaaagcatttggggtaccaaaaattgcacatgtgcacattccggtatttctaatacttatgcatatacaaactttgtgatgaatcttggctatctacacaataagggtgctacatttcatgctttattc

SEQ ID NO: 131023 - DNA, 295 bp, Glycine max
ccaattggcgtcctaattttcggctatcctattaggatgcgacatcatggcagttaagtcccaactttccatcgtggattcagtcacaaaacaaactttaatatgttggactgtctaacacggggaatttagattctattcccacctggttctgggaaacaccttctcagattgtgtatttaaacctctcttataatcatatccatggtgagattgagactacattaaagaatccaatatctatccaaactattgatctaagctcaaatcacttgtgtggtaaattaccctatct

SEQ ID NO: 131024 - DNA, 457 bp, Glycine max
  unsure (1)..(457): unsure at all n locations
ggtaagatttctaagatcattntccttgacttctctntgtagatgantgccatgaatatgaagagatgacaatttagagatattcatgagatgacaatttagagagtgatcaaagactttcaaatcgatttccactgaatttatcaatagacagatcaagatatcttaatgttgaaagttttccaaatcatctagaaagggcaccaccaattgagttgttgtaaaaatctagcatgtcaatatttttaaaaactccaatttaatccgtcaaattgggttattttatcatctagggacaaattttttctgtttttttttctcatgtgggtacttttcaaatcatgccccagaagtgaataagtggtattataatatttaagttacaagtcgtaatatgacttttttttntttttaacttanatcgtaaaaatatttatgcctccttttttttattact

SEQ ID NO: 131025 - DNA, 254 bp, Glycine max
atctgcaacaaactcagtaagttagtctaaacctaagaggctggctaatgggcctatccaacagaggatctgagacaagctgattgattcgtcgacgaggatcaagttattaattagctcaacatagacatagagcatgattgttaaaaattatttatatgcatcactgttgtagaagaccacttctcctacgtatactttacttgatttatatttcataaagttattaatttgttgaatataactacagttct

SEQ ID NO: 131026 - DNA, 476 bp, Glycine max
  unsure (1)..(476): unsure at all n locations
tgcctgtccgatgcagcagtaaggaaggcctgattgaattgtggagtggttacnagcccggaatgggtntatgcaaggacaacggcggcataactagcctgataaacaccaaaggaaatcgtgggaagtatgggttaggctataaacccactcaggcagatataaagagaagcattgcggaaaggaaaagcggaagtcaaggttcgcggttgagacaagaaggcaaaggaagcccaccttgccacataagtaggagctttataagcgcgggtctaggggacgaaggtcaagtcgttgcaatatacgatgatgatgttccgagtgcattgaatttggtacgaccgtgccctcctgatttccgactangaaattggcgagtggaggagcgctcggacatntacgcaacaagcataatgtaaacctttacgggtttaaaagctctatagttgggcctaggctttagagatttcttttgt

SEQ ID NO: 131027 - DNA, 334 bp, Glycine max
  unsure (1)..(334): unsure at all n locations
acacaccaaccagcttaagngcctagccaataagaaaaccaattaactattttatccgccagcgagactcttcccctctccgttcgtaactccgacttaaaatgtaacaacgggaaacaagtctacgcaaaaaacaaatacattaagaatatatcaacaagagattcaactcattacgagcgcacaatggtctgcacacataacatccaatgcttagtcacagagcattgctgcttctaatcttagagcggcagaaaccatgaaagggaatcaaacctgcgtcaaactgacaatgatgctacattgctacaggtgaaactccctacgaataaat

SEQ ID NO: 131028 - DNA, 421 bp, Glycine max
  unsure (1)..(421): unsure at all n locations
agcttgcttgtggggcttctatataggcttgatatttgagcttcaatgaggtcctttaattgtgagtttccaccatggagatgcagcggaagacaaaggagaagaggtgagaggaggcgccatccactagggaataagccatggcagaaggagcttcaccaccaagatgaagcctggataagaagcttggagtggatgcttcaatggaggaaaagaaagagggagagaaagagagaggggggagcacaaaattgaaagaagaaaaagggagagaagttgaaatttgagttgtgtctcacaagactctcattcattaaagttacaacaagtgttacacatgcttctatntatagactaggtagcttccttgagaagctttcttgagaaaatatccttgagaagctttttgaaaaacttcttg

SEQ ID NO: 131029 - DNA, 466 bp, Glycine max
  unsure (1)..(466): unsure at all n locations
taagcttaatttcctgttgtgactagngagaatttatggttatttactttggagctgcgatgtactgattctggtgtccatttttcagatggctctcccaagcaccaagatgcctgtggtgttttactccatggtgttgctgatcatcaacaattgcattgaagcagtttctgtgagaggagattatcacagaactggattccatttccagccccttaaaaactggatgaacgggtagtatgaagactttatttctggacctgcattttcgtttttgcatatcttgccatattctgtagttagttttaatcattgactgcaatataaaaaactagaaagcaactgtgtctctttgaaaaggagatgaattaatgaatagattgtgatcttgtgtcaattcttgtgtggacatattgcagttgaggtcttcattagtctacgaatattgtacaaagtggtttaagtc

SEQ ID NO: 131030 - DNA, 356 bp, Glycine max
  unsure (1)..(356): unsure at all n locations
agcttgggctgtttcctctagtgaaananattangctatgcatttntctaaacgtgtagggctgactttgacatatgaaaatgtctagtggaccttgatatngaataattnntggcagcatcatcggttgagaatgannaagtttttactagtagggcatgatagtgcataaaactcacatccaaaaggagagaagattaaaaatatctattgtaattaagagagtacaaagagtaagagtcacacacacacactaaattatgtattctaatttccaataaagaaatgccaacaacatgttttctaatacaccttnttattttttgtaaaggaggggggggggggnnncctttttt

SEQ ID NO: 131031 - DNA, 452 bp, Glycine max
  unsure (1)..(452): unsure at all n locations
cgctttctcagtcgnctgaaggtatgatgtgttttagaaatttgtgatgcctatcgnagactattnttctcccatgtttaagttgtatgtaacttgtattttcttcacagatggggcatgcatgatgacccttaacactataaccgctaagattcccatatgttggaaagtcattaatggtacaaaaaagcattgcacgcatttcaaaggtctccttgcgaaacgcatcaaacactacaaccccctcgtcccacaactttctcagatcttcaatcaacggacttagataaacatcaatgtcatttcctggctgtcttgggcccgatatcatcatagacaacatcatgtattttcgtttcatgcacaaccaaggaggcaaattgtaattactagcagaactggccatgaaatgtgtngagtacttaaggtgccatatggattcattccatcac

SEQ ID NO: 131032 - DNA, 377 bp, Glycine max
  unsure (1)..(377): unsure at all n locations
tttcggcctacacctatactcgccactcctttcacaaccaattaacacaaacgaagtncttcctctactacttgtgtgtgtgtcagaccttattatcacagctacaaatccattttcatgagcaacggatcgagctcaccgcaaaacattctctcggctgtcaaacacctataaatcaatccagaataatttagtttcctacaacatatntcatttattaaatcactcacaatcatgaacattattacctaagaagtattgaacgcatccgacaatcaacatgtggtcattcacacatattcttctcatttcataatcatatcactttttagacttatacttcaacatcactgtcttgtcatttacaataatcaaat

SEQ ID NO: 131033 - DNA, 468 bp, Glycine max
  unsure (1)..(468): unsure at all n locations
tcaggttgctcattgactccagatngctgcaaagaatgtttattatctgaatggtgatctgcagaagaacatataccacagactcttgcaacaggtgtagatttcttattcatggcaagctgggttactaggttgaccaaggcatcaaattttccttcaagctntttatttttagtagatgaagatgaatccatgaccaccttatggactcctctaagaacaatagcatcatttcttgcactgaattgttgggagttggaagccatcttctcaatcaaattcctagcctcaacaggggtcatatcaccaagagctccaccactggaaacatcaatcatactcctctccatattgctaagtccctcataaaaatattgaagaaggagttgctcagaaatctggtggtgagggaaacttgcacacaatntcttgaatctttcccagtactcatacaagtttctcactaag

SEQ ID NO: 131034 - DNA, 359 bp, Glycine max
  unsure (1)..(359): unsure at all n locations
ggacactactcttaaaacaaaaatggcatacaacctcctcccataaatacaaacatcaatctaaatttagagcaagcttatgcgcatatttccttacgaacgttcacttgcacaagacatcctatcaactaagaaaaatgcacccatatacaatcaaggtagcttcattacctagattatttacatgtacttccaaggtgtatttgttatttacatcacacacgcctccttggctgaatttacatacatgcatanctcaagcattttttggtaccaaaaactgcacatgcgctcatcttggtatttctaatacccatacatatacaaacttcacgatgaatcttgactacctacacaat

SEQ ID NO: 131035 - DNA, 466 bp, Glycine max
  unsure (1)..(466): unsure at all n locations
atgcctcaatcatttccaaatatgcatgttaattangaagcatcttcaagaatcaagccaaggctattgtgcaagcaatcaatggggcaaaacacaccaaatgattatgatgatggatggctcaaattctcacaaaggtaaactcatcactttcaaattgagctttcaaaactatcatgacatgtagaggagattcaaggatttcaagtcacaaattttcaagaacttttattttcaaaacaattacccgtttcttgaacatatcctataattcaaagaaaaacatgcaaagtcgtacatgcacacagaattgacccaaaatattaaactagaaatccgacgaaactaacaacattaacaaattaacacaactaacaaattagcaaaaccaacaaaactagcaaaaccaaagaacactcccncccccccccatacttaaacaacacgttgtcctcaatgtagcaca

SEQ ID NO: 131036 - DNA, 388 bp, Glycine max
caaaaacttatcttctcctttttggacacagcatggcaggctgatggcatgtaaattatcttcccattagaccttggatgcaactgtgatcatatgcccacttcagctagatcttgatgggtattcaaaccatacttcgttttgccttgaatgttaaggagcgtcccaatcacactgtcacaaacaatattctccacatgcataacatcaataaaatgtctaacgccaagatcagaccagtacggaagatcaaagaatatggacctcttcttccatatgcaactcttacttttatccttcattagggtcataccaaatacaatattaacgtgatgaacctcctcatataccatgctacttgtcaacgctatcggccaatattatgctc

SEQ ID NO: 131037 - DNA, 270 bp, Glycine max
tataagcccatagtgcatcgtctagcttgcttgaccaatcctttcgggtggcagccacagtcttctccaaaatcttttttagttccctggtggaaacttcaaattgaccatttgtttgtgggtgaaatggtgaagctactttgtctgtgacattgttacggctcaccaccttctacagttggttgttgcgaaagtaacagcccccatcactgatgatgacccttggcacccctaagcgaacaaaaataattttcttcaaaacttcactat

SEQ ID NO: 131038 - DNA, 455 bp, Glycine max
  unsure (1)..(455): unsure at all n locations
tgagaaacaacattttcctgtatcagaagcttagaagcttcgagaagaaaaagaagacttagaaatttcaaagaggggaatagcttaaaataaatggctctagatagcatctaagaagaaattttgtataatagaatgaatgaatctcatttcattaacttgagagaaagttggttgcaaaagacatacttataactttctaaactgagagtagtatagttgtcaatagatgtacattccttaagttgaggttgttattggcaaaggctaacaactctaactaaactatttgaatagctttacatttatatactctaatagtgttcaattgcaaatggtgagtcagcaggcataaaaggtgatcgtgagagatgactntatatatctttctaaaaatgcgaattgttcactcattagatggttcaacaatattaccatattagtttactcattta

SEQ ID NO: 131039 - DNA, 326 bp, Glycine max
  unsure (1)..(326): unsure at all n locations
agcttggaaaaagatattttcaactatttttgaatgatttactgatcttaaccaatttttgagaaaaatgtgtgtacacatttgaagggtaaatgctgtgaaaagtttctctaacacccaagatagactctgatgaatgcacaaattgatagaagaacatattttggaaatactgggttgacttaaaatagggaaaatgaatcctgagccctagtgtcacatgaccataaaaacttgatgcttgagtgttcacatgggtgcatgcatgaccagttntgcataaaatttcctaatcatctttgttgcatgtgtatcatggaaataat

SEQ ID NO: 131040 - DNA, 399 bp, Glycine max
agctttcagaaagaagaatatataatgaattttttctcttataatcaagctaatgcaagcatgcacttaatcagtcacgcattacactaataataagcatggaaatcttagaaaaatgtccctgaacaaacacacagttgccaatttaaatattataagctctaaattcgagacattattgacaattgaataaaaactgaagacctctaatgtcaaccaaacatagagttcagtatatgtccagcaataaaagaaataaagaaaacagatatgcgtaagcaccaggactcaagctatttatgtatcgatgacatgtttgtgaattcacgttttttcttgtaccttgctatggagtaaatcttatttctgaccttccgggtactctatcacttctagtaa

SEQ ID NO: 131041 - DNA, 496 bp, Glycine max
ggaactatgaaactaagcttgaaggatgcttcaatggaggaaaagaatgagggagatattgagagaggggggagcacgaaattgaaggaataaaagagggagagaagtggaactttgaagtatgtctcacaagactctcattcatcaaagttacaacaagtgttacacatgcttctatttatagactaggtagcttccttgagaagctttcttgagaaaacttccttgagaagcttctttgagaaaacttccttgagaagctagagcttagctacacacacccctctcataactaagctcacctccttgagaagcttcattaagaagattcctaaagaagctagagcttagctacacatacctctctaatagctaagctcacctccttgagatgagaagctagagcttagctacacaccccctataatagctaagctcacccccatgacaagaaacatgaaaataaaaataaaagtccttatacaaagactactca

SEQ ID NO: 131042 - DNA, 462 bp, Glycine max
gacactataatactaagctttgaagataatacaaagtagtcactctctcatatttgtggaaactaaaacatagatttctcacttagagatcttgcacatagtgttgtatgtttgacattctactagatccacatagacgccaaaaatgcctgttaaagctcccccattttgaggagcctttttgatgggcattctaaagaaccatcacaatagccattttgatgtttgctgagaatgaatccatacttgatgaagttcatgtagatgttctattctgatgtagtgtgacttcatcaatcttaaaacttctttacaacttcaagcattctgaagttgattactttacaaatacttagtagacattaagttgatggcgtgtcagcgttttttccaatgttagactgagtagatatctttagtccttcaatttgatgcttagcattagtgccttgcatggacaaa

SEQ ID NO: 131043 - DNA, 264 bp, Glycine max
  unsure (1)..(264): unsure at all n locations
agcttgactcttgttgaagattttaccactttctagctngcgcctagggaaggtcatgttactcaattggggaatcaactacccaaggatgacagcatctgaatacaagtcatccgagaacatgtcaacttattttgctagtccataatagacatgcccggtatcacccaagcttccattgtcttaggttggccatatgtgaagatgcctagcccattgcctataggaagagaaagatggatgaaaggaggtgtcgagcagtgc

SEQ ID NO: 131044 - DNA, 243 bp, Glycine max
tcatatgaccacccgcactaactagctagcgtgcacactcaacatattgaagaacccaatttgttttcttaaacggaaatctttcccaaatagacaacctgcatggaaacttcctttatgcttctaatccaagccgcgctcattataactctatagatgcccttcaaatctctcacttcacatataccctcattcacaaagttttaaaacatatatgcttaataatgtcttggattccttcta

SEQ ID NO: 131045 - DNA, 267 bp, Glycine max
gcgggaagcattttctgtgttacccaagaaatcgctggccgaacgtactgtgcgcctttctgccacaactgctaccatctcaaggagcacaaccgactcatgcattattagagaaggactacctatatattatactatcgatgtgcatgtaaacatgaatatatctagttattatctacctatcgactgtaaagagacaaatcacaggcccatgcaatatagctagaatgccattgtttgcatgaataaaacagtctgatctaatgc

SEQ ID NO: 131046 - DNA, 348 bp, Glycine max
atcatcctactaggacgactgataaaactggggcaaatgaagagggtgagaaagagggagaaacccatgctgtgactgccattcctatacggccaagtttcccaccaacccaacaatgtcattactcagtcaataacaaacctcctccttacccaccacccagttatccacaaagaccatccctaaatcaaccacaaagtctgtctaccgcactttcaatgacgaacaccacctttcgcacaaaccaaaaacaccaaccaaaatatgaatttttgcagcgagaaagtctgtagaaatcaccccgattccgttgtcatatgctaaacttgatcccatattcactcgata

SEQ ID NO: 131047 - DNA, 385 bp, Glycine max
gaaaccgggggcttaaccggcatgttcttaaatacccgacaagcctcatccaatgtacatgctctagtgtaagccacaaccattgatgtgcatgaaacaacatttctctctggcatgtaacaaaacacagacaacgacaaattgggttccccacatttcccataagcgtcaattaacgcgtttgtaagaatcacaatccactccatgccaactatgactgccaccccatgaacctgacgcaaccattgaagattacccaaacaagcgcaacttcaactacgctaaccagcgtgaactcgtctaacaccaaacccttaccactgttttggatcacccgaaagacctaaccgaatcttcttgaagccgtgggcgtgagcccgaatta

SEQ ID NO: 131048 - DNA, 422 bp, Glycine max
  unsure (1)..(422): unsure at all n locations
cactgcgctatggctttggagtactttgtgagacgtaagaattaaaaggtggcagtgttcagcgtctattctcctgtagtagtgagagattctgactcgcaaaagtacttcaacagtctgaggctaaattttgagccgagtccttttgattttcccatccctgtttcttgtgaatgaagctctgctacctggagaaattgcatcagcctcctaaatgctgagtttgtacagtgattttagcgggagtacggaccagattcatattggatgtggatgagtgctgtataaactgtttgattcatctaagtcttgggattgcgatgcactgctgagcatatactgacatgttaccttcttggatatctgttatcatggtcagacctccagtattggcgaactgctctgttactntttctgatatc

SEQ ID NO: 131049 - DNA, 311 bp, Glycine max
  unsure (1)..(311): unsure at all n locations
agatgcacttgagggctacccacactttttagagttactcataatggcaccacacatatgtttccttttgcactgtctgagtgatcctatccggaccatatagatagtctgatctgcctaacaagcaacattngtccttcaatatggactcgggaagttcaagtagtgtaccagaacactccccagtagatttttggaaaagtttacagccctatcttgtgttcccttatctccacatacttttgatggtctgggcaagatcctgtatttcaagccacaccttgactggaggggagatttggtctagacac

SEQ ID NO: 131050 - DNA, 477 bp, Glycine max
  unsure (1)..(477): unsure at all n locations
cattcaatatcctaatgagggtgttccatatgttctctagacatgatttatacatnngctgcccaagttttatggtcttgcatgtgaagatccttataagcatcttaatgagttccatattgtttgttccaccatgaagccccctgatgtccatgaagatcatatctgtctaaaggcttttcatcattctctggagggagtggcaaaagattggttgtactaccttgctcccaggtccattttcagctgggatgaccttaaaagggtgttcttggagaaattcttccctgcatctcggaccactgccatcagaaaagacatattatgcatcagacaacttagtggagaaaacttgtatgagtactgggaaagattcaagaatatgtgtgcaagctgtcctcaccaccagagttctgagcaactccttcttcaatatgtctatgagggactcagcatcatggagaagagtatgattga

SEQ ID NO: 131051 - DNA, 370 bp, Glycine max
ctatgagcatgaatctgacacccagcgggttattgataggaccaacagctgtggcctaccctaccgcttacctagatacctatcgtccaccatcccaccatcatccttgcctatcccctttgatactaaagaagagtttcatgaacaattaaccaaagaaaggcaagaaaaagaaacttggaagaggagatgccaggagctcgagcaagagaatgagactctgaatgggaagatagcccaacagagccgtgagttttttatccagaaccagaggatgattgagaaggacgacttgcttcgtcggaaagacgctttgctccaccgagatgctagaaggaagaggaggtgtatggatttgatctcccgtgca

SEQ ID NO: 131052 - DNA, 324 bp, Glycine max
  unsure (1)..(324): unsure at all n locations
agctancactagnnnatatcttgtgacttttattgatnagncatccnnaagagttatttgttctcggttggtcaaagccatattttagttcctggtggaatagcattttcaactatggcgctctatggaaccaccttatccttcaatgtgagttgcccattttcttttaatctaaaagttcatctatttaatattttgtggaatttgttagtctctcgctttggtcttggcatattactatatgagagcacttgtatgttgatcaatgacatgttggatgagaattctaagatcgaatctcgatttaatctaactacttcaaaa

SEQ ID NO: 131053 - DNA, 299 bp, Glycine max
gcccaagtttcatggtcttgcacgcgaagatccttataagcatgctaaggagttccatactgattgtttcaccatgaagccccctgatatcctagaagaacatatctttctaaaggctatgccttatactctggaggaagtggcaaaagatcggctatactacctggctcccacgactattctcagctgggatgacgcttaaagggtgttcttagagaaattcttccctcatctacgaccactgccatcataaaagacatgtcaagcatcatgcagcgtaggtggagaaagcttgtatg

SEQ ID NO: 131054 - DNA, 476 bp, Glycine max
  unsure (1)..(476): unsure at all n locations
ntgtccttaatctaatcataatagagccaaatgccaaactttgtatggctaaaancccaagacgaagaaactgagatcccttggtccaaatcagaagttcaacaaaaagaagaagaaccagaaccggaagcatcttcagtacttgcttcaagtgccttagtatgttgttgaaattgcaaccctggcaatgcccatttcatcaccttgctcttattctctttctcttcatgctcattatcatgctcctccttgtgatctttctcctntgaactcttatgtatagtgagaagcttctcaaaagccttgaccaaatgcataaccctcccaaacccattttcaggaacactattccttgccgtttccaacaacctatccctctctcttcttcgtttcacagtagaaccaccctccatgtgtttattttctgcatctgccactgtatcactatttgtatcattgattacaatacattctca

SEQ ID NO: 131055 - DNA, 365 bp, Glycine max
  unsure (1)..(365): unsure at all n locations
agctttatcataagtactaaatgacatttttatgttatgattaactcactgtaagctcgctttaccacagaatggagactcaaccttccagctgtgagagcctcactctttttacactgataacatcacattctcactgtctaaccctaggttagtgctgcccttcatctctaacagatttccgtcagctatttcagcatgttagcatgacaaacatcatcacatgaaccctgaaacagaatgggtatgtntaactcctccaaacatgggaatttcagcaagctttcaacaagagtcttcacaaatcaccgtggtgaagcagaaaacttgccaaactacccatcatgtgttccaaaccccatacc

SEQ ID NO: 131056 - DNA, 479 bp, Glycine max
ttgagccaaaatcctaactcaccataatccttaccctctgttgataacacaaagagaaggacaattcccaatccatgaaagggagaagacacaccaaaagaagagagaattcccaatccaagagagggagaagacataaaacagaaagaaaattcccaatgaataagtgggagaaagcacaaaaaaaaaaaaggaaaattctcgatcaaggatcggaagaaaacagaagaaatatgcagaaaggtcttcgaaccatacaatatctgaacaatagagaattgtcaccaagtaaataaaaaagaaaggaaaccacgacccaaagtggccctctccctttgattgccaaccaaaatccagtgcgctagcaactttctcgccacgcactaaacaaaaacagaaaaggaaaaggcaaaaacactcaaagccaaattccccacctaaaaaccattcccaaaataagtcctattgatccatgatca

SEQ ID NO: 131057 - DNA, 354 bp, Glycine max
ttctttgaccagccactatgatctcacttcattattacctagaatggaaaatgtgtataacattgtctttttctaactacctaattagggctttcatcaactctctatcaagcatattttctctctacaagtcaattgcataataaccataagttgacccattgatacacataacagaaaattccaccaatgaaaaaaagaaataaagctaggtttatatacttaaaaacaggcctataatataacagtgatgactaactacttataaaaggttgttataatatatgtcctcaataattcaagcaacccaatatctttatcatcccaaacattccttgtgattcaaccttacta

SEQ ID NO: 131058 - DNA, 471 bp, Glycine max
  unsure (1)..(471): unsure at all n locations
ntngngtcactgtataaaatgaaggtggtctcgggacatacttttttctctctgtgtatagagtatagacctctacaacatggtttttgtacgggtgtttcctacttagtatgcatcacttttgaggtaaattntttttccatcttatcgtgaaaaaaaaaaaaaagtgtggctcaattcacatgggttaggttaggtacttggtttgcataatgtttgaggtaaaaaacaaaaatctttcgatgttatcatgaaaaaatgaaaaaattgtagttcaatttgaattagtctggtttagtctaaattgtatttttattttaattttcattttcattttagtagtaatgatcacttataaaagttatgtacattttttttaccaactcttcatcatgatattggtagaaaatatttacttaattttgtaataattaatatcctaaaatattacttatcacctctaatagaatc

SEQ ID NO: 131059 - DNA, 347 bp, Glycine max
  unsure (1)..(347): unsure at all n locations
agcttgcactctcaagctgtgacttcaaggtttttcaaatncgaacattngnnggaaggggcaaaagatggaaggcataaagctttggtgcatcactcttgctcctcaaggcaaactgaatgtccatgtcaaagcttttggatgataatattgagatcttgtcaatactttcttttattccatgaacataaccgatatggtagtttcttttaggcctgttgattaagtcatctacggttttcggtttaatatcagtgaaggcaatgaagtctccaacctcaggctcatattttccattcacatcattgctgcttcttgtcacagatatttggtagaacacgctcttg

SEQ ID NO: 131060 - DNA, 444 bp, Glycine max
tagactcagttcagcctaccacccttagtctgatggcctaattgaatggaccattcaatcgttggaggaccttatgagggcgtgtgtcttagaacaaaaagggagttgggagagttttctatcgttgatagagttcacttataacaatagttttcactctacgattggcatggctccctatgaagctctgtatggtagaaggtgtagaacacccttatgttggttagagcccgaaaaagacctcgccttatgacctgaagtggtacaacaaaccattgagaagctctggttgatccaagaaaggatgagaactactcagagtatgcagaaaagttatcatgataagaggaggaaagacctggaattcgaggttggtgatcatgtattgttgagagtcacccattggactgatggtggtctagctttgatatcctgaaaactcac

SEQ ID NO: 131061 - DNA, 298 bp, Glycine max
gcttatactatatcgagacgctcaaaatttatcatcgataactctcgttatattcaaaggggcataactttttacacggatgtccgattcgggcgcataatatgtcgagaggctagaaattgaacaaccgaagctcttgagaaattcaaatggtcataacttttcaaacggatgtccgattcatgcttataatatatcaatacgctcgaaattaaacaacggaaactctcgcgaaattcaaatagtcataactattcacacggatgtccggttcgggcgcttaatatgtcgagaggct

SEQ ID NO: 131062 - DNA, 186 bp, Glycine max
  unsure (1)..(186): unsure at all n locations
tcggacctcagtgtgaanagttgtgaccataagaatttctcgattgcttccnttctccaacngcgggcgtgtcgatatgtgagtctcccgaatcggacatcgcgaggtaaagcgatgtgcatttaaatttgtcaagagcgatcgtagatgaatttctagcgtctggatatgcgaagcgttggaatt

SEQ ID NO: 131063 - DNA, 363 bp, Glycine max
agaccaatcacccttttactaaaatatctcatgtgatgattgacttccaagccacctttcggtagatctaatcataacgccatttacttaacagaatgtaaccttatacgcgtttagctacgaaacatatgatcgtcacttaatttgtcaccttagtctaaaatagcaaattacagataagccattcttatgtcataatgccgacagacgcggaatcttacctttttgatcacattgtcatgaccgatcgagtcgcattccacctccatcataattgagtacaatagctacactacttattccattatcttaggcgtccattcttctttcctgttaaaagactatggatggtcattatctttt

SEQ ID NO: 131064 - DNA, 349 bp, Glycine max
tcctttcttcttttctggctttaaaaagtcaatggagtggtttttttttttctctttggtctgctccacgttcttctaccatttctttctttgattccggtgatcctgggtttccttgtcaccggaatcaactttcacaataacaacaaagttctatcttacttgcaaagtccattacatggatcgtatgatataaaaggctgaatcttataatacatttgactttggtaaccatatgttaaatgcggagctgtcttcaaggctatgtgtagttgaacgtctacgtgaattttacatatggttgatattggtaccataccctacaattcgaccttttattaaaagaatg

SEQ ID NO: 131065 - DNA, 443 bp, Glycine max
  unsure (1)..(443): unsure at all n locations
agcttaatctaaaatagtgatatgtaacttttataatgtttcaaannngttatttcttgacaatcattcacatcttagattttgatatttataaaaagtataaattattgataatctaatgaactaatgttaagtggatcagatcaactttgttaaaaaacttatttgttatttacatatctcgtccatactcatccatactaaaggtgaaaaatgttttaaaatatacaaccaacgtccaacgtgttgtaaaaactatagtgtccactcgttatgataatcattgttatacactaagtgtgttgaacactagtgtccagttgatataagtctcttatatactcttatatgtgacatccaatgaagtatataaaagtatgctagctgaagagggaagtgcagatattcttgctcaaaaatcattttgtctctatttgaatact

SEQ ID NO: 131066 - DNA, 461 bp, Glycine max
ttgagaaaacttccttgagaagctagagcttagttatacacaccctctcataactaagctcacctccttgagaagcttgcttaagaagattcctaaagaagctagagcttagctacacacacctctctaatagctaagctcacctccttgagatgaaaagctagagcttagctacacacctcctataatagctaagctcaaccctatgccaaaaaacatgaaaatacaaaaaaaagtccttactacaaagagtactcaaaatgcctcgaaatacaaggctaaaaccctatactactagaatggccaaaatacaaggcccaaaagaaggaaaaacctattctaatatttacaaagataatcgggctcatacttagcccaagggctcgaaatctaccctaaggctcatgagaaccctatggtcttcccttggatctctggcccaatctagttggagtcttcta

SEQ ID NO: 131067 - DNA, 433 bp, Glycine max
  unsure (1)..(433): unsure at all n locations
agcttgtactagtcatatatatgtnacaaatcatcgaatgtcttaattgaatcgantattgcagatacagaaatacttaaacaaacctgccaattaggagttttgcagctttttgcaaattccgcccatgtttcttgatcaaagccatacttgactgtaggatcagatatttgctgaccttcattgtcagcaaagacaaattttgaagtcaatgaagacttaaattgcctccatcttgctgcaactgttgacatcacctttttttttgcattttcaccttcagggatatcaaatttgcgctgcacaacaaaaggagttatgtaacagtatgtaaatgaatcctttaaagtaacttaacaacaaaatcatgaatacaagtgtatttagaattacttaccaaaatatctttccatattaagctctttagatcgtc

SEQ ID NO: 131068 - DNA, 219 bp, Glycine max
ttaacgggatgctacgtgctcccactggaactattggtacccccaacaatttcacatctatccagatctctccttacatgccataagcatagggctcttacctattgcgctactgacccactcatactatgatggagctaatgctgacatgcataatgtctattatacgcgcatgtaaatgtgaatcatagagagtgtgatactaatgcttatatagct

SEQ ID NO: 131069 - DNA, 474 bp, Glycine max
  unsure (1)..(474): unsure at all n locations
actcacgctgatacaatcgcaaattctatataggaacttttcttaattatattctagcgcncaactatcgagaaactatttattgaatcatgactcctgttaacgggagattaatttataacatgcatacgagggcttagaagtacactctctctcctatatagtctgtaaattaatcaaattaattatatacagaatctctaaaatatagactgtcttatctattaatggacaatattttatcactatcacatatatgatttttaacaatatttatatataatactcaataaaatattgtcaatctttatttataatatatagaatatatcattaattatgaatgaatattattaatattttttcatgatattgtatgaacaacgttgtgtataatcaatgaggcttgtcctcaaaggatggattgtctccattattttgatagacacatgaacgtattttgccaactatgtt

SEQ ID NO: 131070 - DNA, 427 bp, Glycine max
  unsure (1)..(427): unsure at all n locations
taagcaccgcggctgcagctgaaggaccccattttctagtttcttgnctcttctaactaaaactttcttcctagacctatactcgccactcctttcacacccaattaacacaaacgaagtccttcctccactacctgtgtttgtgtcagaccttacaatcaccaccataattccattttcataagcaacagatcgagcccatcgcataacatcctctcgggtgtcaaacacctacaaacaaatccacataatttcagcttcctacgacatattcattttattaaatcactcacagtcatgaacatcattacctgagaaagtttgtacgcatctaaactatcaacatgtggttcattcacaccatattcttctttcatttcataaccatatgcaattctttatgccatatacctttataccttcactg

SEQ ID NO: 131071 - DNA, 395 bp, Glycine max
ccttgtcccattccttatatatgatcttggttctaaaatatgaatgagttagatatgttatgataggatggatctcaacctatgtcaaagtgtgagttttttacttttgcataaggacaagaaaagttcaagtttggtggagttgattatttccaaaaatacttaattgagacatgtggatttacgcaattatctcatctttttcttatttaggactttgtttatgccctttatatgtaaactcttaatttatagtctgctctctttaacttgtcactttgctatatctcatatgcttattgatggattattatgtacgaatttgaaatggatcgaatcgcattattggacaaggttactgaaagcttgaagtggaaatacagctcatatgtcat

SEQ ID NO: 131072 - DNA, 402 bp, Glycine max
  unsure (1)..(402): unsure at all n locations
agctnattggcactatttattatcctnctatggtaacaccttatctgagggatgctaaagcaaccaaggtttttcataagtacctagatgagtgcctcactactaagngcgttatcttggcatcaatgagttcagaactccagaggcaacatcaagacatggacccatatgagatcgtcgaacatcttaacaagatgtgtggtggtcaaagtagaatggctagatctcagtcatctaaggccctgtttagatccttacttgctgctaatgaaaagggtggaccccatgttcttaagatgattgatcttatagaacaacttgagaagtcggggtgctctcttgggaaagagctttctcaagaattgatactgcaactcctttctgattcatttcataatttat

SEQ ID NO: 131073 - DNA, 476 bp, Glycine max
  unsure (1)..(476): unsure at all n locations
ntnngggttgagttaaacccaaacccacattctaagattattatgttttanattcaaataaaacacacttacaaaacaagaagcattcaataaatacattttccagggaacaacatcaacagaatacaataaggaaaactcttagaagttaaaaccaagttcaatgtttaaattgagcaaccagcctggattgctccctactaaagccatgattaggcttcaactagaagaaatgtcaataaagaaaaacagtgagtaataagagtggaggataaaatataaatttaaaaggaaaaagaagacatatgcagaattgacaaatcaactttctgccaaaagaattcaacacatcaaataagaaaaatctggtccaaatttctgcatagtcgaccattgacaaccttaacacctaaccattatatctgnttgtatgtctnctcacactccggcactcactggccccacccaaaaagact

SEQ ID NO: 131074 - DNA, 207 bp, Glycine max
ctgtgtttgaaaccggtccaacttatgtgggatgctaccaaatttggggtgtttaatcgaaacctcccattgtatataaagcacgagaaactcactgaaatcgcacactgtgggcaaagtctacaataactgtatacagcgtggaccctgaggcattttaattactattattaccaagtaatggttaaagtctacataaatactttg

SEQ ID NO: 131075 - DNA, 472 bp, Glycine max
  unsure (1)..(472): unsure at all n locations
ngagaagctgtttggacaaattgatcggatactangagtcatcatcaatgaacacaaagaggcaaagtcaaaagccaaagaaggcaacggcaaagcagaggaagatctgttagctgttctccttaaatacgaggagggtaatgctagtaaccagggatttagcttaactattaacaatatcaaggcagttacctcggtaaggataacaaccacatttgttaatccattcttttatgaacatagctcatttctatgacactttggtcttgtttgaataaatttctttataagcacaaaaaaaaggtacataagttgattttagcttatagagaagttaaatatattttatcttattttcttctcttaaaaatgtttaagagatctatgtcttgactcttgatgtattggtccttcangtggaggtctttgntttatttggttagtttggatattctttgatcgactcttttat

SEQ ID NO: 131076 - DNA, 440 bp, Glycine max
  unsure (1)..(440): unsure at all n locations
agcttaggagtnncgagtgtctgcaatgtctaaatggtatttgcattatcagcaaactatgcagaattaatcccatcaaaaactatctctcattttaaagcattaacctgggcaatcatgaaattataatcacaaataaatgtaacatttggaaaacaccagtaaacagaatcaaatactagtgagcccaggttattaattcaacattgaatgtgtggaccctgcattaaggcgtgtacctacaaaacctattcaaaagttaatataacttacaaagaatggcaagtccctggagtcaccatcagaaataatatttgcaagccagtgggttatctgtaaatganaataaaaaatatcttaaaagagctgtgcattagatcttagtcattctacatttattagtcttagtacacaacatatctcacaagttatatgatgac

SEQ ID NO: 131077 - DNA, 417 bp, Glycine max
  unsure (1)..(417): unsure at all n locations
tgagagagagcaagggagatgctttctaacttataacagataaaaatggaaatgtggtggggtcttttctgggtttgcgttgttgtccgtgtcattgtaaaaggtgaagaattgaaatatttaataatggtagttagaaactttatccattttcttttcatggaaaacattaaggataaatgcacatacacgttcacccaaaaaaaagactctaattataaatttaatcttaaattattcaattagattttaaaattcttaaaaaattaacttaattattgaatttctaaaaaatttaatccgatgattcaatttttgaaatgaatntaatttgagaatgacataacatgttttacaatttgacaataaatagatttttttaacaattaaaataaataaatctttaagaattaagat

SEQ ID NO: 131078 - DNA, 305 bp, Glycine max
atatattggttatcgattaccaccgtatttgaacgttgaaattcatattcaattgtgaagagtcatatcttttcataaaatgtattgtgtaatcgatttcgtggttgtgataatcgattaccagtgacaagttctgaataaaaagccaagagatgtaactcttccaatggttttctcaaagaatttctcaaggctataactcttccaatgggtttcttgaccagacatgaagagtctataaaagcgagaccctgacttgcattcaaagaacttttgaaaacttttgaccttcttttgaccacctt

SEQ ID NO: 131079 - DNA, 467 bp, Glycine max
  unsure (1)..(467): unsure at all n locations
tgactcatttatttaaacaattctaattataagcttgagtttggctttcttgaaaaaactaaagcatgagcttgagcttgaatggtttagctcatttaaaatttgattattttttaacttgcaaaaaaattattaaatcattttttaactgtcaatttattatttaataaaatattttaatactatgtaataatctacaaataaaatatgtgttaaacatatgatatgatattgtagaatctatgtaattttaatttttatattctatttataaacgagctatttatgagttattaatgtcaagcttgtaaaacttaagcttagcttgagtttgtttatttcattaaacaaacgagtttgatggagcatttatgcaagtgaactcgagaagttcacgagtaactngactcatttacatctctatctagaaatacttcttgatgtttaattaagtgtcgcatatatat

SEQ ID NO: 131080 - DNA, 288 bp, Glycine max
  unsure (1)..(288): unsure at all n locations
agctncgtgtttattacctacaggacgattgactagatactgnngaagccaatgaggagttgggattgccagnngactccagggagtatggcattggcgcacaggtattaattatatcagtagtactcacatagtatttggcttttctttaatagatgatgatttactaaaatggttatggaagttaactggaatgatttttattgtatttgacattctctactcgcagatgttgagagacttgggtgtacgatctatgaagctgatgacaaacaatccagcaaaata

SEQ ID NO: 131081 - DNA, 470 bp, Glycine max
  unsure (1)..(470): unsure at all n locations
tctacttattacataantgttatttatatattccttgttatnnnnncatcgctcctatgtctccaataatattcctatatttgcctttctagttaattatgactagattagggcagttagcgtctttctttttatgttttactaaataatataaataacattaattttcgtattatcattatacaaaagagtttaacaagcttaaaacttaataagctttaacttagagagtgtgttaaaacatatttagttattgagcgaggaaaaacagagaacagaaaatgaatatacacaaattaatatagattggtgtttagctagagtcaaaatgtgtttcccctttaatatcaatactactattattttgattccttatttgtaactacgaagaaagattgtactacagtcaccagtgataaagatganaacttgaacaaagcattggcaacacttacactaaagaagattca

SEQ ID NO: 131082 - DNA, 368 bp, Glycine max
  unsure (1)..(368): unsure at all n locations
atcctcaagtcacctgcggcatgcaagcttattgaaaaataaagttttgccctatttagagatcttatactacacgcacaaaagtaagatttgactcttataaagcttaaccaatctatttccatccgtatataatgctttgaatatatagttgtcattntaatcttcatataatttatatntggtttgtataaagactttttttttattgacctattagttaattaacctctttgtttattaccagtcagttaacttatttaaatacgagtcttttcaagatttatgaactaaataatataaataaaataaaaatttatctaaatgatacaaggcaacaattatttatatgcatgatataatttact

SEQ ID NO: 131083 - DNA, 454 bp, Glycine max
gcaaaccctgcatcatgtcaagtggaagcaaacgatccactattcaaccttactattcccaagatagagacaaccaccattcttactaagaataaagctaccatccatatcgagcatttctttgatatcaactaccttgaaggcatcagcttgaaaatctaaatgaagaacgctatgttgtggcataagacgtttttacaatgactgttagaccattcatccataactcatcaaaaggttttggcgcaatgctaagttcaagactactcacaccatcgcctccaatgttcttggcaggaaggccaccttatccatggagatcattgctcaagtcactggatgcataagagtattctaatcactcaaataatttttacacaataagcttaaatacaacaaaattcactaacttagaaaagctaagaattattcaattcagcctagtttccttcat

SEQ ID NO: 131084 - DNA, 287 bp, Glycine max
aaatccttgaaattccaaaaaaaagtccctactaccaagactatctcaaatgcccttgaatacaaaggctaaaccctatactactagaatggtcaaaataccaggcccaaaagaaggaaaaacctattcttatatttacaaagaagagtggatccaaccttgatccatgggctcaaaaaattgccctaaggttcatgagaaccctagggccttctttagtagctctagcccaagcctcttggagtcttctatccaatccccatggggggtaggaatgcattaattgg

SEQ ID NO: 131085 - DNA, 452 bp, Glycine max
  unsure (1)..(452): unsure at all n locations
gggttcgaggtacttacccgttgaagatcgaagaacgactaatatacaatgaagaacgtcgaagaacgggtgaaacctttgcgagattcctcacggaaaacgttacggaaacgtttcggaagcgcctcgcttagatttcttcacggaaacattttcccagcaattcgaaagagagagaagtgcctaaggggctggaccccttttcttcttgctttcctcccctatttatagcaaaataggggaggtgggtgccgcccagctcgcccaggcgagctcagctcgcccaggcgagcagggttgcttcctccagaagcaaccgccttctggaggaatcttctggagggcccaaatgggctgggttgctatntgcacccccattttactaagtacacccccnctctgctattatttggtgattccttttttcgtaagtaccgaacttacgaatttct

SEQ ID NO: 131086 - DNA, 270 bp, Glycine max
ttgcataccatattctttttaatggtcgtacaactatcggcattgtgtaccctccgagttaacaaaatgctttttggcttcaccaaggacttcgtcatatcatcatgtcgtaccctaatttcgtctggcgattattatatgatgatatacaacctctgattggccgcttcaagatactatgcaccctctgttgcacaatatgtgaagtccccagacgtgccgaaagataataagaagcatgttgacgcgatccgcgaaaaatccggcatg

SEQ ID NO: 131087 - DNA, 265 bp, Glycine max
ttatgaagagcgcactgcttcaatttccataagcaatatatagctttttcatctccgtgcccatgaggaagcatattggaagcaacgtccaaaagtgttttggctaaaagatggggattttaattctcgctttttgtttcatattcaagcctttgctacgaaaaaaattaattttattgtctctttgaagcatgatgatgatactgtggctttgtctcactatgggctgcgtgatgttgccaaaaaacaatttcatgaattttat

SEQ ID NO: 131088 - DNA, 306 bp, Glycine max
  unsure (1)..(306): unsure at all n locations
cttgtacattaattgcgagcggggcttatatnacgttatctaancggacatccgaggaaaaagggatggttgtttgaattttatcagagcctccacattcaattgcgagcattctgatagattacgggacttcatcacacataacggtgaaaagttatttcgcctgtatttgctaacggctctaggaatcactttctgagcgtctcgatatattacgggactcaatcacacatccgagtaaagaggtattgttgtttgaattagctcaaaggttgtaacatttaattcgagcgtttggatatatta

SEQ ID NO: 131089 - DNA, 400 bp, Glycine max
  unsure (1)..(400): unsure at all n locations
ttcgaacccggagattgggtttgggtgcacatgagaaaagaaaggtttccggaacaaaggaaatcaaagcttcaaccaaggggagatggaccatttcaagtgcttgaaagaatcaatgacaatgcttacaaagttgagctgcccagtgagtataatgttagttccaccttcaatgtctctgatttatctctttntgatgcagatggagaatccgatttgaggacaaatccttctcaagagggagagaatgatgaggacatgttcaagaacaagggcaaggatccacttgaaggacttggaggacctatgacaagggctagagcaaggaaagccaaggaagctcttcaacaagtgttgtccatactatttgaatacaagcccaagtttcaaggagaaaagt

SEQ ID NO: 131090 - DNA, 381 bp, Glycine max
  unsure (1)..(381): unsure at all n locations
agctaatcggnnnctntcttgtttagcgctattaanaaancattattccagtcgtttaaccaaacctgaatnttaaccacgccaaggatcatggcgaggataataatgattaacaacactgaagttttattattcttacgcagccaaaagggcttcaacagacagagatactttgctatcaacatacgaagcgtaatgggaatggttatcattagcgaaaattgattgtgccatccaatgattatctatggcaatgatctactgatgaaatttatttaagtatcatttaacaatatgaaatataaaggaatatttcattttcagngggtatggttatgctattgataatcaaggatatngctaatgccctgatgcatacca

SEQ ID NO: 131091 - DNA, 402 bp, Glycine max
  unsure (1)..(402): unsure at all n locations
agtcctgcaaggataatctggttgttgaaagtaatggagacatttacgaatgcgaccattttgtctatccacagtacaaaattggaaacattaataaatctgaactcaaaacgatgaacagtgtacaactgacagcgcaaaanaaacggattccagcgaaatgtcagcaatgtgcatataaacctatctgcaatggcggttgtcctaagcatcgtattactaaagtaaacaatgagactgtttcttatttttgcgaaggttataaaatccttttttcaaccatggtaccttatatgaacgccatggtagagttagctaagaacagagtaccgctttaccacattatggatgttgcanaacaaatggagaataattaataacgctctcttttaactccattct

SEQ ID NO: 131092 - DNA, 422 bp, Glycine max
  unsure (1)..(422): unsure at all n locations
agcttggcgggattggtcttttccggcaatttgatcgaattgtttctaaaaagaggcaacattggtcatcctgctttgatgaaaattggggcaagtgaagagggtgagaatgatggagaaacccatgttgtgactaccattcctatatggccaagtttcccaccaacccaacaatgtcattacttagccaataacaacccatcttcttacccaccacccaattatgcacaaaggccatccctaaataaaactacaaaacccacctaccacacgaccaatgctaaacaccacttttagcacgaaccgaagcaccaaccaatagggaatttttgagcaaaaagcctgagaattcacctcanattctggtgtcatatgctaaatgggagccataacccttgctagggttcctcaaccttcatttt

SEQ ID NO: 131093 - DNA, 471 bp, Glycine max
  unsure (1)..(471): unsure at all n locations
gggttggtgagtnngatttagtcttagtttctctttgattattagtcaattcattcaaggaaactttcaaagaataatctccgattgattnttctgattattttattattatttttttctagatattttgattattttattattattttttgaagatattttgattattttattattttttaaaagatattttgattattttattattattttcttttgaagatatttattttgcttttttgatttcactgaagttacaacgtgaacgatcggttggatttattttaatagtgattaaacgagattacaacacaaatgatcggctgaaattcattttatcaattattaggcgagacaatgacttanataaatgggtaaaagctcattaaaagcgaaagaaaaganatcaaaagtgaatgagatgaagatgaaagcaaaacaaaacaataaatgaattgaagtctcggatcg

SEQ ID NO: 131094 - DNA, 279 bp, Glycine max
  unsure (1)..(279): unsure at all n locations
gcaccgangctgcagcttagaccaagcactttaanctatgttccaatcncttcacncacggaaccgaacggtcgaaatgaaatgagaatggggaactttggacaactttatctcaacaagtcttaacattatctaactcgctcaaactggtttacgacaaaactctaccgatcaaaattgcttctaacacccaatctaccctagaatggtcttgcctcactttggcaaccattttctccttgcacagccagcttttcccagcccaatgactttaaacta

SEQ ID NO: 131095 - DNA, 356 bp, Glycine max
  unsure (1)..(356): unsure at all n locations
tgtgcattcaatatcctgatgaggggggtccatatgttctattactggtctaatacatttgctgcccaagtttcatggtcttgcaggtgaagatcctcataagaatcttaaggagttccatattgtttgttccaccatgaagccccctgatgtccaggaagatcatatctttctaaaggcttttcctcattctctggagggagtggcaaaagattggctgtactaccttgctcccaggtccattttcagctgggatgaccttaanagggtgttcttggagaaattcttccctacatctangaccactgccatcagaaaagacattttatgcatcatgcaacttaatggagagagct

SEQ ID NO: 131096 - DNA, 458 bp, Glycine max
  unsure (1)..(458): unsure at all n locations
agcttgagtgagccatcatatagtgagtctantttgtttcacatccttgtaaccctactattcttttgtatagtagaagaatcttcatattggacgtgtgctcccattactacctttaattactaagtgtctatcttaactctacgaagcgagaaaatccgagttttcccaacaagagttgatatgaaggtatgacatgcgcatcggaatgtcatgtgggttgtcatgtgtattttgtgaactctgtaaagtacaaatctcacattggttgcaaaagagaaaacaatatatgatgcttatagtggaaggtggacgacccttataattaggtcaattcgtaattttaacaatgtggcacaacataactcggaagcatagaataattatgtntatgtcatatgatgctgcaactagcaatgataatgtatcagatgtttcatgctctaacaactaacaag

SEQ ID NO: 131097 - DNA, 420 bp, Glycine max
tcagctggcaacatagtgacacagaaggatattcttctatattaagcataatatcatcggcgaaagccaaatgagatagctgaatacttgcacaattgggatgaaatttaaaactggcatcatccttgaggctgctcatatctctggaaaagtactccaaacagagcacacactgataaggggagagaggatcctcctgtctaagaccccgctgccctttgaagtgaccataactggatccattgactgccacactatacgaagtggaagaaacacattccatgatccatgtacagaactgggctgggaagccaatggacttaagcatgcaatccaagaattaccacgatatggaatcatcagctttatgcgagtcaattctcatgaggcatctgcgagaggatcttttctgggcatatt

SEQ ID NO: 131098 - DNA, 293 bp, Glycine max
  unsure (1)..(293): unsure at all n locations
acactactcttaaaacaaaaatggcgtacaaccttcttccataaatacaaacatcaatgtaaatttagagcaagcttatgcacatatttccttacgaacgttcacttgcacaagacattctatcaactaagaaaaatgcacccatatacaatcaaggtagcttcattacctagattatttacatgtacttccaaggtgtatttgttatttacatcacacacgcctccttgggctgaattacatacatgcatactcnaagcattttggggtaccaaaaactgcacatgcgctca

SEQ ID NO: 131099 - DNA, 463 bp, Glycine max
  unsure (1)..(463): unsure at all n locations
taggagcctaaacttgtagcttccatgcttagtaacatgtttatagctaggaatccaaaatttggttttaggattagaaaagcatgaaaatagggacttgtttgtaagaatttgggctgccccacgattggcactttgcacctaagtaacgtgggagatgcttttcaatggtgtgtagatatatgtgtaaatatatatggcataaaaatatgttgcaaagtgtgtgaatatatggcataaaaatatgttgcaaagtgtgtgaatatatggcataaaaataccttgcaaagtgaatgaatagtaaataatgcatttcaaaaaatgtatatttgtggataggtagcataagaggcttttataaaaaatgtacccatgccanaatggcacaagaatgcttcccaaatgaatatatgatgtnggaatgccccttcagtgtagataaatggcatganagttccttttc

SEQ ID NO: 131100 - DNA, 294 bp, Glycine max
  unsure (1)..(294): unsure at all n locations
tcaataatncattgatgatacaattttattgaaaaatataattgataactttgaggtcttttctccttatcatatttttctatgtatgaattaaaaaaatcttaaaaaaattaaactcaattctacttgaactaactaggtcaattgttgaacattcaaatgacacaactataaatttcatataaatattntaatacaaaacttcagaaaacaattgttggtacacatttttttctatcattatattagtctcgaatcaataatttattgatgatcaatttttattgaaaatct

SEQ ID NO: 131101 - DNA, 408 bp, Glycine max
  unsure (1)..(408): unsure at all n locations
tatgcacattcatttggttttctctttattgcaagcatggctgtctatgcttgatcatgttgaaaatcaaatggaccaagcacacgatgggaactttgggagtaaaaaaaaaaaaaactgatcataagaaaagacacatggaggattaataaaataagacaattctttatatattttcgctttatactttttatttattttgtgttctcattttttatatatatattttagaattttaatatgcggaaaaatctgtcaaaacactagaaaanaagtgaattcatctcccattaaactatggatttattctattgtcaatgtaaaggatgcttacattaataaacttaaatatattttttattctaataaatatctgattttgagggctaatacataatatctattttt

SEQ ID NO: 131102 - DNA, 284 bp, Glycine max
tgagagaccatacacgtttcctaacgatttctaattatgtgggccattaagtctatcatatgctgaccatatccgaaaagcccatgaatctcttgcggggcggagtaggtagctgccatcgacttggccttggctaacaatcggggaagttcttgactcccgttcaaggtaagagcaaaccgatccatccacatggttgcctctaggtgtaaagagtcgatcacccgtcctctatgctcttttctcgcgtatactggggcatactcatccgcgattctatgctc

SEQ ID NO: 131103 - DNA, 384 bp, Glycine max
gacactcagaaactcacgctaaagtatgcccgagtcattcatgcgtatgagacgtggtttaagatgtgttatcagtatcgacattccttggattatatggttgaaccaaactcatgcttttacaaaaaggttcatcaagtgaagttgaaatatggcagtgaccgtcctgcagaattggggcgaaagatgaattgagtcacatcactgcttcgtctactgccaaacatatttatgattggtgatgtccttgttactttcagtttcaccttgacaaagatgtcatggatcatgttgaaaatctatattgattcaaccccatatcctgcgtaaaaattcgcgatacttcaactatacatcattcgcatacatacatgcttttcattg

SEQ ID NO: 131104 - DNA, 320 bp, Glycine max
  unsure (1)..(320): unsure at all n locations
ggctcatgggccactttgggatagacaagacccttgtcttactcaaagaaaagttttattggccccatatgaagaaagatgtccataagcattgcactaggtgtgtggcttgtttacaagccaagtctagggtgatgcctcatgggctatacacacccttacccatcccatctgcaccttgggtagacattagtatggactntgtccttgggcttcctagaacccaaagaggtgtagactctatctttgtggtggtggataggtttagcaagatggcacactttataccatgccacaaggtggatgatgctttccacatc

SEQ ID NO: 131105 - DNA, 476 bp, Glycine max
  unsure (1)..(476): unsure at all n locations
tatatggcatatagcgataaattagtaggaaacagacttttttnnatttatcagnnatacagngagcattaaatcatttcatcataatggattaaagaatcaaaaaatttactgtaggtctagatcatcaagatcctagtttaattgtaaaccagtatcatttctgatttccttactgtgctaattatttgatatattagtatctttctttcgggcctgtctttctttgatcaagtcagaagcatattttaaggacagtgaaaattcagattatggagttttcttgctcttgacctacactacatacctcattctttacaaaaagtagacatgcctcagaatattgataatctgtatattagcatgggggttngatgaagatgccttttgaaagggtttagctgtttanggatatggtggctggctggagtctatctctcctttccctcacgttattttctatcaatgggactcat

SEQ ID NO: 131106 - DNA, 450 bp, Glycine max
  unsure (1)..(450): unsure at all n locations
agctntngaaatgactgatcttggncttattacttatnttcttggaatttatatcaagcaaagtcagaacaaagtgttaatctatcaaaggaaatatgcaaaataaatnntgaagaagtttcaaatggaggaatgcaaatctgttagcacaccaatgaatcaaaaggagaagtttagcaaggaagatggtgctgataaaattgatgaaggatattctagaagcttgattggttgtctaatgtatctcactgtacaaggccagacattgtatttgttgtaagtctcttgtctcattttatgtgttgtgcaagtgaaatgcatttaaaagtagcaaagagaatattgaggtatgtctagggcactattgattatggtgtcaaattngagaagtgtcaagaattcaagttgtatggattctctaatagtgattgggctagatcccgtgatgac

SEQ ID NO: 131107 - DNA, 458 bp, Glycine max
  unsure (1)..(458): unsure at all n locations
ctactggaagaatataatgatttcgntcttttattccacttacatcaatatgtggcacgttgtataaaaaggaaagcatattccattagacgcttaaagaaatgagatccccagggacagatggacagatgaacataagttcatatttcttctcaactttcgcgcaagaaatgctctgttatgcgctctatctcaagaagagtattccaaagttcacaacttcagaagtgctaaacaaatgtggaacaccttagccattacctacaaaagggtcttttgaggtaaaacgtaacaagttgtgtcttctaacacgtaagtacgaactcttcagtatggaagagggagaagatatccaaaccatgtttggatgcttccaaatcattctgaatgaagctttatctctaggtagacatgataattatgatcacattgantaaatcatacgaagtttatctaga

SEQ ID NO: 131108 - DNA, 481 bp, Glycine max
  unsure (1)..(481): unsure at all n locations
tctgtgttctgaccattgccaaatgttgcaattctgtatctatccttctttcagtcatagcttcgggccgcgataagactcactgatctgaccctgattcctcttgcagactttatagaccaattaaaatgcagtttctgcaggtcaacgtctgaccatcattgtcatcactctggccattagagtaaccttctgcattcatccttttgtaaaaagtttatattagtatcagcaattaaccggacctgatactgatatgagtcttaccgcatatacggtcaatttcagcaattaattacattatccacgccaaagtatttgtcatcacaatgatggtaccttctttcagacaccattttttcaactccgttttccacggaccgcactcttatgtcaagagtgcggtccgtggatacaaccagagaccgactgacacgagtcagaggaaacgacggatatgtntcagtcgtaaatatctatc

SEQ ID NO: 131109 - DNA, 194 bp, Glycine max
aaacagaggcgaagagacgcaaaacgcgaccttgcgaatctacgaaacgtcgaacgttggagcctcgcttaatttttccgaacattttcagcaaatcaagaaaaaggcctaggctgcccttttttatcctcctataagaaaaaggaggggtgcgccactgcagcagaggtgtcctcaaaccccgctttgagatc

SEQ ID NO: 131110 - DNA, 441 bp, Glycine max
  unsure (1)..(441): unsure at all n locations
ntccgcaagacttacggaaagaacnnagaattgtcctnatcatatgtatccatagaagccattgcatcactcacccaatactacgaccagcctttgagatgcttcacattcggagacttccaattagtaccaaccattgaagaatttgaggaaattctaggatgtcctctcgggggaagaaaaccatatctttcatccgggtgtctcccctctttgagcagaattgcaactgtggtcaaggattcagcaagaggtttggacagcataaaacagactcggaacggcatggcgggcctaccacggaggtacctataagacaaggcgagaggtatggccgatcaaggagattgggtcccgtttatggatgtgttagctntgctaatttttggggtcgtcctttttccaaacgtggatggtttggtggacctagcagcaatcgac

SEQ ID NO: 131111 - DNA, 341 bp, Glycine max
gcttgcgggacgttagaagaatctcgctttgttgcggacctcacgatcattctcggggtatgtcccaccaacctgatcgcgaaagcgaccgggaagaaaacctgaccgcacgtgctgttactgaaccctaaccgaaaggctgcacgtgtaccgcacgactcctgcgcacgtgcgccaaacaacgtcgctgtgaatccttggctgatgcggataacctgcgggctgccacccggcaacgcgaagctgagatttatagtgcactataacttggcgaactggcatactgttctgtggaattgtatcgtcaaatcacacactcaaccgagcataaggtaactggg

SEQ ID NO: 131112 - DNA, 430 bp, Glycine max
  unsure (1)..(430): unsure at all n locations
ccgggatccctaagtcacctgcggcatgaagcttaggatggaaacttacttgtgtttgataacaaaagcgcgaaacggaatcaaaaaatgcgaaaaatgatgaccctaggactgcaaactcgtaaatcccgtgggtatggcttttgaaaagggggaaaagaagtttttgaatgaaaaaaacgtcccccctttcgtcacttttatattttggtgcagaggtggctcgcccaggcgagctcagctcgcccaggcgagctaacctgcactttttttttgttcttttttttcgaggggaacattaaccatgtcccctccctccttagggattagcatcntgcctaactggaacttacttaggtcacgaataaggcgttgattaccttattttattattactcttatccttattaaaacaaacaacataattaaa

SEQ ID NO: 131113 - DNA, 416 bp, Glycine max
ggaacttacatactaagcttcctcgggccattcctgcgaaggcaaacttttggaaatttagttcttaccaagaaaggccacccttaagacaaaaatggcatacaactcgctccaataaatacatacatcaatgtaaatttagagcaagcttatgcgcatacttcttcacgaacgttcacttacacaagacattcttataactcagaaaaatgcacccatatacaatcaaggcacctatagtacctagattatttacatgtacttacaaggagtatttggtacctacatcacacacatttcctttgctaggttcacatacgtgcatactctaagcactttggctatcacaaattcacatacatgcatactctggagccgggtgcagatactacgatactttcttgtgtcactaaaat

SEQ ID NO: 131114 - DNA, 418 bp, Glycine max
  unsure (1)..(418): unsure at all n locations
agcttcacacatggangtgttacctcanttaatcttgatcatgccaagccnatcngaaacttcactcaacagtgaccaccccactaaacatatggcttagggattggaatatatactttccgcccgtcatgtgtcatgagcaatcactgtccaattaccatgactggtgttcctttcctgctatcaaggaagcctacaacaagagattatcttactcttaggtacccaaatctttttgagtctttttctttgttagcttatgggtgctgataagcactggataaaccctttgatgagttgcccttctcagggaggacgctgctcttatgaatctcatgacccacttttcccaaaaaagcaaataatgactttttaccagcataacctctttgctttgtaacctgaacaatttgtcttt

SEQ ID NO: 131115 - DNA, 471 bp, Glycine max
tatcaaagaattgtgtctcgcgtggtctttaaacaagattatttgtgtgtaaaattaaatgaactttgaaaaaagtaaacaaaaacatcagaagctgttaaaaaactgttttatgcccgataatcctgacccaataaaagtaaacaaactccaaaaatgaaatcacaaatccattaccagatttaaaccatgacaagtgtcacgtcctatgaaatataggtttgaaatataatttttttagtcagttttcttattatattatctttttttacatctaaaataaaaataaattttaattttaagtattaaactagtaattttgtggaaattattatttattaaatatttctaaaataaatatttaaataattgtgtttaaaaaatgagtttccttcaatagatttccggatctgtcccgaattaaaattacaattattatcagacagatagaatacatgtgatctctaatac

SEQ ID NO: 131116 - DNA, 351 bp, Glycine max
  unsure (1)..(351): unsure at all n locations
agctanctgtatttntctggttatctaattcttgaaaactngngctattcatcttttcattctcttctcccttctgccaaaaagaattcgccaaggactaaccgcctgaattctttttgagactctcttctctcttttccaaaagaacaagggactaactgcctgaatacttctgtgtctcccttctcccttgtcaaagaattcaaaacgacacagtttgaanatttttttgatttttcccattccctaatacaaaagcgttcaaaggtttaaccgcctgagaattcttttgtattcccattaacaaagtatcaaaggtgtaacaacctgagatctttgtcttaacacatt

SEQ ID NO: 131117 - DNA, 365 bp, Glycine max
  unsure (1)..(365): unsure at all n locations
atcttagctacatatacctctctaatagctaagctcacctccttgagatgagaagctagagcttagctatacaccccctataatagctaaggtcacccccatgacaaaatacatgaaaatacaaaaaaaattcctactacaaagactactcaaaatgcctcgaaatacaaggctaaaaccctatactattagaaaggccaaaatacaaggcccaaacgaacgaaaaaccttttctaatatttacaaagataagcaggctcatacttatcccatgggcacgaaatctaccctnatgctaatgagaacactangagccttccttggatctttggccaatctacttggagtctctatccatgcccttg

SEQ ID NO: 131118 - DNA, 310 bp, Glycine max
  unsure (1)..(310): unsure at all n locations
cttgatggtgaagacgagngtgtgtggaattgcttaacattgttagcacangcgcagaagngagtgcgagggcaataacaacagccacaacaagaataggctgtagtgggatacatgggtgatcaaccctagtggccgcacaatagggatgaggcaatgataccactaatgatgtattatgtctcaccatcggcttatcgatagtacgatcaacattggacacaggttgtgagctctgcttagcagcgtgcatagtatcttgaacaatcacatcatcaagccttacatcgagggataccatctcagttgc

SEQ ID NO: 131119 - DNA, 339 bp, Glycine max
  unsure (1)..(339): unsure at all n locations
agcttcatgttatagtcaattatcaaantttgatgaaaaataaaagctatgctaaacaagccaacaaagggagaaagaaggttgtcttcgaacccggagattgagtttgggtgcacatgagaaaagaaaggtttccgaaacaaaggaaatcaaagcttcaaccaaggggagatggaccatttcaagtgcttgaaagaatcaatgacaatgcttacaaagttgagctgcccagtgagtataatgttagttccaccttcaatgtctttgacttatctctttttgatgtagatggagaatccgatttgaggacaaatccttctcaagagggagagaatgatg

SEQ ID NO: 131120 - DNA, 433 bp, Glycine max
  unsure (1)..(433): unsure at all n locations
cgccttgaattcatttatgcatccgtaggggttcattcttgttttgtatgtnnccatcttcatctcatctactttcggtattctttttcttcattntaagcgagtttcgactgattgtttaagtcgtaatctcacttaatcaatgttaaaatgaatttcaaccgatcgtttgtgttgtaatctcgtttagtcacctttaaaataaaattcaaccgatcgttcattctgtaacctcgattaatcatcaaaaaggcaagtntcaacctgacatttacttcgaaagttctctctaaatgagttaagaaataactaagtgaaactaanggctaaatcaactcacaaatcaagctttgccccgcaaaaggtcatttgaaccatttcaaggtcaacgtctaaatggtcctttgctttattcgtaaatgaaccgttaaaa

SEQ ID NO: 131121 - DNA, 214 bp, Glycine max
atgagccatacgactccccagccaaaagcgagagtgtgaaccctaaaaaactaaataacacatttcacttctttgaagtgcgaatgatcagtacaatgatgattaacgtggccatcatgctttacaaaggactgcgagactttggcgaacaccaacaaactaaggaggacaacttagcattgacggcggtacctatcccaagtgctaagcataa

SEQ ID NO: 131122 - DNA, 423 bp, Glycine max
  unsure (1)..(423): unsure at all n locations
agcttgcctacagctgggatntcagaaattttatactattttatctgggcttcagggcaatgcaactatgcaaggtaaagaacgacaaactagattcaccataaagagaagttaagaaagttccttcaaatagaagccaaaccagattttaaaatgagtttctatgaataaaaaccttacataattatcaagaaccaatttcatagcagaataaatcatagtacttagaaaagcactagactatgtcctaataaagatttggcatcagtataaatgatttaaagaagaagaatacacatagtttacaaagcaatgtaacagacagcaacactcctaaactctgcatatctacacagcttaatttggatccaaaatcgcacatcacacttcataactacaatgtaatggacagtagcaatggta

SEQ ID NO: 131123 - DNA, 475 bp, Glycine max
  unsure (1)..(475): unsure at all n locations
aactaagctaagccgttgacacccaatcccaatcatgatccgccatttgttcattttgtcttgtcaaaatctaaattgatcctatgtgacaaaatctaaacttggttaaccaaacatgtcgaatgtggtgatcactgagataaactttatcatgtcacaacaaattatgttagggcttttaatntgaaacacaaaattgattgtttcattctagaaatatcattcttcgataacaaaaatggatatatgcaatgtgtgttattaaaccataaaaaaaaatcaaactttactaaaggtcactgcagtcaaatgatattccaaaattctatggattacacatattattcaattgatgcgacatnttgtgttcattaaatagttaaaaaacaccaacatcagtgtattagctcatgatntttgtgaatgagaaacaaaaaactgatactttcaacctattatatttaattttttgtct

SEQ ID NO: 131124 - DNA, 466 bp, Glycine max
  unsure (1)..(466): unsure at all n locations
agcttcgcgtatttatctctctcaactttgttttggaagaccaatttctaagtcttctctaaccagatgatgtaaatgatgcatgttaatgtgtactgccctacaatgccacaaccatgaatcatctattttacttacgaaacaactcagctcatgaaatgatgcatgttcaacatttagcatatagatattacctattcccttactaatgcggacaactctaccgaatatggtttcacttataagacaacaatttctgttgaactctantttgaagcctttatcacaaagttgactaacacattctttatcaaagttgtctattgattccctatatttccttctaccatctattttcctttgttattggctccaaatgtgacatatcctccatttgttgacacaaaatcaaatagtgtggacttgcacctgtcatgtccaagagcagcactatccagtatcatag

SEQ ID NO: 131125 - DNA, 356 bp, Glycine max
  unsure (1)..(356): unsure at all n locations
aacaatgcacatctaccagataaaaactactcgagatcatatgtatctctaataaacaccacacatcatttactattagtaatcattgttaactcctgcccataattgtcacaactacccctaattccaccaattacaggctcctaaaaatcaacctttatgcaaggcttaatgcatgaaattggntctttctccttatttttgaacacttcaatagcgattacattgtcatctttgtttagggtttcattatatcccaaaattcccactcttaattgtttatctacatattaatggaaggggagaaacttttctgcactcctaaaatacaacccttcatatattctttccatcac

SEQ ID NO: 131126 - DNA, 373 bp, Glycine max
  unsure (1)..(373): unsure at all n locations
agcttgcccttttaagctgttttcttatgtatcaagncatntcatggcccacgcaagccaaatgctagcctgcgtgagctagggtctataacaatccacaaaagaccctattgcccccttccttggtatctttttgttttcttgatcaaaacatcgagtgattccttgcttcgcactgtaactggcgccaaatactataattcgactagcaagaatcataatatcatattgaatgatatttttcggacgaattatggtctgacagttgcccctctctacttatcttttattgaaaatgaanaggtaagtaaagataaggacactaatttcatttgagcgatctttgtattcgaaatccggcactataggaaac

SEQ ID NO: 131127 - DNA, 488 bp, Glycine max
gacctatgaaactacgctgtggatatggggacccttcatatgttgtactacgtggtggtcgggcgatggtgcacaacaagttttccacatccacaatgcgcgcataaacccaccatcccctgttgcccacctccaactgagctcacgtactcccacgtagcccatatcctcgtttctctcaataccgggtccccatcaatcctcccattcttccacaacatccaagcaaaacaacattcaaacagcacaagctatcacagccaagcaaaacagagcaaatgcagaaaactctgccaaaacaccaaccaaatcacagcttttctcacttaaagaccccagtaacaattccttcgttccggttcattaaccgttggatcaactcgaaaatattactggaagtctttagtacataagcccacattttgaccgttgggatctactagcaaacatacagaactcactctacattactctgttcacaaccagca

SEQ ID NO: 131128 - DNA, 270 bp, Glycine max
agcttaacccatgaggggactgttcctccgctttgtattgcagacgatccatcataatgcctatgagtcggaacttccaagagaatatggagttgacaccacctataatatttttgatataagaactattgcaggctgagctgatatagaggaagacgaacccacagatttgaggccatatcctcttcgaggaggatgggatgatgccatcctccctaggaaaggaccagtgctcactgccatgatcgagaggctcctagaggattgggc

SEQ ID NO: 131129 - DNA, 391 bp, Glycine max
  unsure (1)..(391): unsure at all n locations
acactatgaaactcagctgtcggagccgtgcttacgcggagtttacttttctttttgtggcggagctggcgnggatcaacaatgattcaacttctgaccactcggtgacagaggctctctatcctagttaacaaccaactctcctttatattcaagctattaagagcagtagaatggttttatagtgtcaaaataagttggactttatatgcagttgaatgacttccatgtcagctcgtacccctgaatattgcatgccagctgactactactagagatgatctaatacgcgtcattatataacattatataggaattcaataacgactctcaggnccatatatgcttcattgttactaatatgacggaggtcattctcttgacttctgaa

SEQ ID NO: 131130 - DNA, 294 bp, Glycine max
tattaggcaattcaattgagcgaaatcccaaagaaaagcgtctaattgatttttttggattattttattcaaagatattttggttattttattattattttgcctcttttggttttaaacgtggttacggcgtgaaagatcggatggattttattttaacagagatcaaacgatattgcaacttacatgatccgtggaaattcattttattattgattacgcgagaaaacagcttacataaatggtttatgcacgtcaaaagggggtacggaaaacatatgaaatgaaaaataa

SEQ ID NO: 131131 - DNA, 469 bp, Glycine max
tctcttggaccttaggcaaacctccaactctattcttcattatcaaactgtctactcgtgattggtccctctcctctctccggagtttaagctcgctgttgctaccccacagagcccctcgaaatttgttccggccgtgttcttccctacaagccctcttggtttctcgttccaaggcattggtggtagccacatttacatctctctgttcggtattctcctttcggatttttcagagccgctgatttgaacctttctttaactgtttgggcttgctcaagttccgccctaagggcctgcacctctttgtcttcctccggtgcctcaacttcctctcttttagcggttctcaaacttagaagccaatccaaaccttgcacgtgggcttttaaccacttacgatagccaccgatgggcccattgttacttgccctgagttccttgtccttcttttgcaacaccttccatg

SEQ ID NO: 131132 - DNA, 242 bp, Glycine max
cgcattcaagaatgggctgatgcctaaaactacttctgctagttcaaggattctatgtcataacaaacaagggagagcacctctaaacactaaagtttcctaacacagccacctacgcctatagacaaggacactttctcactgtacaggcctgccatataagaagattaaagaatcattgtgatagccagacgcgtatctacgactctagctatacactgcctgatacaaactgtgaattg

SEQ ID NO: 131133 - DNA, 414 bp, Glycine max
  unsure (1)..(414): unsure at all n locations
agctngtatttttaccaactgaaggcaattcttggcatgctgaccatattgttccagtatatgacggacgaggtacaattcattttaaagattaatcctacttgcgttttaggaagagatataatatcgattcctaattataatgacctgattttcctagaaatgaccaaaagaatgtgtttcagacttaaactccatttgataatatgattctggaagcaatcatagtcttaaataaatactctggtacacttttgataaaggaattagttggctcaatggaagtgtcaatatagaatattgatgcatgtgaaaaatccatgtaatctgcttatacctatgatttaaggattatgatttaagcctctaaatagtaagagagcggtatgtattcctagtactcaatatcatgct

SEQ ID NO: 131134 - DNA, 440 bp, Glycine max
tatagtgtttggagggagaatattacaatccataatcaattgtacctttcaagtgacgaagaattcttattgcggcttttagatgacgagaggtaggagcctccataaagcgacacacaactcccaccgcatatagaatatcgggccttgtattggttagataccttaaactccccacaagactcttgaagatcgtggagtctaccttttctccttcatcaaactttgataacttcaagccaccttccataggtgtgttcacgggattgcaatcaagcatattaaacttcttcaacacttcttttgtgtacctttcttgtgagacaaagataccattctccgtttgcttcacttccattcccaagtaatatgacatgagtcccatatctgtcatatcaaattcacgagacatggactccttgaagtcttcacacagattt

SEQ ID NO: 131135 - DNA, 290 bp, Glycine max
  unsure (1)..(290): unsure at all n locations
tctcttgaaccgagttccaatctaagctgtcttatagacacctttggaattattcaagggatggaaacgaattatgctacatatacacttttgcggatgcccgtctgaagtatcaatctatcatcctctagagaagatactagaccctaagactattactaggtatttcattggatatagctgaaaggtctaaacggtctatgttatattggacataccacaacactatgattgccgaatcaaggtatgctaagttntcttgagaatgactctagctatgaaagtgaaca

SEQ ID NO: 131136 - DNA, 305 bp, Glycine max
tatttctccattggcaatgcctgttacaacacctttgtcaatgattttcttcatgcctctgaaggcaaaagtcccgacctttgatgccaaaaatatgacgctcatccttccttggacgatacactatgtggacgagtagctcgtttcttggggcgtacatggtaacagatagcctttgatctgctggccttatctcaactctaatcttttatttgtcaccacgattctgactagtgacgttccaatgaattcttcatcctcagctgactgatgtgagcaatttgcagccgtccttaccagcttct

SEQ ID NO: 131137 - DNA, 349 bp, Glycine max
  unsure (1)..(349): unsure at all n locations
agcttgaacttgtgattccactcaggatttttangtttttcttatttgtggccnnggggggggaagnaagtgcgctatcaagcttagtttaacataaggatcagaagttcccagcatatccatgtttaaaagcttttgtgcacgaacctcattcgcatgttatatcctcacaagcttctttattgccaccctataaaagatgtgaacaaagcatcagacatcttcatagagcaaacattgttatttaaaactaaactttgtcaattcatagtaaatttttaacaattagtgaagtatgttctaaataaaaatatagttctagtaagaatgggtgttcgcgtgtgtctgt

SEQ ID NO: 131138 - DNA, 397 bp, Glycine max
  unsure (1)..(397): unsure at all n locations
agcttgtcatgtataagaatggagagggacttatattttttttcctcataaaggaccacaggggtatagntttagtgaatatatataaaaaaacaaccaacaagttaaaagaaagagagaccgcgaaggtcgacatgttatagttaagaagtataaatcattcgtaaagagcaaacacatcttctggaaacaagggactgatgctaagagtttattttccggaatgaaccgagataaggatggatgaattcattgaactgatgaaagaacataacttggaaacgctgggtctgtctatgttaattcccaaccgtagtatcacaatgccataaacgggatgcatgagtgcccacctggctgtaaccatgactaattttgatggtgttttcaaacatta

SEQ ID NO: 131139 - DNA, 413 bp, Glycine max
  unsure (1)..(413): unsure at all n locations
cacatagaaactaagcttagttttcttgtgaaatatgcttctttggtctttctttcttatcacaaaagcagaaacccgctatatctagataaaaccagctacacaacatcttagtttatccatgttggctaacctcttcttgcacaaactatntgggaatgctcatggctttaatgtcactatcatggcatgaaaggatactctaagctctaaatctcaaaccttgactatgatttgtgaaaatcaggccctacaatgacaaagttactcattatctgcttgtcgtaggttgatcagtgttgtcgatgtcttatgatgagatcggcatgtggcatattgagcatcaaaatgttcaacaagtgtgtcaaatgagttgatagttcgaggggaaagttgatgccaccatgttaatg

SEQ ID NO: 131140 - DNA, 340 bp, Glycine max
agcttacccttatggcttgcctctggactttattcctcgttctcgctccggaagatgtgagccaagcccctaccttcgaggggcaacttcctccttatgccgaataccccctgcaagaagacaacgaatgagatgcccatctaggccctctgcttcccctcaaggatccagccccccatgaactaccccaaccaaacatagtccgccatgtcccatcttcacccgcacccgtaaaagaatctgttcccttcatagaagataagggaaagattgatgcgcttgaagagaggctaacagcattagagggcctcggtaattacccgttctcggatttagcgga

SEQ ID NO: 131141 - DNA, 292 bp, Glycine max
ttggccttctgggcaacaatctggagccattgaacagcctgaagcttatggtggaaacatttaccatagaacttctcaaccttaatagccaaatcagcccaatagaataattatgaacttttcagcaacaagtacaatcccgggtggaggaatcatcccaaccctagatggtcgaaatcctcacaacagcaacaacaaccacaacaggcttatttttattattttggtggcccagccaaaccatacgttcttcaccattcagcaccacaaaaaagtaccagcccaaacagca

SEQ ID NO: 131142 - DNA, 329 bp, Glycine max
  unsure (1)..(329): unsure at all n locations
gcttcttagtttcagatgatgcagatgtgtttcatctacctcgttctctcctctaaggactatggcatcatttctggcgctaaactgctgggagttggaggccatcttctcaattaaatttctggcttcagcangagtcatgtctccaagggctccaccactggcagcatctatcatacttctctccatattactgagtccttcataaaaatataggagaagaagtngttctgaaatctgatggtgggggcaactggcacatagtttcttaaatctctcccagtactcatacaggctctctccactgagttgtctaatacctgagatat

SEQ ID NO: 131143 - DNA, 109 bp, Glycine max
ctggaggtggattttgaggattccactctgatataaaatttcctcttagtgtagtggttcagcgtcaagcaatgacatctcatggtggccaccaatggtcgtgggtggt

SEQ ID NO: 131144 - DNA, 362 bp, Glycine max
  unsure (1)..(362): unsure at all n locations
gattcaatnngggcaaaattggatgagggaaagagtggtttttgaaatctgcactttatgcagaattttgctggtggaatgtgcagcaaaattttgtataagtgcagaaaaacgcttgtgcatggctggttgtgaaaagggtagtacatatggggttctggacattttctagcagatcccaacggtcaaaatgtagaattatgtactagagacttccagtaaaattttcgagtcgatccaacggttaacgaactggaacaaagagaatgttactggggtaattgaatgtgaaaagctgtgatngtggtttgtgttttgggcagaagtttctggctttgccctggtttcttggctggtgtagt

SEQ ID NO: 131145 - DNA, 305 bp, Glycine max
  unsure (1)..(305): unsure at all n locations
tcgattacatcttctggctatcgattactagagaggtactatcatatntttgaacagataattggtcttaaaaaacttttgtaaaatatttcctttagccaaacttgtgcaacatcaattatggatttctttctaagatcctaactaagtacatcgttcttcttgcatttttgaattcttgacttgaatcgcgttcatctttgacatcatcaaaacttcatatcatatatgcttctacaatcaatgagtgactgatagacaaatttgcaaccatggtaaaatttaggaaccaacattgcaaaaat

SEQ ID NO: 131146 - DNA, 359 bp, Glycine max
  unsure (1)..(359): unsure at all n locations
agcttctaaggcattaggcatntttgtttttgtatcattacgancacgaaggacagcagttgatttttaataacctattgatggatctaatatcaatttggattagttttctaaaaaaagtgcatttttaattcaaaaggaactcaattaaatatttaacttctgaagaatcacccaacaaaaaatcattccgacatttattaaaactgattcttttggcataaaagctttctttatgtcattgccacctttatggctttttagaaataaacccatccaaatgcacatctaattaaattactacgttttataactaacatagaaggtntggcattaagttcttgtatttagttcttaag

SEQ ID NO: 131147 - DNA, 366 bp, Glycine max
tatcatgaagcattgcaaccatgtgatatgtcctggtacattccataaaaaaatgacacaacaaaacttaaaaaggatcagtatatagcatggtattcctttattcttcacctaataaatgagaggaggggaaaccactcaatcctatcattttgcacattttttactctggatttataaaccataaaatccaccaatcatcattgtcactctttctctagtttccactttttctaccaactagctaacaagtatgtcccaaaaaaggcaataaaatcccaatttggtactgcaacattcttgtgctgttacaggtttaaaatgaaaaaaagaactatgagcttagccatggtagaatgaaaaaac

SEQ ID NO: 131148 - DNA, 350 bp, Glycine max
  unsure (1)..(350): unsure at all n locations
agcttttgcaagcnggaancanntatcctattttcgacttttcttgggngagncccgtgcaggtagttccaaagaaaaccggcctcaccgtgatcaaaaatgagaaggaggagctgattcatactcgggtgcagaacagttggagagtctgcatcgactataggaggttgaaccaagttaccaaaaaggaccattttccactgccattcattgaccagatgcttgaacgcctggcaggtaaatctcactactgtttccttgatggtttttctggttatatgcaaagcactattgctcctgaggatcaggaaaagaccacattcacctgccccttcggcacttttgcctat

SEQ ID NO: 131149 - DNA, 274 bp, Glycine max
ggatgctttctcgcgtcttcatgagcccgagcacaccaccgaatacttcccaatcgtcttcatgccttacccaaaattccttgatgagctaaagagggaattatcgggaccagaggaattcaaaactctcatgctccaagtccgcaatgaaccttcgaaaaatccagaatttgaaattagagacaaccttttgctttttcaagggccgaatttggattaatcaaggcaatcttttcatttccctcttattaaaagaataccacaaatctccact

SEQ ID NO: 131150 - DNA, 149 bp, Glycine max
  unsure (1)..(149): unsure at all n locations
cctataagcggacgtanacatagaggtaaagataaaccaatataacttcttgcgtgtaatcttcttttatctgttttaactaacctacgatttgaattagattttggtcttgaaaatctatttttagtctataaaaattagttctcatc

SEQ ID NO: 131151 - DNA, 290 bp, Glycine max
  unsure (1)..(290): unsure at all n locations
tgcattggnatttaggtcttttgagtttcctttaactgagactgaatgagtgaatgtacatgtttaatagatttgaaaaagaaaaaatgaaaatttcctaaattttaaatactttttattaatatattgtaggacatgactcaagcaacctctactcatgacagcaaaggatcttcatggatttgagtggaagtttaagcgtgcatacacatacatatatgggtaaattggttttgatatgagcaagtaaatttaattgcttggtcaaattctgaatgaatgaatgaata

SEQ ID NO: 131152 - DNA, 369 bp, Glycine max
ccggacccatgagtgacagacatgactatttctacaaccaacggacgcgacaggtctttgccgaacgaattaaaaaggaccactctacggttatacgaaccaacatgccaccgggtgctttcaatttctctaatcctacagtcatcgctctcctcgacggagtctacttccccattctattcgacaactccaaagtcgatgagcgcgatgtgctcgacgggacctatatgccttacacctgcttcaccgggggataccgagcgtgtgccttccatgacaccacccaacctctccacgcgctgcttgagcgcttgtactttacttcctccctccaacacgaaaccttctccactctttcgaacacctttc

SEQ ID NO: 131153 - DNA, 263 bp, Glycine max
ttatcactagagggggaacagttatgaaagagcgacgttactgaaaattaggaagacgcctatgctcgagacgaatcaagtaaagaaagagttagataacggtgcgcataaattaaactttgatatgactgttgttacaatactatttattttggtccataagaagctagctagctacaagactgggaaaggatggagactcaagcttcatctctagaccctgatcgataattctaatatactggatagcagaacccattatg

SEQ ID NO: 131154 - DNA, 314 bp, Glycine max
  unsure (1)..(314): unsure at all n locations
agctngcttaatctaatctcatctgctatgtattattgtagttgtatagannaaaggagcaacataaccaatgaatttcagagaggcgcatgaaagtgactaacgggatgcttcttacattaacgaatacgcgcggagtcgccaccaacgtttattcgaggaatacgtgngaaaaaccggaaaagacgtggtctacaaactttaagtgaaagggtccggagatgttttattcacggtgaaagtttattaccccaccctccgtccaagagacagcacctttaatcaatgtgccaatatgacttcaatgtatatca

SEQ ID NO: 131155 - DNA, 208 bp, Glycine max
ccaccaaggtcaattcctgacgcatatctccagccttcttttcttcaaactgtacaattgcctaacgcgtgaaagcctgcattttcaaaggaagccaattttaacaatttgtcactaccatcctcataacatattcttcacaactggtttaaatctatgagaatagtgggagaagtaaattaacggaaaaaacttaaacacacatctt

SEQ ID NO: 131156 - DNA, 454 bp, Glycine max
  unsure (1)..(454): unsure at all n locations
agcttcagctccacaaatcaacccagtgtttatatttacaccatcaggaaaatcaaacatcttactctgggttggttgatagcagagaagataagtctcaagaagaaacacctgcaataatctctgagctctttgaaggttttctaacaattggaactcttggtgcagaaacagtcaccaatgaaccaggaacaccaacatttgctatgccttcagaaaacataacatcgagaagtgaagaggtgacaggaaatgaactgaagctcataagttacgagcttgagaaatttcttgagactgaaaaagaagaaagtttgtatgattcatcaggaagaaacagctatgttagcattatcacacttagtgaaaaggaaatagatggacccaaagctgaagattacagaaacaaagctgtatgtccactgcaaggatanttactggggtcctcatttga

SEQ ID NO: 131157 - DNA, 314 bp, Glycine max
  unsure (1)..(314): unsure at all n locations
cacacacacacaanngggcctagtcaatcactcacataaatttccattctcccgctttttttttaatggattcttatcttaaaatcaagttgatcactcatgagggctctggatttaatccctatttctctccccctgtgccatcaacaaaaagccaaagtgcgtatcaaatttgaagtattcaaatataactaaacatccatacaacattcatggaaaaaatatcaaccaaatcatgaagcaagaaccatgaagncacaatcatgaatagattaattattaaattcagatagtcaaacaacatactttatatt

SEQ ID NO: 131158 - DNA, 442 bp, Glycine max
  unsure (1)..(442): unsure at all n locations
agcttattcttcttgctatgggctgatctttttatttangttgcatgcacaggctcttacgctgggagcattagccggagctgcactagtaaaatattatgatcgtaatgcaggagcaaaggcttcaaaagaaattttggacaataagtagaacgcaaccaaagtaccatgatgaattctttatatataccgagggatcctagtactagctagtcatacctgatatgattatagcaaaatttgcaattggacttgtactgtactctattcattcttaaaataaaacactacattgaaatgttaacaccataacatgcctgtggcagagtgaatatatttttttgtgttggaatggattacttatagtgctagttgcttcatacatttgctagcattntttgtcagttcatagttatcggaataggattagacaatatcttat

SEQ ID NO: 131159 - DNA, 375 bp, Glycine max
tttggtgtcaccatacttggacagctgctcattctccctggtatgtgaaacaaaataacactcaattgtcaagttaccactttaattaatctgagtagtgaatcacaaatcatgaagaattgagaaatgaattagacataccatctcatccacctaacagtcaagagaagacactgaaaagcaatgcattccgttaaattacatattcaagatattacctgaaattagtaagaagtaataactgggttatttctttgtacagctcctcattgaaggtggaaaacatctttaatcacccacttaatatctcacagccctttgcctttcttggccttaaatttgaaaaacaccagagacaatacaatgtgaaatttc

SEQ ID NO: 131160 - DNA, 368 bp, Glycine max
  unsure (1)..(368): unsure at all n locations
atatctcanaagggggaatgtcacaacctacccttcggcgggagggcgacgtgtgactcgcgggatgcgtcttccatgaaggaatacgcgcggagtcgccaccaacgtttattcgaggaaaacgtccgaaaaaccggaaaagacgtggtctacaaactttaagtgaaaggttcgggagttgtatntatgcacggngaaggtattagcaccccacacgtccgtcacaagagacggcaacctttaatcaaatgtgcaaatatgacttcaatttatatcattttccctttttttgcgtatctatttctttttatgctttttggatttttatctttttgggggcgacgagggtgtttaccttgctcctatgt

SEQ ID NO: 131161 - DNA, 349 bp, Glycine max
  unsure (1)..(349): unsure at all n locations
tgctctannattacattgatgttgatntactggttgatgtttantgccatttttgtttaagggtagcatttcttggtaaaactaactttccaaatgtttgccttcacaggaatggccccgaggaagcttgcctcaaagaggtccaggaaggacaaggcggccgaaggaactagttccgctccggagtatgacagtcaccgctttaggagcgctgtacaccagcagcgcttcgaggccatcaagggatggtcgtttctccgggagcgacgcgtccagctcanggacgacgagtatactgatttccaggaggaaatanggcgccggcggtggacatcactggttacttcca

SEQ ID NO: 131162 - DNA, 364 bp, Glycine max
  unsure (1)..(364): unsure at all n locations
agcttcacaaaagnnnatanggttttgaatctatgcactgttgcagaggtacaagaagtttaatgaggttgtgagctactcaagattatacagatgtgacatggaccattgctgctatgttaagaaatatactaatagttatgttatccttgttgtgtatgttgatgacatgttgattgcaggatctagtatggcacaaattatacaggctgaagtagcctctgctacaaatctgttaaagagtggaggttatttcttcgtttagtggaggtttataccctccgcaaaatagatgacggaggagaagaaagtcctctctattcattatgtataatccttcatgtcctccttctcacacttattg

SEQ ID NO: 131163 - DNA, 385 bp, Glycine max
  unsure (1)..(385): unsure at all n locations
tactcagctgtgctgacccataaattttncttcaagggggtttcttttangtttttgcatcaatggttccctcaaaagaattggaaatttcttttgaattctattggtccaaaattaaaatgatattaaaatccctcttatttcattaaaaacaaccaataaggtagagaaattttaatcattcttagtcaaaattgactatcaattaaacctgaatttacaattatcagctccccaaattaaaatctttgcttgtcctcaagcaaaataaaatttctaaaaagttctaaatgtgccaacacatgagataactacgaatcatttcaaacctttcaatgactgaccctcgagcttgcatttttcatgatattgtgatgaaaaaatg

SEQ ID NO: 131164 - DNA, 320 bp, Glycine max
actcagcttatgcagattagtaatgacccactaacctagattattatatcttaatgccattaacctcaggaaataaaaaaaacttaatggctgagtgtaactaaaaatgtggcaaccaaaagtcacccccaacagccaacaagtcaaccaccatttggtcttccaaaaggctgatgcctaaggtgcccattgggcccttattacaacttgaactaaacctactaaagcccttttagttgattaacccaaaacatatttttggtcaaccaactttacaaagattgggccattatttagacaaactaaacactctaaaattg

SEQ ID NO: 131165 - DNA, 419 bp, Glycine max
  unsure (1)..(419): unsure at all n locations
agcttatgtgctaagcaagnnanccctnattcntcttcttctagnnnnngcannaanggtgctccaaagcacttgtaatttaatttttttgaatcctgctggtaaaaaattaacatgatatcaaattcctcattatttcattaaaaacaaaactaaagtaaaggaattttaatcattcttatccaaaattgactatcaattaaacccaaatttcataattatcattgagccaacccaattaagcttcactcaactatgtaagcttatctttggcaattgtgtagctgggttcttctttctgcgtgttacaactgttgagttcgacactaacactgctcctctctagaaggccatgaataacattattcttcattagctgcctatggactacattntcctatttgaggaacccactcaca

SEQ ID NO: 131166 - DNA, 337 bp, Glycine max
  unsure (1)..(337): unsure at all n locations
ctaacctttaccttcatttaaccttaaactcccggtattttgtattataaacaaagtgatggtcaaggacactttaaatncctttttaatcaactaacctacgcttaacaaggtttggtccatggtaaggaccttaaaaacatctgatattaatttgatacctaaacacgttgaaattgcaacagtttcctttccttttacaggaatatagccatcattcccaattctgacctttgagacaatagttggctttcaatccttgaatagagtcttatcatatgtcatgtggttcgtacaaccactatcaatcaaccaactttcacttgattcactactc

SEQ ID NO: 131167 - DNA, 383 bp, Glycine max
gcccttgtgagccttgattccctttccttgttttgaagctcactacaagccttaagtgaaaaaccatgatattaccatatccttaaggaattttggagctttggaattgttttgggaataagtgtggggggtttttgtttcattggacaacttgttttgttggctatgcttcatgatggattttgggccatacttgatgtacattgtatattggttaaatgttggacatgctgaatgaaacgtgagttctcaaaggcttaagagtaaaaaaacaaaaatctaacaagacactacatcttaaaactgaaatgaaatgccttgaggttggtgattaaatttaaatggccaggaagatgaactttggtctacactcatgttaattg

SEQ ID NO: 131168 - DNA, 324 bp, Glycine max
  unsure (1)..(324): unsure at all n locations
tgtctcagcagttgtgcgagaccgaaaccatcatctaattcatcttagtaagtaccaagaggaattaaatctagccacgacccacgagcacaaagttacggacgaatatgcctgaatgtacgcagaaaaggaggctagaggaagggtaattgactcgttacatcaagagccaacaatgtggantggaccgattgctcttactttgaacgggagtcaagaacttccccgattgctggccaaggccaaagcaatggcggacacctactctgcccccgaggagatccacagacttctcagctattgtcagcatatgatagacttaat

SEQ ID NO: 131169 - DNA, 263 bp, Glycine max
tcgcacagaagaagaagaagaagcagtgcgcgaactcacgagtttaagctttctctccttcgtttggttgatttctgttctactcgcaaggagtgaggagatttatgagcattccaatttcggttgtatggtaaagaacagaaaaagaaaactcgatcgattgtagggtcattctacttttaaattactttcttccctgtttaaaaaatattacatttctgcctaacaaaaattaaaagtacaaaaagagcatggtacagtta

SEQ ID NO: 131170 - DNA, 188 bp, Glycine max
atttattaaacttaattatgcccgccgatgtctttgactaaacccattccgggttcgtaaccgttccccaacataactcgggccatcattactgctgcatcggacaggcaagcttgcccagagaaggagcccacggaggaaatgcttaccacctcaaaagactggaaagcggtttctaatgactcctc

SEQ ID NO: 131171 - DNA, 201 bp, Glycine max
agctagagcttagctacacactcctttataataagtgagctcacctacttgagacgagaagctagagcgtagctgcgccctgtctagaatagctaagctcacccgtaggcctacatacatgagaatacctcatcagtccctactacaaagactactcatactgccctatagtacaaggctaaaaccccatattactagaat

SEQ ID NO: 131172 - DNA, 448 bp, Glycine max
  unsure (1)..(448): unsure at all n locations
agctcgaggagacgctaaancagnncagggatangtctatgtccatctataggagcacgaaagcctccatcaagaacctggagatacaactaggacaattagtcaaacaaatggctaaaagactcattagcagctttggagccaacacagagaaaaacccatagaaggaatgcagggcagtaatgaccagaagccagatgaaagtgcaagaagaagaagagaaagctgaagaagaccagtctgaggaaggaagggcagacaaagaaggagagaaggagggagaagaaaataaggaagaagagaaagaaggagagaataaggtcttaatctctaagaccaaaagccagctagcccgagaggctaggcaagaagagccaccagcccctctaaaggagtccccatatcctntagtaccgtcaaagaagaataaagagcactacttcaagca

SEQ ID NO: 131173 - DNA, 177 bp, Glycine max
gctggatcttcgagaattttggtgcgcagctttacaagacaattgtgcacgaaccgcctgctgggaacctctataaaatgtctggagtgtgtgtgaagctttctgtcccgagagaagatcgtctttacgcctttcatcctttgctttcgagaacttatgaattccttctcctttctt

SEQ ID NO: 131174 - DNA, 301 bp, Glycine max
  unsure (1)..(301): unsure at all n locations
agcttggagaattatgggggacccatcacatttggtttctattgtggcggnccggcgaaggggcacatcaagctttccacatccacaatgcgcgcataaacccaccaagcnctgttgcccacccncaactgagcccacgtactcccccgtagcccatatccacgtgggccccaaaacccgggcccgaccaatactcctcaagctgcgcaacatccgaacaaaacggcattcaaacagacaagcagtccagacaagcaaacacaactaggcggaaaaagcaggcacacagaaccaaagcaca

SEQ ID NO: 131175 - DNA, 351 bp, Glycine max
  unsure (1)..(351): unsure at all n locations
ttttctagggttgaaaagtgaaatttagaatgaggtaaatttgaggcaaactctcacctcacaccagtccataacatccatttagacttgttcaaactggatttacacctaaaatctcaccgaatcaaaatttgactcttcaacacccaaatttgccctagcaatggctctttgttcactttggtcatttgtttttctctctagctcagcctaacctttctcacatgttctaaatgacatttcaagctagtattaactcactctaacctncatttaccacagaattcagacttagccttccaactctcanagtctcactctttttncactcataacatcacattctcactt

SEQ ID NO: 131176 - DNA, 430 bp, Glycine max
  unsure (1)..(430): unsure at all n locations
agctntaaatgatgaaaattcatttttgancttatatgtattaaatcatngaaggcctccagaagaaaatcgatcatgagaagatggtctccatgaaagatgatgagaatgaaaagtttgttaaggccattgaaattcttaacaagaatttcaacactgtagccaagaacttagcagagaccaaaaatattgttaaggcattgaacgatcaactaaatgttgaagaagagaagaaaaagttcttgagctagaaaaagataatttgctaaaaaagagatagactcgattgatcaagaagcttccaaattgcaagtgtaacttgctgatcaaaagatagcaactgaaaagacaagtgctaagcatgtgttgcaatngcaacaagccttcatgatgggtcatgaagatggttntatgaaagctatttgtcaac

SEQ ID NO: 131177 - DNA, 370 bp, Glycine max
  unsure (1)..(370): unsure at all n locations
tggaagagccatggactacttttttttttttccccngggganaccaaaaacaacgcggcctaatcaacacggaggtcaacaataagcatatgatattccgaatctttggtatttttgcacactttttcttttttcttcctattctatgttagctatctctgatcaaagcatttcttttgtagtttctattaacaacatttcatggtatggagctactattttatggtccacccttcacattaaaagaacaaatatttggcatgagctctcttctatgctgatcaacttccttggacctgggttacattggtgaatcaatgcggttttaggggacatgaaaaaatggtggctacctctcccttaaccatct

SEQ ID NO: 131178 - DNA, 453 bp, Glycine max
  unsure (1)..(453): unsure at all n locations
ggatctctaagcacctgagctgcagcttggaaagagtgggaggttttgtttcttttgcagagctngaaagagcccgagtagtcgaagagaagttcaagtccatagccatcaaagtctgaaaagagtatgatgaactaagggacgtcaatatggccaccgctgatgccttggaacgagaaaccaagaaggcccaaaaggaagaacacgtgccagcaaggttttgaggggctttatagggcagcaatagtaagctcaagctccgaagaggtgaaaggaatcatcatgggtcaaaggcatgatcttgaaggacgagctaaaggcttaccttatgtcgaaaagaaatttgtcccaacagttaagcgagactgaagggaatatgtgggccgncatcgatgagtgcaaagagaagctaaatctaacagtgactcacgagcataggctagaggatgagta

SEQ ID NO: 131179 - DNA, 270 bp, Glycine max
gaagaagggaccccaaccgaggggcgaaccgaattatgtttgcaacaacaacacaaagggaggaagaggaaaaggagaccccacccccccaaaaaccaaagaagcacgcaaaacgacaaaaaaacaggggaaaacgagaagaaggggaaaacccaagcaacaaaggggacaaggaagaccgaagagagcggaaaagggcaggaaaaagccaaagggaaaagggaagaagcagaagagggaagggacaagaaagaagaggaaacacaagga

SEQ ID NO: 131180 - DNA, 305 bp, Glycine max
  unsure (1)..(305): unsure at all n locations
ctaagcttgagccaaatcctgactaccatnaccttgatccagttttagaatgccaatccttaccctcggaagccaaaaaaaaggagaagagaaggaaaatttcccatccaaggaaaaaggagaaagaaaatttcccatcaaagaggaagcataaaaaggagagaaggaaaatttcccatccaagagaaagaaaagaagaggaaaggaaattcccaatcaaagagtgggagaaagaaaaaagaaaagaaagaaaactcccaatcaaagaatgggagaaagaanaaaagaagaaagctcctggtcaa

SEQ ID NO: 131181 - DNA, 332 bp, Glycine max
  unsure (1)..(332): unsure at all n locations
agcttgaaggcatgttacccaccatctntttatagtagaacaccggcaatgtgtctactatcattgtaatcatctccctttcaatcattggggcgctacttgagctggcagatccctacaccttttggcgtattctttgaaagattcatgctnccttttgcacatgttctgtagctgcattctatttggagccatatcagaattgtactgatactggctaatgaaggcaacccttanggccttctaagaatggccccgggaaggttccagatagtatactacgtgacggctatccccacaagacttttctggaagagatgcataaacaaaat

SEQ ID NO: 131182 - DNA, 366 bp, Glycine max
cggataatttgaaaattatagaataacatgaaatgtctgtttttctgaccaagcaactacctatggaagtaataaattatttatgttgaaatattgagaatggttttacttccaaaaataattccatgtatctactgcataaatcaattaaagttttccaaaattagtttttttaaccagttttccaaaattgatttcttaaaccgctattacactgaattccaaaattttgtaaaacaatctcaaggttgataacctaccaagatatcaaaaacaagaattcttaatgatctctggacaagaaataaactaatcaaagctgcaattcagaataaagcaaacactccttaatgcagtactattact

SEQ ID NO: 131183 - DNA, 389 bp, Glycine max
  unsure (1)..(389): unsure at all n locations
agctntgaaattattatctctatttaccttgtttatgttttaggagagcacattggtttaagacaattttgccccaaatttgggggagtttgttggatggataaatttaaaggtaagaaactacaacacacatagcaaattaataaaatgttatgtgttaaaaaaaaagaagaaaaagagaaattcaaatgagtgtgtgttgttaaaacaaagtcaagtgaaaggctgatgaatgggctaagtggattgaaaagacgaactgggttagtctaggatttgtgctctcttagaactcaagcttttgcatcctaganaaaaccaatattttgtagctcagcctcattacaagccaataaaagtccttctgattcaatttgtgtatttctgac

SEQ ID NO: 131184 - DNA, 329 bp, Glycine max
  unsure (1)..(329): unsure at all n locations
cactgtcacttttggctcttacaactcaagctatacaccaaggttgacacaaccctgtattctttgtcctaccaagtcactactagcgctaaacaaataaaaagatttgtagtttgtttgcacagtgactaactcttactcgtcttacagacaaatatataatctactcacttaatcttttctctcaaggtgttcaaggtgtattgagagctttttcaaacttcacaagaatgtacaaagaactttntacaaaanaaaaatgaatgttanggcatangtttgtgtcccatgtctttaaaagttctggtatttatagttcttcatcttta

SEQ ID NO: 131185 - DNA, 376 bp, Glycine max
agctgcccattaacctttacaaatactgtttagcattttacatgtttggggggggcacattcccatcacaaatattttctgttggactaactggcctcataattattaagaagggggagaggaattaattatgaacgtgtcttgactaattaaaaaattatccttcttaatgttactagatacaattatgctttactactaaattatgagaaagtaaagaccagaaacgatatcttatacaaaagttaagcggaaatacaaagtacacaacgggaagataaacagtgtttggaagaataagacaaacacaatatttatactggttctgcctccacccgtgccaagcggctatatacaagcaaccaccggtgcttga

SEQ ID NO: 131186 - DNA, 249 bp, Glycine max
aagggcacagatcccttgctcaacctattcgaggtttgaacacaagcctatggcttacattcacagggacggacttattaactgaggtgagacatcccctgatccaccatatccgcctctcatgagaccccattctcttgagcacgtaagagaagaaatgccaagagacagaatcataggccttctcaaagaccactgtgataacaatgcaagatctcttagacctcagagtctcctcaaccacttcat

SEQ ID NO: 131187 - DNA, 454 bp, Glycine max
  unsure (1)..(454): unsure at all n locations
agctntgcttctacaatcacccnncttttgttgatgtcttcttctgaaatcaagaaacacacacacacacacacacacacacactttntcctagtcgatcactcacantaaattccattctccccctttgtttttgaatttatgcttatcttaaaattaagttgattactcatgtgagttcttgatttaatccctatttctctccccctttagcatcaacaaaaagccaaagtgcgtatcaaatttgaagtataaatatgactaaacatccatacaacattcatggaaaaatataaaccatatcatgaagaaagaaacatgactagatcaaatatatagaaaaatcacatagtcatatagcataattcataattgttcaatcataccatgcaaataaaggaaatactacatttgtcaaatgtcataataatatagccaaatacacgagaataga

SEQ ID NO: 131188 - DNA, 122 bp, Glycine max
gattaaactgttaacacaagtgaactctggtatgattttggaaattctgtctactcatgttttgaaaagtttaaaactatcttgatgagcttcctgatcttgatctgagcttgaactgactg

SEQ ID NO: 131189 - DNA, 268 bp, Glycine max
  unsure (1)..(268): unsure at all n locations
gctntcaagaatcaagatcaagattcattattaagggaaggcttattcaagataagnatgaaaaggttntttcaaaaactaagtagcacatggatttttctcaaaacatgtttaccaaagagtttttactctctagtaattgattaccagattatngtaatcgattaccagtagcaaaatggatttgaaaaaagtttcaaatgaatttacaaacgtccaatttgattcaaaaagctgtaatcaattacaatggtttggtaatcgatta

SEQ ID NO: 131190 - DNA, 66 bp, Glycine max
tctactgcaagtccccgcaagttctcgttttatgtttcactgagaattttttttggtggttgatgg

SEQ ID NO: 131191 - DNA, 213 bp, Glycine max
tttttattattattcaagagaatcggtatatcatatttgacttcagaaatttgacattttatattaccccgccctttttggttaaccgcggcttagtgtgacgaccggtagatttgcttttcagcgattaacgagactacaacgccctgatcgggtgaatcatttttcttatcaggtggaaaacacttattatcatttacgcacactaagggg

SEQ ID NO: 131192 - DNA, 424 bp, Glycine max
  unsure (1)..(424): unsure at all n locations
ttgttttttttttgataacaaacacgaaactttattatntgttgtgatgccattccatataataatttctaaggagaggggcacaatacacatttaagttgtttggttgatagagaaaatttattacgtggtttagataatcttgtgtttgtagtcttagttaatatttatatgatatatactttttttatttataaataaaaattaataacacttaattatatattatgtagaaatttataaagatcataatagtcgtttgctgtctaataatttctcaaaatttaaatcagtttccttaacaacgcgttttaattgtgatctaattttcattattatccttgacgtaataattaaataatatgtctcctaaacgtcaattcttaaatgtatttaaaattgtaaaagttaaatcctctaaata

SEQ ID NO: 131193 - DNA, 450 bp, Glycine max
gaccttagaaactcagcttaggcatatctgtgccttaagaaagtggccagagtattttattacttattaaacagtaggaatattcaacatccagaaaatttagttctgacatgtactcaaaatatattccctaactacttcagtgagatcacagtgtttttccacaaacctaaatttatttaattttgtattttcttaaatgtacaccagtctattaaatttttatatatcatgataattaaggagttcaaggggtgatctcaagttgtcttacatagtactatatcaacctccttttggtaaatgaatttagtttatttttcaattcttattgctcggcatgttacctgaaaaagtttcactacttaaaatgcatttttcctccttattttccaagttctttatacgtgggaaactatcaccagttgacgtttgacacatattgatgtt

SEQ ID NO: 131194 - DNA, 297 bp, Glycine max
tgggtctctgcaaatcttcacacaacaaaatctctcgattctcttgaacttggacctttctctctttagaatctctcacatgcagaagctccttgagaaaatggccaaactctctctcaaaatctgatttcacgcttaaataaggggctttgttcattctcgtgcgcttaacgcaattctgaaccgcttaacgcgcattaatgaatttcggcttaacgtggcttttcttgctcaacggatggactgaagcaatgcgcttatcgggatggcccttcgctcaacaacaagcacagctta

SEQ ID NO: 131195 - DNA, 402 bp, Glycine max
  unsure (1)..(402): unsure at all n locations
agcttctacttatgtggcanggcgggtntcttcattttcttgtttccaacgcgagctctgaccactgttcttccttcccgcgatgcttcttttcatgtccgcctgagtgggcttatatcctaaaccatacttcccacgattcccttgggtttttatcagactagttatgccgccattgtctttgcctaaacccatcccgggttcataaccgttccccaacataactcgggccatcattaccgccgcctcggacagacaaggttgcccaaagagggagtccacggaggaaatgctgaccacctcaaaagactggaaagcggnttctaacgattcttctgcggcttccacataaggcatggaggatgggcagcttaccaagatatcttcctcgcctgacacgat

SEQ ID NO: 131196 - DNA, 262 bp, Glycine max
ccacttttgctagcaattgatgacgcccttgctattttccctaaactccttatctttcctttccactgtattccacactctaaggattctctgaattatcttcgcattggcttcattgaaacctcgtgcgacgaaaaggcgaatgatctccttcgatggtgcatctctcatagggtagcctatgtgtcttatggccagcatgggattataattaatacaacccctcggtccatcatggggacgttcgggaattccttacatg

SEQ ID NO: 131197 - DNA, 366 bp, Glycine max
  unsure (1)..(366): unsure at all n locations
acataagcttattcttcacatgttctatggcagatcagttntcattccgagtcacctaattaaatatattaccaactcttaacgggcctaatcagttcactccttctcaaattcatgctgggtggcagaatttgttccttctcaaactacacctctctctcactcatgccgactcatgtccgaccaaaaaataagcaatgagacctgtttgacttgaaatataaaaacaaataactagttntcaattttgaaattattcgcttcattgctttataaaggattttttttttgagaaaaacaaaaataagatattgctgtttctgctaaagaaaaaaanaacaattacttcaactaanaaatgaaact

SEQ ID NO: 131198 - DNA, 305 bp, Glycine max
  unsure (1)..(305): unsure at all n locations
ntagtatgaaaaatgaaaaaaatatatttaaataaatgttttaatttttatttaacgagaaatttctatgaaatgggacacttagagtatttcgagacttaaataaattaaagaattgcttaaaccaaaacaataacatcaggtgaaaatgataataatagcaagattactaacaacataagagaagaaaaataatagcaatatactcatgataagaatacttcccataatttagcaaaaaagaactgtaagagttagagggtatgtagtttctgttaaacttgaaaaagatagattgaaccctt

SEQ ID NO: 131199 - DNA, 388 bp, Glycine max
  unsure (1)..(388): unsure at all n locations
ttacgtgacctatgatactcagctttactgattgcatgtccattgttttttttggtgtnatcgattacaagatgttggtaatcgattaccaatgtatttgaacgttgaaattcaaattcaattgtgaagagtcacatcctttcataaaagctttgtgtaattgattacaaggatttcgtaatcgattaccagtgacaagttttgaacaaaaatcaaaagatgtaactcttccaatggttttcaggtttttctaaaggttataactcttccagtggtttccattgaccagacatgaagagtctataaaagcaagaccttaatttgcattttgatatctgattacaatcttagacaacctttacaaacaacttttccacatattctttta

SEQ ID NO: 131200 - DNA, 421 bp, Glycine max
  unsure (1)..(421): unsure at all n locations
agcttgcatganttatattctttttctttcttaagcaaattcttaattcttcttgacaccatcaaaatcttcatgatttacattctccccctttttgatgatgacaaccacctgtaggttaggagccacaacaaagaaaaaatatctatttgcatatagtttactcccccttggttttgcaatgattgcttatatgagacagttgaagatttcatatttttcatatgtaaacaaattgtctcataaagaatagaaaaattttctttctattttattttttatctttctctccccctttgtcaacataaaaaacaaatcatgaatagagaggagaaagatgtccacttgtgcaatgttgggaatcaagtgataccaaaggcataaaacaatcttcatataatcagcaaaacagtcaatacca

SEQ ID NO: 131201 - DNA, 420 bp, Glycine max
  unsure (1)..(420): unsure at all n locations
gcatgaagcttacagttgcgctggaaaagtcataagtttattataagatgtgtatntacatataaaatcagtgagctaaggagtaaaatttcaatgaaatcaacaaacagaaccatcacagtcaaattatgtcaacctgtttagaactgatcacaagaatgcaaaattattttttagaagaaaaagtaggtgctgggcagttaactagttaaccctttttaacatatccctatgcctgtcctttcaatagcaagtggcagaatgatgtaatcacatgatatattttacccaacaaaatggtaactgaattcattactacatattcaactgatcaagatataatagttaagttattcacattcatagaccacaagagatgtgaaaagataagtcataaagaagttcatgaaggactactag

SEQ ID NO: 131202 - DNA, 320 bp, Glycine max
  unsure (1)..(320): unsure at all n locations
cctaaaataaaatttcaatgaaccgagccttaatgggttaaggggaaaaataatcctcaaaccttgacactaggctgatattaaaataaaaggtattaagtaggtaaatgataactgaaaattcctaattaaaataagaattaggataaaaatggtacatgtgaaatcgtaattcgagaaacttttactcatacatatctcttctttgctcaagtttctagcattggtgctagggaccagttgtgaagttcttggatgatttaatntgtgtaaattaaatataaaaaaaatgttcatatttttttgttttatattattta

SEQ ID NO: 131203 - DNA, 187 bp, Glycine max
  unsure (1)..(187): unsure at all n locations
agctatctttggtcaatatcgagcgtctcgatatattatgcacctgaatcggacttccgtgttacaagttatgaccaattgaatttctcgagagcattcggtgctcattccgaacgtctcgaatattatgcgcctgaaacggacttccgngggacaagncangaccacnngaatatctcgagagccg

SEQ ID NO: 131204 - DNA, 329 bp, Glycine max
gttggtcaatttcgagggtgtcgatgtattatgcgcctgaaccggacctccgggtaacaaggtatgaccatatgaatttctcaagagctttcgatggtcaatttcaagcgtctaaatatagtatgcgcccgaatcggacttccgtgtgacaagtcatgaccatttgaatctcccgagagccttcgtggttcaactgcaaccttctcgctatataacgcgcctaaatcggacatccggttgaaaatgtatgaccatccgaactccccgagagcattcgatgttcaaattctagcggctcaaaggataatgcgcgtgaatccgacttgcgc

SEQ ID NO: 131205 - DNA, 462 bp, Glycine max
  unsure (1)..(462): unsure at all n locations
gtgacgcggctgcagctacctgagatttagaaactncaaattttgttgttataatgaannatgaaatcccttggccataaatagtgttgccatgtctgcaaagctcttaccaaagcatacaactctttgtcatacgtggaataattcaatgttgcccatgaagcttttcactaaagtatgcaactagtttagagtcttgcatcagtacaacccttgttctaacactaggatcatcacattcattggccagcttatctttcaataaattaaaagttntctcatgcacatcattccattagaacattacattctttntgacaagttcatntanaggtgcagcaagtgaactaaagttctttacaaatcttctataanaacttgctaaaccatgaaaacttcttacctcattagcattctaagggacagaaccatccctaattgctttaccttntcttcttcata

SEQ ID NO: 131206 - DNA, 302 bp, Glycine max
gtaatacctttcttaaacctaaagattacttcccaatcttgaataatcttcatggaccaattcctttgggttttctaaccgtttcctttcaataaacggtggtggcgactccgcgcattttcctcctttggaagacgcacccgtgagcctcgcctcgctcgcccgcaaaagggtaggttgcgacaataagcaatacagatggagtcaaaggattcagaacaactcttcgtctgaaagaaaggtcattctgagcatagaagtcattttttattaacctcctatggttcattctaaatctaaag

SEQ ID NO: 131207 - DNA, 382 bp, Glycine max
  unsure (1)..(382): unsure at all n locations
acaacagctcctccttctgggtctttttaatttgcatttgacattacaacagaatgtacttggctntgaaacttagctagccatcgtgattntcaataaattntctcctgcattttactaagcttatccgagagtatntgaaaatcttcttgaacactcttacccaatggccaganaaattacataaatagaagaaataaaaaaggcttaattntcttaaaatnttgctccaaaattcccttccactgtacccgaatgctaatctgaacctgtagggtgccaagttggaaactttttcccctgaaaatgatgggggtatcagaattagaggagctactgcttcttcagtggcacccagaatctgaaaacaagaacatgttct

SEQ ID NO: 131208 - DNA, 280 bp, Glycine max
tgaatgccaggatcgtgagataagtgggggacgttgtggatctgattgcaatcagttcctttgcaactgccaagataagtcatacttaaaaagttgtgggagtggtaataatacatttggaaaaatatggatcatacttttcgtggttggttaacacgctgatagggataatattgtaagaagctaaaggtctgcaagaagtataaggcccaaacataaggaaacaacctcagcccaatatgggtagttatgacccatgcattcatcaatacgtggaaag

SEQ ID NO: 131209 - DNA, 442 bp, Glycine max
  unsure (1)..(442): unsure at all n locations
actcagctaagggttcntgagtcaagccacggcattccgagattcattaaacgcagattccttcctccatttcctcttcctcattgntctcatctgaagaacaacggataccgtacacaaatgttttctcttctcgttccattattgatccaaaattcattgatatggatttcttttcaaatgaaggttttgaatgcattcaggcatttgaaaactccaatcttattcctttcatgtctttaaaattgtctgtttactctgatttagttaaagccttctattcaaacctagaaatccaagaaggcactntaatttatgaagtttatgggattcaaatggtcattgaccaatccctattctatgaagtgaccccattatctaatgaaggtgtacaatttgaaggacactgattgatgattggaatatgaattctctgtgcatg

SEQ ID NO: 131210 - DNA, 400 bp, Glycine max
  unsure (1)..(400): unsure at all n locations
agctngagatgaggaagngnngatgggtgatacttcctgcttttatngnngaccacagagtggtacctggagatatgtcgcgggggtcaggagaccttggggacgtcaggtggggtgctattgcccaaaaccaagcttgaccaatcccgacccaacccgggcatagtcggtcagtgagaacctgtgatgtacctaaacaggcgagctcctggcagtcaacagataaaaggaacaaagaccacaaagcaaggaggcttgtggtggctggccagctgtgaattttgtgtgatatgtggattatggcctctggtaatcgactaccaagggtgggtaatcgattacaaggcttaataatgaagacagganggctagatggtctctggtaatcgattaccactgg

SEQ ID NO: 131211 - DNA, 406 bp, Glycine max
  unsure (1)..(406): unsure at all n locations
ctggaaacatanaataattgaagtgctcattgnattattttttatgtgagtacatcttaagttcatagccaaataataaaaaaaagttttgctctcttttctatttgaatgaagatttcactaagactaagacgactaatacaaacaaccatccaacagaaaaaggttaattgcaacaatgtcaaggttagagtttagatttggctgtcaagctgattgacaaatatttgtataacaattcatataataatattttgtatctatttttctcctgcacactatttattatatgtcataataacggaaagagatgacataaaaaatgatgttatataaaattttgagcatcgattactttctttggttttggtttttttttctaaaaactttatcttgaattttaatc

SEQ ID NO: 131212 - DNA, 439 bp, Glycine max
  unsure (1)..(439): unsure at all n locations
ctgcagctgaaaggatgcttaatgtttgaatatttagagaagggggagcacgaaattgaagaataaaagagggaaagaagtggaactttgaagtgtatctcataagattttcattcatcaaagntacaacaagtgttacacatgcttctatttatagactaggtagcttccttgagaagttttcttaagaaaacttccttgagaagcgtctttgagaaaacttccttgagaagctagagtttagctacacacacccatctaaaaactaagctcacctccttgagaagcttccttgagaagctagagcttagctacacacccttataatagctaagctcacccccatgacaaanaaacatgaaaatacaaaaaaaatcctactacaaagactactcacaatgccctgaaatacaagggctaaaccctatactactagaat

SEQ ID NO: 131213 - DNA, 333 bp, Glycine max
  unsure (1)..(333): unsure at all n locations
actatgaaactcagcttgtggaaatggggacccgcatatgtggactaatggttatcgggagaaggggcaaatcaactctcgcacattcacaaatcaaacatgaacccaccatccccaggtggccacctttcacagagctcacatacccccacgtaggccttatcctcggtctttcacaccggggtcccatcaaccccttcaagcttcacaatattcaagcaattcaatatccaaacatcatgaactaccctaaaccaagaaaatatggcagaggaagaaaactctgcccaaacacattccaatacacaactttcctactcnataccccagaac

SEQ ID NO: 131214 - DNA, 423 bp, Glycine max
  unsure (1)..(423): unsure at all n locations
agcttcctctctaagcnncaaaccaagactttctcnggtggngaagcttcntcttccatggctcatcccctgggggatgaccgcctctctaacttcttctcctttatcttccagtgtaactccatggctaaaaatcaccattgaaggacctcattaaagctcaaagatctagcctccatagaagcttctcaagaaagcttccataaaaatggatttgatctaggaggatattcaggtatttcaattaaatgttgaatgttgttgtaattggttgtactaaaaatcttatattgtaattgactaactagaaaatgtatttaatgtatcgcagggctgaattgatattcttgaagcatcccgatttgggacaaagaanaaaatacttcataccatangagagtgtggaggtaggttaagtcaaat

SEQ ID NO: 131215 - DNA, 350 bp, Glycine max
tagtctatcactcacataaattttcattctccccctctggttttgaatttatgcctctcttaaaaataagctgattactcctgtgagttcttgatttaatccctatttctctccccccttggcctcaacaaaaagccaaagtgcgtaacaagtataagacaaacatatactattaatcattcacaaagcgttcattgaagaatataaacccatccttgaagcagaaaaatgacttgatcaaatatatagaaaaatcgcataggcatataacataattcataattggtcaacacaccatgccaataacgaattacctaattgttcaaaggcataaaatataattatttgat

SEQ ID NO: 131216 - DNA, 479 bp, Glycine max
  unsure (1)..(479): unsure at all n locations
agctttaaagcacagcaacacagtatctatttgtccaacacccctcaanncaaaggcttttctaggtttgaaaggtgaaatttacaatgaggtaaatttgaagcaaactctcacctcacacaagtccataacatcaatctaaacttgcccaaactggatttatacctaaaattccaccaaatcaaaatttgactcttcaacacccaattttgccctagaaatggctcttggttcactctggtcatctgtttttctctctagctcagcctaacctttctcacatgtcctaaatgacatttcaagctagtattaactcactttaacctncatttaccacagaattcagacttagccttccaactctcaaagtctcactctttntccactcataacatcacattctcactgtctaacgctanngtagttctacccttcatctctaacagntntccatcagcaatttcagcatataaacatca

SEQ ID NO: 131217 - DNA, 353 bp, Glycine max
  unsure (1)..(353): unsure at all n locations
taagacaacttgagtaatcagttacgataaggctgttatttatttaacaaagacttttgccttttgaagaaactttctaacttagaaactatcttctcacttactcatgatgatgcatgatgcacaagagatatgatatgaactaagatgaaacattccatataacaaccaatacaaatgtcactcaaaggagttgggcatgtaaaagacaaaacatcttcaagctttcttccaagcttcaaactttagtcttcatgtagctcatgttgctccccctatctcttacaaaaattgcacttactcctagaaaggaacatgttnttataacaaattaaagtaattttcactagatg

SEQ ID NO: 131218 - DNA, 412 bp, Glycine max
  unsure (1)..(412): unsure at all n locations
agctgctgattacattctccctctntctcaagcatattctttattcttcttgacatcatcaaaatcttcatgaattacattctccccctttttgatgatgacaaccacctggtggttaagaacaacaacaaagaaaaaatatctatttgcatatagtttactcccccttggttttgcaatgattgcttatatgagacacttgaagatntcatatttttcatatgtaaacaaattgtctcataaacaatagataatttttcttactattttatcttttatctttctctccctctttgtcaacatcaaaaacaaatcatgaatagagaggagaaagatgttaccactttgtgcaatgtatgagaatcagtgataccaaaggcataaaacatcattcatattatcagccaaacag

SEQ ID NO: 131219 - DNA, 422 bp, Glycine max
  unsure (1)..(422): unsure at all n locations
agctnagangactttgttngttctcgagatttctntattannnanncngaacaagttgaatgtgatgtaaaaaaaagggaatgtgagccttttactcctttgaaagacttgtatttaaaaatggtttaaaaatacttttaattaatatttgaatttttattcctttattagtaattatttgaggggtagagggtgtcacagtgtagatgaatcacttttgccatcttagacaaatagcgtaggcatgggcaacaagacataaattatagggtaaataatcacttttatctttaaatgtgtaattcgttgataaatgtttctctgaaaaataaaataaagatgtagccctgaagtgtaaaaatgtgataaatatattgccgttacttgcgtcgcaccttaataaatacttactgacacaaaga

SEQ ID NO: 131220 - DNA, 322 bp, Glycine max
  unsure (1)..(322): unsure at all n locations
caacccaagtccattgcattttcaatctaatatgttgctcaatttggccatatgtagggttcctaggccaactggttcgattgactgatctgagctagttctaataacattaagcgccccggaggcaacaatttgggggtaagaactaaacatatataagtattttgtttaataaaattttattaaattattattattatgaattaaaaggtattttaaatattaaattaaacaaaatgcanacttgtcaactaaattgtgtcatgtcacaacatccttaacaagtggcaactgcanagtagacaaatgtacatacatgcca

SEQ ID NO: 131221 - DNA, 339 bp, Glycine max
  unsure (1)..(339): unsure at all n locations
tactcgactntactctcactacactacctcggggcttgggggactcactccactttccttactcgaacttatctcttaaatactacccttgctttagcctatgattgaaaacaatacaaacattctaacctatggtcacatagtgtcattctagatagaccttcatgcctttaaaaaggcacttctcatgcattccaaggcatcagaataggtgtccatccgaacatatatcatatctagggagggaaccatgcacccattacacaagtacaacctaaggcgttcatgggtggacatcattcatcggacaagggagaccaactcacaataatgcaatat

SEQ ID NO: 131222 - DNA, 397 bp, Glycine max
  unsure (1)..(397): unsure at all n locations
cgcgacatatctccaggtaccactctgtggtcaacgaataaaagcaagaagtttcacccttctacacttcctcatttcaagcttgtcggattatggggtacccatcacatgtggtactaagtggcggtcgggcgatggtgaaaaacgattctccacatcaacaaatcacgtataacccaccatcccttgttgcccacctccaactgagctcacgtactcccacgtagcccttatcctcgttcctctcaacgccgggtccccatcaaacctcccaagctttcacaacatccaagtaattccacatccaatcatcatggactaacaaaatcaagcanaacagggcaaaggcagaaaactcttnccaaacacaactcagaatcacagcntttcacataca

SEQ ID NO: 131223 - DNA, 467 bp, Glycine max
  unsure (1)..(467): unsure at all n locations
gagtcgaccgcggctgcagctatttagtacctatgnnggaactttcttgtataagatttatagcataaaagcccttaaaatttgtcacttttataaataaatgtctcgaatttgaatgtcttgattagtctttcatttatatatttagccttgtgttgacgttaaattgttaattgagaagagatttcatcggtttatttaccttaaatctcagtaattcatggccatttcataattcatttttcaaatactaaaatttctgaactttataaaaaaggtaaaataaaagaaatcaatcaaaacaaggaactgaatatcacgtgagatattctaattctcctggttgttagtttagaaatttttttattatattttaatatttaaaaatgaatgaatggttgaaagtaaatagggttcaatgggtcggacttctgtgaggctgaaaagaaacaaacccctcttacact

SEQ ID NO: 131224 - DNA, 384 bp, Glycine max
cttgattcaatcttgaactcattctttgattcttgagatcatcatctttgttatcatgaattgttcttgatctttgagctctgtcgcatcacctttgtcatgatcaaaacttctttgaatcaatcttgattcatcatgaagcttacttctacagtttaggcattatacgaacctatttatctttcgaactatcatgctattagtatgaaatatccaccacatgtacaccacccatgttattctttaaaactggcttcattcgattcatgggttatctttttccgttcacgtttaaaaaataagttaatgagtgacggtgcatgacaatcgacaaccaaagtgtgataattgttaacatgtaaacgcaactcatttaactacctt

SEQ ID NO: 131225 - DNA, 353 bp, Glycine max
  unsure (1)..(353): unsure at all n locations
attccctagnggatggggcttcccctctcctcttctcctttgccttccgctacatctccatggtggaaaataaccattgaaggacctcattgaagctcaaagatccagcttccataaaagctccacaagcaaacttccatcaagtggtattagagcacaagaagctcaagtaggtgcttcttaaacctccattaattntttgctttaccttctcttccatgggtgnttcttcatttttccatgtttctcctcacatgtcttgtgctaaatggttttaacatgattctttagtgttcaaccgataaacctgcttaaaatagattgatttcatggtcaattcttgttttgtcttg

SEQ ID NO: 131226 - DNA, 428 bp, Glycine max
  unsure (1)..(428): unsure at all n locations
gcaagcttactactgcacctgtgangaaagcacttgacatgatgtaagactttgagcngaggtgcgatgccagtgattacgccatangagcagtccttggacagagacatgataaggtatttcatgctatttattatgctagcagggtcctgaatgaagcacagttgaattatgccaccacggaaaaggaaatgctagttgttgtctttgccttggagaagttcagatcatacttgataggatcgaaggtcaccattttcacagatcatgctgccatcaagcacctacttcccaagacagattcgaagccaaggctgattagatgggtcctcttattgcaagaattcgacatcgtcatcaaggataagagaggatccgagaatgtggtagccgatcacttatctcggttaaagaatgaagaagtcact

SEQ ID NO: 131227 - DNA, 360 bp, Glycine max
  unsure (1)..(360): unsure at all n locations
acttttatacaactttcattgttggatgatcaaacactgagttcttagtgtgttatttcttttcttagtaaagtttatttggaatctttattgtacattctttatatgagagtttattaatttgatagtaatcattccaactttttgtttcgaaagctagaagtgacttagtaatcaaagaatacttgagtgtttttagtctcagggtgtgattgaaagtgtgtcaaaagtaacctacagaatatttgttgtaaagaaatggaaaggaagaatacttgttttgtaatatgttttgataagtggaactcttctaagttgaagganaactaaacacaactcacgatttgagtgaattaatat

SEQ ID NO: 131228 - DNA, 399 bp, Glycine max
ctatagcacctagttcttcttactccaaaaaagttgatgcttttatggtataaggcatgacatagttgcagcaaaattttttggtcaaccaaatgcaacttccttagtggatcaccaacatgtgatgaagtaaatgtaaactaaaatgtcttcactataatagacatggacaagttttgaggtgcacatataagcacattcaacatgaatgccaagtgccaaccttcacaaaatttggataaatgagtttgttaagtttaaaaaagtattctctggcacaaaactttgtgcatatttttttaatgagttgtgttgtaaaccagtaaagagaacaataaatctatgcaaaatggtcatatgtttcaacctaaccaaaataaagtttaagattctaatcta

SEQ ID NO: 131229 - DNA, 404 bp, Glycine max
  unsure (1)..(404): unsure at all n locations
aagaagaaagagatgattggacggtcaacaagtggcctgatgaaattagagggaacctacttcaaagttcaaagcagtactggcttttgggtcatgttattgctgtccattgattcaaccactttgctaatgctacctttctagctatagaatacaaataccctcctctacctctagcttttatttataggaaccgagtaacgtgaaagaaattcaattttcctatattactaataacaggtattggttcgcataagaggctctataaactcttctttaaatagggtaaattagttcattatttcctataatacaaatattggtttttaggttaaattacgtaattctaaaatcgcatcaatntgatattattatatagactaaatcaatagtttacatcacta

SEQ ID NO: 131230 - DNA, 455 bp, Glycine max
  unsure (1)..(455): unsure at all n locations
acctgcggcatgcaagcttctatgtcatcatnnaggtatttcattatttattctgctccngcagggcattattgtggagtcacaaaacgcacaggaactcctaaatcttaattaaagtttacttataccgtgtgacgcaacaaagagagcatttcaagcactatccgaaaggagataatataaataaaaagaagcaacttaagatgaagtcactgtgttcaaatttatcgtgcatgctggacccttccatagtagaaaaagcgtcagggaaaagaaattaatgttatacagtgaaatgtagataaaacattgcttttggaagatacaggtgaaaaaacagaactttgtttccatcgggatgtgtgggattgtacaaatggagggtttaaagctttaatgctgaagtgggatacttctggtttgtatttttcttgaaaagaaatgctgattgttga

SEQ ID NO: 131231 - DNA, 178 bp, Glycine max
tttgctactggtgctaaaagggttggcgttccttgcctttagagaatctaatttatccacaagttctgcccacgattcacctattcaatggtggaaaaacttgtgtcaatccgtcacagcaatatccatataattgcattttcacaagaaatgagcattgtgtgttatattttaaaaa

SEQ ID NO: 131232 - DNA, 115 bp, Glycine max
ggacctatgaaactaagctgtcttgatttctaatcttaacagcttgattttatacttgtccttcatttaactgtctttgggcttggcggccacactcaacaaagtactttcgaca

SEQ ID NO: 131233 - DNA, 261 bp, Glycine max
aaaaagtattggctttaaaatttgctcattacctttgttttcaattttgagtgtctcgatataatacgccactcaatcaaacatcccagtaaaaaagtattggcatttgaaattgctatgaccctcttttctcaatttcgagcgtctcgatatattacgggactctatcggacatccgagtatagaattatggtcgtttgaattgctaggagccattgttttcaatttccaacatctctaaataattatggactcaatcga

SEQ ID NO: 131234 - DNA, 372 bp, Glycine max
  unsure (1)..(372): unsure at all n locations
ttgccatacatgcttctacatgaagggttagngaaataaagtaatctaaaaatgaaaaagaactgggttctgaaaaatcataaccagacgttcctagattgggttaaagatacaatctttgctgatgataatgcctatgaaatgttaaaaaagctagtagatgggtctaaaagaaatgttataacttggccaggatacgatataacaagtattcttttatcaaaagccaagatgaaaaacaatggaaccagggggcaccctagggctgatctaacactttgcagtgtcatgatgacatcatgtgtgctccctctcttacttggtgcttgaagaaattggagcttactatgtanattactgtcgtgtttcaat

SEQ ID NO: 131235 - DNA, 232 bp, Glycine max
ctcacacaaatgtcttggcttgagtttctcttacttggaatgattcaacttaactttataatgctctttgaataacctcttatagcttcaaagaagaattgtggagtggagcccacacaactaccagcttttggaacaagtggacaaacttgacaattgtcaggaaatgatagctagcaagatcattttgaggtagtcatatcgaggttcttattctgaaaaacatttttta

SEQ ID NO: 131236 - DNA, 415 bp, Glycine max
  unsure (1)..(415): unsure at all n locations
agcttcaatgtctatgttaccaccctngaattcttcttatcttatctttgcccttgnctattngtgtatttaaatttagtggtgtccccggaaatttgaatctttggtaacccttcatttgcatgagtcctcacaaaaaattgctatctaaccacaccacccctcttgtctgattaggtttccaccaaaactttatgtattctttacttatgtcccacaattntgatgaagcggctatcccaaaagcaatgtgttggagcttcgtgtcatatctttgagataaatgatcaaggggtaatttgttaggaagaaggacttacaggaagaagaggcaagagtgctgaagtggcatgaggatagtgatcgtaccacaaatattgtttgcatcactttcaattattcctttgtcccttta

SEQ ID NO: 131237 - DNA, 287 bp, Glycine max
  unsure (1)..(287): unsure at all n locations
tccaacacacattgggttgatggacaaggttggtagaataattactaaacaacctttntgaagaattgggaaaagttgaaccggttaaagaataaccctgaattggcataatagaactttggtggtaaggtggctacccttgtgtaatgcatgagcaatggccaccaatgaggtatcatttgttgttgcatccctcctgagataactctcaaagtcaagagaggatcatgaaactcttcaaagtcaatcggctttcatgagtgcgaagagctgtacaaacctccttg

SEQ ID NO: 131238 - DNA, 187 bp, Glycine max
tactcgcagaccacagagaggtacctggagatatgtcgcggggatcaagagaccagggggacgtcacgcgcggtgctattgcccaaaaccacccttgaccaattccgacccaacccgggcatagtccctccttgagaaactgctgtgtacctcaacaggcgagctcctgaaaccctatctgtgatgc

SEQ ID NO: 131239 - DNA, 228 bp, Glycine max
catatatgggtattttgtctttcgaatttttaaccataaatggcactatgtaattcttacacagatgacacaacacatatacatagcacagatgggaaattggctcagacaatttttatttctctgtcaaaaattactaaatcaatcatgcacacacatatacatagcacaaaaatctatgattaaaacctataattattgaaattaaaatcatatatgcatagatga

SEQ ID NO: 131240 - DNA, 470 bp, Glycine max
  unsure (1)..(470): unsure at all n locations
agcttcggaagatagtgatgaggtacaagttttatttgtttagcttgaaagagcccgagtagtcgaagagaagttcaagtccatagccatcaaagtctgaaaagagtatgatgaactaagggacgtcaatatggccaccgctgaagccttggaacgagaaaccaagaaggcccgaaaggaagaacacgtgccagcaaagttttgaggggctttatagggcagcaatagtaagctcaagctccgaagaggtgaaaggaatcatcacgggtcaaaggcatgatcttgaaggacgagctaaaggcttaccttatgtcgaaaagaaatttgtcccaacagttaagcgagactgaagggaatatgtgggtcatcatcgatgagtgcaaagagaagctaaatctagcggcgactcacgagcanaggctagaggatgagtacgccaagatatcagcagaaagcgaagcaagggagag

SEQ ID NO: 131241 - DNA, 251 bp, Glycine max
atgatttggtttttgatgatgatgatttgaattggttagatgttgctgaggcaactgggacgggtgaacctttacaaaatacaaggagtcaaacacatataaacaaggcaatagctgcacttgcacctacaaatgaaaaaggaaaaaaggtggtggaagtggaagaagagaatgaagatgagggggaagaagagtacaattctaatgctagtgagaatgatggatttcaacaacacaatgatttggatctt

SEQ ID NO: 131242 - DNA, 374 bp, Glycine max
  unsure (1)..(374): unsure at all n locations
tgatgaagatcggctgcattcctttattgactcgtatacattgggtattgatttaatcagaggtactaattatttttaaagaaaggatttgagctggtcatttctatatccttgtacttgtcacaatttccattcttaatttttggtttttcaggtgtccactctacacatttgcctggtttagatgctanactcatgccagagaacttattttatctcttgttacactacagaaagaagtatgctttgtctcacaaatctgctgccagatacaattttacagtgtgttgctaacatttgtntgactattaggagcctctgatttttacctttctgttctggaataaatcatgacctgtgtattcttatattct

SEQ ID NO: 131243 - DNA, 178 bp, Glycine max
tggatgtacttgcatttctcctcaaaccattttatttgaagaatttgattatatacatatatgtatttaatataatgcgataagacgggttttttctttctcatttatattgtagaatatgctcctttttattgaaaatcaatatacctaaataagaagaaactcatcttactgatta

SEQ ID NO: 131244 - DNA, 196 bp, Glycine max
atattttctttcatctctttcaacagaatttttctgattcatcttctcttcatctttctaaaaggttttgttcaatactttttctttcaagaaaagttctttgataaaaacacttgcggtattcatctttttcattctcttcctcctttgccaaaagaacgaaggactaaccgcctgaattcttttgtgtttctct

SEQ ID NO: 131245 - DNA, 398 bp, Glycine max
  unsure (1)..(398): unsure at all n locations
agcttccttaagaagaatccatattatgttgatcttatctacacatacctctctaatagctaagctcacctccttgagatgagaagctagagcttagctacacaccccatatagtagctaagctcacccctatgacaaaatacatgaaaatacaaaaaaaatccctactacaaagactactcaaaatgcctcgaaatacaaggctaaaaccctatactactagaatggccaaaatacaaggcccaaatgaaggaaaaacctattctaatatttacaaagataagcgggctcatacttagcccatgggctcgaaatctaccctaaggctcatgagaaccctanggccttcccttggatctctgacccaatctacttggagtcttctatccaattccctt

SEQ ID NO: 131246 - DNA, 273 bp, Glycine max
  unsure (1)..(273): unsure at all n locations
tacttcgggcgtgtattatagagcaacaaggtagctggatggattgtttgccattgattgagtttacttacaacaatagctaccaagccagtattggtatggctccttttgaagctttatatggacgaaagtgcaaaactcctatttgttggtatgatgatggagaagcagtacttcttggacctgaaatgctacaacagattaacgaacaagtgaagttgattcgagagaagataaaggcatctcangataggcagaagagctattatgata

SEQ ID NO: 131247 - DNA, 369 bp, Glycine max
  unsure (1)..(369): unsure at all n locations
tgcaagcttctagaaacaagagatttcatttttaacattctgcgngagaatgccaagctgcttgagactggccaagaagccacggctcgaattagggtatacatgatttccatacagtcaaggttttaaattgcggttgcggtttcatcgtgtcacttgatattgtgctcgcattgcagttgtggaccctaaaaagaacttgacattgtagccaaaatcatggttgcacgcccgttttaaaaccttgcatatgatgtttagtgctgcaacttttctatttgagaattttataccaatggcttacgacataaagaaaattcttttggtaatttttcttttgtagcacagttgctgatgtggtcatctgtg

SEQ ID NO: 131248 - DNA, 357 bp, Glycine max
  unsure (1)..(357): unsure at all n locations
actagctgtattatgaattgtgttcaaaggaaccattttttttaatctgtgagaattttcacatgattagtaaaaaatgtgccttgactagtaaatacccaaactcttctagataccttgagaggataagaaagagaagagagaaaaatatgtattaaacgtatgatagatgatagctgataagtggatatttgataggtgatataatgcatgtttgaaaaatcatgtcaaaaaggtgaatagtcagccatgggaagatgcctcaacatgaaatggaaaaactaatcgtgcttcattgaacatgttgcaaaaccatagttggtaatggtgggcanggccggcactatcatggtggag

SEQ ID NO: 131249 - DNA, 459 bp, Glycine max
  unsure (1)..(459): unsure at all n locations
agctntgccccgcatacactagtatcaaatttgctataattgaatnacaaaggatactccatcgtaccaatgacaagatgattaagcactagtaggcccattcaaacatgcacttgtgttactcatccactgaaccaaagagaaacgaaatgccgagtcgaattgcttaagccaagaccatgatacaaaagtgatatcatcaattaaacttctgctatcaatatcttgttgattaaagataactgcatttctcttcttccaaatgcagaacactaccgagcaccaaatagtctgccaccataccttgctagagcctgttgaacccatattagtgtagtcatgcactcacacgatcactgattagtaaactatgtgataaacatcggatgaatcagagatgccaaaatggcgttaaattctgattattagataacatgagtgactggatcttcatctaat

SEQ ID NO: 131250 - DNA, 382 bp, Glycine max
aaaatttatgtttgcgttgagtccctaataaaacaacacttttattcttgatctttaatactttaattagcgaattttgttttagttctgactaataactaataaaaaataattattagagaacaaatacaaaatttattaagtaatgaggaactacaaataagtgttaagaacaaaaaaaattattcttattaagaacttaacacaaaacaaatatttattacaaaacaaacataaaaatcgaatatttattaaggatgtatactactattacagggttctttttttagtaaaaccctattacccgtcatcttctcaataatacaaatgccatttactattctgttataacactattgaggacaatactgtgggctgacat

SEQ ID NO: 131251 - DNA, 259 bp, Glycine max
cacgacattccgagaactggatctgcataacataaaccaggatcttcataataacagtattcctaggtatgattttatttaagtaatgaacttctaaacatgaacaaatgggcattgccataagatcaccttatcatatcaaacatttgataatgaatggcgtgactaactacttataaagcttaagtggctaagtggtaaaaggtgggggttcatggtctatattaattaaaaaatttctaaagaaaccatgagttga

SEQ ID NO: 131252 - DNA, 376 bp, Glycine max
  unsure (1)..(376): unsure at all n locations
tatttagagtattaagagttttttttgaagaaatgtnatgaatctcacatgagtttcagaacttatacattttattttaatttaaatatcttttttatatttttggctttcctattttcataatcttaactaaagaaagacaacgattacttcacttagagctaggccttatgacttgtctccaagagttttatttcccaactagatcatcccagcgaagaattgaagagaatgaaacttcgtggaatccgtcaaagataggggagcataatacaggccctcggtcattaattagtgctaatatctcaactatttcttaataattgacctaaagaattcaatgactntattccagagagtggcttgggtcataact

SEQ ID NO: 131253 - DNA, 307 bp, Glycine max
cctctggagcttctttatgttaaacaatgtgggacttgtgttttcttgagttgcatatataaagacactgatgcagtggtaatttttttaattacatcatggtctcaagattagtcttcaatgcagggtaactctccaaatctccttccttcggactcttctcaacctgaacctatcctcacaaacgtctcatagcagaaacatctgccttcaacaacctgaagaaaccattcatgtcactgtggttaactgattgaaagtaaggatcgttggggcttcaccctggtgatcaacagcagaaaccccc

SEQ ID NO: 131254 - DNA, 313 bp, Glycine max
agtgatgaggcttaacgaaaaattatggaacttaaaaaaactaaattcttaattgaaggcgtaggtgacaatcatagcgaattactaaacaagattagtagtttgcttaaagtcattccagatactccccaagctcggaaaatacttcctaaatggtgacaagaagtacctccacattaattaatgttattaatgaagatagtgaccaacacttagataacacaactgagataggatcagtggcagaaaagaatataattcatttaactccaacactggagaaccccctcaaatatattataacgtcaactgc

SEQ ID NO: 131255 - DNA, 231 bp, Glycine max
caaaaaatatgacatatgttaataaaaaccatttcatacactcttgcaaaccatttcatacaagatttgtagtgtactctcaatggaaatacacttatgagataaccttctatattttttatcagtgaaaaactctataaaaaaggtaaaccaaagacagaactcaaggaccttataagtcaatagctgacccctgacataacagactccttgatcccctcataaccaaaa

SEQ ID NO: 131256 - DNA, 341 bp, Glycine max
agcttgtaacgtatctgcagtaagctcggattttaatatctgatatcttatttagctaacggatttaaaaacaaatgaacagacatctattaggcccattcaaacagaaaaaaaacgttgtcatactttgagtatgggactatgatacacaccatgacatcctgtattctattatagcaaagattacgatgcggcgtgaaaaacatgtatatagttatcgcctacttagtgggacatatacacacactgtataattctcatccttcagcttgatgatgaaagtgtatgatactatgctcccacaacggcttttaaatgttgcgtttacctaatataccacg

SEQ ID NO: 131257 - DNA, 232 bp, Glycine max
tccactcaatcgctataaatatctagacattgtcctaccaatagttggtattcttgggaataactctctatctaaacagacgagcaatattattgaacatgttttttaccaccactttttctgcatgagataacgtattctcttgctgttcttgtatctgatgatcaataatctatatggtatgaatctaataattcttctgaataatgcgggattatggctgacttctttt

SEQ ID NO: 131258 - DNA, 441 bp, Glycine max
  unsure (1)..(441): unsure at all n locations
caccgcagctgcagcttacaatgaacttgatgagaatttttttatctgatgaagttacaatgccaacttgatgaaaaaaatatgaatcatgaaagccaaggtttcttttaccaatccgaccaagcatatggagctcaggttaatgaaattggtttgggtaatgataatgatgaatatgtgggtggtgatgactttgatatgcaaccacaacctaactatctcgactntttttagttatttcatgactgatgaagtatatttcatgatttttatatgtttgtgttttgttactgaatattattattattattttaggtttttttaagagtatgatgatttgttaaattgtgtttgacaagtggaaaatgaacatgagtttgtgattgtgatttaatagtcagaagtaagtatacaaatgttgtcttgcgttatgaaaaggag

SEQ ID NO: 131259 - DNA, 375 bp, Glycine max
  unsure (1)..(375): unsure at all n locations
ctctancttctcaaggaagttttctcaaagaagcttctcaaggaagttttctcaagaaatcttcttcaagaagctacctaatctataaatagaagcatgtgtaacacttgttgtaactttgatgaatgagagtcttgtgagacatacttcaaagttccacttctctccctcttttattccttcaattttgtgctcccccctctctctttctctccctctttcttttcctccattgaagcattcttccaagcttcttatccaaggctcatcttggtggtgaagctccttcttccatggcttattccctagtggatggcgcctcctctcacctcttcttctttgtcttccgctgcatctccatggtggaaaatcacc

SEQ ID NO: 131260 - DNA, 449 bp, Glycine max
  unsure (1)..(449): unsure at all n locations
agcttgtgtcattaagcgatatgccacttttggcgtttatcacgacctctngnatggagcgaattacctcctcgggttgcaattgcacttagcgcacaggtctcgttaagaaagttgtccaaagatgttatttgaaaaatctcaatagtaaaaaatgtaggcatgaatcaagaaagttgcagttcatgtttgaaggtgatccaacggttaacgagtctgggatcatggttttactgaaataggttaaacaaactccacataaccttattgtcacaccaagcaaccgcacacaaataagtcacacaacacctcaactaatccaacttaatcaaagaatgcaagaattatattaaacatctatnttcagttatcaatattttaggctgttacaaaagaccttttcttgtgtatcaacaccaaagtattcaagaatcttggagatcagaact

SEQ ID NO: 131261 - DNA, 94 bp, Glycine max
ctcacccccccaaatacatgaaaattcaaaaaaaagtccattctattgaaactactcaaaatgccctcaaatacaagggttaaaatctatacta

SEQ ID NO: 131262 - DNA, 280 bp, Glycine max
  unsure (1)..(280): unsure at all n locations
ataaaatggcatgaatttgtttccttaaaaaaaattctatagcgccatgtcactaatatgaaagtcacaaaaggtgaagaatagtaaacagaaggcaaaaaatggttgttgaaactgaggtttttcatttacttctctaatggccaaacgtgggatgtaaaaagttcgatttttcactttcaatccaacctcctgttagcagcataattgttgaacataatgataacaacgcccaaccaaaagaatcanngtgcgtgtgtgtgtgtgtgtgtgtgtgttg

SEQ ID NO: 131263 - DNA, 445 bp, Glycine max
  unsure (1)..(445): unsure at all n locations
ctcagctttaagagatgagttatgaacctatgcactaacatttgaattttttttattaaaagccttttatatattcctggaaagatcaaaagctcttaaaataccttaaacatcttgagagaaaagactaagagcttgcttaggggttatattcatctgtgaaacgattaaaaattagtcagtgagcaaatacactttacatattttgaattgtttacaggtagcagtgaattggtaggacaaagaatactgggttcgtcaagcttgcgttatagagtcataagtgacaataattattactttttacttttagaagttaatgaaacatttgtgtttatcaataactggatgtggtgattgagatgaactaatatgaattcatgcgtctatantatcttgcctttttatcgtaaactgactaggatcgaattgagtttatttttaa

SEQ ID NO: 131264 - DNA, 335 bp, Glycine max
  unsure (1)..(335): unsure at all n locations
agcttataccctattgctcctattncatttcttccacggncgtcatcaccataaacagcaataacctctctccagccaaagtagttaacatagactgctattgcaggcatttcataaatgtcactaaaagccgctctaataaagaatgggaattgaagtgaacaaagagtatggtcagtggctgtaaatgatattagaggaacttggagctcgttcgctatatgagatatgacatgagctgtngtagacgtctgtggaccgattatagccacagtttgtgttgccatgagctgcaaggctttacacacaatttaatgtaaccaagagttataatc

SEQ ID NO: 131265 - DNA, 384 bp, Glycine max
  unsure (1)..(384): unsure at all n locations
agcttgcttctacactaatgaacatttgattgttacacttttcatgtctaaataagtgtgttntatgtgttcattgcttctatcgatgcttcattgttgcatgcttttgctttgatcacccattggtgtgtactgttaggaattttagcactgggaaatgtattgtttccttataagttgatagagcatggctagataattgcattgctagggatagattgcaggttttttagtttttaattatgttgtgattataattttgtttaaattaagcctagtccaacaagagggatctgaggacgaagcttagtttaaattagtcttaacttacgagggatcgaggtttagtactttattcttcagcatagaacataagaacattta

SEQ ID NO: 131266 - DNA, 368 bp, Glycine max
  unsure (1)..(368): unsure at all n locations
aaagattctccacatccaccaatcacgtataacccaccatcccctgtttgccaccaccaactgagctcatgtactcccacgtagcccttatgctcgttcctctcaacgccggggccccatcaatcctcccaagcttgcacaacatgcagataattccacatccaatcatcatggactaacaaaaccaagcaaaatatggcaaagttagaaactctgcccaaaacacaactcanaatcacagcttttcacatacaaataccccagtaacattttcttcgttccaattcgttaaccggtggatcgactcgataattttactggaagtctctagtacataaagtctttatgttgaccgatcggatctacta

SEQ ID NO: 131267 - DNA, 447 bp, Glycine max
  unsure (1)..(447): unsure at all n locations
agcttgtggcttaccttattcgtttactattatttgtagtatatagatgaaaaaccctttctttcttatgtttatgaaggcatgcaaagggaaataaatgctataaatgagatgtttaagaaagaaatagatgcataaaccttatgcatatattattaaggctcaatgggataagcatttaaagctcaaacttcatgcaacaacttattggtttaatcatgcattcaggtacaatgagaagtttaataataagagaagggtcatcgattcagttgttgatttacttgaaaaaagaggtttgtgtgagaacctgactcaagtcattagtgagatggagatgtatcaagatcgacaagaaagttttgatcgaccaagtgctctttctataagcaacacaatccggcctagtaagcactaacttgtatttatattnntatacttaaatag

SEQ ID NO: 131268 - DNA, 416 bp, Glycine max
tgtcagccatggtgcccaagtgctagcgcccgctacttattccctattttagacttatgtggagaagtctaggttatcagctcttgctacgatgtggtatcctgtcacaaacaaggacttgatgaatttcatttttgagaagtggcaccaagagacatcttccttccacctacccgtcggagagatgtccatcactttggatgatatgtcttgtctgctacatttacctctgataggtagatccattgatcatgtctccttacattttgacaaaaaagtggtgaggatcttgcttatgacttatctaggcattttgacagagacagaggctacaatagcgacaaatgcaggtgccaagggtaggttgacatggctagaagacctttatcaccgctatgtaaagtcaaactcatacg

SEQ ID NO: 131269 - DNA, 386 bp, Glycine max
  unsure (1)..(386): unsure at all n locations
actccataatcaagaaaaatgattttccaaaaattgaattatactagatgtaaataaccaacaagacataatttgttttttaaaaaaatataggtatgtaaaaactagaaagacttccaatgcaattntttttgtgtatttctttgtgcctttctttgtctttgcacttttttttggcacaaaactcaaatctgaatgctaatatgtgattgggtagattcaaatctagactataatagaatctctgtccaaacttgaaaactgaacctctttctttttttacttctttctttcctttnttggcacgaattttgatctatatatataaaatagatgctgatactagatagagttcaacagagaaagattccttcaagaaataaaca

SEQ ID NO: 131270 - DNA, 166 bp, Glycine max
ttttggagtagaaacatgggaccaactgaatttattttatatagaaagtcggatctagtcaacgtctgagagaacatacaagtttcctaacgaatttctaaatatgtgggccatttaatctatcatgtgctgaccatagccgaaaagcccatgaatctcttcgggg

SEQ ID NO: 131271 - DNA, 391 bp, Glycine max
  unsure (1)..(391): unsure at all n locations
agcttgtatgagtngccggagcataaattatgtgttcatatttttcatcagagagaacctgtataaaacagccttaagagattcttgaaaggatctatcattgagaaaaacacatgcangcatcatggatgtatgtctgtaccaaaagcctggggtgctntgctacaatttgggctatctcttcaagtaatttcttcgagtagacagatcctgtggggttacacggtgaacaaagaataagcagtctggatctttcggtaaggtnggcttcaagccagttggaatcccaaagaaagttactagatatgtggctttgaagaatacacgttgtgcatgagccaatcttgccatttctggtaactcacatagaatggagctggataataacctg

SEQ ID NO: 131272 - DNA, 269 bp, Glycine max
  unsure (1)..(269): unsure at all n locations
aaattttcttaacttaccaaccgtttaattattggtttggaccacatccaacattgaaaaggaataaccatttttatggattagacccgaatatctagcttggcagcacatattatgccagaaaccatattaaaagttcctccactggcatataccaagactctaacattctggcttttctggatatttggaagaaaataacaaattctttttaaactaatatgatttaacccaaaggtgctcaggactagaanatgtttttaatattt

SEQ ID NO: 131273 - DNA, 422 bp, Glycine max
  unsure (1)..(422): unsure at all n locations
agctncatgaagaatcaactttgattcaatggtgnnnngatgataacaatgatgactacaaaagatgatgacaaaagtgatgaacaaaaagctcaagtgaatcaaagaacatccatctcaagtgaatcaaagaacatccatctcaagagaatcaagaacaagtcaagagttcaagaatcaagaagaattcaagactcaagaagaaagcctacaatcaagaatcaagaatcaagattcaagatctcaagaatcaagatcaagattcaagactcaagactcaagaatgaagaanagaccccatcaagataagtattaaaaagtttttttcaaaactttgaatagcacatgnagttttgacanaacctttaccaaagaagttttactctctggtgatcgattaccatattgttggtatcgattac

SEQ ID NO: 131274 - DNA, 346 bp, Glycine max
  unsure (1)..(346): unsure at all n locations
gtatatcgagacgctcgaaattgaaacagaagctctgagcatattcaaacgacattaacttttttctcggatgtacgattgtgtcccttattatatctagacgctcgcaatngaaaacggaagctcgtagcaaattcaaacgacaataactnttaactcaaatgtctgactgagtcccgtaatatatcgtgacgctcgaaattgaaaacataaggtctgagcaaattcaaacgacaataagtttttactcggttgtccgattgagtcccgtcatatatcgagatgctccannattaaatagtagctcctagcaaatcaaacaatataacttttactcgatgccgat

SEQ ID NO: 131275 - DNA, 343 bp, Glycine max
  unsure (1)..(343): unsure at all n locations
ctcagctttggtttcatttcgagcgtctcgatattttattgtgtctttatcggacatccgaagtaatagntattggggtttgcaattgctatgaacctccgcttttaattacgaggggggcgatatattaccggaatcaatccgaccacccagtaagaaagtattggcctttgaatttgcttagagcctctgttctgaatttcgagcgtctcgatatactaccaaactcgatcggacatccgagtaaaaagttataatggtgcaaatttcaacgagcttccggtttcaattaccagccgctcaatatattatgggactcaatcgaacatccgagtaacatttt

SEQ ID NO: 131276 - DNA, 405 bp, Glycine max
  unsure (1)..(405): unsure at all n locations
agcatcctctctaagcttcttatccaagactttcttttggtggagaagctcctccttccatggcatattccttaatggatggcgcctcctcccacctcttatcctttatccttcggtgcatctccatggttgaaaatcaccattaaagcacctcattgaagctcaaagatccagcctccatagaagcttctcaagaaagcttccatcaagtggtaatcagagcacaatagcttcatgtaggtgctccttanaccttcattaattntcagctataccttatcctccattgttgttcttcattcttcttcatgtatctcctcacatttcttgttctaaacgttgttcacatgattctttagaatttccaccggataaactttctatagaagctagatttgattttct

SEQ ID NO: 131277 - DNA, 374 bp, Glycine max
  unsure (1)..(374): unsure at all n locations
cgagaatggagaatngcactaagcaaccactacgcatggctttaactcgttggtggaggtcgcatgaacgaaaacgcaatttatggggctccgaacaaagattgagaatggagaattgcactaagcaatcactacgcatggctccaaactcgtgggtggaggacgcatgaacgaaaatgcaattcatggggctcccaaagaagattgagaatggagaattgcactaagcaaccactacgcatggctccaactcgtggttggaggacgcatgaacgaaaacgcaattcatggggctccgaaaaaagattgagaatggagaattgcgctgagcaatcactatgcatggctccaaactcgtgggtggaggacgcatg

SEQ ID NO: 131278 - DNA, 424 bp, Glycine max
  unsure (1)..(424): unsure at all n locations
agcttgactctttngactcatgatgcagatctatgtttttcttgagtagncatcaattatggacaaaaaataccttccaccacctagagagggtactcttgcaggcccccaacagtcaacatgaatgtaatcaagagttcctttggtggtgtgaattgctttaggaaatttaatcctatgttgcttgccgaaaacacagtgctcacaaaatttcagttcatccagtatctgatttcccaacagctgctgtttttgaagtatcatcatacctctttcactcatatgacctagcctcatgtgccacaattgagttaagtcagatatgctcttatttgatcttgatgcaacaacaactagaccatcatcaatacatgttgtaccttgaagtatttgatattacccctctttatacccttcataacca

SEQ ID NO: 131279 - DNA, 477 bp, Glycine max
  unsure (1)..(477): unsure at all n locations
actcatgtttatggnggtattagaacttcgattnttatgactatatacaaattntgncccacactttaaagttctcctaaaatcatgaaattaaaaggcgtagtggtgtattttgtgtcaaaggttattgcataattttttttctatagttaagagggatatcaaaatatcaagataacaattgggataaaggtgaaatagcattaattaaaaaacaaatttttaatcaaacttttattaggggagaaaataaatccaactttaaaatgatgcaataaaaaacatcaacttatcaaactcaacactgacctttggtctagatgataactacaaagcacttcatctcacttgcttctaaggtagcctcatagaaatctttcaatatatttcataaacaaaaggaaaagcatcatacatatatcatataatcaacaacanaatagtctttttttttaaaagaaaaataagaaactaaat

SEQ ID NO: 131280 - DNA, 387 bp, Glycine max
  unsure (1)..(387): unsure at all n locations
agctnctagccaaatggacttaccatgaatttatttctttgatagccctttagagccttgattccctttccttgttttgaagctcactacaagccttaagtgaaaaaccatgatattaccatatccttaaagaattttggagctttggaatagttctgggaataagtgtggggggtttttgtttcatcggacaacttgatttgttggctatgcttcatgatgtatattgggccatacttgatgtacattgtatatagggtaaatgttggacatgctgaacgaaatgttgcttctcaaatgctaaagagtaaaaaaaataaaaatctataagaaaaaaaacttaaaaaggaaaagacaagcctaaaggtgagtgaaaagatcttaaat

SEQ ID NO: 131281 - DNA, 486 bp, Glycine max
cttgaccatcagagttgcaagttttcagcgtgagatcgttgtttattttactggtcaatatctagaatttaccaaaaaagacaatgttagcaatttagaattatattaatgatttcgtgaaaaataatgtttagattaacgtttgatctgtcacgagtaagatatacttgtttagttgtacacttcaatcgtttatggctacgtaagaaaataattttacagcggtcaacttttgttaatcatgatataacatttcgagtctttgaccttagtgtagaaagaataattgaagaaaacttatcactaacaagcatgagatcaaaataagaaaaatgtcttgaacacactcttataatgttttttaggttaaattataattttcttcctcttataattctaaatttataatcttaatttctttatttctgaagataatataaaaaatatgtagataagaattgaatctattaatttttattcattgat

SEQ ID NO: 131282 - DNA, 439 bp, Glycine max
  unsure (1)..(439): unsure at all n locations
agctngnagagntcagactcatatcgggtttatctattactgtactctcataatcgattacactgttgtttgagatgatgactgatctattcacgagcctttgctttaatcaattacttctctctcacttagttgtgcagaggtgaacaagaacactttaatcgattacctagagcctctaatcaattaaattgttcttgagttatttccaggcgttgggaataacactttaatcgattacttagataatctaatacattatttcattgaattaatcgattacagcatagatttaatcaattataggcagtaataattttttctctataaataaccagcttgtgttcacatctacagatcaagagatcaatagaggatactcgacacatctcaaaaataacatcttagcctcagaatgatcaagatctcatgttgtcat

SEQ ID NO: 131283 - DNA, 489 bp, Glycine max
  unsure (1)..(489): unsure at all n locations
ctcagcttctcaggaagctacctagtctataaatagaagcatgtgtatctcttgttgtaactntgatgaatgaaagtcttatgagacacacttcaaagttccacttctctccctcttttattccttcaatttcgtgctcctcccttctctctttcttttcctccattgaagcatcatctctaagcttcttatgaaaggctcatcttggtggtgaagctccttcttccatggcttattccttaatggatggcgcctcctctcacctcttttcctttgtcttccgttgcatctccatggtggaaaatcaccattaaaagaccccattgaagctcanagatccagcctccatagaagccccacaagcaagcttccatcattatggttgagcccgctaatccaagatcaattccaaaattctccactaagtgtgcttaggtgtcatgaggcatgtaaagcatgaaggacatgcacaaagtgtgactatatgat

SEQ ID NO: 131284 - DNA, 352 bp, Glycine max
agcacctgggctgcagctggaaggggcttcatggggatttacttgtgttaactaaaagagcgatccgtaatgaggaaatcccggaagaatggcctgtgagtgtgctccaaaccctcattcagctttttaacaagtgttaactgctctattttagactagagctgctgagaagcttttgaaaacttctgaaactctttgaaaaatccttgaaactgagctactcaccacccttttaacaagctcacctccttggaactccttaaaaatcctagagctgacttgctcactcctttataccactcactctgaataagctgtatagtacacccttgtacgagcaccctgaaaaaaa

SEQ ID NO: 131285 - DNA, 456 bp, Glycine max
  unsure (1)..(456): unsure at all n locations
tcgctggtccctttggtacttatttatcctacatagntaatatttattttcaatggtagntaacactttatttgtaataaatccttttttaataataataaacacaacaaaaaggaaataccttttctgaaaaagttgtacaagatgtgttagccaagcaaggaaggtgttaaaggcctgccccactaactgaacctcttcagtgggtacaaggacgtaatcatcaacatctcgaacttccttaacacccaccttcaccagatcattgcccaaaaggacgtggtgctcagtgacccttcataaatcttccaaggacaactaggtgggaaggatngtcatcagtatacaacccacactngtctgatgtattcgtgtctaagtcctgccctaagggatcacatacaacttcctttatgctgacataggcattggaaagagctatctcangctcaacag

SEQ ID NO: 131286 - DNA, 271 bp, Glycine max
  unsure (1)..(271): unsure at all n locations
acttaaagttaaatacctatatttgttactaaaganaggattgagggattgttctcctccgaatcctggaggtggattttgaggattccactctgattaaaattttcctcttagtgtagtgggtcagcgccaagcaatgacatctcatggtggccaccaatggtcgtgggtggtggaagaagaggtgttggggcttgggtggtggtttaaacacaaacttattcaaaacctactctttctctctaaaacatcatattctctcttattttga

SEQ ID NO: 131287 - DNA, 442 bp, Glycine max
  unsure (1)..(442): unsure at all n locations
cgtgcttggtttagacatgattggtacatgatttgtgacntttatgattcaattngggcaaaattggatgagggaaagagtggtttttgaaatctgcactttatgcagaattttgctgttggaatgtgcagcagaattttgtataagtgcagaaaaacgcttgtgcatggctggttgtgaaaagggtagtacatatggggttctggacattttctagcagatcccaacggtcaaaatgtagaattatgtactagagacttccagtaaaattttcgagtcgatccaacggttaacgaactggaacaaagagaatgttactggggtaattgaatgtgaaaagctgtgatgttggtttgtgttttgggcagagttttctgcctttgccctgttntcttggctgtgttagtttgtgatgattgaatgttgaattanctggatgttg

SEQ ID NO: 131288 - DNA, 443 bp, Glycine max
agcttcccgtatccgtacttggaatgatcttattcttgtcttcctaaggcaatatcagtacaattccgatatggctcccgaccgcactcaactgcagaatatgttcaagagagagggtgaaacctttaaagaatacgtgcagcggtggagagatttggcggcacaagtagctcctcccatggttgagagagagatgatcaccatgatggtagacactctgccagtgttctactatgagaagctagtatgttacatgccgtccagctttgcggatctagtattcgccggggaaaggatcgaggtagggttgaaaagaggaaagttcgattacgtttcctccacgagtgcgaatgccaaaagaatctatgcaacatgggcaaaaaggaatgaaggagatgcccatgccgtctcttaacacccgcgtgggtcaacccccgatacac

SEQ ID NO: 131289 - DNA, 449 bp, Glycine max
  unsure (1)..(449): unsure at all n locations
ctaacaaaaggaaactctaaagcctaggcccaactgttgtgtttaaaagccacaaagggttacattatgcttgttgcgtaaatgtccgggcgctcctccactcgccaatttcctagtcggaaaccaggagggcatggtcgtaccaaatccgacccactcggcgaatcatcttcgcatatcgcaacgacttggccttcgtgtcctagacccgcgcttataaagcttcttcgactntttgtcccaatcgcgagccttgacctccactcttccttcctacaacgcttttccttatgtccgcttgtgtgggtttatggcctaacccaaacttcccacggtttcctctggcgtttatcacgctggttatgccgccgatgtccttgcctaaacccattccgggctcgtaaccattccccaacatcactgcggccaccattactgccgtatcggac

SEQ ID NO: 131290 - DNA, 331 bp, Glycine max
  unsure (1)..(331): unsure at all n locations
agctntactttgaaattttgatttatatgttatgtatgctagtttatatatatagaggtagttatttgtattgataatttatgtaaataatattgtagagtgttatagtatgattccaaaaattattaagtgttggagtttgagaatattatggttaaatttcatgaacatgtgtatgttgtaccttatgaatatcatcggggatgttatgagatggtcgatgtgatgttatgagatgttaaagtgtggacatgatattccattgacaataagtggatgtgtttaatacttatgctacattaaatatattcgaaactatgaattatacaat

SEQ ID NO: 131291 - DNA, 465 bp, Glycine max
ctcagctagtgatagttccactataattggtttgttaagatcttttttctcctacacgttgcacattgggagtaacactaacactcaaaaggtactgcaatttttttgaagatactacactagggctgtgtctatatatattgctctctttctttagccaagagacacaagtggaaaaataattttgcattttcttctaaattttttatcttcatgttcttataaaaaaaatacttttgttgagagaaagaacattgatgttcagatggttcgaggatcctttcgctgcacaagatcagaaccaacgagttgtcatatcttgggagagtagcacaatcagattctcctaccagtgcaatgatggtgttttctctctaaggatagcgttgacacgcttcaacccagactatttaaaatttctcccttaaaattattttcctttgtacttactggatgttatattgc

SEQ ID NO: 131292 - DNA, 424 bp, Glycine max
  unsure (1)..(424): unsure at all n locations
agctttngcaagctggaatcatttatcctatctccgacaaccaatgggtgagtcccgtccaggtagttccaaagaaaaccggcctcaccgtgatcaaaaatgagaaggaggagctgattcatactcgggtgcagaacagttggagagtctgcatcgactataggaggttgaaccaagttaccaaaaaggaccattttccactgccattcattgaccagatgcttgaacgcctggcaggtaaatctcactactgtttccttgatggtttctctggttatatgcaaagcactattgctcctgaggatcaggaaaagaccacattcacctgccccttcggcacttttgcctataggaggatgtctttcggcctatgctatgttcctggtaccttccagcggtgcatgattagtagttttagtgaatt

SEQ ID NO: 131293 - DNA, 465 bp, Glycine max
tctcggctacaattactcaatccagtacaaggcatgtcgtattaatgtggtggtggatgctttctcgcgtcttcatgagccagagcacacaacagaatacttccaaatcgtctccatgcctcacccaaaattccttgatgagctaaagagggaattatcgggaccagaggaattcaaaactctcatgctccaggtccgcaatgaaccttcgaaaaatccagattttgaaattagagacaaccttttgctttttcaggggcgaatttggattaatcaaggcaatcttttcatttccctcttattagaagaataccacaaatctccacttggtggccacatggggctagctaagactctcggccgtctccagcaaagctttttctgagaaaacatgcgctgcgatacccaggacttcatcaaacaatgtcctgattgccttcagaccaagtacagtacaaggaaacc

SEQ ID NO: 131294 - DNA, 429 bp, Glycine max
  unsure (1)..(429): unsure at all n locations
agcttgactaggcgagttgatttatcctttttttcaccttagntattagtcaattcgggtaagaatgagaaatcccctaaagaaaatgtccggttgattttccgctttattttactaaaagatgttttttttattattatattattgtttacctctttttttgatttccaacgtggttacggttgacgaacggtcggaattcattttaaccgaagtttacagataatacaattcaaacgatcgctggaaatttattttatttttaggttaagcgagaaatgacttaagtaaaatggcttaagcacgtcaagagggggtataaaaagtaaatgaaatgagaataaaaatacacgaaacacaatgtggaccaccacgggtacatagaatgaattcaaaagcttggttcaaggtacttacccgttgaaaatc

SEQ ID NO: 131295 - DNA, 473 bp, Glycine max
  unsure (1)..(473): unsure at all n locations
ntcttgaganaacttccttgagaagcttctttgagatatctttcttgagaagctagagcttagctacacatacccctctcataactaagctcacgtccttgagaagcttccttaagaagattcctaaagaagctaaagcttagctacacacacctctctaatagctaagttcacctccttgagatgagaagctagagcttagctacacaccccctataatagctaagctcacccccatgacaaaaaaacatgaaaatacaaaaaaaaagtccttactacaaagactactcaaaatgccccgaaatacaaggctaaaaccctatactaccagaatggccaaaatacaaggcccaaatgaaggaaaaacctattctaatatttacaaagaatccaaccttgacccatgggctcaaaaatctaccctaaggttcatgagaaccctaggaccttctttagtagctctagcccaagcc

SEQ ID NO: 131296 - DNA, 431 bp, Glycine max
agcttgtagcaggattattattattgtttattttggactacattgtgagatacactgcaagttgtctataacaatattttttgtaagtataatataatattaatgtgatcatatgaagaataataataatctataaatgaattgcaaattacaaattacaaatctgtattaagtatcaccattagtagctgaacgttgtctttttcgttcttgcaaaatagttttcctacgcttccttcgttcagcatatatgtccatgagtagttgatttctacaacaactgccttataattgccaaacaacaggaaaatcaaatgttgaaactgagttaaataagttgttgtagtaggctgattttaaaatgataccaacattatagttatttgcatttgcttcaccgagtaaagggatatgtatttgcaatagaaaaa

SEQ ID NO: 131297 - DNA, 458 bp, Glycine max
  unsure (1)..(458): unsure at all n locations
tctctgagagaacttccttgagaagctagagcttatctattctcacccctctcataactaagctcacctccttgagaagcttccttaagaagattcctaaagaagctagagcttagctacacatatctctctaatagctaagctcacctccttgagatgagaagctagagcttagctacacaccccctataatagctaagctcacccccatgacaaaaaacatgaaaatacaaaaaaaaagtccttactacaaatactactcaaaatgccccgaaataaaaggctaaaaccctatactaccagaatgaccaaaatacaaggcccaaacgaagaanaaacctattctaatatttacaaagataagcgggctcatgcttagcccatgggcttgaaatctaccctaaggttcatgagaaccctagggccttcccttggatctctagcccaatctacttgga

SEQ ID NO: 131298 - DNA, 355 bp, Glycine max
caagctacaagaactcgagccgcccaagctcttgtatgtcagtattacacaccaagaccataatctcttaatatagaaaattaacgtacttatacaacactaacaatcaacatgtcttcattagcatatgactcttctcttgttctaattcgaaataaatgactcggcatgaacttgggtggtttagaaaaacaaagcggggattcttacaagccgaaaagctcaacatgagaaatcagcagctgatgaaagtcttgtcagccaaattaagaagctacagctagtatactagctagtgctgaagagagcaacgctagctaaagctaggccctcaaattaaagactgaacgttggg

SEQ ID NO: 131299 - DNA, 485 bp, Glycine max
  unsure (1)..(485): unsure at all n locations
actcaagcttatctgaatggttaaagttgtattattatgatatgccaaatttcagtttctctatagtaaaaaaaaagtaaaatatatgacatatattctaataatttccacatatgatgaaaacaaatctacataaatgtcaaaaattataaatataaataaaactaccagtggcagcagcattctaattaaaagctacttaaaatggttactcccggacaaaaaaatattacatccttaactccaatctaatagacaaatctcataaaaattagattaaattgcatcatatatttcacaaattctgctctgtgtaggattagatcctcatttgtatataactaatttaccatttctccatatagtataccatttcaaccaaaagaagaagaattagaatgcctgtctgttggtgaatcttctaaatatatatatatatatatatatatataattatatattctgaagacaaaagacattntagt

SEQ ID NO: 131300 - DNA, 354 bp, Glycine max
  unsure (1)..(354): unsure at all n locations
tcattnctatcttacctattgtgaattatggcctcggtttgtgtgtctagattgacaccagactcctaaatgcacaatatatttcattgcaagcttaacaacagtcccaaaacccaattttattcgaaaccaagtgtcatgatttctatattaccaattttggtagttgttaatgttgaatcatagttttgctttctcatctgccctttgtcttatctctttaccttacaactcagtcaattctatcattaccctctttcaatatgcagaattagcaacatgaaaacatatctaatccagcaaatgccaccatcaatagccaggctatggtccagaaccaacgaaatgcctcat

SEQ ID NO: 131301 - DNA, 487 bp, Glycine max
  unsure (1)..(487): unsure at all n locations
gcttcaggctgctcaattgctccaggttgctgcatagaaaggcttatgtttgttggtggtcggcagaggagcataaaccacagagtcttgtgacaggtgcagatttctgattcatggccagttgggttaccaagttaaccaaggcctctagtttaccttcaagcttcttagtttcagatgattttgtagctacctcgtgcactcttctaatgactatagcatcatttctggtgctaaattgttgggagttggaagccatcttctcaattaaattcctggcttcagaaggggtcatgtctccaagggctccaccattggcagcatctatcatacttctctccatgttactgagtccttcataaaaatattggagaagaagctgctcagaaatctagtggtgagggcaactcgcgcgtacatttttaaatctcttccagtattcatatangctctctccactgagttgcctgatgcctaanatatcctt

SEQ ID NO: 131302 - DNA, 414 bp, Glycine max
  unsure (1)..(414): unsure at all n locations
cgcagcatgcaagctngncccccaattttctataaatagggttatattttatttggaaaagggttcagccccttaggcacttctctctctttcgaatttgcttagaaaaattgtttccgtgaaaaaaatccaagccaaggctcttccgcaacgtttccgtaacgtttccgtgagtgatttcgtgaaggttntcgaccgttcttcgacgctcttcattcgttcttcatcgttcttcagtcttcaatgggtaagtacctcgaaccaagctcttcgattcattctatgtacccgcggtggtccacattgagtttcgtgcattctcctcctcgtttcatttactttttataccccctgtggacgcgcttaacccatattatttaagtcattcctccgctacccaaaaataaataagtc

SEQ ID NO: 131303 - DNA, 411 bp, Glycine max
catcacatgactgcgtagacctgaccttaagagatgtttgtcttgcatgtcctccacaggacatactctatgtgaaacgagtcagaacgggaaatacactataccttatatgcacgctaatggtgcgtatacaccgcaaaaccactgtcaacatgacgggctgcgtatctatatcgatctagagggaagaccctcagtacttacatggtgctaaacacatggactgtgtaagtcatgcacaagtgtctactcactgtaccacctaaaatcagacttgacatacatgataagtactattggacatcgtgaagtgattgatacaattttgtagacataactcgatgatagtcaaggctaagattctaagatatgtttgctatgaccataggatctacatcgctgataaagatt

SEQ ID NO: 131304 - DNA, 140 bp, Glycine max
  unsure (1)..(140): unsure at all n locations
agcatgcaagcnngngactcacagacgagcgaagccatattcttttccccccgggaaagatggaaaccaccctaggggacaaaggactagnggaggacaccacccagctggcgggagttctcaaccagccaacagagcgc

SEQ ID NO: 131305 - DNA, 455 bp, Glycine max
  unsure (1)..(455): unsure at all n locations
tactaagcttgaacagttgtgaatcatgccgaaagcatgtaaaagtagttcanatcnattntcttccataactacaccggtaatgccaagattaatgtgtgtgatttgcattaaaaatgggaaataaggtcaatcattaaaagaaatgcctaaactagtggaggagactgcagtgactaaagagagcacacgactctacagacttgcaattgcaatatatcagactccttataattatatttttctaatatgatttcaggttgcaagaattcttcattgagtaacctcattgagtagctatatatgcatatagctacaacgttgacatttttggcaagaacacatattggtaccttccagctaatcaacatacgaacaagagcttgaagaggagaaaccatttctcacataacctacaatgattatgacggtcatatatcctctcactaaatatc

SEQ ID NO: 131306 - DNA, 375 bp, Glycine max
  unsure (1)..(375): unsure at all n locations
tgcagctgcagctttaagatggctcatttgataaatttatctaantttggangagnncagcncacggaacctcagctgaataatatgtgaacatggatagtgaagcatagaataccttccgcattgacaataatgaccattcaagttaactgcccacttttttttgccacgttgcataataggattgaaggtctcctctacttcaaaccttgtggagtggatatcatacacgcgaacgatgtgcgaacaagcttgttcttgattttttctaagatctttaacaagctttgaacaatatacttatccttcatttaactgtctttgggcttggcggacacgttcaacaaagtacttccgacacctggtgtacgttga

SEQ ID NO: 131307 - DNA, 472 bp, Glycine max
  unsure (1)..(472): unsure at all n locations
tctaagctatagaacaaatgcctaatcacttcaaatgctgttaatttgattcatcaacaagaatcaagccaaggctattgtgcaagcaatcaatggggcaaaacacaccaaatgattataatgatggatggctcaaattctcacaaaggtaaaatcatcactttcaaattgagctttcaaaactatcatgacatgtagagaagaatcaaggatttcaagtcacaaaatgtcaagaacttttattttcaaaacaattacccatttcttgaacatatcctataattcaaagaaaaacatgcaaagtcgtatgtgcacacacaaatgacccaaaatattaaactaaaaatccgacgaaactaacaacattaacaaattaacacaactaacaaattaacaaaaccatcaaaactagcaaaaccaaagaacactcccncccatacttaaacaacacattgtcctcaatgtagcacaa

SEQ ID NO: 131308 - DNA, 421 bp, Glycine max
  unsure (1)..(421): unsure at all n locations
agctttaaccccccccccccccttattaattatatgcttagaatgtcgaagaagaagatgaagaagaagaagaagcantcaatttaacaatgttcttttaaatgtgtaagataaaattgattgcaataaaataaatgagataagggaagagagaaatacaaactcaatttatactggttcggccacttcccgtgcctacgtccagtcctcaagcaacccacttgagatttttactaactttgtaaaagacctttttacaacttctgaacacccaaagaatccctttcccttgtgttcaagaaactcacaattcaagagaaagctagtctcttgattacaattgactttttaagacgaacaaaaagatttctctcctttagaagtggataatacaattgaagttcttggatgaactcttaat

SEQ ID NO: 131309 - DNA, 444 bp, Glycine max
  unsure (1)..(444): unsure at all n locations
tgcctatccgatgcagcagtaatgatggcccgagttatgtttgggaacagttacgaacccggaatgggtttaggcaaagacaatggcggcataactagcctgataaatgccaaaggaaatcgtgggaaatatgggttaggctataagcccactcaggcagatataaagagaagcatcgcgggaaggaagagcggtagtcagagctcgcggttgagacaagaaggtgaaggaagcccaccctgccacataagcaggagctttataagcgcgggtctgggggacgaaggtcaagtggtcgcgatatacgaagatggtattccgagtacattggatttggtacgaccatgccctcctgatttccagctgggaaaatggcgagtggaagaacgcctcggcatttacgcgacgagcataatgtaaacctttacggttntaaaagctcta

SEQ ID NO: 131310 - DNA, 434 bp, Glycine max
  unsure (1)..(434): unsure at all n locations
agcaccgcggctgcagctaggaggaatgcagcttgttttaccttatgactgnnaganaagctgttacatgctgttacataactaactacatgtataaaagtcatgcaagaacccgtgaatggggatctggaaataatactctcttttttacgtttagatctcctttgtctctcctctgctctttcccttccccctcgaatattcagttacgataagcaacacctaacactgtcaaagttaggtaacgattgttatgcaaagtggaaccacatgcatctgaanaaaggtgccaactcagttatatttttacttgcctatttgaaaccttactgaattttcgtgttcttctcgagtgtcattaaactctcccaactttaagagaataaattgggcagatgaatgcgaagacttcgattgtctatgtatcaaaacaa

SEQ ID NO: 131311 - DNA, 446 bp, Glycine max
  unsure (1)..(446): unsure at all n locations
tgtatctgtggattcactttcgatctcaactataccataagtaanaacattattcaccacaaaaggaccaatccactttgacctcaacttaccactcatgagtccgagcctagagttatacaataaatttttttgtccaaccacaaagttcttcttagctatcaagctgtcatggaacttcttggtcttctcctagtagaatttggaattctcataggcttctaaacggatctcatctagctcacttagttgcaacttcctttcctctccagcctggtccataaagaagttgcaagtctttacagcccagtaggctttgtactctatctctacaggaagatggcatgtcttgccaaagacaacccgataaggagacgttcctatgggtgctctgtaggcagtcctatgcgcccaataagcatcatctagcctggtgctccaatcct

SEQ ID NO: 131312 - DNA, 371 bp, Glycine max
  unsure (1)..(371): unsure at all n locations
ccactggacataggcccatctcacacaggnntgttaatagcattaagctactcacttggatcctgttgcataagttgtgaatatatagttaactcatacatacatttcttgaaaaattttcagttggacgtatatgctgaatttgaaatcgaatttttagcatccaaagggagtggcaaggacaatataggatgtggaaatggagctgctgatagaagcgctttgggaccattcggtattctggctattgcagatgaccatctntctgaactaacaccaatttatttccatctttctagtactactaaagatggcagttcaaccacttccttctgtgctgacgaaactatgtactatagttgtcatttgca

SEQ ID NO: 131313 - DNA, 413 bp, Glycine max
acacatagaaactaagctggtataataagctataagctctcgagagaacagtttctcatacttatgtgccaaccgaaaagcttcgcacacaaagaatctgattatccaccatattctatattgatctctaatgtcaacaacagatagagcccatattgtccttataaggcatagacaatttgtaccttacaagtaggttttgtaaggatacgttagaatctaaacttaatatctaaggaggtattaaagtctatgttaaatgtgatatctgttattggatcacctatctttgtttacgctatagatgtgtattcgtcataacctgaacatgagggagcgtcgttatagggcaacaatgccacatcaactgaagatatggattatctagtacttatattgtttgggatgtcctc

SEQ ID NO: 131314 - DNA, 441 bp, Glycine max
  unsure (1)..(441): unsure at all n locations
agctttggtataagtcttgtttctctaatttgctnatngaangacacttatccttttgcaaagaatgagaaaccagattgcatatgcaaacaaaggttttaaattgtagttgcagttaaggcttggttttggttcataatcacagcctaatgatgcaacggctgtattccatcaaacttgctcatttttcatataacacttaatagagtnttggggaggagtcaagagagaaagacaatttggtgacgtgcgatgtgtgttgttatttgatgcctaacttcctatggttggagattaatttccaatatcaaactctntaatatcaatgttagtatttttcctctctttacaatacttttcttttaatacttgcatcngaaattaaattggcgaacatgacccgtacttatacacatattatcgactagcttatattacaac

SEQ ID NO: 131315 - DNA, 434 bp, Glycine max
  unsure (1)..(434): unsure at all n locations
tgtctctgngccctctcnttttggatatgatgtttgaaatattataatagnccntntctctcatgagtcgcagtctttccttcttattattcccatctatctattaattacttgtctcttccacagttccacatgttgtccttttggcctggtgtttttccttcttaacttatggtctttgtttttccgctttcctacatcttcttttcagaatagttgaaaataatgcaagttgtatatagactaataatacaattatattagactttataattgttataattaagaaacaatttttatttcttaactaatttttgagattgaattacacccaagtcacattcaaagaacaatatatatatatatatatatatatatatatatatatatatattcaaatgtgaaagatcagattaactaacatgtatctaatt

SEQ ID NO: 131316 - DNA, 437 bp, Glycine max
  unsure (1)..(437): unsure at all n locations
agcttataagaacacaattgtctttatcaatgctcaaanangcacgngaattaggacgcatcaacaagaatcaagccaaggctattgtgcaagcaatcaatggggcaaaacacaccaaatgattataatgatggatggctcaaattctcacaaaggtaaaatcatcactttcaaattgagctttcaaaactatcatgacatgtagagaagaatcaaggatttcaagtcacaaaatgtcaagaacttttattctcaaaacaattacccatttcttgaacatatcctataattcatagaaaaacatgtaaagtcgtacgtgcacatgatattgacccaaaatattaaactgattatccaacgaaactaacaacattaacaatattaacacaactaacacattaacaataccaacaaaactagcaaaaccaatgaacact

SEQ ID NO: 131317 - DNA, 464 bp, Glycine max
  unsure (1)..(464): unsure at all n locations
tctagccaaatggacttaccttgaattaattcctttttattctctttgagccttgnttccctttccttgttttgaagatcactacaagccttaagtgaaaaaccatgatattaccatatccttaaggaattttggagctttggaattgttttgggaataagtgtggggggtttttgtttcattggacaacttgttttgttggcaatgcttcatgatgtattttgggccatacttgatgtacattgtatattggttaaatgttggacatgctgaatgaaatgttgtttctcaaaggccaaagtgtggaccctcaagtgcaatcctccattctccccctttctttntcggagccccatgaatgttattgncaagcgctgttcatgtgtccttcacctacgagtatggagctatgtttcatgaatgtctaagtgtggaccctcaaagaatcctccattctccacttt

SEQ ID NO: 131318 - DNA, 307 bp, Glycine max
aacaacagcataataattatgacctttcaagcaatagatacaatccatgtttgaggaatcatccaaatctgagatggacaagtcctccacaacaacaacagcatgtccttccttttcagaatgttgctggtctaaacaagccatatgttcctcctccaatgcaacaacagcaactgcagtcacagcatagacaacaagcaactgaggctcctcctcaaccttccttagaaaagttagtgaggcaaatgaccatccagaaaatgctatttcagcaagagacaagagtcttcattcagagtctgactaa

SEQ ID NO: 131319 - DNA, 393 bp, Glycine max
  unsure (1)..(393): unsure at all n locations
agctaataacccttggatcattagaaaacttgcttatttattttataancacaggcaaggaaacctaactacatgctagagattagaacgaaaagtagaaaagggaaagagaagctgggttgcctcccagtaagccctcttttaacgtcactaacttgacaagtcatgtgccttcaaggtggcatgaaggtcacaaagaacacatccttcttacagttccaccttttagctaggaattccatgaacttcatgtattttggaagtgcatgcaaactcattgcaaaagagaggttggtgatcccaaagagaaaaacacttaactctctcttttgctctccttgcctttgcttcctgacaatcaattgatggagtagctctttgccacatcaatat

SEQ ID NO: 131320 - DNA, 457 bp, Glycine max
  unsure (1)..(457): unsure at all n locations
tcctcatggttntctttgtacattgttttgatctaataaaaattgttcttcgtaatgatngaatagcgatgttttaagttgtaagcttattccggttattgatgcttgctcatatttctaggtgatgccagagaaatacatgtttggtagacgacctcctgtaccattatggaataagaaaatagacataattattggtgatccaattgaattcgaccttccagcaatgaggcaaaaggctatttcccagtctcgtaatgagtcattccctaccattggatggcccagcactcctgatggtttggatgaattagcacaaagatgtctctacaccgcaatttcagagcaaatccgtgctgcaatggagagattaacgtgtcttggtaaaagttttgtgaagacatgggtaggttcaaacctacctaagtcagagattaaggtgttttatatcttgagt

SEQ ID NO: 131321 - DNA, 379 bp, Glycine max
  unsure (1)..(379): unsure at all n locations
acgangaaaccactgtcgactagcctgtttcaaaccataaagtgatcattgtaatcgacaaacttgattagggtgtgagacttgcattcctggaggcagctgcatatagacttcttcatttaattctccatgaaggaatgcattgttaacatcgagctgacgaagatgccaaccatgaataacagccaatgctaacaataatcgaactgttgtgagccttacaactggagaaaaagtatcaaggaaatccaatccttccatttgagtataccccttggctacaagtcgagccttatatcattcaacggagccatcagcatgatacttaatcttataaaccccacggcacccaatagctntcttattagctggtaagtct

SEQ ID NO: 131322 - DNA, 472 bp, Glycine max
  unsure (1)..(472): unsure at all n locations
cttgattntgtgctntacaatgttacagttaggttattttttgatgctatgctgntaggggtttattttcgcacataatgtacatgcttttgtgctgttttgattaggttttgaggcctaatagaggcctatggtaggggaatgaaaagccccaagtttttctggatttttcgatgatttcgctaagcgagcctgctcgctaagccagttcatcaatttttgttgattttttgggtttttggatgaactcgctaagtcggccttgtcctgctaagcatgttcatcatttttgtacatatgtttgaatgtttgtatgaactcactaagccactgcacttgggcttagcgagtatttaaatttctattttttttatttttttattttcagttggtatgaactcgcttagctggcatgccgcgcttagtgagttagtttgttaggacagactcttagagtctttttgtcttctat

SEQ ID NO: 131323 - DNA, 384 bp, Glycine max
tatatatacacacataactaataattacaataccgttcgattttaattaagtaattcagtcataaaagaaacttgtaggaaggaggaagaaattgtgttattcaatcccttcaactaatatttttaacaaaactatccgaaaaaaaaataaaataaaaaaactgcatataccaccactctcaattcttgtccccttctcaaaaagttactaaaggttaatccatcatatatgtatatatgaaatatgaacctaatcgtatatttaaaaaagaaaaaaaaactgaaaccgacgacccccaagaaaaaaataagtaaaaagaaattaagaaactgttactaaccccacccccctcgtttctgtgtgtaccatatatgtgctgcgga

SEQ ID NO: 131324 - DNA, 397 bp, Glycine max
  unsure (1)..(397): unsure at all n locations
agcttttcgattcattgtatgcacccatgtgttccacattgngtttcgggcatttttattctcgtttccgttactttttataccccctgttgacgcgcttaagccattttacttaagtcatttctcgcttaactaaaaaataaaataaatttccaccgaacgtttgaattgtattatccattaacttcggttaaaataaattccgaccgttcggtcgtgccgtaaccacgttggaaatcataaagaggtaaaagaaataatataataatcaaaaaaacatcttttagtaaaataaagcggaaaatcaatcggacattttctctttgggatgtctcattcttaatcgaattgttaataactaagtgaaaactaggctaaatcaactccctagtcagct

SEQ ID NO: 131325 - DNA, 470 bp, Glycine max
  unsure (1)..(470): unsure at all n locations
cgaatcggacatccgngtganaagatatgaccatttgaanttccatgagcttccgcgggtaaatttcgagcctctcgacatattatgcgcccgaatcggacatacgtgtgaaaattcatgatcatttgaatttctcgagagtttccgatgtttaatttcgagcgtatcgatatattaaaaccctgaatcggacctcagtgtgacaagttatgaccatttgaatttgacgagagcttccgttgttcaatttcgaatatcactatatgtgatgcgcctaaattggacattcgagttaaatgttatgaccatttggatttctcaagagattctggtgttcaaattcgagcctctcggcatcttatgggatcgaatccgacatccgtgtgaaaagttatgaccatatgaatttctcaagagctntcgntcgttcaattcgagccgctcgacatattatgcacccgaatcggaca

SEQ ID NO: 131326 - DNA, 438 bp, Glycine max
  unsure (1)..(438): unsure at all n locations
agcttgttacctctaaacanggtcttctattcacgtggataactgacaatatcaactttttgttctctgttaggcatttcaatgttgaaatatatcttgaagcctttcttcttgccttcatcacagatgggtaaccttgagtaggttctgttacgaaccatcttcatgtcaatagctctactgatatgaagaattggtggataagatgtagcttcattaaaaaatgtacatctgttcagaattctagctatcatatccaactcaatctgtgagggatttagatcaacaggattattgcatagaaatcttgtaataggcgtacggatgttaacatttttagaccactaaacctaagaagatgagttctcttgagatggatccattttgtttcttgaggatgtaacaatggagatcttttcaaatggatcatcgacattg

SEQ ID NO: 131327 - DNA, 434 bp, Glycine max
  unsure (1)..(434): unsure at all n locations
ngaaggcgtgtaacccaccatcttctcatagnagaacacctgttacgtgtctactatcattgggataatctccctttccatcattggggggcgctacttgagctaccagatccctccacctttgagcatattctttgaaagattcgtgctctttcttgcacatgttctataactgcattctatctgaagtcatataagaattgtactgatactacctaatgaaggaaaccattatgtccttccaagaatagactcgggagggttccagattagtataccaggtgacggctgccccagtaaaactttcctagaagaaatgcatcaacaatttttcattttttgagtatgccctcattttcctactgtacattttgaggtgattcttggggcaagtagtccccttgtacttatcgaagtccgacaccttgaacttc

SEQ ID NO: 131328 - DNA, 449 bp, Glycine max
  unsure (1)..(449): unsure at all n locations
agctttgaatgctctattcaatggagntgtcttgaatatcttttgactgatcaacacatgcacagtggccaaggatgcatgggagatcctgaaaaccactcatgaaggaacctccaaagtgaagatgtccagattgcaactattggccacaaaattcgaaaatctgaagatgaaggaggaagaatgtattcatgacttccacatgaacattcttgaaattgccaatgcttgcactgccttgggagagaggatgacagatgaaaagctggtgagaaagatcctcagatccttgcctaagagatttgacatgaaagtcactgcaatagaggaggcccaagacatttgcaacttgagagtggatgaactcattggttcccttcaaacctttgagctaggactctcggatagggcgtgaaagaagagcaagaatctggctttcgtgccaatga

SEQ ID NO: 131329 - DNA, 475 bp, Glycine max
  unsure (1)..(475): unsure at all n locations
tcaccaccaagagagcaccttggataagaagcttagagagtattcttttttggaggaaaagaatgagagagagagagagggggggggagcacgaaattgaaggagaaaaagaggaagagaagttgaactttgaagtgtttctcacaagtttctcattcatcaaagttgtgacaagtgttacacatgtttctatttatagtctaggtcattaactaaaagaaattcacttttgtgaatttgattttcatttcatgtgaatctaagaggaatattctaatgatatgccaaaggcatcttaacatattccaagaatatgctaaaggcatcttagaatatttcaagaatatgccaaaggcatcttagtatattccctttagatgccacaagaatgaaatgtgtgactctagcacatggaatatgaatatgccacagtaatattccaaaanatatgccaaaggggggaaaactacacaca

SEQ ID NO: 131330 - DNA, 452 bp, Glycine max
catgcaagcatgctatggtatcatgtttcattctatccttattcatgtggtttgttctaggttctgttgtttatttatttttggggaagggaagggtggacttatgaaacactgaattatgaattggggtgagtaaatatgagtacaattgcattgattttgtaaacattgatgaatttaatgagacaagggttgctcaatttatgattttgcagaaaaagtggttccgctttgttttgcttttctgaacctgaatgttgagtgctaaaagtttatatgtatataatgttgattatattactcgggtccttatggtcttactaaatttttttaataagtttttgcagttgaaaggattttaatttttaaattattcctctctagctaacaaccgtgaaaacttttgatacttttcggtattctatggggacttaatattaatcttgatatac

SEQ ID NO: 131331 - DNA, 484 bp, Glycine max
  unsure (1)..(484): unsure at all n locations
ntatacaagtcaattntcaagaggcatctcggagaggatcttttttttgcatatttgcacaaaatctcttgaactatgaagatgttgtccatcatttttctgttcttaatgaaggcaatttgagtttccccaataatagtctcaagcactatgactatgcggttggccagaattttagacacaatcttgtataacaaattacagcaaagatatgggtctaaaatggttaatctgggaggcctgatcatgcttaggaataaccgcaataatagcatggctgatctactttaaaattnttccatttgtaaagaattcattaactgcctcaaagatatcatcaccaatgatattccaagccttcttgaagaataaagcattgaaaccatctggcataggagctntattgttatccatcacaaaaataacgttccaaacctctcgcttagaagtaggacaaagtaaggccgcaaagcaatcggtggga

SEQ ID NO: 131332 - DNA, 448 bp, Glycine max
  unsure (1)..(448): unsure at all n locations
gtcacctgcggcatgcaagctttgagtgtaatattgagtctcattgttacattcacagttacagcagtgcttgtctcgactatagtgcatgcctttgtcctacgagacctctttcccaatgaccttgccattgccacaagtgagagaaagcaaaaaccacgcaggaaatggctcccatttaagacttgggagccatgatcacgccgaanagactgaaaataaataacttgaaagtttgtgaactcggataaaaatgatttagtttaggagcttattcgagaatcacacactccaatagttcaaggaatacatcatgtatgttaatacatagacgtctcaaatgaggaagaaaataatgaggcaaccaacatctttactgaaaaccttcagtggtcagacatgggaggggcatgagtgaaagttttagatntttcttgagtaaacccca

SEQ ID NO: 131333 - DNA, 469 bp, Glycine max
  unsure (1)..(469): unsure at all n locations
tcgcagacggagtgtccacatgataagacacgaggaattgtgtcgttctcgtcgaaggattgaagaaataccgggcactccggcgactccatcgccggcggtgataaccagagcaagtaactaaggtcgaggcaacacccaaacaaatgactctcaaacggcgtcgtttgttaagcagaggaagagagagtaaggggattgaaggatactgaagccagggaagaagagggtccttgtcacatggatgcttgcatacataaagacttgtgatagacatatgacatatgaccaaagaaaaaattaaactttaaccataaaaacttatttgtataacagatataaacactattttttacattttaataagatagagattattttttatattttaataaaataaagactaatttacaaaacgattaagaaccaaaatgcttattcactctntaattatttgtcaaaagaagaa

SEQ ID NO: 131334 - DNA, 373 bp, Glycine max
  unsure (1)..(373): unsure at all n locations
cgcatgcaagcanacggacttgcagagccttttgagcactcggttggacctagaacctccgggcctcgaacgaacacaaaggggaggagcgctgaaccctcaagaaacgagcccgagacgcgggactatgacaggtgcggcttgaacatagaagcatatctcgcccgccaggatgccgaggagagagtgaatgagggatccactcttggccataacacccccgtgccgcccggccnagccaaggcgagcgcggacgagggaaacaatgcagaagctccaattcatgcacccactgatgaaggggcctcagaggggcaagcacatcacaccttcctagctcggccaacacaattggacaagtctctatcacacc

SEQ ID NO: 131335 - DNA, 478 bp, Glycine max
  unsure (1)..(478): unsure at all n locations
tattgtccaaaaagaaaaccttccatatctacgtattcctttttntattntgatacttgagttttgcggattaaattatcaggtaaatcttacaataatacacagctttagatttcttcagaaaatttaactttcgtaaatacccttttgacgttgacgtgtatttaaggaaattaaaaaattcaacatacgatttaaactaaaaactaatgacgtaaggagtaaccataaactaatgttgcatgttaccgaaaaagaaaaggaaaactaatgttttcattttatccaaaatgagatttttggttttaactaaaaatatattgaaaacgagattttattgtttctaattttttattggttcgtttggaaaaatattttgactaanaatgaaaatagaaatctaaccaaacacatttttcatcnatcatttttatttntagtgaanataaaaatagaaacaaccaaatcaaatacccct

SEQ ID NO: 131336 - DNA, 482 bp, Glycine max
  unsure (1)..(482): unsure at all n locations
acctatgaaactcaagctgaggtgcgtcccaccatttttcatagaaattattgtttatgtgtctactattattgggatcatctccttctccgtcattggaggtgccacttaagctgccaggtctctccacctttgggcgtattctttgaaagattcgtgcccctttttacccatgttctgtagttgcatcctatctgaagccatatcagaattgtactgatactacctaacgaaggcaaccattaggtccttccaaaaatggactcgggaaggttccaagttagtgtactaggtgacagctaccctagtaagactttcttggaagaaatgtatcatcagtttctcattttttgcgtatgcccctatcttccaacaatacatctttagatagttcttggggcaagtagtccccttgtacttgtcaaagtccggcaccttgaacttangaggggtgatgatattgggtactaggaacaactctt

SEQ ID NO: 131337 - DNA, 494 bp, Glycine max
acacataaaactcagctaatagaccctcgtggaggtacagcagcaagaagatcgtattataccattctagaagctaggggtggtgatgtaaacagactataggccgttaggattgttagttaactgttacgtaactaactacatgtataaaagccatgcacgaacccgtgaagggattatggaaataatattctcattttacagttagattctttctctctcctctcttctctcgtagaatatacagtctcgaggaaagctacctctaacaaatggtttttattaggttcttaagaaagaacttcaattcctttctcctaactaacttctcattgtcaagaagcagctgtttgacttacaatggagcttgggcgcctttgggtcctcatagttattattttggaattaatgctgaatctgacattcttgggctctgaaggaaatgattataaatagaatgagatataagtagttttaatagttggggtatacat

SEQ ID NO: 131338 - DNA, 402 bp, Glycine max
ttccctaagcccaaaggacaattgcattctaaagcactttatggtataccaaaacattcatggaaatcaactgaaaagcttacactctttaaatgggtggttcttgacacatatgcatattggagaaagactactttaacccagaataaaagatatacatatgtctatttatcaaaagggtttcacgaaatgatattacttaatatacattgttgataggttgagatcatgccagagcagtacaaataaaatcatcattattctgacttgtgacacaaataataataataatgacatatgaaataccatgcaccaagtttagaacatgatcccaccccgtcctcgtttcaacaggatgttattagcaacatgccctaattatgaacatacatgctagaagaa

SEQ ID NO: 131339 - DNA, 405 bp, Glycine max
agcttagtcatgctatcttgaggtttatcttcaaacttcacaagcatagcctcgtaagaggacttccaaagctgtcataccacgattattccttttgtgaagattaccaaaaaagggaaacaagtataatgttcttctgaagctcaaaatattgcttccacttctaggtgcttagagctcctacaccttgacctgtttggtctaactaggactgcatccctctctggatacaaatatgcattggtcataggggacgattacactagatggacacgggttagggtcctaacccacaaggatgagtcttatgatacccttcatcaattctataaaacgattaaacatgaaaaacgcatatgtatctactccatcacacatgatcatgggggagagtatgaaaacgat

SEQ ID NO: 131340 - DNA, 474 bp, Glycine max
tatattccatcaagtgaagtagaagaagaaaacatctggtgtgacatttcttcacccctttcttagaagaagaaaacagctggagggacattccatgatatatgatagagacattgacaaagatgttacttttgacagtgaagatatgtggggagcatcactccatttgaaagaagtacgtagagtaagcgagcaagatatttcagaaataaacagctggagggacatttcttcacccctttcttcaaccagcctagactataatgaaaaatggatttctacttaaaactcagtatatcaagggtttaaaaaaacacaaattagcaatgtcaacaaattaataaccaagcacatataaatgaaaactataacaaatgaaggagcacgaacaacaaaggcattaatcttttgaaggagcatgaagtataccattgctacttactgcatgacagagggtggaagcaatggatgttg

SEQ ID NO: 131341 - DNA, 457 bp, Glycine max
  unsure (1)..(457): unsure at all n locations
gcatgcaagctntaaaatttgaattaacacgttcaattaactgctggtaatcaattaccatccatgtgtaatcaattacacgttataaattttgaattcaaatttctagtgactgttataaacatcttcagctgctggtaatcgattaccagagaaaaaatctcaattggaaataatagaactctttggtcaaacctcttgttttttcaatttggacacttcttcctaaagattctagagatcaacttgatcatatatcttgcatttcttggattcttgtcttgaataaaacttagaagcacttgatcctttagcatcatcaagacatcaaaacatcttgcttctacataggagtcatntgacttaatccatcaactgaaaaatccttcaactatttctcgtccttggaaaattcattttgcaagaatcaactgcatctttcgatccttctcactgc

SEQ ID NO: 131342 - DNA, 484 bp, Glycine max
  unsure (1)..(484): unsure at all n locations
ctatgccttaataagagccctccaaacttgggaacattactcttgttttcataggaattgccgttcagagtgatcatcaatcacttaagtacattagagggcaaagcaagttaaacaaaaggcatgcaaaatgggtagagtacctagagcaatttccatatattatcaaatacaaaaagggaaaaacaaatgtcgtagttgatgccctctctaggagacacacattgttttgcttcctaggagctcaaattttaggatttgataatattagggacttgtatgctttagatgaacatttctctcccatntacgaaagttgtgggaaaaagacccaagatnggattctattggctaaggggtatctgttcaacgagggaaagctntgcatatcccaaggatccattaggaaattacttcgtaaagagagccatgagggtgggctcatgggccactntgggatagacaagacccttgtcttactcaa

SEQ ID NO: 131343 - DNA, 358 bp, Glycine max
  unsure (1)..(358): unsure at all n locations
tgcggcatgcaagctttatctctgctattncacaagctggttgccatgcgtctatgggctcgtctaactattctctatggcatctgcgactaggccacatgaccgaaaaagtactacatagtcggagcatgaaaggcttatctggaaaacacaagatggaaccctcttaggtttgcgagcatcgcatacgtggaaagcacaatcggatgaacgccccacagggtttagctaaaacaaaggccatgttacactacctccattcagattgttaggtgcctncgagagatacatcactaggaggggctgggaataccctctccagcgttgaaattactccaacacgacatgggtcggcatg

SEQ ID NO: 131344 - DNA, 483 bp, Glycine max
  unsure (1)..(483): unsure at all n locations
ntaccaaccggacgacagtctatgattacaaatcaaaaatgtttatttctgctgtcaactaaactcttgctcctttntttccctctgattatttctttccaagtctccgtctatctacaatgttattacatccctcccatgtcagatttatgacaaaaaaaagaactatttataaacttgttcaacaatcaaaacaaaaagagcggcgatctttattcagctactactactactatatctccatggaaatccgcgtctttattggtttcaatttcaaacctatactctctggagagtaaagctcangagaaatgcaagacggactcaggggacttcttgggctgacactcaacttatgtggtcagtacaagccttatcccatgagaaaatactccatcgatattaacatggcatgaggttgctcctctgttaccattgatccacacgctngaacctgtacttccgccaacaacaatagctatt

SEQ ID NO: 131345 - DNA, 414 bp, Glycine max
  unsure (1)..(414): unsure at all n locations
agctngaagtaaaccagatgccttgttattctggttttccaactggccatgaataaaaaatctgcacctgtcgccagactctgcggtttatgctcctctgtcgaccaccacacagacctttgcccttctgtgaacaatctgaagcaattgaacagcctgaagcttatgctgcgaacatctaccacatacctcctcaatctaagaagacaaattggctcaaacataacaattgtgacctctccaccagcaggtacaatcccggtgggaggaataatcccaaccttacatggtcgagtccttcacaacaacagcaacaacaatagccttattttcagaatgctgttggcccaagcagaccatacgtttctccaccaatcccgcatcataaatagcatcagccccaaaaacaacaac

SEQ ID NO: 131346 - DNA, 480 bp, Glycine max
  unsure (1)..(480): unsure at all n locations
tccaccacatatataattactagtaattngtctttggttattgtcattcctaaccattttatgtgtggatgttatcattcaaatgtgtaattactacattttttgttaatcaagtaaaatttgctatccagttntaaggtgggaagtgcataagaaatagttttcagccccattatttactactcccccatgttttgtcaattagctgattgcttatttctggtcacatatcctatattttttctttcctgtctcaagccattgtttattgacatgatcaaggtataaggacattatcatctttatgcacccttattctttttttgttaattacataaaatttgctatcctattttaaggtgggatgtgcatangaaatcggtttcagccccattatttaattactactcacccatgtttggtcgattagctgattgcttacttctggtcatatatcctatatnntttgtttcctgtcac

SEQ ID NO: 131347 - DNA, 440 bp, Glycine max
  unsure (1)..(440): unsure at all n locations
agcttgtgactctnggaatnntctttanaattatttactttaaaagnngcgactccngaaaaagtcttcataaacaagtacttgaataaacgtgacttttggaaattcatttcttcgaaattagccactggtaatcgattatcattaaggtgtaatcaattacacatcaacagatgtgactcttcattttaaactttgaaaattgaaacgtttagaagctcaggtaatcaattacaggtatcgtgtaatcgattacacaagttaaaaatgatttgaaaaatgttttatcactagttgtgactattgaagtttaaattctaaccgtttgaaacaatggaaattgattacatgctcatggtaatcgattacagctctgtaaatcagttttgagaacaatgttggctactggtactcgantactatcttctggtaatcgatta

SEQ ID NO: 131348 - DNA, 480 bp, Glycine max
  unsure (1)..(480): unsure at all n locations
gaaactaagctttcgatatctaccattcgagctgccagagcgatgttatttttacaggntgannttgaaggcagaatgtcactatccaatataattatttttaacatactttntattttcaagtaaactgtaagcggatcatattaaataaagagtaagccccactatatatgaactcagatccaccccatttaataagatattttttatttttcaataataaacaactatgatctgctaatgtttttctcaataatatataaaacccataaactcaaaatgagacccaagtgagaattataaatacttcttcaacatttgaacatatatatgtagattacagctatatatggcaccccggaaaatcctatttgttgaaactataattcactttttttaataaattnntttggaggtacctcctattgaatgttaaagaaatctttgaagacatgagatcaattacgagactaacttttt

SEQ ID NO: 131349 - DNA, 397 bp, Glycine max
aacatgacaggttcacgtgcatgttctgctactatcggaggcacttgaatctggctgtcagacttcacggtgaaggcactcacattttttggactctgcatagcttgagaacgcaatttgtcaaaattttgggactgagcttgattcaactgagtagccatctgccccatctgatttgtcagactctacatggaggctcttgtctcttgctgaaatcgcatattctggatggtcattcgcctcactaactcttctaaggaaggttgaggaggggcctcagttgcttgttgtctctgtggagactgatgttgtcgctgctgctgtattggaggacgaacatatggcttgcttggaccaacaacattctgaataagagggacaggctgttgatgctggg

SEQ ID NO: 131350 - DNA, 471 bp, Glycine max
  unsure (1)..(471): unsure at all n locations
tgtatcttgtaataagggttgaaacttgtaaacatttctcatatttcaagcctctgcgatgctcacggatcgaccggttagtacaatgttctcaactatttattttttctatagtagagtaaatcatttcaatgatatcctcttcttcctatgacatcttcttctttcaatatctttttcttctttctataacacttttctctttcaatgtctctttcttttttcttagcatattttatttaatgcatattattattttgtttgattatacttacaatcatatattttagattgaaccgaatattaaaaatttaatacattgacccatggtaaaagacctatgaagagaggatatatggcctccaaatgaagaatttttatctttctcaaatttttataagattatgtntgttgatgaaaataaatgcaaaatttagtgtcaaataatattataaaacaagtagcagaata

SEQ ID NO: 131351 - DNA, 422 bp, Glycine max
  unsure (1)..(422): unsure at all n locations
agcttggcgcatataaatgatatgtctccttcttgagggggagcgntataattatgggtattattagacgtatctctagagtagacttccctactttatcttgttgaagaagacagcagcgtgtactgtcttgtcaaagctagtcaagctggctctctcctatgtgtatatatatacgctatgtgaatgacataaaaaaaagcaactgagggaaaaagtttctctcctcacatattcaaaacttcaagtattctggttgttaatatttttaaaataatagggtagctagataaatatcgaaagtttacgttaatcaacaataataggcattgcaaggctaggttagtcattatcattaataaattaataagtatgctcgcatttgttattaatttttatgtagtaacagatatttgaagagc

SEQ ID NO: 131352 - DNA, 444 bp, Glycine max
  unsure (1)..(444): unsure at all n locations
tagaagggccaagagggacgagtcaaggttggaaatcttgttgttagaagataagttgaaggcttgtcaaagggcaaagagaagtttgacggagcaactgagcagaacgaaagagaatatgttgacaattattgatcaatataaggagaaggtgaacctagctgctagtcatgggcaaaggctggaggatgaacatgcgaaggtatcagatctgcatattgaaatggaagcaagagaaagggtgatagaatcattgcacggggaagctatgaaatggatggataggttcgctctcactttgaatgggagtcaagagcttccaaggttgttagccagagcaaaggcaatggctaatgtatactcagctcccgatgaagttcatgggctttntgattactgccaacacatggtcgaaccgatgtcccacataattaggaaccactg

SEQ ID NO: 131353 - DNA, 434 bp, Glycine max
  unsure (1)..(434): unsure at all n locations
agctagttaagttcccccagattattgttatctggagtaaactctgnaaataaatcttgttttatggttaacactgtctctagaacatttccattggatttaatgatggaatctatgcattttcaggtgaaaaagaggctaatgtttgaaatgcaaaaagtagcagttgggctaagcgcatatccaccgctaagcgtaaaggagaatctggcagagcatcaacatcaaagttgcgcgctaggcgcgagatcagtgtgctaagcgcagcaggtgccttcagccaggcttatcacaagactagcgctaagcctaattccacttactcgcgctaagcgcgagggtggcgcttagcgcaaggtcttgatatttgagcctatttaaagcctgtgttgtgcaaaaatatggttacagacacacgtacaccttttgagact

SEQ ID NO: 131354 - DNA, 473 bp, Glycine max
  unsure (1)..(473): unsure at all n locations
tgtgttngaattanggatttcanaatttaaagaatttgatatgtctagaatttgaattgctttgattttaattttcttcatttttcaaatgttttgtttggataaattaattcaaatttcttccattttaaattctttgtttggataggacaattcaatttcctccatatgcaaaattttaattttatattttaaatagatgaaattttaatattaaactttatagaaaataaacacaatctaattttgaaatattaattaaaaaaaattttcaatttttcataatttataaatacaaaatattgataattttaactagggttgttttgtctgaccatagccagtgatgtttttaaatcgacaaccaaggctattttttgatcaacatcaaatagggttttttttctcaaagtatggtgggaatatttgtacgtcagtcaggctatcttttggtaatggtagttgagtctatt

SEQ ID NO: 131355 - DNA, 316 bp, Glycine max
atgctgacgctatcatggccaaagttctactgttcattccccctctcataatacaggtcaacagataatataaattccttcaactcttggaagttttatatcaagaacccaaatacctatgaccacagtctattaaaaagaacaaacaaactcgcctaattatagctactaattcaatcctaattatttatgtattaacatcaccataatatgtcaacatctaatatatacctcctgtggctctgtttaattacagataggcatcaaggattcaatccagttttatgggcctgcgggtcaacgcacaaagcttgtg

SEQ ID NO: 131356 - DNA, 474 bp, Glycine max
tatccttatggctggcctccggacttcactccccgtgcctctccaaaagatgtgagccaagcccctaccttcgaggggcaacttcctccttatgtcgattaccccctgcaagaagacgacaaaggagatacccatctaggccctctgcttcccctcaaggatccatccccccatgaattacctcaaccaaacatagtccgccatctcccatcttcacccgcacccgtaaaagaatctgttcccttcacagaagataagggaaagattgatgcgcttgaagagaggctaagagcagtagagggcctcggcaattacccgttctcggatttagcggacctatgtctcgtgcctaacatcgtcatccctcccaagttcaaagtaccggattttgataagtacaaagggacaacatgtccgaaagggaatcttctgatgtattgccgaaagatgggggcgtattctgcggacgaaaag

SEQ ID NO: 131357 - DNA, 472 bp, Glycine max
  unsure (1)..(472): unsure at all n locations
tggggtacccatcacatgtggtactatgtgtgttgtcgggcgaaggggcacaacaagttgttcacatccacaaagcgcgcataaacccaccatcccctgttggccacctccatctgagctcacgtactcccacgtagcccatatcctcgtttctctcaacaccgggtccccatcaatcctctcaagctttcacaacatccaagcaaaacaacattcaaacagcacaagctatcacagccaagcaaaacagagcaaaggcagaaactctgctcaacacatcaaccaaaatcacagcttttctcacttaaagaccccagtaacaattccttcgatccaattcgttaaccgttggatcgactccaaaattntactggaagtctatagtgcataagcctacattgtgaccgttgggatcgactagctaacatccagaactcattctgtactactctttccacagccaaccacacac

SEQ ID NO: 131358 - DNA, 429 bp, Glycine max
catcaagcctctatggagctatatctttacttaatgaggcctccaatggggaatttacaccatggagatgcaacggaaagcaaaggacaagaggagaggggaggcaccatccactacggaataagccacggaagaaggagcttcaccaccaagaacttccttggataaaaagcttgaagaggattctctaatggaggaaaagaaagagagaaggggggagcaccaaatcgaacgaataaaagagggagagaagcggaactttgaagtgtatctcataagactttcattcatcacagttgcaacatgtgttacacacgcttctatttatagactaggtagcttccatgagaagctttcttgagaaaacttccttgagaagctctttgagaaaacttcttgacaagcagagctatctacacacaccctctc

SEQ ID NO: 131359 - DNA, 473 bp, Glycine max
  unsure (1)..(473): unsure at all n locations
cgaaggcacgtaacccaccattnttcatagtaattcactgtttatgtgtctactattattgtgatcgtctctttctccgtcattggaggtgccacttgagctgccaggtctcttcacctttgggcgtattctttgaaagatttgtgcccttttttgcacatgttctgtagttgcatcctatccggaaccatatcaaaattgtactgatactgcctaatgaaagcgaccattaggtccttccaagaatggactcgggaaggctccaagttagtgtaccaagtagcagctactccagtaagactttcttggaagaaatgtatcaacagttcctcatcttttgcatatgcccccatctttcgacaacacatctttagatggttcttatggcaagtagtccccttgtacttgtcaaagtccgacaccttgaactcgggaatgaccatgtctgggtactaggaataactcttctagat

SEQ ID NO: 131360 - DNA, 449 bp, Glycine max
gaccttagagcacctgctgctgcagcttctcgggccagtatctgttagaacttacattcagaagtcagatttacaggataatgcttatcttaacgcaaaaaatgtcatgccaatttctctaatttagaccaaactcatatgatccattcatgctcactcgcatgtgtagaaaataccctattatttacatcaacatacaaggatattcaaatcattctaattaccacacatatatttttttttggaaagaatacttacacgcatgctcaaggtatagtgccaaaattacatatgttcatatcctaactatttgctaccacaaactaaccacacatatttgaagtattttattaacatacaaacttttcgtcgttcgcgttcctatttatttatacatatatgcgcattgaagagccaatctcttgtccgcacatacttgctttgaaaag

SEQ ID NO: 131361 - DNA, 464 bp, Glycine max
  unsure (1)..(464): unsure at all n locations
cgcacaaattatttaatcctttcaaaaactaattttttgtttgttttagtccaaaaaacgtaataaaactaaagtcatgctatcacttaatgtacaaattagatggaaataactaaagcctatgaaaggaaaatggttcaaaaatgttgatcggttctcgaaaagtttaggaaccaaaaccataattgccgaaaaattcaaggatgaaaatcataatttacccctatattattactattaattaaattaaaatataaaatgttattattagttagaatatttaaattatgattaattactataattaaatatttcataattaattggtaaataaactaaagagtgattttttcacatacacattnttttccccaacacatatgcctattaacatgtaaacatttacaatgcaacaaatatgcaacattctgtggagacaaatgtgcatgtntgattactttcat

SEQ ID NO: 131362 - DNA, 167 bp, Glycine max
ggggacgccaggtggggtgctattgcccaaaaccaagcttgaccaatcccgacccaacccgggcatagtcggtcagtgagaacctgtgatgtacctaaacaggcgagctactggcagtcaacagataaaaggaacaaagaccacagagcatggaggctcgtggtggc

SEQ ID NO: 131363 - DNA, 410 bp, Glycine max
  unsure (1)..(410): unsure at all n locations
gcaagcttggntatttaaatattctgacatttattattttctatctcgctttattatatcgcacaaatgctcaattagtatgtcatttatagatatctcgttattacctttatatgaagtagactcttatgagtctacgagttgagtttacgagtcgagtctatagaactctcatgagtctgcgtaaactcttgagtctgataatcttggtctcctttatatggagttattattatgggttcaatgagcatgagagtgctttgaaccccttcattgtaaattcgattattcacaataaactaccactttgcatgacatatctcttctcctctgccatctaaacttctttatttgaataaaatttcccaaatattccctaacaaagtggaagtgaatatttatcctataat

SEQ ID NO: 131364 - DNA, 430 bp, Glycine max
  unsure (1)..(430): unsure at all n locations
ttgatctaagcttctcgctgcaatattttggtggggtttggttgngtgataggtggngttcgncattggaagtgcggtagacagactttgtggttgatttaaggatggcctttgtggataactgggcggtgggtaaggagaaggtttgttattggctgagtaaagacattgttgggttggtgggaaacttggtcgtacaagaatggcagtcacaacatgggtttctccctcatcctcaccctctntatttgccccagttttctcattcgtccaagcaggatgattaaatttgcctcttttcagatccacttcgatctttttgctggcgaagaccaaatctgttaaacttgaaagtgtgttacccaccatctttccatagtagaacacccgtcacgtgtctactatcattgtgatcatcccaatctctgtg

SEQ ID NO: 131365 - DNA, 338 bp, Glycine max
  unsure (1)..(338): unsure at all n locations
agcttataagaacaaaattgcctcaatcattctcttttatgcatgtngncataccctaatttcgtccggggacctttgcttgatgacatgcaacttttgtttggtcctcgtgaggtgcttggcacccatcattatgcaatttgtgaaattccgggacatgccggataacaaaagaaaatatttgatgcacaattcgtaaggtttcgtgacacaccggaaatcaaatggaagcatcgttgcacaattagtgaggtttcgtaacattcctttagtcaataaaggggatgattatcgaatccgcatcgttccgtaatcattctgaaagaaaatatataatc

SEQ ID NO: 131366 - DNA, 452 bp, Glycine max
tcggaagaaagtgatgaggtacaagccctataggcagagctttgattagcccgagtagtcgaagagaagttcaagtccatagccatcaaagtctgaaaagagtatgataaactaagggacgtcaatatggccaccgctgatgccttggaatgagaaaccaagaaggcccaaaaggaagaacacgtgccagcaaagttttgaggggctttatagggcagcaatagtgagcttaagctccgaagaggtgaaaggaatcatcacgggtcaaaggcatgatcttgaaggacgagctaaaggcttaccttacgtcgaaaagaaatttgtcccaacagttaagcgagactgaagggaatatgtgggccgtcatcgatgagtgcatagagaagctaaatctatcggcgactcacgagctaaggctatatgatgatgtctccaagatatcagcagaaagc

SEQ ID NO: 131367 - DNA, 419 bp, Glycine max
agcttcacctgatatcctcaaaattagattgttgttttctttttttgcggcacttgaaaagatttttaattacacttacatgatatctccctttcccttcttactcttttttttgggcaatgtctagtgatgtcgagattcagatacatgctctacggatctcattttcagaatacacaaaacaatagttatagtaattgtaggtataaattttttaaaaaaaaaactatttccatatatttgcgtagaaaaggaagaaatttgcagaacaaatatgtcgtggctatcagtatttacagtataggtaccctgagaaggattaaagacttacatgatactcacattatagaaaagtaagacttttaagaatctaacacccagaaccataaccataaccaaacattccccccccccccccc

SEQ ID NO: 131368 - DNA, 378 bp, Glycine max
  unsure (1)..(378): unsure at all n locations
tgaccaatcccgacccaacccgggcatagtcggccagtgatttnctgntatgtacctaaacaggcgagctcctggcagtcaacagataaaaggaacaaagaccacaaagcaaggaggcttgtggtggctggccaactgtgaattttgtgtgatatgtggattatggcctctggtaatcgattaccaagggtgggtaatcgattacaaggcttaaaattgaagacaggaggctaagatggtctctggtaatcgattaccaaggggtgtaatcgattaccaggcttgaaaacgaagtcaggaaacttatggagcctctggtaatcgattaccagcctgtgtaatcgaatacacagagggatgggtgactggtaatccata

SEQ ID NO: 131369 - DNA, 471 bp, Glycine max
  unsure (1)..(471): unsure at all n locations
ntctaccagaaaactattctgaagtagcttacttcttcacttatatcttttataagntattattggtgtattgattaatcattccttagtgaaggcttctgaacaatcttcataacttcatcatgatgatccacattagaatatctaaggacttttctaagcttcatctttatgcatcttcaaatgttgtcaacttcagtgttctaatgaatccacattcattgtgattcatatggaagacatgatattgcttcatgtatcttctaatgttgtcaactttagtcttcttatgaatcctcattcattgtgattcatatgaaagacatgatgttgctttatgcatctttatgatgttatcaaaactctcatctgctaatgaaaccttagtacttgcaaatngtaacaccctatacgaatcacaccggaattagagggatctaaaggccgtgtagatatgagactatacaattg

SEQ ID NO: 131370 - DNA, 353 bp, Glycine max
agcttcttgcgtagcctctcttgttgctcatataatcccaaaaacaaatccctcttattactagctattttgaattctttagttcctgaatatacaaccttcaaattgtttctcgttcccctctttgttttctgcaaaaaatcaaatcaatatcaaacaggtttttccaacatagattttcataacctatgcagtgcaggccatatctgaatgggatatccttcagtaacattggccaacagcaaaatcagatgttggtgtgtaacttttatgagcaggaaataagggctttcaacaaggaactacttggaaaatggaggtgggatatgcttcagcaaagtaacaagttatgg

SEQ ID NO: 131371 - DNA, 452 bp, Glycine max
tggaaaatccacaatcttattagagacatcaactacgatgtattcagtgtatcttgaggcaaacacaacataaggaaattcataatccaccaggcgatgacacttcagcataatgtcttcaatcagtagtacccaattcatcttgatacctgatttcagagcaaaaactatttgtagattatcatttgttacctaagcatgatagcttgacctaggtgtgagaatgtaggtggtgaggtatactaacattttgtcctcggtagtcagtccaccaacttctaagtgattcctcaagttcctaacagggtcaagaagcatttccttataggtctgtatcttcctatacccatcaggcatttcatcgaacttgcggactccacccatgtccagactggctacttccttccacaaagcaacatcaatgaccatatctactccattaacagtagaga

SEQ ID NO: 131372 - DNA, 397 bp, Glycine max
ggattgaagataaggttagtgatttgtaccatgcgttattgttgactaattatgtcatgtgattatgtaatgtataggatattcaaatattattcatatgttgaaacacgttcaaaccggatgttatgaatgtggatattacgtaatgcattggatgtggaacatcatatccagcgagataaagagtgactagtccatggtatgcataaacttgagtttctaacattgttgactgcaattggaactgaaatttgctatttgcacgactaactttcaaatattaatactcgtagtggtttgctgatgcgacatcgttggacatcgacaacatcacaacatttcaaaacaaatgggcaagatatttttttaaagctggtgtaaaaaggctaatgatggc

SEQ ID NO: 131373 - DNA, 423 bp, Glycine max
aactcagcttagtcaacagaatatccgaaatgtcaagaattggtctttgaaaaagcataacaaaactttctgtgattggtttaaagatacaatctttgtagatgagaatgcttcaaaaacattaagaaaactagcagatgggcctaaaagaaatgttataacctggcaaggatacgacataaacaggtatttattttacaccaaagcacaagatgacaaaagtacaatgcagaacagcggggtcaccctaagggctaaatcttaacactttgcaagtgtcaatgacgccaatccctgtgtagcttccatcccttactttgggatcattgatgaaatttccgaacttaattatgtgaaacttacacgatgtggtttcaaatgttaatgggttgacagcaacaccggtgtgcgcaccgatgatat

SEQ ID NO: 131374 - DNA, 437 bp, Glycine max
  unsure (1)..(437): unsure at all n locations
gcaggcatgcaagcttgtagaatgactgttcatgatatatgtcagggngtcggttcggtcagcagtccaggggtaaagggatgtcccacattatttccatgacacgcgcgcaacaatgatgattcaaaaattttatgcaaaactggtcacacattcacctatgtggacactcaagcatcaagttttggtggtcacgcgacactagggctcaggattcatcatttttcctatttaagtcaactcagtgtttccaaaatatgctcctttatcaaatcatgcattcatctgagtccattttgggtgttcgggaaaattttcacaacattcacccttcacgtgtatacataatttttagacaaaaccctttgttgtgatcggcgaatccttttcaaagaaaagccggaagttatttcttttcaaaagcgtgctggcttttt

SEQ ID NO: 131375 - DNA, 440 bp, Glycine max
  unsure (1)..(440): unsure at all n locations
cttgacttgagtcatcaagagattataatatgtgcccatggcatgagtttcataaatcatccttcaacatctttatcactatcaatcatctttgaatcatctatctttcaatcttttttaacatcatctctcaaacatctttcaatgaatctttcaatatctttctatagaattttttgattcatttctcttcatctttctaaaagttttttatcaacactttctcttccaagaaaagttctttgttaaaaaacttgtgttattcatctttttcattctcttctccctttgccaaaagaacgaaggactaaccgcctgaattcttttgtgtctctcttctcccttacaaaagattccacggactaaccgcctgagaattcttntgattcttcccttccccttaagcaaaagatttcaaaggactaaccgcctgagatatc

SEQ ID NO: 131376 - DNA, 413 bp, Glycine max
  unsure (1)..(413): unsure at all n locations
agcttcttatccaaggttattctttgggtgattcacccncaccccaggctcattccctagaggatggtgcctacccttctcctcttctactttggcttgcgctgcatcttcatggtgaaaaatctccattggaggacactattggagctcatatatccagcctccattgaatcttcacaagcaagcttccatcacctcttttcctgtacatgactgtgttagacgagtctatgggatgcgcgttgggtccacatgatgactctgggaataaggaacaagccttttactacctaagcaagaagcttaccgcatgtgagatgaattacacaatgctggaaacgacgtgctgtgccctgttattagcctcacatctgtctatgcagtacatgctcaatcatccccatggcttatct

SEQ ID NO: 131377 - DNA, 475 bp, Glycine max
  unsure (1)..(475): unsure at all n locations
cggtgatccagactatnttagtctcacccctgtgttatctttatatggcaagtccgatgacatgcggagatacccaagggttatccgtacctttgtcaactagaggcaagcgagcctgttgatcgagactattttaatctcacccctttgtcaccccgacccatgagttaggtggcatgcggagatatccaagggttattcgcacctttgtcaactagaggcaagtgagcctcttgatcgagactattttagtgtcacccctttgtcatccagagacggcaagtccgataacatgcaaagatacccaagggttttccgcaccttttgtcagctagaggcaagcgagccctttgacatgcagagaccaatgtggtcatctgcacccttcccgaaatgtcagcatcttccggccgagaccacgaataagtctcaatttcgctatcgtgacctaagggtccggtagcacacagacaca

SEQ ID NO: 131378 - DNA, 396 bp, Glycine max
  unsure (1)..(396): unsure at all n locations
ggcctggngagagctcacgcgcttatcgcaattatggactgcttagcgcacattaatgaaacttggcttaacacgtgctttactcgcttaacggatgaactaaagggatgcgcctggtgagaagaagaggtgtgcttagcgaacctgtacagctcatcttcttgcagagactttctcgcgcttaacccatgagtgttatgcttagcggaagctcgctaagccagcagattggcttaacgagaatgtgaaaaacaacacttttcaaagcttgcctaattaacctaaaattgatagaagatgattattaaacacacaaaacggaagtactaagtatttggtacctatacttaacagaaaatacttataacactacgaaataaccatagatggcgagag

SEQ ID NO: 131379 - DNA, 484 bp, Glycine max
ctaagctggttgcactgggccctcctcgcgatgattctaaaggttctatattcgccttgaaagcttggattgactcgttcccgacaccgaggattaccgatacggtctcaacttgactatgacccattcattcacttggaactcatgatctctacgatgcccatccgcgatttccttcatgcgagcctgagccttctgaagattttgtcgaagtagggcaaacatgtgctccctctgactgagcaattcatccactgccgccaccgtacaagtgcccgtcaagtactgtggaaaacttggtggtttgcggccaaaagtgatctcgaacggcgtcagccctgtggctgaatgtgtggacgtattatacaaccactctgcccacatcagataatggccccatgcgcttggccggcgatgcacgaacgctcgtaaatattgctcaatgatcctattcgcaacctcggtctgcccatccgtttgagga

SEQ ID NO: 131380 - DNA, 59 bp, Glycine max
cgttgcgcgggacaaagaactgagttaatggtaatagtttaacaacttgctcacctatt

SEQ ID NO: 131381 - DNA, 385 bp, Glycine max
  unsure (1)..(385): unsure at all n locations
agcttggtttatctttcaagggctaattattatatatatttnnnaananncgntacgcgaaaaacaagggattaattaacaagaagtgattcgacacttgacactcattctgaacgagcttattagttcttatgaatgttatgatgataattatttttgcccttgttgcagtgttaacaaaggcatgaagattgaagaattcaaattcatatattggatgaaatatgcacattgtatgtggggaagggcactaggagttatgttttctttgccatattcatattttcttcatacggggtatattaccttgagattgggattgagactctttgctttgtttgccctagctaagtgttgggcagggtctcatcggctaatggatggt

SEQ ID NO: 131382 - DNA, 426 bp, Glycine max
  unsure (1)..(426): unsure at all n locations
tcaagcctttaaacaagctatccaattatgctagcatcattgtatgctctttaaacaaacaagtttcaaccatatcatgaaggaaggaaatcaacaaggtcacactttgagtgtttacaggtcacggttcaagagctctgaaagtttcgggatgatggagaatcagtacgggatgagaggatagaagatcatttaccaaaggcaaacacagagaccacattttcaaagagctagctctccggtgtagagaattagtacgggtgaaatgagtggatctcctctcatgtgtgtgtgtatgtgtgtgcgcgcatgcgtgcgcatgtgcgtgtgtgtgtggatgtatgatgacataagataaagtcatagtgtctgtttggatacaagtcataagcgtttnttgagagcttctctaatgagaatgtggag

SEQ ID NO: 131383 - DNA, 428 bp, Glycine max
  unsure (1)..(428): unsure at all n locations
cacctgcagctgcagcttaatgcgatcccccactttcgtttttacaaccaaaattcagctttacactgttattgagcaaagtcaaggttttcatactaagcctttttagccttggcacatttcatattattcctaactaactcccttcaccattaacattaatctaattacgccacatggaactccttcaattcatacaaatacagttgggcctagggtaggatcccatgaaaatctcataagtgaccaagcatgacacggaagaaagagttgagtaaatgtgaataattttcagaacttgctcaacatctttcaaactttcacacgacctaccatcatttcaggcaaacttttcccaccatcaagtggataatatgatcccctttataaaantatttacaacgatgttaccattttaaacaaacaga

SEQ ID NO: 131384 - DNA, 451 bp, Glycine max
  unsure (1)..(451): unsure at all n locations
ntaattaattcaccatttataattaagtatctttttaacttttatatttgctttcgatgtaatacacacacatgttaaaccatacccaagctgtgagagtgatctattaatattgccagcttccttcaatcgctctcctgcggcacctgttgatttttgccgttctgacccagctaggtcaacaagattgatcctacttgttttaaatctgctcatgccatctgatgcactctgcaaaaatgaatttacttcaaaacatcttccagatgtatgttccaagaataataatgaaacgatatctatttacagctccaatgttagctgagtaatgtatcctaaacagaaagttcttttagtaaacaattgctgagagacagtgtatcaccttgcatcgagattcaacaacacaaataaaaacagtatgggagcgggaactctcagaanttatact

SEQ ID NO: 131385 - DNA, 471 bp, Glycine max
  unsure (1)..(471): unsure at all n locations
cctataaaactcagcttcatagcatgaaagctatcggcctaaatgtcaatcctttttcaaacagaactngggaacacactttccgaggcggcgtctgctaacacaaccgggtactatataaaacaatgtgcgaaggggcgattgcataaagtaacgaactgttagacatgatcatctgtgcatagacgtcacattcaccttatcatatgaggcgatgagcatacgaatgccagagaccaactacttagaaagcgtagttgactaagggttacatgttggggagccatggactatataatttaaaaaattactaaagaaaccatgagtagataggaccccatcccatgaaccacgcattatgctagaatcactaacggtttaggggttaccctctatgtgtttttcaaatcacgacgctgcttttatcaccaagtgtagaaagatgacacctctacttatcacgtgagcact

SEQ ID NO: 131386 - DNA, 438 bp, Glycine max
  unsure (1)..(438): unsure at all n locations
catgcaagctttagtcaaacagtttttttttaatgnttagaattgggnggcgaaaaagcataccaagactttttgtgagtggacaaagatacagactctgcagatgaaaatgcttcagaaactttaagaaagctagcaaatgggcctcaaagaaatgttataacttggcaaggatatgacataaacaagtattcattttacacaaaagcacaagacgacaaaagtacaatgcaaaacagcaaggtcaccctaagggctgaatctcaacacttcgcaagtgtgcatgacgctaatccttgtgtagcttccatcccttactttgggttcattgatgaaatttgggagcttaactatgtgaaatttactggttctgttttcaaatggtaatgggttgacagcaacacccgtgtgcataccgatgatataggatttatggtg

SEQ ID NO: 131387 - DNA, 453 bp, Glycine max
  unsure (1)..(453): unsure at all n locations
tttgaaattaaactttgctactggtaatcgattacagttatttggttatcgattaccagagagtaaaaactctggtaacttagaaaattttgagaaaagctcttttgaaaaacaaaattgtgctatgtttgttttttgaaaaatcttttcaatacttcccttatgaagtcttcttgatttcttttcttgaatcttgaattcatcttctcttgaatcttgaaatcaaacttctcttgattcttaaatcttgttaactcaatcttgaaatcattctcttgggctttttgtcatcatctttgttatcatcaaaactacttgaatcaacttcattcatcatcatgaagcttgcttctacaatctcccnctttntgatgatgacaaccctgaaatcaagaaacacatacacattcttttttctagtcgatcactcacttaattctccatanttctctc

SEQ ID NO: 131388 - DNA, 422 bp, Glycine max
  unsure (1)..(422): unsure at all n locations
agcttggtaagaggcatttgtattctattatttgctctcgngcttagcgcgtaaccttgattcctgtgctctttcaaattgcttggtcacactaagcgcgctgaagctgcacttagcctatgatgcgtgctaagcccaatgcttgcgcttagcacaatagctactttgacacttcataatttaacctcttttgacctgaaattgtacatattttatcattaaatcatatggaaagtattctagagacagctataacaagaaaacaaaatttatttacaaaatactacaaaataaccctaaattggggaactatacaaaatttagtcgtataagatgactaacaatatgcctataagcgaacacaccaaaggggaaagtgaaagtttctctggatctttacgatccactacaatntgattata

SEQ ID NO: 131389 - DNA, 468 bp, Glycine max
  unsure (1)..(468): unsure at all n locations
tgtagaccttctcttcttcaccctttcgaacataacccagttgttgttccacatacacgtcctctgtcaattctccgtgaagaaatgcgcttttgacatctagttgatacacattccatcccttttgtgctgctagagctaaaaccatccggattgtgtcccaccttgctactggggcaaacacttcgttgtagtcaatcccttgttgctgagcatagcctttagctactagtcgggctttgagcctatcaacttcaccattctcatttaacttggttctaaaaacccatttcactccaatcttcttagcacctttgggcaaagctgtaagctgccaggtttcattctttntgattgcttcaatctccaaatccattgcctttctccatttctcatctctttcagcttcttcaaatgagcttggatcttcatgagaggtaaacattgcaaaataatcttcatcatcag

SEQ ID NO: 131390 - DNA, 470 bp, Glycine max
  unsure (1)..(470): unsure at all n locations
tatccattatcatgaatcaaggagtacaccatatatttatttttttactgaatctccacccatcacaagaaatagagctttccacaattatgtctcaaatatttagactgttaaatttcaacctcaaacaactaaaattcataaatgtcaattttttaggttgagatggaatggtgtttctattatggttgctgccttctcacttttggcagtaggtacatcacttattggcaccctcctagccttctcagagttcttcaaggagcaacttaaaaatggaacctggcattcccttcccactaaaaaggtaaaagtaaattatgtacttttaatatctttattaattgcaatttgttacattctttgcctataacacagtcaataaagaatcatgctatgttttaatgaagaaagttctttggacancgacaatggtggggcaggaataaaataaatgtcatatctgcaac

SEQ ID NO: 131391 - DNA, 479 bp, Glycine max
  unsure (1)..(479): unsure at all n locations
tgtcatcaaccactgcctatccctgacgaagaacatatgattctttattatagctcactcactacgtcctaacatcaatatgttnaaagtgtcatcacatacattggcttactaatatagagttctatgagacataatcggagtttcaactttctgtgacaaattatactaatctggaagactaagaattctcgagccattcaataagattggagtgctaacatgagaataaatgacaaaatagctagtacaacctccagattgctcagtatctagacaccaaaaagacaagtttattttcaatcttttgaccgcttgtaatcaaatgtctgaataatttgcatgaaatnttacaaaatctcattggcacctattgctataagtcacaagtttgtgtgtaagttgttgctcaatgcgtaaagtaaacaacttgttattttcaatcacagattatgggtgtttcaatccaatctttgata

SEQ ID NO: 131392 - DNA, 335 bp, Glycine max
  unsure (1)..(335): unsure at all n locations
tagcctttggagctggttgatagctttggctgatgcaaataggggcggtcaaatagtaacgcctgaaacagtctttttacaacatatggagactttttaccaacataggacgcaaacttgtcatgattaactcgatggatttttgttgatgcaaaaaggctatggcctgcgctcttaagttggctcacgactttggatgccaccaccaggccatgatatattcatgggattctacatcaagaacatatcggatatatgtttgctgtcttttaagattaaggattcattttcaacactaccgtccccagtattttaaatactattaaccanatcaa

SEQ ID NO: 131393 - DNA, 478 bp, Glycine max
  unsure (1)..(478): unsure at all n locations
ctaagcctgacagatttagtatccnctgaatggatggctaaatggtcttatatcttccaatccaccctggataggaatttctctgaccactgccctatcttgctgaggtcaaggttcattgattggggacccaaaccttttgggttctggattgttagtttcaggatagttccttcaaaagaattgttcatgattgctggacatctacgcagctaggagggtggggtgttatgtgcttaaagagaagataaaacgtctcaaaagaagactaaaggagtggaataaggagcactttggggacacctttaagaaggtcaaacagattcaagaggacctcactatgttggaagagaatactattgatagacaactatcccccctggaggcctcatctagaaagtagcttcaggaagcattgtggacagccgcccagtcacacgagtcccttctaaggcagaaagctatatccaggtggatt

SEQ ID NO: 131394 - DNA, 335 bp, Glycine max
  unsure (1)..(335): unsure at all n locations
tactcaagctntgactcaacccacatctttggatccttctctgccaaggagtcaaggtcattgcaaaggatcttcacaaactcaaccttcatcttcagtttatccttcattgtcgcctctgactcaacccccctcttatcgacctcctttgttgcctctgaagacaacgacgacaatgaaatcaccaacaccgagtggttcttaattccccctctccatgacccatgataaggcttctataactctgcccccatctaggtcattggtgtgcattcattgatgttccatttnttattttcctcgaattgctgatttttctgctccgagactaatgc

SEQ ID NO: 131395 - DNA, 432 bp, Glycine max
agctttatgaaccatattattttatggttattaattacgagaagatggtcactaacacacaattaactaataatcaaagtgatcaattccaatatagaagtgaaagtgatagaaagatacaattaactgaataacatcgaagaactttattaaacttgagtacatgggtacaactacatcaaaatctaagttctaaggggtttagccaaccatgttcatagaataattaaaaagcatacaatattgcatttagaaataaaagagattgaaaacccttacaaattcggaccttgattgttctcgctgtaattctcctcacaaaagttattgttgttcggaaaaagtataatgaattttgaatcccccaaatacagactccaacttcttatttatagactcctaaagataattactctaattaggcactctctc

SEQ ID NO: 131396 - DNA, 474 bp, Glycine max
  unsure (1)..(474): unsure at all n locations
cccttgttcattactaaacaagctgatattaatttttatcacaagcaaagtatcctaactacatgcaagagataagaatgaacaatatgaaagggaaagaaaagttgggttgcctcccagtaagcgctcttttaatgtcactagctcgacgcaccatcctgttatccaggatccaagcatagaacagagttcaatctttccatagctccaccatgatattgcttcaaccttcgtccgttcattacctatgtcctatcaggatctttagattgaggatcacaaagctccactgctgcatatggtcaaacttntttatggtaaatggtccaaaccactatgatttaagctttctcaggaaccaattaggtctgagttgaaaagcaacacttattgtcctagctgaaaatccttcttgagcaactttttgtcatgatactntttaaccctttctttatactgctttgaagatcataa

SEQ ID NO: 131397 - DNA, 330 bp, Glycine max
  unsure (1)..(330): unsure at all n locations
aacataatcctaacggaactacaaaatcacaaggcaatggcagacaaaccaacgaaacgctgaatctgttactggcaaaagagatattgaagcctacacaacaacttctctctgtcacaaaagaaaacctttacgtacgctggagaggtgctaaaccacatgggccagtaccatactgatngaacccctagtcagctagcaacagtcagcaccccccgaaagccaacataccctgccgcaagcagaaacaccatgtcctcaagatggcagacagcacggagttggacccaacccttccaagaggtaccatcaagggatagaccatcccat

SEQ ID NO: 131398 - DNA, 480 bp, Glycine max
tctaagctttatacaagaatgaagctctgatacatcttgttctccaagtggcctcagaaatcttaagaagagggggttgaattaagatttcacaaactattccccaattaaaatttctatacatcttttaacccaagtcccaagattccttttaaaatgaattactaaataataattcaaattaaacttactgaacagaaatgataaacaacaataagtaaaggattttgagggaagagagaatgcaaattcagttttatactggttcggcaaagtctgttgcctacgtccagttcccacgaaacccgcttgggagttccactatcttgtaaatcctttacaacttcttaaacacacaaggaaatcccttcctttgtgatcatatgtcttacaacaagagactctcagtctcttagccctttgatttgaaagagaggaagaagaagataatctctcttgaaagagatatatctctacaat

SEQ ID NO: 131399 - DNA, 324 bp, Glycine max
  unsure (1)..(324): unsure at all n locations
agctcgtggcttaccttattcgtttactattaattgtatacgaagatgaaanaccctttctttcttatgtttatgaaggcatgcaaagggaaataaatgctataaatgagatgtttaagaaagaaatagatgcataaaccttatgcatatattattaaggctcaatgggataagcatttaaagctcaaacttcatgcaacaacttattggtttaatcatgcattcaggtacaatgagaagtttaataataagagaagggtcatcgattcagttgttgatttacttgaaaaaagaggattgtgtgagaacctgactcaagtcatt

SEQ ID NO: 131400 - DNA, 469 bp, Glycine max
  unsure (1)..(469): unsure at all n locations
tgtcagccatggtgcccaagtgctagcgcccgctactcattttttattaagacttatgtggagaagtctaggttatcagctcttgctacgatgtggtatcctgtcacaaacaaggacttgatgaatttcatttttgagaggtggcaccaagagacatcttccttccacctacccgtcggagagatgtccatcactttggatgatatgtcttgtctgctacatttacctctgataggtagatccattgatcatgtctccttacattttgacaaaaaagtggtgaggatcttgcttatgacttatctaggcattttgacagagacagaggctacaatagcgacaaatgcaggtgccaaggtaaggttgacatggctagaagacctttatcaccgctatgtaaagtcaaactcatacgtttaggctaccatgacttatctcttgcacttgatcaaaagtacaatattngatg

SEQ ID NO: 131401 - DNA, 387 bp, Glycine max
  unsure (1)..(387): unsure at all n locations
agcttgagtcgtttcatggaggatcatngttcctttagatggngaagggtttggtgagtgggtgacttcaactggtgccatatggttttgttgatttgtgtttgtagagagccaacacaaaaaaggcgggaaccaacgctcgcaggtttcagtttcaaagcggagaacatgaaatcaaaccagatattaggttcccaaggttcttgtgtttgtatcaatcctatctattcatttttctgctgttaattaaaaaattattacagtgtctgagattttctgttttatttttggctaaattattaatttggctatctgatttattatctagacttaattccatcatttatttttgttatacaatttgtcattatgcgatttcaattatta

SEQ ID NO: 131402 - DNA, 471 bp, Glycine max
  unsure (1)..(471): unsure at all n locations
tgagcatgtgttcaagatatcctgaaataaacctttgtggttcnttgcataaaattcaacatccaaaagccaaacccaaccacaaattaaagcacatggcataattgaggattgatctatgaaaattgcccagtaaaatttaagctccatacaactatactgagtttaaaaatagaaaagaagaaaccttgaaaaatctgcaaaacctcagttgctctctaccaaacagtttaaaatactggtagcataaacttgatccctatagttcttttatgtgtnaaaactctattattcttatgttgtcaaattctgggtcttcaactcctcatcattttatgtattggattatcatttatctgcaaaattttagaggctgtgattatcagtttcaagctgctggtggtggagccctcctttccaattccggcaatctgatgattgctcatcttctgcatccacacttgttcgtcc

SEQ ID NO: 131403 - DNA, 432 bp, Glycine max
  unsure (1)..(432): unsure at all n locations
agcttatagttatatgcatcacttgtntatattatatgcagatagtatgcacttgaaacaagtgccaagacaataataccatgataataaaccaaaccttattacactagatgtgcttatccagatcaactgacatcatcagctatatatcaagaaccaaattttcaacaaatccttgtagactaagatcctcttgatggtttcaatttcaagtggaggggaaaaattaatgcatgaattgaaatacaacattatccacgagaatacagtattattataaaggcatattgaggcaatagttgttcatacaaaaagcaatgattgtgttaccataatatattcagaagtcaatggtcgctacaacctattggacacacaaattgcccacagggaacatatacagcacagaggcagcacgcacatgtgccccat

SEQ ID NO: 131404 - DNA, 450 bp, Glycine max
  unsure (1)..(450): unsure at all n locations
ctttggtcttgaacttcccaggtttcatactctgcattgactcgatcagcaatatgatcatcctcagtgagatttgatcactggttcgacgtgttgtcgccaatggagataattcgaatcatcaagcttctgaacaacagagttagggaacgactgagaaatgaaatttgacggagcggaagccatgaaagcacatatcaggaccttgaagaagcacaaaattacaaaaaaatgactctagataccattttgataaactaagaggaaaatagagagaaaacagagaagaaaaaggagaagaacaaagctgatttttattgatctgaaaaactaagttagagatagttacagtccaggtatttataaatctctatacaacagaactaactctaacagaaagctaactaactctagagaagcccttgtactcnctgaantactaactaccac

SEQ ID NO: 131405 - DNA, 269 bp, Glycine max
  unsure (1)..(269): unsure at all n locations
agttctatcgagacccgcaaaacaacgagaggcgcgacaacaaaagcgggcgcgaccgaatncgaacgacggcaactctacacgggaacaccgcacgagacctgcaagatatccagacgcccgaaacacaacgccgccgctcagagcaacggcgaacgacacaaacccagcaccacgaagtccgaacgaggccccgcacacacggagacgctcgaaagacaaaagagaagagccgaggaaagtctaacgacacaaaaaaagcactcgca

SEQ ID NO: 131406 - DNA, 465 bp, Glycine max
  unsure (1)..(465): unsure at all n locations
ggaatctctcgaacgttccaatgcagccaacagaaacattctagtgtgtggtccacgttcctcagcggatcgaacccgaacctcggtggttagtggcttacggaagaaactgaaggacttgatggatgattttcaagggttgagggcaagaatgcataatgagtacaaggaaaccgtggaacgaaggtacttcaccatcacaggagaaaaggctgatgaggacaccatatagaacttgatatcaagtggagaaagtgagagttttcttcagagggcgattcaggaacaacggaggggtcagataatggacaccatatcggagattcaagagagacacgatgctgttaaggagatagagaagaacttgattgagctgcatcacgtgttnttggacatggcagctcttgttgagtctcacggtcaacaacttaataacatagagagtcatgtggcacgtgcgagttc

SEQ ID NO: 131407 - DNA, 450 bp, Glycine max
agctatttagtctcatatgatgcagatgattttgttgctacctcatgcgctcctctaatgactatggcattatttctagcactaaactgctgggagttggaagccatcttctcaattaaatatcattgcttcatcatgagtcatgtctctcagggctccaccactggcagcatctatcatacttctctccatattactgagtccttcataaaaatattggagaagaagctgctccgagatctaatggtcagggcaactggcacataagtttttaaatcgctcccagtactcatacatgctttctccactgagttgtctaatacctgagatatctttcctgatggctgtggtcctgtaagcacggaaaatgttatcttaaaatactttcttaaggcatcccatctcgtgatggaccttggagcaggtattacatccagtcctttcgcactc

SEQ ID NO: 131408 - DNA, 342 bp, Glycine max
  unsure (1)..(342): unsure at all n locations
tctatagcacgtgcgttcctaanttctctacaatcgcatctctctctcaatgagctagggaaaaagaatgtggcatatacctgtgtgaacaacaagagcaagcctttgcttttctcaaagaaaagcttactaaggaacatgttctagctcttcctgacttttctaaaactcttgagctagaatgagatgccactgtagtgtgagttggagctgtgtttgtacaaagtgggcaccctattgcttatgttaangaaaaacaacatagggcctacctcaactaccccacctatgataatcagctctatgccttatgaagagccctccagactggcgaacagtacc

SEQ ID NO: 131409 - DNA, 492 bp, Glycine max
  unsure (1)..(492): unsure at all n locations
tctatcagtcacctgccgcatgcaagctatggtcaaaaatcctacgtatggtttaggtgtncgatgatgtgttgttacagagatcaaccaattatttaaaccaggttcatggtccaactataaagtcccctgctacctctcaaagcaacacattatctttgtatcgaaattcgaccaaatttgttcttctcctgtgatgatggaggacgagcataaaaagctggattctttgcctgaatttggattatcagagccagagaaatattccaaggaattggaggtggctgttagagcactgcatatggcgtgttccctctgccagagagtgcaggacactttgatttccaacgctcggaccaatcatcgtcatgtgcagtccaatgatgacaattctccggttacggttgcaggtgaatgttggttaactaacttgcttgtatgctaaaacctttgcttaccataattctctggttttgctctgaatacggtggt

SEQ ID NO: 131410 - DNA, 429 bp, Glycine max
  unsure (1)..(429): unsure at all n locations
tggcacctgaatcactggtcaggctgttctgttagagtttatcaactgacttctgatgatttgttttatgcttcaatgatggattcaaacttctagagcttggaagtgaataacaatctgaattatatgcctgctttcacaaaagtccaagagaatattgagaggactgactgttcatctactgggataaatcatgtgggggcttggtggtttcctttacatgccattggctatgccaaaatcatgtttacacggattttatttcttccctctacacacctcatggaaagatatagcttggntttacaggaattatttgtggagttcaacttctgcatttgaaatgcgattggaatccacattatgggaacgccaatacgagaaatttcttttcattttttttggcttggtatttttcctaaattctaa

SEQ ID NO: 131411 - DNA, 364 bp, Glycine max
  unsure (1)..(364): unsure at all n locations
agcttataagaacaaaatagccctaaacatttccaaatatgcatcgngaattgacgacgcatcaccaatgaatcaagccttggctatatgtgcaatgctatctatgtgggcaaaactacaccaaatgatctataatgatcggatggctcattattctcacataggtatatatcatcactcttcaaattgagcatttcaataactatcatgactgtgtataagaagaatctaaggatttcaagtcacataatgtcaagaactcttattttcaaaacaatcacccatttctcgaacatatcctataattcaaagaaaaacatgcaaacttgtacgtgcacaccaaaatgacccacaatattaaact

SEQ ID NO: 131412 - DNA, 466 bp, Glycine max
ctcagcttagcttcttaggaatcttctaaggaagcttctcaagttcgtgagcttagtttgagaggggtatgtgtagctaagctctagcttctcaaggatagtctctcaaagaagcttctcaaggaagctttctcaagaaagcttctaaaggaagctacctatcctatatatagaaacatgtgtaactttgatgaatgatagtcttgagagacacacctcagagttcaacttctctccctttgtctatcttcaatttcttgctcccccctctctcttactctccctctttcttttcctccattgaagcatcctctccatgcttcttatccagagctcatattggtggtgaagctccttcttccatggcttattcctcaatggaatgcgcctccactaacctcattttcctatgtcttccgctgcatctccattgtggaaatcacctcttaagaccccattgaagctc

SEQ ID NO: 131413 - DNA, 329 bp, Glycine max
atccttgagtcacctgcggcatgcaagcttctacttatgtggcagggcgggctttcttcaccttcttgtctccaacgcgaactttgaccattgttcttccttcccgcaatgcttcttttcatgtctgcctgagtgggcttatagcctaaaccatacttcccacgatttccttgagtatttatcaggctagttatgccgccgttgttttttcctaaacccatcccgggttcaaaaccgttccccaacataactcgggccatcattaccgctgcatcggacagacaaggttgcccaaagagggagtccacggaggatatgctgaccacctc

SEQ ID NO: 131414 - DNA, 476 bp, Glycine max
  unsure (1)..(476): unsure at all n locations
tccatcanattcactccaacaagatagtattccatccttgttgtttttgctttccattgatgcgttttcttcatcttttggtgccttaatttgtgagaatatgcttataattgtgaggcagttttggnttgctttggtgcttgttttcttgaattgaggattttgaatgaaaaggccttangcctatgttgtattctgaagcaatggggcatgccacattgtttccattctcttgcaatttatgtccaaacatgcgcccaccaagtgctcggtgaaatgcctcaatgacatatgagcatggttttgtaggcttaggattgtgggactgttttatatacatagggacagcatgaaggaattaaaatgatagtccgaatgcaattctatgcctatgaacccatatttttaatttcaatgcaaggaagcatgcttatggctaggaatccaaaatttggttttaggattagaaaagcatg

SEQ ID NO: 131415 - DNA, 294 bp, Glycine max
tggctctggaatgggtttacaactcgtcaatcactttcaaggtggatgtttatagctatggaattgctgtcttgcagatgataactggaaggagcccaacaacaggtgttctaatcaccgaattagaagcagagtcagatcatcgcgagaggtttttgacatgggtgagggataaaaagatgaaaggatcagacgcgggatcttcttgggtggatcaaatcattgaccctgctttgggatccaactatgccaagaatgaaatggatttatagcgcagggtggctttggaatgtg

SEQ ID NO: 131416 - DNA, 415 bp, Glycine max
  unsure (1)..(415): unsure at all n locations
ctcagctcctttgctctcccttcagcctgtcccagcaattcgtccttatcatctaatcaccatgacctaaagacactattagttatatgtttgtgattaaatcgatattgtggatagagaacaaaaatggatttgtgcacaaatttgtacctctaattcttttcactttcacagagggaaagaagagagaatgagctttttgtntagtatgaattgattccacatgggttgattgtagtgagactttcgttggttcaggattcccttactagcgctccagcaatgtgcggntgcacctgcacgtgccattggactttctaatagcattgttttatttccaaatcatgtggaatgcgatgtggtcaaaaccatggtgtttgcgactgctctatgtggagaacgtgttgcaagcggt

SEQ ID NO: 131417 - DNA, 422 bp, Glycine max
  unsure (1)..(422): unsure at all n locations
cttgataaccttaatagtaccagtgggcctagaaacctctcagctgcttgatattgaatggtgtaggccactctagaactgcctgcaccttagtagcatccatagcaactccttcacctgaaactatatgtcccaagtactctatctccaatacaccaaaagagcatgtagacaacttagcaaacaaaacattttctgtcaacactgtcaatacaacctctagatggcataagtgttcatgccatgtggaactatataccaatatatcatcaaaaaacactaacacatatttccttaaagcatgttggaaaatatggttcacaaacattgaaaagaagccggagcatnggttaaaccaaatggcattaccaaccactcattatggccatggtgagttctaaaggctggtctatgtctatcca

SEQ ID NO: 131418 - DNA, 323 bp, Glycine max
  unsure (1)..(323): unsure at all n locations
gcctcaattcatcagtgggcttttcttctgtgtccagcatcttgggatgttcccagcctatgatgacagctttccatgttctgcttttcagtgatttgatgaacgccaccattcttgctntccagtattcatagttgctaccattcaaaaattgtggtgctggtcacttgatcccgcttctttctccatggtcatcacaaaattatcttcctagattccactcagctatttctagtgccctgctctataccaattgaatatctgatctggggacagtattttactagatgttctcacatctcgcttcataacatgcatattgt

SEQ ID NO: 131419 - DNA, 469 bp, Glycine max
  unsure (1)..(469): unsure at all n locations
ggatccttaagtcacctgcggcatgcagctntaaaaatattcctgggtgttgtttgatttcacgagagtagtatttaccatgtttagcttggatcccatggtgagggggtgggtatgtaacttatgttgcattcccatgggaagttagtttctaacctaactattaaattccattttcattcttacttctttttattaattttggacatattctcaggaatattaaaatctaaccaaacatattccttgaaatgccatatccaagaatgtaataatacatgttgaaacaaatgttacctagtaattaattgggactggccactgggttgggtttggggaaaaattggttgaagccagctagttgggtttgggtttctgggaaagtatgttcagcctgtacctatccaattcaataatatccagcttgggttgggtcaggttatttcaaatgtatctganttcattgaat

SEQ ID NO: 131420 - DNA, 249 bp, Glycine max
  unsure (1)..(249): unsure at all n locations
agttttccttgcgtctagtttttttacttgcagtgtcaatacttgatgttacgatttgctttgtttctttggtggctttgtgtgataatttgatgtgctgtatctcttgaatgcagacggtgctggtggaagggcacttgggggaaattgcttgatacagatggtgaatcccgtatagacaagaacgatccaaactatgatagcggcgaggaaatntctcttttctgggttagngggtagtttcttaca

SEQ ID NO: 131421 - DNA, 372 bp, Glycine max
  unsure (1)..(372): unsure at all n locations
ctcgacccgngatccttgagtcacctgcggcatgcaagctntgagcaaattcaaacgacaataaccttttactcggatgtctgattgagtcctgtaatttatcgacacgctcgaaattgaatgttgaagctctgagcaaattcaaacgacaataaacttttactcggatgtctgatattgtcccgtaatataacgagacgctcgaaattgaatgctgaagctctgagcaaattcaaacgacaataacattttactcggatgtctgattgagtcccgtaatatatcgacatgctcgaaattgaatgttgaagctctgagctaattcaacgacaataactttttactcggatgtctgattgatcccgtaacata

SEQ ID NO: 131422 - DNA, 430 bp, Glycine max
  unsure (1)..(430): unsure at all n locations
gctggtgggacatcttgacttgctntccaatctgtcattcaccacagattctgccttcttctattttcagattgggaatgcctctaacagcacctttgtcaatgattttcttcatgcctcttaagtgcagatgtccaaatctttgatgccatattctgacttcatcttctttggaggatagacatgtggaggagtaactggtttcttgaggtgtccatatgtaacagttgtcctttgatctgctgcccttcattagaacttcactcttctcatttgtcaccaagcattctgactttgtgaagtttacattgaatccttcatcacacaactgactgatgctgatctangttgcagtcagtcccttcaccagcagtactttgtccagactaggaagtccatcatgggctagctttcccattccaatgatctt

SEQ ID NO: 131423 - DNA, 354 bp, Glycine max
agcttatcaccaagacacaggtacgacctctatcttttgagaataacacgttaaaacaatacaataagatgtgtgcacaacttaatctgagtaatatattactaaaagtgaatgcagagtagtgcacaactcataatgatcaaggacctgaattttaggtatatgaaggagaatatgatggtggtggtagatgctgcgttatattatgatccttacaatcgtaatcctctcggaagagttcctataacattagcatttatgtgcgcttaataccgaaaatttaactatgtagaatggattctgctctttgtccctagggataggatataaaaggtggatatgggatcgaatcta

SEQ ID NO: 131424 - DNA, 299 bp, Glycine max
  unsure (1)..(299): unsure at all n locations
nnatgannnattaaatagtaactcgccagtgttgtgacacgttatgcaaaactaacgcattcactaagtattgaagactcaacttgttagaatctcactagcaaaagaatgcaagggaatggaaacaataaagggtgtctattcccataatgggaaaggattgtcttatgggtcaagacagccaactcacatagactacagagctatgtacatctgcattaattaccgaactacacctgtatgaattagacttgtatataagcataatgtacatgcttcttgtaggatccaaaggagat

SEQ ID NO: 131425 - DNA, 282 bp, Glycine max
aagtcgcctgcggcatgcaagctctaagaataatggcctcggcattcttcttattcccagagagaaattcaataaatggcctcctatgtttaatggagagggttaccactactggaaaacccgtatgcaaattttcataggggcaatacacttatacgtataggaagccatataagttggacctttatattcctaccataggggctggaaattacatcaattgagaaacctaaaatgagtggtctgatgatgaataagattactaagtcaatttaaaggttt

SEQ ID NO: 131426 - DNA, 268 bp, Glycine max
taagactaccccataggtagctttcatttctggtgagtgcaactatggcttataacttgatctttttgcacctctggcgcattaattattaagaagctgactaataaatataagatcagtctttaatatataaattgctgtggatgaaaaaaaccagtttttgcttttacaccagtcgtcaacaccaattaatgggttttctaatggaagtcgaaaaacatcatacttatagtaatcttattttgaaaatttcttattaaaataaaaa

SEQ ID NO: 131427 - DNA, 340 bp, Glycine max
  unsure (1)..(340): unsure at all n locations
gatcctccaactcacctgcggcatgcaagctagtgcattcaatatctcttatgagggtgtnccatatgttctcaagactggactaatacatttgctgcccaagtttcatggtctcgcaggtgaagatccttatcagcatcttaatgagttccatattgtttgttccaccatgaagccccctgatgtccatgaagatcatatctgtctaaaggcttttcatcattctctggagggagtggcataagattggatgtactaccttgctcccaggtccattttcagctgggatgaccttaaaagggtgttcttggagaaattcttccctgcatctcggaccact

SEQ ID NO: 131428 - DNA, 413 bp, Glycine max
ctttaagagcagctccaacagccttatatttctccaaaatgaagagaacaaatgatatattttatttgggaacagaatatggaaattcgtaaatgcagatagataacaagcccattcactgctagacattgatattctagttgttacaatataaaacatatcttactaagtcttttttttcttctagttttctatttcaaaagccaaatagttatcttcgaaaatagtgatcaaacaattcctatatatttaccttttcttcaaaattttgaaaaccaaataaagagagaatatagtacaaatatatcggttaaaacattgacatatgccaaaaagtcttatttaagggagtaatttataaattagtctttaacaagtaacagacgacattatatgcagtcacatgatgattc

SEQ ID NO: 131429 - DNA, 480 bp, Glycine max
  unsure (1)..(480): unsure at all n locations
tccttaagtcacctgccgcatgcaagctgggttcgaggtacttacccgttgaatatcttataacgatgaagaacgaatgaagaacgtcgaagaacggttgaaagccttgcgagattcctcacggaaaacgttacggaaacgtttcggaagcgcctcggcttagattttcttcacggaaacaatttttccaagcaaattcaacagagagagaagtgcctaaggggctgggatcccttccttcttcatttcctcccctatttatagcaaaataggggaggtggttgccgcccagctcgcccaggcgagcagggttgcttcctccaaaagcaaccgccttctggaggaatcttctggagggcccaagtgggcctgggtggctattgcacccncatttttacttagtacacccccctctgctgtttttggtgattcttttttcgaaagttacggaaacttacaatttcgtaacgatatctgttt

SEQ ID NO: 131430 - DNA, 442 bp, Glycine max
  unsure (1)..(442): unsure at all n locations
cctctgcattcagaacanaacccctactcttgatgcaaagatgaccaganaactcttgatgatcaatcctcatccttgtaaatctggaataggtaggcagtgtctcacccttctccaaaactactgtggtctctaagaaggtattcaggctgntagcatcaatcttgattaaatgtcctcttaccctcacttgcttagggctctggtctttcgggctgtataagttggcataaaactccttcaccacaattacatctatgcttccatcttggaaattggtgaggcgttngtgtaagttatgcctctccaactctgccttaaactcgtcaaattcagaatgataaatcttaacattcctttctagaatgatccttctggccagaatgttatctgtgtatcagntccaggcttcccaagattggaatctnctggtatcatactg

SEQ ID NO: 131431 - DNA, 448 bp, Glycine max
  unsure (1)..(448): unsure at all n locations
tctgagtcacctgcggcatgcaagcttctntatttatttatatatatatatattaaataacaaatattctgagccttgtgaagaaaaagatcattgtaaacaggtgtagcatttgttgctagagaaatgattatttggactcaccaggttcactagagcagacttggctttaactttttcagacagcttcaaattaattccatttttcattatcaaattgatatgaagcacatgatcaaatctttcacagtttttattatagtacagagattagcttcacatgaatggatgttctttttaatataaccaatgatttttattagatatatgttccaaaagttttaatataaacaatcaaccatgtcattatttaataagaagaatctgatgaccaaattggggagaacctacctgagattttttcggttccttaccccaaatgacaaaa

SEQ ID NO: 131432 - DNA, 450 bp, Glycine max
  unsure (1)..(450): unsure at all n locations
actcagcttgtggttgtgcttttgtcaaacctcagnttgagcattttgttcatgtttacaaacacacctatagaagtcaataatgtttagatgggatatggagttttgaacttatatatgtttaatgttgtttgaagtagacattggagaactttacttttatgcttttccttttcttagttgttcacaatattttcttcagcgcttatcctatggtgtttttatgtatttaacagaggtatcatgccaaaaagagattggatagtcatcactttgaacctaatggaagtagcggtaaactgccctgttatctgataatatatttagaaaacttttctgtagncagtattatatttttttcatgcttgatgtttttaactgtcttgttttgaaggtttgtatggccagcatagtgtgaagaagctgaagccaacanaacaatcccttgat

SEQ ID NO: 131433 - DNA, 394 bp, Glycine max
agcttgcccaatggtagtgtagtgatggctttattatctggagatgtgaaatcttcagacactcttattcttaggtatgcattgttcttacctgaattcaacatcaatctagtgtccatttctaaacttacaaaggcagctcaatgtaatttaatttcacattcgttgaaaatgtctgttcaattcatgattcagcgttgaggaggattggtttggctgaactccacaatggactatactacatgaaggtatcttgtaagagtagagattatataagcaatgtagtctctcatggttgtattatgatttgattatgatgaatcagttaattgccatcctaaaactgcatatgctttaagattcgacctgtttctttaaaattcttccactttga

SEQ ID NO: 131434 - DNA, 483 bp, Glycine max
  unsure (1)..(483): unsure at all n locations
ncatgtgcaatagtgatgcccgcaatgtaatcatcatcatctccattgttacccatgccagaagtgtcacccccttctatagaagatggttggactcctggctaggcaaactactgtagaaaagcctttggcatcatcagaggaggctccatagaaaggtgaatggatagttgatgcaagttctagatgacgaggcgatggccatgatggaggctctacatcatctggactagatgctcctgctgggaaaaggaggaaaaaggcttgtcagcagtagaagaggttgttggaggagggattatcgaaggtggagctagaggaacatctgaagtggtttgggccttgactcgctgctcaactccccacacagntcctttntcttaaatttacgaacacttatatcngaggggaagtgatataccggcaagcgcaccangtcaccaagtatttaaatataaaacggaatgatccgagtatcgaaca

SEQ ID NO: 131435 - DNA, 305 bp, Glycine max
  unsure (1)..(305): unsure at all n locations
agctctgagcaaattcaaacgacaataacttntgactcggatgtccgattgtgtcccgtagtatatcgagatgctcgaaattgaaaactgaagctctgagaaaaatcaaacgacaataactttttactcggatgtacgattgagtcccgtaatatatcgagacgactgtaattgaaaacagaagctctgagcaaattcaaacgacaataacttttgactcggatgtccgattgagtcccgtatattatcagacgctcgtaattgaaaacagaagctttgactaattcaaacgaaaataactttaa

SEQ ID NO: 131436 - DNA, 441 bp, Glycine max
  unsure (1)..(441): unsure at all n locations
ctcagcttacaacagatttagtaatgacccactaacctataattattatacttattgtcattaacctagggaattaaaacacaattaatggctgagtgtaactgaaattgtggcaaccanaagtcacccccaacagccaacatgtcagccaccatgtggtctcccaaaaggctgatgcctatgttgccaattgggcccttattacaacttgaactacagtccctttagtngattaacccacaacatatttttggtcagccaactntacaaggagtgggccattatttagacaaactaaacactctataattgacacaaagtggtgtcatatagtcctcctccatttgggccatgatacaactcacaaccttggacttttcttcgttgaacttgtgcttgtattcaaatagtatggacaacacttgatgaagagctttcttg

SEQ ID NO: 131437 - DNA, 444 bp, Glycine max
  unsure (1)..(444): unsure at all n locations
gtcacctgcggcatgcaagcttgtgtttctctcacagataggatatgcatggtgtcctttgacactatatccagtgaaatatccatctgttggaaagtcatcaatagtacaaaacaccattgaccgtaacctgaaggtctgctatagattcccatcccacacatcaaccccatcttcccacaattatctctagtcttcaatcaacagagtgagatacacattaatatcattccctggctgccttggacccgctatcatcatacacagcataatgtattttcgcttgatgcacaaccaaggagggaggttgtaaatcatcagcanaacagaccatgaactatggtttgtgcttaagttaccaaaaggattcattccatccgaagcaagaccaagccttaggtntcttcgctcatctnccaaatatggatacaaacgatcaattgt

SEQ ID NO: 131438 - DNA, 286 bp, Glycine max
  unsure (1)..(286): unsure at all n locations
aacactcgccactagtgatagaattatttctttttaagagtaaaacgcatgtcacgcgaaattaatctgagttgctatcaaacttgtctatagntactaagggagtctaactcagatgatttaatagggtatgtgaactgctggaaactccttctgtcttcgatttttatagataaaaaagtatctacagcttcatgtgcttaaataaggatgcctaataaataaaaccaggtaagaatattggattgcgcatctaacatacaaaaatgggataaattatatgcct

SEQ ID NO: 131439 - DNA, 267 bp, Glycine max
acggctatcattgctagtgttctcatcctgatgctttgttcgagctgattccgtggcgtcatcactgcatccgagctttgaagctacaacatctttggcagagatggctttgccagctattgctgtggttgctgaggagattctatctgcgtaactgctctcgtgtgatggctcatagaggggctcctcaactagggtggtggtggacgcttgtgggcgattggttagagttgaacttctggctgaaatctatcctgacttccagct

SEQ ID NO: 131440 - DNA, 293 bp, Glycine max
aacctgcagacacttcagttgtacctgaacttgctaccctatttctattaattcacctccacgcctatgtgcgagatgaatcttccccgcgaggacgctgtggctaaacaaatatgattatatgacccctaacgaatatcttaaattatagggactataaaaaattatcacaactatgatgattaaaagagcaatcaaatcaaaatataactaactagtgcacaataatggtggtggtggtagacactattcatcctcaacgtctcgttggtgacatatataccttcacatat

SEQ ID NO: 131441 - DNA, 221 bp, Glycine max
  unsure (1)..(221): unsure at all n locations
gatccttgagtcacctgcggcatgcaagcttagggatggaatacttacttgttggtgtatgaacaaaagcgcanaacggaatcaaaaaatgcgaaaaaggatgaccctagggctgcaaattcgtcaatcccgtgggtatggcttttgaaaggggggaaaagaagtttttgaatgaaaaaacgccccccctttcgtcatttttataatttggtgcaggggtg

SEQ ID NO: 131442 - DNA, 130 bp, Glycine max
tatttttattggtaatttggcccaaactgtttaaaaggcccatgtctatttttatctttttgttcagatacactattagtattggtttttattttcaataaagaaaaaaaacctttgacatttgataaaa

SEQ ID NO: 131443 - DNA, 265 bp, Glycine max
agcttgaagaggatactttaatagaggaaaataaagagagaagggaggagcacgaaattgaaggaataaaagagggaaagaagtggaattttgaagtgtatctcataagactttcattcatcaaagttacaacaagtgttacacatgcttctatttatagactaggtagcttccttgagaagttttcctacgaaaactttcctatgaacaacttctctaacaaatcttcctgtgaatacttcttcgagaaaactttctctagatg

SEQ ID NO: 131444 - DNA, 429 bp, Glycine max
  unsure (1)..(429): unsure at all n locations
ngtggcatatattggtgtggtggattcccgacttgcatttgttgtggcagataatgcgcatgtgctcatgggtgatgaggtccttgctatagtgtatgcactgctcaaggtaggattngtgctgcaacttgacgagctcttcaataggctttgtgcctttttcagaagtttcgtcgtgcatatctacatcatagtggtcatctacgcttgcttgctagacagtcactagtagaacatgagacccctcgtccatgcttatgacttgagtaccttcgcgtgttgcgggacgattcatggtctccctctcatactattatcgtgttctgattcgtctttctccaaactccccaatcttcttctctaacctcctactctttttacttggttttatattctaacctcttttcttattttttataatacccattc

SEQ ID NO: 131445 - DNA, 436 bp, Glycine max
  unsure (1)..(436): unsure at all n locations
ctgcagcttgctgtttattggtgataatatatttataaattgcacatttttatatccatgtgctaaattcaaactatattntcaacacccattatattccaagacacctagagagaaattctttttataaatattataaaatttatgatgtattaagaagaaagagataaaaaaaattaaaaatgttgataaaatgtttaaaataaacaaatatttgggtattattcttcttcaatggtgaatgtttatattaatgctccccttctcttaattgcagtatatagcataaataaagtatcccaaggcactaaagtttaaagaactaatatcttctaatgaacattttttgaaatatatttattttattaaactttaattttaaaacaataataaatatcatagcgttaaaaagttcactattcgtaagagaaaaccg

SEQ ID NO: 131446 - DNA, 382 bp, Glycine max
tacatgaacagtattaatatactataattccttccaattctgagaatttcaattggaaactgcaaaagattatgtcatggtgttatgttattttgcgtctacatatttctaacttaataaatataatataggtatcgatattagtaattaaattcattaaaaaagactaacctaatttatgtataatgtgcaaccaacaaggagtgagttatcagattcctaactaatagagagaaacaaaataacttgttggtataaatatcatataaataaaataaaacttacttaaacataactcacgtcatttcgtcattgtgtcgtccaacatcacatcacatcacaacacaacacatttcattcattttcacaacattcacgtact

SEQ ID NO: 131447 - DNA, 423 bp, Glycine max
cccggatctctaagcacctgcggctgcagcttgagccattctacgtatttaactttttactcggatgtccgattgagccccataatatatcgacacgctcgaaattgaatgttgaagctctgagccagatcaaacaacaataactttttactcggatgattgatagagtcccgtaatataacgagacgctcgaaattgaatgttgaagctctgagccaattcaaacgacaataatcttttactcggatgtctgattgagtcccgtaatatatcgagacgatcgaaattgaatgttgaacctacgagccaattcaaacgacaataactttttacttggttgtctgattgagtcccgtaatatatcgagacgctcggaaattgatgttgaacctctaagcccaatcaaccaccataactttttac

SEQ ID NO: 131448 - DNA, 192 bp, Glycine max
ctcagctcaacattcaatttcgagcggctcgttatattactgtacttactcagacatccgcagaaaatcttatagtcgtatgaatcggcttatagcttacaacattcaactttgagcgtctcgatatattacgggactcaatcagacatccgagtaataagttattgccgtctgaattggctcagaggttca

SEQ ID NO: 131449 - DNA, 439 bp, Glycine max
  unsure (1)..(439): unsure at all n locations
atccttaagtcacctgcggctgcagctgtgcaataaatactcctacttttatcttttatgcattttctttctttacccactcctcacgtttggttttttagggaaaaacaccataactaaacgcgccgcaagggatccctatcgcaccagatccaaatctagaacgatgggtgatcaagaggagacgcatgaacagatgaaagccgacatgtcggctctgaaagaacaaatggcctccatgatggaggccatgttaggtatgaaacagctcatggagaagaacgcggccactgccgccgctgtcagttcggctgccgaagcagacccgactctcttggcactacgcccattctcctcaacatagaggacggngaaggcacactgggcacatggcagcctcacctggatcaccgagcgttaccttattgatgcgccactt

SEQ ID NO: 131450 - DNA, 76 bp, Glycine max
aaaagacccaccaaattcttgcaaaagcgctgaacactatgaaacacattaatctcaacgtggttaaacatatcac

SEQ ID NO: 131451 - DNA, 407 bp, Glycine max
  unsure (1)..(407): unsure at all n locations
agcttagagacactatagccaatacaagtattattgttgcataggccataatacaccccattgtttttcccctcaacctcactacagagtgcggttttgtaatgatctttgcgaaccaagcgccaccctntatatagatacgttctttaccccattcaacaccaactaatcattttggtaaaaaaaaattcaaccatactaaaacgcgcaagcattttgtcaatcaggtgtggttctctttctagtagcagccttcacttaatagtattcaaataaaaagctaataattcatctcataaaaacttatcaattattacaaaatttattgccaatatcatataatagaaacggaaaatacaattgtaaantaagtaaaactaaattctccgagatcaacgatcataaac

SEQ ID NO: 131452 - DNA, 384 bp, Glycine max
caagctgtctcgtggtttcggtagagaacaattcccaatctgaccttcgcggttttctgtgaggtaactgtgattctacgcttgttccttgatagtattagcttgtctttgcatcttttctgactttggaaccaccattgtgtgttctacgtgtccttcgaaaaaaccctagagaaagagactctgttaacgttatctattattgaaatgggtgttatttttgtgaccttcactgaaccccaatcacattggcttgatcaaaatttataaatgatgttcctttcgttgaatctgaaaccgcctcagccttttcttgtgtgacaagaatattttacttagatttatagttgtaaccttattatttaaattccttataatttccct

SEQ ID NO: 131453 - DNA, 161 bp, Glycine max
taaaaaagacaaagaaggagaaaaaaaggaaacaaaaaaagaaaagaaaaaaaaaaaggaaaaaaaaaggaaaaaagaaaagaaaaggaaaaagaaaaaggaaaaaaagaaaaagaaagaaagaaggaaagaaaaaaaaaaaaaagaaaagaaaaaaggaa

SEQ ID NO: 131454 - DNA, 302 bp, Glycine max
  unsure (1)..(302): unsure at all n locations
agcttgnggctgaaaaaaactatataacatctccaagggtctagtttaggacctccccctctcttcctcgcgggagactctctctctctctcatctctctcttctattattcgtttttagtgttagtctctcttctctttctcttgtattttcgttttatttcaattccagtgcagacttttagttttatcaattaaatttcattctctatttgatcaaggggaagcaacgcgttttaattctgatatttcctaatgcacatatattcgctggtgaatttacacaagcagacaacccctccc

SEQ ID NO: 131455 - DNA, 405 bp, Glycine max
ggtcaagcatccaatgttttggagcattgagcctcttcttgtgtttctttaaccctctcgcctgaaatacaggagaaaaactacaaattagaatttgaggtcagaacttaagatactcaatattcctaacaattacaccaagcaatgaatcattgtatgcccgtgttttaaaaactagactgaaccggacagtctgacaaattcaaccattaatcgaaccgttagccaaccaagtcagtggtcaggtcatataaaccattaaatccgaaaaaagctatagattgacaacgcaacagccgaacgcaacccctaaatttacacacagaccagttcaaccacagttgagtattaaacttgtaatagtactcaaagtatttgttgagcattacagggggtgtcaacacc

SEQ ID NO: 131456 - DNA, 356 bp, Glycine max
aatagtgcttatgcaatgagaccctatgtcccttttcctctgtgttctttgcatggagaaattgtctcttcttttacataaggtgcatcataatgtttgacttcttgttgaaattgcccctaattcctcaagtatgtctcatcattttttcacagatgactgtttattatttactgatccaaatcctctcaaatcaatgtcgaccaaaaatcttgaactttttgctatgttttggttgaaatcaatattcagaatccatgtctcacttcaaatatcctattgcatgtgacaatatgtcttttctatttaatctccacaaatccgaaaactttggatgcttgtcattgaagaaaaat

SEQ ID NO: 131457 - DNA, 342 bp, Glycine max
  unsure (1)..(342): unsure at all n locations
ccttgaaccagctggcgccagaatagagacaagatcatgttggatngatttcctatgacataccaagaaaactattaattgtccttatccctcatctaacaaaaggatttcaccccttcgaaaatcttacactttgcacgactgagaatgtggcctaatgcttcacagtatattgaaaattagtccataagatgacatagactacactacatacctccttcaaaacaccatgaggtcatcaacataaaataaatggctaatatgattgaagcctcttggagtagccattggaagaactactctagcttctaaaagcgatgtgatggaacaactcaacacctc

SEQ ID NO: 131458 - DNA, 365 bp, Glycine max
gctgaaagaactagttccgctccggagtatgacagtcactcgtttatgagcgctgtacaccatcagcgcttcgaggccatcatgggatggtcgtttctccgggagctgacacgtccagctcatggacgactagtatactgattatcaggaggaaatagggcgttggcagtgggcatcactggttactaccatgggcaagtttgatccagatatagtccttggagtttatgccaatgcttggccaacataggagggcgtgcgtgacatgagaccctgtgtaatgggtaattggatccctgttgatgtcgactctatccggctactattaggatatccggtggcgttggataggctcaataagttta

SEQ ID NO: 131459 - DNA, 339 bp, Glycine max
tcccgactcaaccctggcatagtttgtcagtgttaacctgtgatgtacctaaacaggcgagctcctggctgtcaacagataaaaggaaaacaaaaccacaaagcaaggaggctcgtggtggctggccaactgtgaattttgtgtaatatgaggattgtggcctctggtaatcgattaccaatggtgggttatcgattacaatgcttaaaattgaggacaggaggcttagatcgtctcttgtaatctcataccaaggggtgtaatcgattaccacgcttgaatacgaactcagttaacttagggagcctcttgtaatccattactagcctgtgtaatcga

SEQ ID NO: 131460 - DNA, 403 bp, Glycine max
  unsure (1)..(403): unsure at all n locations
agcttagcacaggtgcattacacagttctctgcttcatgttgaggaaagcttgttcagcgtcagcattccagtgaaaggagtctntagttaggagagctgtgaggggagctgctagtgaggaatatcctttaatgaaccttctgtaaaatcccgacaaccctaggaagcctcgtagggctcgagtggatcggggaacgggccaattctggactgcctcaatcttagctgacactggtaccactccccggcaagactcaatgtgaccaagatatttcacctgagaagtcgaaaagaacactgtgaaagcttataaaaaaattagtgcaagctaatgatttcaaacgctttgcaaaggtgcttcaagtgttttgggaatgatntgcctattatcacaatttcatc

SEQ ID NO: 131461 - DNA, 290 bp, Glycine max
cgggatcctcaagtcgcctgcagcatgcaagcttatacacccgcgaagaagagtcttcttgagctcacgtctcaagatgcattactggctcaaataaaactctttacctagcaaattgagaccctcgcagagacattgaacaaacttcctcaacagtgtcaatttttgcaacctgcttcatccttagtgaagccagttggcggatgcaccctgtgtggtggagctcatgagtcaagcatgtgcatgacataagaggacgcgcctaaagagtgcaactacttggccatccc

SEQ ID NO: 131462 - DNA, 453 bp, Glycine max
  unsure (1)..(453): unsure at all n locations
agctatgagccnaaatcctgactctccatataccttgacccagggtgagaatgtcaatccttaccctcggaagcaaaaaagaatagaggggaaatttccaatcaaagaaaaagagaaggaaaatttccaatgaaagcaaaaaaagaaaagaaggaaaattccccaatcaaagagtgcgagaaagcaaaaaaagagcagaaggaaaattccccaatcaaagagtgggagaaagcaaaaagaaaagaaaggacaattcccaatcaaagaatgggagaatgttaaaaaggaagaagaagaaggaaagaaagctcctgatcaaggatcgaaagacaacagaagatatgtgcagagaggtctttggaccggacaatatcttgaccattcagatttgccaccaaatgaaccaaataagaatgaagggaaccacgacctaaaatagtcttcttctttttt

SEQ ID NO: 131463 - DNA, 292 bp, Glycine max
gatccttaagtcacctgggctgcagcttcttgagaaaactttcttgagaagcttgagcttagctacacacacccgtctcataactaagctcacctccttgagaaacttccttaagaagattccttaagaagctagagcttatctacacatacctcttctatagctaagctcacctcccttggatgagaagctagagtttagctatacacaccctattatatctgagctcacccccgtgacacaaaacatgaatatacaaaaaaaaagtccttactacatagactactttaaa

SEQ ID NO: 131464 - DNA, 448 bp, Glycine max
  unsure (1)..(448): unsure at all n locations
ctcagctatcgaatcgagacacaagttgtttgaagctngcagatttatgtctcgtatcaatttaatcgattacaacctctgtttatcgattaccatgtgatataatcaattactcctctttctattagtgtttcagaagtgaacaagaacactaaaatcaatcactctgggcatctaatcgcatacattgttcttatagtgtctccaggttatgggaagaacactttaatcgattaataagataatataatcgagtacttcattgaattaaatgattatcttgtggatttaattgattacaggcggttatatttgtttctctattaataaccagcttgtgttcacttcaaaaacttttacaatgaacgatataagcttcagaatgagctaatatcacgtgctggtatttgtgtaagaaagatgacaagaatagttcttatataagtta

SEQ ID NO: 131465 - DNA, 321 bp, Glycine max
  unsure (1)..(321): unsure at all n locations
agtcacctgacgatgcagctgctctaattacattgatgtttgtatttatggaggaggctgtatgtcatttntgttttaagagtagtgtcccactggtaaaactaactttccaaatgtttgccttcgcaggaaatggctccgaggaagcttgcctcgaagaggtccaggaaggacaaggcagctgaaggaactagttccgctccggagtatgatagtcaccgctttaggagtgctgtacaccagcagcgcttcgaggccatcaagggatggtctgttttccgggagcgacgcgtccagcttacggacgacaagaatattgaa

SEQ ID NO: 131466 - DNA, 344 bp, Glycine max
  unsure (1)..(344): unsure at all n locations
ctcagcttgtagttgttggtccctagaatatcatatttccctattttatagtttaaggacttggtagtattttcanaacaaataaccaatgcacttacatggattgttcttaatactcatgtggtatattggttgtgccataacctttttttcttgtatttaaaaagaaacctcttttntctctatattatttcttaagcaaataaagcgtatagnttaagactcgtgatattatgttatttaatgttgtcatttattgcgtgctttctttattatcagatgaattttccatgcatatgtattatactatcatatactaatattntagatagcgatgtatgaac

SEQ ID NO: 131467 - DNA, 442 bp, Glycine max
  unsure (1)..(442): unsure at all n locations
cttgagtcacctgacgcatgcagctatccaacctaccaagaatttttttggttaaaaaccattaaaaattataaaagaagcatcacaaattgtaaaagaaaaaaaaatacaaattgtggcaatttttgtacgattccaatgttggggttgcagtttgatcctctccaattgaaaataattaatgagtctccaggttaacaaattttcaaccaatggttaaattaggaattggaatttgatcatatgtccaatttaatatattctttaaaacaataatgttgttcctatacagctttttctactataaaatgtctctgattttttatatttntattggaatcattcttgcgtacacgtatttcacccanaacaaccacacgcgacaacaaaaacccttcgacaaccgttgaaattcaattttttacatggagcgactctaaac

SEQ ID NO: 131468 - DNA, 374 bp, Glycine max
  unsure (1)..(374): unsure at all n locations
tgatctctttgatgatctatttgaagatgaagaaatgctcattcttttatagtcaaggaccaggagaagaagaatgaataatgttatggtgagtggtgaccatttttttctctgcatatttcttgcactgatctttcagatttntttaataggtggaatattttatcatatttcaatgatgcttatctaattgtctgaacaggatgttggacaaaatccccgaaaatgtcatcaatgcatgaaaaaggagagaacattttttgtgccttgtactaaatgcccaaaaatgtactgtatgcgatgtgtcaataaatagnatgtcactttacatctaatgaatcaattctgcttggttgtgtagtttatgaattgca

SEQ ID NO: 131469 - DNA, 438 bp, Glycine max
agcttctctagagggtggatctttgagcttctatgaagtccttcaatgatgatcctccaacatagagataccatagaagatacaggagaagaggtgagagaaggcaccatctactagggaataagccatggaaggagaagcttcaccaccaagagagtatcttggataacaagcttatagaggaagattcattggaggaagaaaatgagggagagagagaaagtagcgtataaagtttaatgaagaaagagagagaagttgaactttgaagtgtgcctcaaaagattctcattcatcatagttgtgacacgtgttacacatgtttctatttatgagtctaggcactaactacatgagattcatttccattccatcttaatctaagaggaatattccaagatatgccaacgcctcttaaaatactctaattaaatgtca

SEQ ID NO: 131470 - DNA, 471 bp, Glycine max
  unsure (1)..(471): unsure at all n locations
ctcagctaagctccttcactgcacgaggctcttaatattggaatagtatccttgtagaaccttcacccgacgaagacactgacaaaaacttatcttctccttcttggacaaagtatggcaggctgggggcaagtaaattttcttcccatcagaccttggatgcaactatgatctgatacccatatcagntagatcttgactggtattcaagccattcttcgtcttgccttgaatgttaaggagcgtcccaatcacactgtcacaaacattnttctccacatgcataacatcaatacgatgtctaacgtcaagatcacaccagtacgaaagatcaaagaaaatggacctcttcttccatatgcaactctgacttttatccttcttttgggacttcccaaatacagtgttcatgttgtgaacccgctgatatacctgctcaccagacaacggtatccgcgcaatatcatgctc

SEQ ID NO: 131471 - DNA, 435 bp, Glycine max
  unsure (1)..(435): unsure at all n locations
cttaagcacctgcggctgcagcttgatagactacaatttgcttttctatatttctatttgggatacttccttctgccacaaagttgttactacttactaaaacctgaatcttagaattttatctgagttgccttttccaatcatctgacctaagtcaaggttntatttgaggtatttctttttcttttgatacattgaggtgattggtttgaaaaaccttttgaaaaaaagggaaattaatgattctgatttttgagtcagtcagcaagaaattactgtagctttagttgcagacatcacacaagttatttattgcttatacccatatttgggatgtttaaattttaatacttctcatcaattattatacggctgacctctattataacagttgaaaattgtgcacatactattggaacggatctttgatacatc

SEQ ID NO: 131472 - DNA, 488 bp, Glycine max
  unsure (1)..(488): unsure at all n locations
actcagcttacatttatctggttacccanatcattatagacattatattcattgatcctttcatgttccttgcgctctccggttccatttcctcttaaaatctccaactcttcttccctgtacttaactaatggacctggtgttgcacttggaagatatgtctacaatatatagatttcatgaattaattttctcattcacaaaatgaaaataattaaaaaaatgttgtgacaatatacaattggaaataaatgagcttagtaaatcttgtaaacattaggaaaatagtacttagattcaaaactactagacttaccttattggcaaagaaaatgcgatccttgttgtcgtagtctttaaagttgtaaacccattagttacaaacaaagngaatggctccttgattaggaatgtcctcaatagtgacactgacgaggaagaactcatcatacgtatagtttctgatgtaaattggctctggaattcca

SEQ ID NO: 131473 - DNA, 280 bp, Glycine max
atcgcaacaggtgagtatcacaatatatagcacaacagatacaatccaggattgaggaatcattcatatctgatatgggcaagtgctccacaacaacaatagcctgtccctaccttccagaatgctgctggtccaagcaagccatatgttcctcctccaatgaaacaacaaccgctacaacaacaacaacaaagacaactagcaattggggcccctccttaaccttccttagaagaattagtgaggcaaatgaccattcaaaatatgcaatttcagcaag

SEQ ID NO: 131474 - DNA, 426 bp, Glycine max
  unsure (1)..(426): unsure at all n locations
cttgccatggaaagtagntaagatggtatgctggctgaggtctttgctgatgcacccctaatgtaatatgccacttttcaactcctacagaattctgtaattttaggatttatcaatttttttccagagctgttctattattcccttattgctagtgaaaaatattttgtgacttgcgattgaaacaaaaaagatattggaagacacctgactgctatgtcatctttgattcaaaatgaatcatccccattttccccatcttttatttggattgttgnttgcaaaggaagaacagctgctggttaattagcataacattaattcaagaagagggctagaagaatggcataaagcctttacttgaataatttgtaatgagaattgtttggagccatattctanaattgatttataatttatgataac

SEQ ID NO: 131475 - DNA, 418 bp, Glycine max
agctctctttggaccttgaacaggctttctttctcctctttcaaaaccatgctatgtgcttgcgactggtttctctcttcccttcgcaacttgagttcattgttgctaccccacagagctctgcgaaatttgttccggccatactcttccttgcgagccctcttggtctcttgttcaagggcttgtgcggtggttgcattctcttcccgtaatccggcatactccttctggatgtgtgtagcggccaacttgaacttctccttggcaagtttcgcctttcctaactcgcttttgagagcttggacttcttcgtcctcttccggtgcttcaaaactctcttcgctgacgattttaacttggcgagccaatctaaacctcgtatatgaactttcagccattcatggtaccccacaatgat

SEQ ID NO: 131476 - DNA, 337 bp, Glycine max
  unsure (1)..(337): unsure at all n locations
tctgcactttatgcagaatttcgctgttgaaatgtgcagcagaattttgtatatgtgcagaaaaatgcttgggtatggctggttgctgaaagggtagtacatatgtggttctggacattttctagcagatcccaacggtcaaaatgtatactnatgtactagagacgtctagtaacattttctagtcgatccaacggntaacgaactggaacgaaaagaatgttactggggcatttgaatgtgatattggtttgtgttttgggcagatatttctgccattgccctgtntcttggctgcgntagtttgtgatgattgaatgttgaattatcgggatgc

SEQ ID NO: 131477 - DNA, 463 bp, Glycine max
  unsure (1)..(463): unsure at all n locations
ggatccttaagtcacctgcggcatgcaagcttccatcaagtggtatcagagcacattatcttcaagtaggtgctccttaaacctccattaattttttgctttaccttctcttccattgntttttcttcattttttctccatgtatctcctcaaatgtcttgtgctaaatgttgttaacatgattctttaaagtttccaccgattaaacttgctatagaagctagatttgattttctatggttcaaatttcttgttcttgttcttgaaccatgaattgtgttgagtttaggttcctttgagttttgtcatgttattttttgtggctgaaacctaaaccataaaattcttacaaaaatattaaagtacaagaaacacctcaaaatctagagtgactttgtcacctattgtagttttgcatagaaatcatgtctagtcatgaaacttgcccataagattcttatgt

SEQ ID NO: 131478 - DNA, 455 bp, Glycine max
ctatgaaactcagctttacttatgggcgggcgggcttccttcattcttttgtctccaacgcgaactttgacccttggtcttccttcccgcgatgcttcttttcatgtctgcctgagtgggcttatagcctaaaccatacttcccacgattaccttgggtatttatcagtctagttatgccgccggtgttttttcctaaacccatctcgggctcataaccgttccccaacataactcgggccatcattaccgctgcatcggacagactaggctgcccaaagagggagtccacggaggaaatgctgaccatctcaaaagactggaaggcagtttctaacgattcttctgcggcttccacataaggcatggaggatgggcagcttaccatgatatctttctcgcctgacacgatgaccaagtgcccctctactaccaattcaacttttggtggaacgt

SEQ ID NO: 131479 - DNA, 312 bp, Glycine max
ggaaaatgtgttgcccaaccatggtacgattctcttgaagaaatggattctgggatggaaatgaaatatctatgaaaaaaatgcgggactctcataactaggaggcacggatgactagactacctcttatggtcccaacacaactcctgcttaatgatgtactccatcctatttttgttaggcaaatcacacctacttatcattcaacattttgcttgcaatctccatgttcctactaatcaacctattattttggcgtccacttacacttagaaaactcttattttacaacctatgcttgtgcacgggttg

SEQ ID NO: 131480 - DNA, 417 bp, Glycine max
  unsure (1)..(417): unsure at all n locations
gccatgaaactggtgcatgatatttttttctggattctttgacgtttagaatatggaaaaaatgtgtcacgaatactagtactatattggacataatttaaaaaaagggaaaaaaagataaataataaaagtaacgtgggatttggagaacgagccataggaagtagctgttgagataaatggggaggtttcagtttcaccatgccaatttcgtagcacaccagcttttaaaaggtgagtagtcgtcagtctcatcgacttgtgttcatattttatagttntatttactatttcccagaaaacatgcctgattggtcacaataacacagaggtgtagtactagtaattgcatgcagttattgctactataaagaacattaatttataaaacactactctttaagatagtttctaatc

SEQ ID NO: 131481 - DNA, 371 bp, Glycine max
  unsure (1)..(371): unsure at all n locations
agcttagcagccaactcctgaggattcggtctcatgagtgcatacctataataagcacgaagattctccccctcttccagaattacaggggtcctcaggaaggtgttcaaagtatcttcatcaaattttatcagatgaccttctgaccttcacctgcttaggtgacttgtcttccgagtcatagagattagcatagaattccttcacaatggcaacatctatgttgccgtcaacaaaatcagtcaactcctcatcccaatgtcttctctcgagttcctccttgaactcatcaaactcagtgtaatatactactacatttctcnttggtagtagcttcctacgcacacatatattagtttaccttctccaag

SEQ ID NO: 131482 - DNA, 420 bp, Glycine max
  unsure (1)..(420): unsure at all n locations
tcttgcgttcatccattctaagagaggggtcattgggtcttacttctttttataggtnaataattattatttgggcatgcattcggntccttagagctttcattgttgtttcttcaaagctttaagtgttcaatatttttttatccactaacaaagctttcattttcggattattcaatttcgtttcataatccttacaccaagatccagtccatgcatctttgtctaggactcatagttagtatactagtaattaattaattatgtctaggtcattggtgactntagtggttgtttctatatagtggttcttctattgaggataatttgtattttagatggaccagtttgtntcaaggagttctttgtgtataaatttggctcacacatgtttatgtttttttaatctacgtatgactc

SEQ ID NO: 131483 - DNA, 344 bp, Glycine max
agcttataaagtatgatgctgataccttcaacaccttcctgaagaccccgataaacttggagcctgtggagcactacatcacttactccaaattctgtcattcacatctagatccctaaaagctggcttctagactttgcattccagggtgaggatttgtgcttaatgctaagagcgcgccttggaagcttcttaggaaggacatgaccaccctagcccagacctggagtgttttatcatactccaacctcacccccacctctcacacgttcgatcttaatatggacagggtgaggttagtctacggactggtcatgaagatggatatggacttgggctcgctc

SEQ ID NO: 131484 - DNA, 345 bp, Glycine max
ctgatatgtgtgtaacccaccattttgcatagaatggttgttgttggtggagaaaatgaggcccctccatagtgttttgcaggggtataccaccaactacttgcccttcagtggcatatccgaggcagggctcgaagtcggctatattgtggcggggaatttcatgtgtctcccccatatgttgagagacatgtgcatgattagatcgaggttgtcggctctcaattagtatgggagtggagttatcgacattctcactaggatatgcccccatttggccaatgtaattaacatcatttcctagtttcatgtttactcatgcactgtaaatgcagatgcatggtg

SEQ ID NO: 131485 - DNA, 385 bp, Glycine max
agcttccgttcccgagagcatctcttatttaagcatttcagcctttgctttcttgtagcttaggaaaaatgccatttcttcttctttctttcttccaaatccatttctaaagatccaagtactttctccatcacccacatccaccattagccaccacaaaccatcattgttctccattgaaaacccacaccgagaggaacccttcaaccgaagcaaaatttccaacttggcttgcggtttcggtagagaacgaaaaccctaatctgatctttcgttttctttcgaggtaaatcatggtctatgattgttacttggtaagatcatcttggctttgcaatctttctgactttggaaccgccttggttggcttatgcttcctttgaaa

SEQ ID NO: 131486 - DNA, 443 bp, Glycine max
  unsure (1)..(443): unsure at all n locations
ntcaactaagttcttcacatataactatcatgaatcagattactagcaagactacccatcatatctgccataaccccatacccacgaatattaagagagaaagaagtccacccaaacctgaaattaggaagtcccactcgtagccacgcacttcacgactccgaaaatgccctccttntgcgatttggggcagaaatgatggccaaaggttgaagctntgcttggagcttcaatggagaatgaagaagaagaaaatggcaacgtgagggagagagagagctgtctgaaaagtgcgggggctgagtgaagagagagacaagcttttcgtgtttaaataaaaggggcttctccttttctattattntatataagctatgccacatgtctccggttgagtggagcanaaagggcccactttctcttttgactgtgacccatactca

SEQ ID NO: 131487 - DNA, 458 bp, Glycine max
  unsure (1)..(458): unsure at all n locations
gtcacctgcggcatgcaagcttaatcatgatggtcaatctacaattaagattgcattatccttaggcatcattgcctctcatgggtaatgcagaaaaatctcctaggttgactattgaaagtaaatttagaaggtaggatcgcaaaaattgtcacgagagaaagaacaaaataaggtatttatatatccagctaataaaatcgtaacaattgatcaccaaaccttgtaattgattaattcaatcaaataccatttgttctgcatttccagaaccatggtaatcaattacaccaactggtaattgattatctcgatcaatagagagcanacattactctntagaagcaattgtaatcgattatgaaatatggtaatcatttctttcgtcttccagaaagcttcctaagtgtttagacacaatgtaatcaattagtaaaaatggtaattggatatctcga

SEQ ID NO: 131488 - DNA, 439 bp, Glycine max
gacctatgaaactcagcttctaaggaagctacctagtctataaatagaagcatgtgttacacttgtaactttgatgaatgagagtcttgtgagacacaactcatagttctacttctctccctttttcttccttcaatttcgtgctcccccctctctctttctctccctttttcttttcctccattgaagcatcctctctaagcttcttatccaaggctcatcttggtggagaagctccttcttccatggcttattccataatggatggcgcctcctctcacctcttttccattttcttccgctgcatctccatggtggaaaatcaccattaaaggaccccattgaagctcaaagatccagcctccatagaagccccacaagcaagcttccatcacatgagccaaccatgttgggatcataaacccatttcacttaaaaa

SEQ ID NO: 131489 - DNA, 502 bp, Glycine max
atctctgagtcacctgcggcatgcaagcttatccaaacctacacaagaagttttgtttgtcttaaaccattaaaaattataaaagaagcatcacaaattgtataagaaaaaaaaatacacattgtggcaatttttgtacgattccaatgttggggttgcagtttgatcctctccaattgaaaataattaatgagtcttcaggttaacaaattttcaaccaatggttaaattatgaattggaatttgatcatatgtccaatttaatatattctttaaaacaataatgttgttcctatacagctttttctactataaaatgtctctgattgtttatatttttattgtaatcattcttgcgtacacgtattttacccagaacaaccacacgcgacaacaaaaacccttcgacaaccgttgaattcaattttttacatggagcgactctaaacctaacttcaccgaacccttcaaatgtacaataagtgctttgagaacatttttt

SEQ ID NO: 131490 - DNA, 384 bp, Glycine max
  unsure (1)..(384): unsure at all n locations
ctcagctactgtctaacaagaaaggatattcaagatgatctctttgatgactactttgaagatgaagaaatgctcattcttttatagtcgaggaccaggagaagaacaatgaataatgttatggcgagtggtgaccatttttttctctgcatatttcttgcactgatctttcagatttttttaataggaggaatattntatcatatttcaatgatgcttatctaattgtctgaacaggatgttggacaaaatccccgaaaatgtcatcaatgcatgaaaaaggagagaacattttttgtgccttgtactaaatgcccaaaaatgtactgtatgcgatgtgtcaataaatagtatgtcactttacatctaatgaatcaattctgc

SEQ ID NO: 131491 - DNA, 441 bp, Glycine max
  unsure (1)..(441): unsure at all n locations
agcacctgggctgcagctntaaattgggggagttcgataactgttgtgtcatatatatatttgggattaagtcataaaaattgctatatttcccatcttttattgcttattttatgtgaataattagaattataacatcattcaaattctattccactatgtgtttaaactgatgaatttatagtgttatattggctgcagaaatacacagtaaagcttgaaagataagttgaagatctgatgaagagtatctatcagtgcgttatacgtgctcaacgcaacacagtcactcagcaggcaaccctcacttagtgcatataagtcacatgaagaactcgatatttgaaggcatgcttatcgtgagtcacgcactaagagtgtgaccaatcgactcactcgcttatcacagaaatcgcgcgtagcacatagttgcataaaatt

SEQ ID NO: 131492 - DNA, 463 bp, Glycine max
  unsure (1)..(463): unsure at all n locations
actcagctaagaaaagctaacanacttagaaatctagtgatcatgtttcctcttatatggggagaaaaacggatgcacattttatctatatacaattggttgttgcttgcttgaatcttgatttcaggtattgtattgtcatcatcaaaaagggggagattgtagatgcaattggctttgatgttctgatgatgatcatgatgatgtgttgcaattgatgcaaaggggcttttcaagattaaaattcaagacaatacttcaagattacaaggcacaacatcaagatgatcactagaatattaggaagggaattcctaattgaattagcaaaggtttggcctagtaatttaaaataaaaagtgtttttcaaaggaattactctctggtaatcgattaccagaggatgtaatcgtataccagcggccaaatatcgtttataacagctataaaaatttgaattcca

SEQ ID NO: 131493 - DNA, 444 bp, Glycine max
  unsure (1)..(444): unsure at all n locations
gtcacctgaggcatgcaagcttctacaagctggaatcatttatcctatctccgacagccaatgggtgagtcccgtccaggtagttctgaagaaaaccaacctcaccgtgataaaaaatgagaaggaggagctgattcctactcggtgcaaaacagttggagagtctgcatcgactataggagactgaaccaggttaccaaataggaccattttcccctaccatttattgaccagatgcttgaacgcttgggttttataggcgctttatcaaggattttagcaaggtggcccttccactatccaatctgctgcaaaaggaggtggagtttgattttgatgaccggtgcaaagaggctantgaatgcctcaagcgtgcggtgaataccacccctatcatttcagcacctgattggaccaccccgtttgagctattgtgcgatgcat

SEQ ID NO: 131494 - DNA, 491 bp, Glycine max
ctcaagcttagtcaaacagaataatccaataatgtcaaagaatatgttgttgaattatcataacaagactttctgtgagtggtttaaagatacaatctttgcaaatgacaatgcttcagaaacattaagaaagctagcagatgggcctaaaagaaatgttataacttggcaaggatacgacataaacaagtattcattttacacaaaagcacaagatgacaatagtacaatgcagaacaacgggatcaccctaagggctgaatctcaacacttcgcaagtgtgaatgacgccaatccttgtgtagcttccatcccttactttgggttcattgatgaaatttgggaacttaactatgtgaaatttactggatgtgttttcaaatgtaaatgggttgacagcaacaccggtgtgcgcaccgatgatatatgaattacggtggtagacctgaagaaacttggttaccacaatgaccctttcatcatggcagaac

SEQ ID NO: 131495 - DNA, 413 bp, Glycine max
  unsure (1)..(413): unsure at all n locations
atccttaagtcacctgcggcatgcaagcttgcagtcctaactgcactaatgggagttagtggagcagggaatacaactttaatgaatgttttagcagggaaagactagtggctacattgaaggagatattacaatgtctgggttcccaaacaaccaacaaaccttttgaagattctttgcttactgtcaacaaactatattcatttaccccaacttactctgcctacctccggttaccaaaagaagttagcaaggatgaaaaaatagtaactactcagcattagagtatcttttgattgttgtcttaataatgattcatagaaaggtgaacttaanatttcaattattttttcttttcaacattttctggaccaattcatggatttggtagaagtacataaactgaaggatga

SEQ ID NO: 131496 - DNA, 438 bp, Glycine max
ctcagcttgaaagcatcggcaccacctaacttatccaatagttcttctattgttgggataggaaacctgtccttaatcgtcactattcaaagccttgtagtctacgcagacacgctatgaaccatcctgctttcgcactaacagaaccggcgacgagaaagggcttgtgctgggctgaatcaagcctttctgaagcatcccctcgacctgaagctcaatctcatgtttataaaaatgaggatatcaatatggatgcacatttattggagcagcttgtggaagtaaatggatgtgatgatcagtggttctcgtcagtggtaaggtctgaggaggttggaataaagcttcaaacttcacaaacaagggctgaatgatagagggaaccactgaaatatccaatgcgtgagaggcttctatgagcaacgtattgtgaaagca

SEQ ID NO: 131497 - DNA, 413 bp, Glycine max
  unsure (1)..(413): unsure at all n locations
gtcactcccgcattntatctctagcatgcattgtatggtcggctcgtcctttgtcacgggaagccggaaggtccatatcaccttcttgattgtacacatggggcactgcgcccccaaatgcgcaagtaagaagagataattttccgggctctcgtgtccgnaaaatgcattcatatcatgcatcgcataagcatctcttcataacatcataatggacatatcctgcatttgtccgttatcatattccagcctcacattttgcatgagtcatggcatcatcatgcatatgcgttcaacaaactttatgatctgcaataatgcataccatttggtttcatgtttgctcatccttgcgttttcctctacaaaacaaaaacaaaaagaggggaagcgtgaaacttcacactacattc

SEQ ID NO: 131498 - DNA, 383 bp, Glycine max
ggttatgcataatatatagaatacgagagcatttcacagatgctgttaagcgagagcggagagagaagataacatatatatcaacactctcacatatatatacaagtagtagttgtagtagtatagtatagaccaatacagaagctatgggatgaatgggaaatgtacagtgagagcctgatgtttggaaacacaatacaataagatgttatgctgaatggaatcactggttttgctgaacctgctatgattatggctgttatgtggacttctggctgcggcaaaactacctttcttgactctttcactgagctctctctttgtctctctctctctggtatatatgtatgtattaatgaatatggatttggaaactaatttca

SEQ ID NO: 131499 - DNA, 372 bp, Glycine max
  unsure (1)..(372): unsure at all n locations
aggctgcagcttgagtggttatagcttgtatgataagctcttaaaagctngcctgtaatctgtcgccataggctaggctgtanccttcatcatgaattattatatatatatatcagcaaactaaggctgaggatcctttttatgtgcatattttcatactcaagcatttcaagtatgtaacaaaaaaaaccactctacaccaattgcctacatgttctccttagtacacaccaaacacttgtcagtgtactgtctatcaaaagcattcttaaagaggcctatgcattgttcatgtgtcaaacccggaggactcttgcatgagggagtctggtagagaatgccatacttaattaaagtgtcttcatcttatgg

SEQ ID NO: 131500 - DNA, 425 bp, Glycine max
  unsure (1)..(425): unsure at all n locations
cactccttcgtggacctgatgatcacttgaaattagtgagaaatatcgttttcgtgaagcaaatccaagccgaggcgcttccgtaacgcgtccgagacatttctgggggtgatctcgtgaagaatttccgccatccttcgttcattcttcgtcgntcttcggccttcaaccgggaggttcccgaaatcgaactttgcaattcattctatgcatccttggtggtccccacttgtttcgcgtacttttattttcatgtcatttactttccgtacccccttttgacgtgctctagtcatttatttaagtcattttcccgcctaatcaagaaataaaataaatttgcaccgatcatgtgaattataacatctagtaatttctcgtaaaatgaaatctgaccgtacggtcttgtcgtaacctacgtggaa

SEQ ID NO: 131501 - DNA, 382 bp, Glycine max
  unsure (1)..(382): unsure at all n locations
ctcgacccggatccttgagtcacctgcggcatgcaagcttctaacttatacaagaatgaatctctgataccacttgttagacaagtggcctcagatatcttaagaagggggggttgaattaagatatcacaaactattcttaatttaaaattntattttgattttaacccaaatcccaagattccttttaaaatgaattcctaaataattttcaaattaaaattattgaatagaagcaatgagcaataataaataaaagaagttaagggaagagaaagtgcaaactcagttttatactggttcggccacacccttgtgcctacatccagtctccaagcaacccgcttaagagttcactaacttgcaaaaccctttccagttc

SEQ ID NO: 131502 - DNA, 241 bp, Glycine max
  unsure (1)..(241): unsure at all n locations
tcgattaccagtgtctctgaacgtcgaaattcaaattcaattgtgaagagtcacatcctttcacaaaaatgctttgtgtaatcgattacaatgatttggtaatcgactaccagtgataagttttgaataaaaatcagaagatgtaactctttcaatgatnttcaagcttttcctaatgttataactcttctaatggatttcttgacccgacctgaagagtctatgaaagcaagaccctgac

SEQ ID NO: 131503 - DNA, 207 bp, Glycine max
aattatatgatacagaagagataaaagatgccatgataaattattaatgattaaagattattaagaaaaaaggtttcgattttatctggctaatattctcttgagcttgtaaacagagatggcctttaactcagttcattataagacacttataatttattggtcacgaatgaaagagagagaccaattgagggagagctttacatg

SEQ ID NO: 131504 - DNA, 360 bp, Glycine max
ctcgacccggatccttgagtcacctgcggcatgcaagcttgaacggatataagaaacatcttcttctaccttggtgattcttgactccatctcattgaagcacatgtccacttgtatttccaaagtatcaaacctttcaccaacaaaggtttgaagaccatcaaacctatccaaaatcttcgaaagaagagatgaatcttctccatcatgtgcttcttcaccaacatgtcgagcaccctttttcacccaagagccatcatgctctttttgataaccaaaagatgcaatgacagaagcgcctattagaaaggatctcttgattggaacatatggttcagaatcaagagggatgttgaactg

SEQ ID NO: 131505 - DNA, 442 bp, Glycine max
ctcagcttcacatcagaccacttccatggtgctggaactacttctcatggacttgatggggcccatgctagttgaaagccttggaggaaagaggtatgcctatgttgttgaggatgatttctccagatttacctgcgtcaactttatcagagagaaatcagacacctttgaagtattcaaagagttgagtctaagacttcaaagagaaaaagactgtgtcatcaagagaattaggagtgaccatggcagatagtttgaaaacagctagtttactgaattctgcacatctgaaggcatcactcatgagttctctgcagccattacaccacaacaaaatggcatagttgaaaggaaaaacaggactttgcaggaagctgctatggtcatgcttcatgccaaagaactttcctatattctctgggctgaagccatgaacacagca

SEQ ID NO: 131506 - DNA, 402 bp, Glycine max
cacctgggctgcagcttagattaggcacaaagtttgatatttttttaatataatgacaaaaatgattagttttaaaagttgggaatacaaattaaaatttagaaatttgtagggactaatgatagtgttaaccctattgataactgatccgcttactatggtcaatcgtgacgtgttgatgctacaattgccatatattccaaattttacacccttatcaaagggtgggggggtatgctataatttcctaccattgaggcatacttctcgcaaaaaacgagttttcccggttcactatacctcaatttggaactttaaaattgaaatgacaagtttatgtaaccacgtctgcgtaaaacttgaaagctccaatccacattaagtggcttttctcctatatat

SEQ ID NO: 131507 - DNA, 432 bp, Glycine max
  unsure (1)..(432): unsure at all n locations
accctaacaacatggaaaggcctaccgctacacatagaataaaagttcttcagcttgaagcgccattgcccacgcttccacttgatatgcatgatggtcctcctctttctttaaacacgtatacgcatgcacaacccccttatgattccttgcaatcagtacccttcactaacagccttcaaagtgttggacgctaagttgctaagtcaagcttcaaatttatctatttcgggcactatgaagttgngcaatctatgtagaatttcattttttttttatgattttaatttgatgaccttggtgacaaaatgtgtggtgacttaacagatatgtnaaatggtcggaagagagtctccttttggaataaaaataatgcttatctcacatcttaccaatttcacatatatggttattaggtacgattaatcataa

SEQ ID NO: 131508 - DNA, 365 bp, Glycine max
  unsure (1)..(365): unsure at all n locations
agcttgaatcataactgatgagagtgtgatcttattctgtgagtgaacaactagctntgagtaatattctttgcatcaatctctgaattttagaatgaaatgtataactgaggacatgatgaaggccatgattgtgtatatacaagccaattgaccaaaaagcttaccttgaattataattgtatcctttgcaccctttgtgtgctaaatgatattgntaaaaattgaaccctgaacttgaatgaatatctccaaataccttgcttagattctaggaaagcatatggttcaaggaaaatttaccccaaatctatgggagtggagctgattatgaatgtaagtaaatgtagagcatcagcacacac

SEQ ID NO: 131509 - DNA, 440 bp, Glycine max
  unsure (1)..(440): unsure at all n locations
tctagtgattntccttgtctgctgattgcttgcagacatattgctctttctcgtcctcattgccgatctctagtcacccttggtctatcatccgctgcaacagttcctccaccgatgaacatgtttcaatatcatgcggtacgcccgaatgcatcaagcaatggtcccctttatgcccaccgagaagaaccatgcctgtctcttgcagggcttcaaacataaacctcctagaggtcattacgtcctttaaatggttaggcttttgtagtttacacgcctcaatcgcatttacatctgatcctccatgggtggngagtgtggtcgtcttcacatttggcccgtcttctgaatcgcaaccatcccgcctcgatcaaactctggaccttgtgcttgatggccatgcattactcgactgaatgccctggtgttctcccatgata

SEQ ID NO: 131510 - DNA, 473 bp, Glycine max
  unsure (1)..(473): unsure at all n locations
agcttgtccattgaatgtacattntcaaatattccatattgnggaatctaaaataacagacaattgattgtacaaaacaatgataggagtaaaatctagtaacatcataatttaaactcactgcaacggataaatgacaatcaccatactcaagagcctcatggataatgataagatcttcactaccctaatctaagaaaattagacgataaaacaatttatgtttggtgattacatagtggcactaatatgtaaatgcaaaaatgctgacctggccatgttcattgaaagtatcgagtccaacaattccaaggtcaagatctccagataacaattttcttgtgatgtatttgggcctctaaaaccaaactttgagtttggatagctgcaataatgcaagagaattggtttatggtcatgtagagatatagtacattgatggaacaaagggaaaaagaaatgctcatgagaac

SEQ ID NO: 131511 - DNA, 442 bp, Glycine max
ctcagcttctcccgcaatttctataataggaggagaagtgtagtgtaaaatgtttcattcccttaagcacttctctctctttcgaatctgcttggaaaaattgcttccgtgaagaaaatccatgccgaggcgcttccgaaacgtttccgtaacgttttcgtgaggaatttcgcgaaggtttcgaccgttcttcgacgttctttattcgttcttcatcgttcttcgatcttcaactggttagtacctcgaaccaagcttttcgattcattctatggacccgtggtggcccacattgtgtttcgtgtatttttattctcgtttcagttactttttatacccccttttaacgtgcttaagccattttattctagtcatttctcgcttaacctacgaataaaataaatttccaccgatcgcttgaattgtattatctgttaacttc

SEQ ID NO: 131512 - DNA, 428 bp, Glycine max
gatccttaagcacctgcggctgcagcttaatgccctaatgtaaagcaatatttttcattcccataatgtattccctaacattccctttgccttgatacttcatggaaatcaagatctgaaggagagtacttatttccaccttatcgctttttgcaaagcacttctcaatttcagcaaggaatacgctggcattaattatatcatatgaatcactacccctaaagacctcaggaatgtcacacttaatgatcataagactaatgcgatttgagtgatcccacttctcatgaagcttcctatgttcaaaggtactagaatccggaggagaatggggtttctcaatccgttatgcaaggtctagatccatgcaaacaagaataattacatgttctctttccagcgcctaatttgcaccagtaaaactggaa

SEQ ID NO: 131513 - DNA, 423 bp, Glycine max
  unsure (1)..(423): unsure at all n locations
gcttcatgtgctgaggatagagtacaacatgatagttngtattatagtccagctgtgaactcaactcatttctagacatgttttttttttactgatttctcatttaccgaccactatccctactctaactatatttatcatggtttaatatctaatcctctatacttcaggagatctaatctattgcgttaaatatactatacggagattggagaacacagtgggaaacatgagatcaaaattaaggataagggaactgaattttttctaactgaactgaagttaggatgacaaaaacggacttttaatatcatggctgctatgagaactatagtcatggccacaccagactatctcaatctggttatttaccagatgtcacctacgctaatggtacttacttccttgtgcctacacacaatc

SEQ ID NO: 131514 - DNA, 404 bp, Glycine max
  unsure (1)..(404): unsure at all n locations
tcttaagtcacctgccgcatgcagcttctccccaattttctataatagggggagaagtgaagtgaaaaagggttcagccccttaggcacttctctctctttcgaatttgcttagaaaaattgtttccgtgaagaaaatccaagccgaggcacttccgtaacgtttccgtgagtgatttcgcgaaggttttcgaccgttcttcgacgttcttcattcgttcttcatcgttcttcggtcttcaacgggtaagtacctcgaaccaagcttttcgattcattctatgtacccgtggtggtccacattgtgtttcgtgtattttccttctcgttttcatttactttccgtacccttnttgacgtgcttaagccattttatttaagtcatttctcgcttaacctaaaaat

SEQ ID NO: 131515 - DNA, 513 bp, Glycine max
  unsure (1)..(513): unsure at all n locations
acactacacaaatactcaagctgtatgttatgtggtacccatcacatgtggtactaggtggtggtcggtcaatggtgcacaacaaattttccacatccacaaatcgcgcataaacccaccatcccctgttgcccacctccaactgagctcacgtactcccacgtagcccgtatcctcgtttctctcaacaccgggtccccatcaatcctcccaagcttccccaacatccaggtaaaacaacattcaaacagcacaaactatcacagccaagaaaacagggcaaggcagataactctgcccanagcaccaaccaaaatcacagcttttctcacttaaagaccccagtaacaattccttcgttccagntcgntaaccattggatcgactcgaatattntactggaagtctctagtacataagcctacattttgaacgntgtgatctactagcanacatccagaactcattctgcattactctntccacaaccagcaaatacatagcaattttcta

SEQ ID NO: 131516 - DNA, 375 bp, Glycine max
  unsure (1)..(375): unsure at all n locations
agctntagacgacagacacagaggattaatactaattctctccctctctctcttccttcaggaattggagaatgccaatgttaagttgcgaggatatagcgaggaaaagacagagatgacccaactaaccagaattcccggaccaaagggagggaaggagggaatcgccccctctaaaagtcacctaataatataagttaaccttgtttattaattccaataatataataattaattagattaaacttatgttttaaagaaatcgatgtcatgtgaacttatgctttagaggtatgcaatgcgacatgttgaaagagtgtaatttcattgaattgtcgagtattaatattttcctctcttttactaaaaaaaaaa

SEQ ID NO: 131517 - DNA, 405 bp, Glycine max
  unsure (1)..(405): unsure at all n locations
ccggatctctgagtcacctgaggcatgcaagcttgttcatccttngcatactcaacattgtgttcgacctcgtcttggagagctagagtaaagcttgcagtggtagccagtcaggtctttaaggccttctcttgggtctcagcctcgtttaacttaatctttgtgtccttcagagacttctgagaatcctctgccagttgcaacaatgtctcattccccttggcagcctcaaccatagcttgttcagcctttgcatactcaacaagagctaattgtgactcgatatcagccttatcaaatttgtcatcctaaaactcaaaaatcctccaggtccctgttgaagaatgtgcaatggaatcctatggacgctcatgtgcccaaaatccctttatcatattccaagtc

SEQ ID NO: 131518 - DNA, 292 bp, Glycine max
  unsure (1)..(292): unsure at all n locations
cctcgaggagatggcactcacatttttcggattctacacagttcgtgaaagcaatttgtcataattttgggactgagcttggntcaactgagtagtcatcttccccatctgatttggtagactctgaatgaaggctcttctctcttgctaataatgcatattctggatggtcatttgcctcactaactcttctaaggaatgatgaggatgagcctcagttgcttgttgtctttgctgagactgttgcagtttctgctgctgtataggaggaggaacatatggcttgcttgga

SEQ ID NO: 131519 - DNA, 390 bp, Glycine max
  unsure (1)..(390): unsure at all n locations
agctntggaaagtgctattattcatctcctcgctaagccaatctgctggcttagcgagcgttcgctaagcgcgacactcctgtgctaagtgcgaggaagactctgggagaagatgagttgtacatgttcgctaagcgcactgcttcatctcactaagtgcaccacttcagttcatccgctaagcgagaaaggcgcgctaagccaaaaatcactaatgtgcactaagcggtccatacgtgcgctaagcgcacgagcacgaacaaggccacctatttatgcctgaaatcagaatttatgaaaggagtttggactgggattcacagctttgcatgtctaagggttctagattgagaaaagtccaagttcctgagagttttaagagaatttgct

SEQ ID NO: 131520 - DNA, 449 bp, Glycine max
  unsure (1)..(449): unsure at all n locations
agatgccactctactctatattcttgaaagatttgttaacaaggaagcataaatatattaatcagganaacataatagtggaaggaaactgcagtgctgtgctccaaaagatccttccacccaagcataaagatcctgggagtgtaactattccttgtccaatcagagaggtcaatgtgggaaaatctcttattgacctgggagccaatgatgccactctccatgtgcagaagattgggagagttggcaataatggccactcgaatgactttacaattagctgactgctccattaccagaccatatatagtaattgaagatgtgttggtcatagtaaaacattttatcttcctggcagactttgtggtaatggatatctctgaagatactgacatccctataatagtgggaaggccattcatgttgaccgcaagctgcatagatgatat

SEQ ID NO: 131521 - DNA, 418 bp, Glycine max
  unsure (1)..(418): unsure at all n locations
gtcacctgcggcatgcaagctnttcgattcattctatgtacccttagtggtccacattgggtttcgtgcattattattctcgtattgtttactttttataccccctggtgacgtgcttaagccattttacttaagtcatttctcgcttaacttaaaaataaaatataattccaccgaacgtttgaattgtattatccgttaacttcggttaaaatgaattccgaccgttcggtcgtgccgtaaccacgttggaaatcaaaaagagggtaaaaatattataataataaaaaaaaacatctttattaaaataaagcggacaatcaatcggacgttatttctttgggatttctcattcttaatcgacatgattaataactaaagtgaaactaacgcttaaattaactcgcctagtcaagct

SEQ ID NO: 131522 - DNA, 388 bp, Glycine max
  unsure (1)..(388): unsure at all n locations
accaggaagatagctaagggaattgtagtggcacacatgcttatgccttgngaaagagatagttcattgtttcaccaatatctgntggtttttttcttcatacttgtctttacattttcttccatttttaccatagtaatagaagcagtgtgatgtatctccattggagcctgtangcctttgatcttcttcatcaatgtagtcctttgcttcttgaagtttgatggcagcggaaaggagaaggagaaatatgattggagacgccacttcaaggagaagactagtctagaagaagctcaccaccataggaagccatggataagagcttgaatgtaggagaagatgaatggagggagaaggagagaaggagcacaataatttatgcctc

SEQ ID NO: 131523 - DNA, 351 bp, Glycine max
  unsure (1)..(351): unsure at all n locations
atccttgagtcacctgaggctgcagctatgctgagatatntataatttacctctctcagtagcacgatcaacaacagcagaataattacgatatttcgcacaatagatacaatccaggttggaggaatcatccacatctgagatgggcaagtgctccacaacaacaatagcctgtccctaccttccagaatgctgctggtccaagcaagccatatgttcctcctccaatgaaacaacaacagctacaactacaacaaccataacaactagcaattggggcccctccttaaccttccttataagaattagtgaggcaaatgaccattcagaatatgcaatttcagcaagaga

SEQ ID NO: 131524 - DNA, 365 bp, Glycine max
attagtttatcgcaattgtggctagaatgaacatgtgtagggatccttagaggaataaatctgaggattattgtgggatgcttattgaattataatctttccttatgaggatgaatacactattgccttgcttgaaggactaattgatgttctgatgcgaatacgttgatgaacttgagtgcttccgatgttctcttgtatttgacctatgatcttgattcatttgatttaatatgatagtgtggaagtgattgacgagctatactccccatgttataacatacattttgaaaaggtgttttgttgatattgtattttgagtcgacttgcgacttattgacaacttgaacctgtgatgaatggtg

SEQ ID NO: 131525 - DNA, 64 bp, Glycine max
atgaactttgaattatgtatcacaagatgtcattcttgagatgtgacagcgctcaccgtttaat

SEQ ID NO: 131526 - DNA, 280 bp, Glycine max
  unsure (1)..(280): unsure at all n locations
ctaaaaacaggccagataagagagcgttgtgctcctcttggaattcttgacctcaactcaacctagcactgtctatgattactcatatgtgattctgagacaacggacgtaacacttttatgaagaacgaactatctacttactacttccgcactcaaattatggcttgatgttggacaccgataccattacaacgngtgttatgcactgccactgcagtgggccccttatgacatacttgatcctaaatccggactactggactgaccaagtcatcatt

SEQ ID NO: 131527 - DNA, 373 bp, Glycine max
  unsure (1)..(373): unsure at all n locations
agcttcggaaaggctgtgttcaccttctcgctaagccaatctgttggcttagcgagcatccgctaagcgcaacactcttgcgctaagcgcgaggaagaatccagaagaagatgagttgtacaagttcgctaaatgcaccgcttcatccctctaagcgcaccacttcagttcatccactaagcgaganaggcacgctaagccaaaaatcactaacgtgcgctaagcggtccatacgtgcgctaagcgcacaagcatgaacaaggccacctatttaagcctgaaatcagattntgtgacaggagtttggactgggattcaaagttctgcatggtttaggtttctagagagagaaaagtcaaaggtctagagagtt

SEQ ID NO: 131528 - DNA, 511 bp, Glycine max
  unsure (1)..(511): unsure at all n locations
tgcctgattgtacctgcattacggaccttgaaactcagcttctcgggccattcctgcagatgcaacacttgtattgttagntttaccagngggacactactcttaaaacataaatggcatacaacctcctcccataaatacaaacatcaatgtaaatttagagcaagcttatgcgcatatttccttacgaacgttcacttgcacaagacatcctattaactaagagaaatgcacccatatacaatcaaggcagcttcattacctagattatttacatgtacttccaaggtgtatttgttatttacatcacacacgtctccttgggtaaatctacatacatgcatactcaaagcatttagtagtaccaaaatatgcacgtgtgcacatcttggaatttctaatacctatacatacacaaacttcatgatgaatcttgactatctacacaataaggtgctacgtttcatgctcttgtcaaaattttgctacctatagtcgcatgcaaattcta

SEQ ID NO: 131529 - DNA, 317 bp, Glycine max
ttctgcttttattggtgaccacagagtggtacctggagatatgtcgcgggggtcaggagaccttgtggacgtcaggtggggtgctattgcccaaaaccaagcttgaccaatcccgacccaacccgggcatagtcggtcagtgagaacctgcgatgtacctaagcaggcgagctcctggcagtcaacaaataaaaggaaaacaagaccacaaagcaaggaggcttgtggtggctggccaactgtgaattttggtaatatgtggattgtggcctctggtaatcgattaccaaaggtgagtaatcgattacaatgcttaa

SEQ ID NO: 131530 - DNA, 347 bp, Glycine max
  unsure (1)..(347): unsure at all n locations
aatctgcacttatgcagaattttgctgtcaaataggtgcagcataattgtggctttgtgcagaaaaatgcttgtgtgtgatgggctgtggaaagagtagtacagaatgagttctggacgtttgctagtagatcccaacggtcacaatgtaggcttaagtactagagacttctagtaaaattttctagtcgatccaacggttaacaaattggaaggaaggaattgttactgtggttctttagtgagaaaagctgtgattttgggtggtggtttgggcatagttttctgccttcgccctgntttatttgctgtgatagttttgtgtgtttgaatgttgaattaccttga

SEQ ID NO: 131531 - DNA, 426 bp, Glycine max
  unsure (1)..(426): unsure at all n locations
gtgtctntgataaggtgaacatcaagatctttatcccaaccaattcttactcgttcaccaatgttcaagcaccatgttgcacttgcaacggtaaaaatgtcttcaatcacctatactctagccaccatgtcagtgatatgatccttgaagaggtcaacatcaagatctttatctcaaccaattcttactcattcaccgatattcaagcatcacgttcttgcgatggtagcaatttctacaatcacctatactccagccactatgtcaatgatacgatccttctctatcaatacatttctctaaaattctttgaacgtttcaacaataataactttgtccctgttgaagaagttaacgatgtcatagagaacaaagntattcttaggtgcaatccttatgtcttccacatgtttatggtgactgatg

SEQ ID NO: 131532 - DNA, 448 bp, Glycine max
  unsure (1)..(448): unsure at all n locations
actcagctgggaggtgcttcatggagganaagaaagagggagagtatgagggttgtggagcacgatattgaaggaagaaaaagggagagaagttgaacttagagttgtgtctcacaagactctcattcatcatagttacaactagtgttacacatgcttctatttatagactaggtagcttccttgagaagctttcttgagaaaacttccttgagaagcttctttgagaaaacttccttgagaagctagagcttagctacacacacccctctcataactaagctcacctccttgagaagcttccttaagaagattccttaagaagctagagcttagctacacatacctctataatagctaagctcacctccttgagatgagaagctagagcttagctacacaccccctataatagcttagctcacccccatgacgaaaaacatgaaaa

SEQ ID NO: 131533 - DNA, 374 bp, Glycine max
gcttttcaacgatgaaagcctttgggaagagtattttgatatttactttctaccctcatgcttctgctaaccgcaccccacccacataactaaaacacaagtatataaggttcaggagtcattagaattctctaaacttccaataacaaataaacacatcactctatgtttaattaattaattaaataatacagtttaaatctaattcatcttgttgttgggtaatcaaacacttaatatatattaatgaaaatctcaatgtacacttttttaaccgaactaaaaattgaaattcatatgattaatttggataattcattacaaaaattgtcatattaaaattaaatattaaatataaattatcggctctgttt

SEQ ID NO: 131534 - DNA, 454 bp, Glycine max
  unsure (1)..(454): unsure at all n locations
accagctagcctcacaccaggccaaattaaatttcttgggacctccccacaagacctgcaaaacttatttctcttcttggacaagatggaggctggggcaagataatttcttcccatcagaccttggatgcaactgtgatcttatacccatatcagctatatcttgactggtattcaagccatccttcgtctcgccttgaatggtgaggagtcgcccaatcacactgtcacaaacatttttctccacatgcataacatcaatacaatgtctaacttcaagatcacaccagtacggaagatcaaagaanatggacctcttcttccatatgcaactctgactattatccttcttttgtggcttcccaaatacagtgttcaggtgttgaacccgctgatatacctgctcaccaatgaaccgtatcggcgtaatatcatgctcttgacctctattaaa

SEQ ID NO: 131535 - DNA, 444 bp, Glycine max
agcttctacaagctggaatcatttatcctatcttcacagccaatgggtgagtcccgtccaggtagttctgaagaaaaccaacctcaccgtgataaaaaatgagaaggaggagctgattcctactcggtgcaaaacagttggagagtctgcatcgactataggagactgaaccaggttaccaaaaaggaccattttcccctaccatttattgaccagatgcttgaacgcttgggttttataggcgctttatcaaggattttagcaaggtggcccttccactatccaatctgctgcaaaaggaggtggagtttgattttgatgaccggtgcaaagggcttttgattgccttaagcgtgcggtgaataccacccctattaatcatgcacctgattggacagccccgtttgagctaatgtgcgatgcatccaaatacacaatgggggt

SEQ ID NO: 131536 - DNA, 483 bp, Glycine max
  unsure (1)..(483): unsure at all n locations
tagtcaaacagaataatccaaaaatgtcaaagaatatgttgttgaattatcataacaagactttctgtgattggtttaaagatacaatctttgcaaatgacaatgcttcagaaacattaagaaagctagcagatgggcctaaaagaaatgttataacttggcaaggatacgacataaactagtattcattttacacaaaagcacaagatgacaatagtacaatgcagaacaacgggatcaccctaagggctgaatctcaacacttcgcaagtgtgaatgacgccaatccttgtgtagcttccatcccttactttgggttcattgatgaaatttgggaacttaactatgtgaaatttactgcatgtgttntcaaatgtaaatgtggtgacagcaacaccggtgtgcgcaccgatgatatattgattacgttggtagacctgaagaaacttgtgtaccacaatgactctttcatcatggcagaac

SEQ ID NO: 131537 - DNA, 451 bp, Glycine max
  unsure (1)..(451): unsure at all n locations
cgcatcttaagcacctgngctgcaagcttgaattgacaacggaagctctcatattctcaaatggtcataactngtcacacggaagtccgattagagcacataatatatcgagacgctcttaattgaacaacgaatgctctcgagaaattcatatggtcataacttgtcacataggagtccgattaaggcgcgtagtatatcgataagcttgaaaatgaacaacagaagctctcgagaaactcaaatggtcataacttattacacggaggtccgattgaggcacataatatatcgagacgctcgaatttgtacaacgaatactctcaagaaattcacatggtcataactcttcgaacggaagttcgattcaggcgcataatttatcgagaagcttgaaatcgatcaactgaagctcttcgggaaattcaaatggtcataacttattacacgg

SEQ ID NO: 131538 - DNA, 310 bp, Glycine max
tcatgtctaacaaagctactatgccccatacttgcgtgcaactttaaaaatcttttgaaatgagtgtgtgcttaaatggtgggattggggctgtgttgatgcaagaaggccatccaattgcttattttagtgaaaaggatagtgggcctacccttaactattcaacttatgataaggagttgtatgccttagtacgggctttgaaaacatggcaacactacctttatcccaaggaatttgtcattcatagtgaccatgagtccctcaaatatatcaaggggcaaggcaagcttaacaaaaggcatgcgaa

SEQ ID NO: 131539 - DNA, 469 bp, Glycine max
  unsure (1)..(469): unsure at all n locations
agcttgtctcagcgtttatgcgagactgagtaccacatgctagctatcatcgccaagtaccaagaagagttaggtctagccgcggcccacgagcatagaatcgcggatgagtatgctcaagtatatgcgaaaaaagaggctagaggaagggtgatcgactctttacaccaagaggcaaccatgtggatggaccggtttgctcttaccttgaacgggagtcaagaacttccccgcttgttagccaaggccaaggcgatggcagacacctactccacccccgaagagattcatgggcttctcggctatggtcagcatatgatagacttaatggcccacataattagaaatcggtaggaaacttgtatggtctctcagaccttgactgggatacgacttcttttnttgaataaaatgagttgatccatgttctactccaaaaacttgtgcaaataaatcacttctacattta

SEQ ID NO: 131540 - DNA, 453 bp, Glycine max
tcagctttgtcttccccaccacctccaccttcttattttatagtttataactttctttctttataagccatgtattttggctatgatatttacgctatcattttctgcactttatttatcttttggtatttggactttagtcttttatgattagattttatgtggtttcgaattatgattggttggattatattttggttatgacctctttatgatttgcttatgtttgtgtacaacttatgattgatctttctcctatattatctgatattgattcccatgaactttggctttttgatgttgccaaagggggagagaaatgtggtggtagagaaacttagaaaaagcttagatatcaagtgatcatctatttcataacatagggggagtgaacgcaatatatcatgcatatcattacttggttcttgtttcaggaacttaattggcatcatt

SEQ ID NO: 131541 - DNA, 297 bp, Glycine max
  unsure (1)..(297): unsure at all n locations
atccgagtaaaacgttattgtcgnttgaatttgctcagagcttcggcattccatttcgagcatctcgatatattacgggacttaatcagacatcctagtaaaaaggtattgtcggttgaatttgctcacagcttcgataatcaatttcgagcgtcttgatatattactagactcagtcagacatccgagtaaaatgttattgtcgtttgtaattgctaagagctcccataatctaattcgacgcgctacatatattacaggacttagactgacccccgacggaaaagttattgtcct

SEQ ID NO: 131542 - DNA, 365 bp, Glycine max
gcatgaagagctaaatcaatttaagagatatgaagtgtgggacttagttgcaaaaccaacctctcacaagccaatcgaaaccaagtaggtatttcaaaataaaatttatgagtcaggcatcatagtaaaaaataaagctaggttggttgcaaaaggttatatccaagaagaaggaattgactatgatgaaacctacactctagttgcaaggttagaaggcataagactatttcttgcatttgcgtgtatcatggatttcacactattccaaatggatgtgaagagtgccttcctcaatggtctcattgaagaagaaatgtatgtagatcaaccaccaagtttcatgaactatgaacattctaatc

SEQ ID NO: 131543 - DNA, 409 bp, Glycine max
  unsure (1)..(409): unsure at all n locations
acacatgcatcacacaatcatgatgaatggtgcttggagaaaacagtgcttgctattgagtcttcttgcttttgttgttctatcagaatgatcaagattacctaaggagtactgggaacagatgatgccaaagaagctaccttctccttcttcttctccctccaaaggcacgaattcggtgttgccttcgtctttgacgaacacaaaaaatgatggtcttcctacgtcagatggaaaggtctaatgtatagtaaactatgttgtagttagcaatctctctaacgggacatttcagtgctggcattctcattactcagcgctgatgatttgaagaaagcatcattatttagtacatctggtacagagggtcatctcacgtgctgcttatanagcagaatcacgtacactc

SEQ ID NO: 131544 - DNA, 354 bp, Glycine max
  unsure (1)..(354): unsure at all n locations
tcatgggccattttgggatagacaagacccttgtcttactgaaagaaaacttttattggccccatatgaagaaagatgtccataagcattcactacaagaaaaatgacctaagcctatggacgcctttttcctacagacattaattagtggaggtaaatctcaaaaatacttctacctactagtgactaatggaggtaaaactcaaccatttgtaccaaccattatttggtgtaagtaaactcattanaactgaaaaaagacttctacctacaattacattgtgtatggaaaacttcaaaaaacttgtgcctatggttgattagggganggaaaactcaaaaggattactacct

SEQ ID NO: 131545 - DNA, 152 bp, Glycine max
ctgagccgcaccccgaaaagaagcgcgggaccacagaaacgagaacgctaaggaccaagaagacaatcccaaacgggaaaagggcaggggccgagcctagggaaagaagcccggcccgccaggagcccggcaaacagcgaaaacgcagggac

SEQ ID NO: 131546 - DNA, 362 bp, Glycine max
tcaagctatagatgctctagtcattcatccctatgagatgttgttgtagtatcggcgatcagaattgccattccttggattatatggatgaaccaagctcatgcttttacaaaaaggttcatctagtctagttgaaatatggtagtaaccgtcttgcaaatatggcgcaaaagatgaatctagtcacatcactgcttcgtctactgccaaacatatttaggattgatgatgtccttgttacttccagtttcaccttgacaaagatgtcatggaccatgttgaaaatctaaattgattcaacctcatatcctgcgtaaaaattcgcaatacttcaactgtacatcattcgcatacatccatgc

SEQ ID NO: 131547 - DNA, 359 bp, Glycine max
tagcttgtctcagtggttatgtgagacatataccaacatgttagtcatcatcaatgtggcgtccgttaattaatgactggtttaatagtcatggtttaaataacacacaccatggtggaagttttcttcttctttttcttttcatttatttctctttcaaaataattacggtcagaaagaaaatcctcactatatagtcctgaatggccagcttacaactctattcggagtcatttttttcttaccactcgtaaactctaaactatcttgtttgttcacaagaagaatatctcaaccctctactttatgtcgccacctgaaaataattaaataataatgggttcgaaactctttaccaa

SEQ ID NO: 131548 - DNA, 382 bp, Glycine max
  unsure (1)..(382): unsure at all n locations
tctgttggaccttgaacaagcaatcaactcctctttcagttcatgctatgngctcgcgactggtccctttcttcccttcgaaactagagttcactattgctaccccatagagctccgcgaattttgttccggccatactcttccttgcgagccctcttggtctcttgttcaagggctcttgcagtaattgcaatctcttcccgtaacccggcacactccttccgaacgtgtgtagcggccaacttgaacttctccttggcaagttttgcctttcctaactcgcttttgagagttaggacttcttcgtcctcttccggtgcttcaaaactctcttcgctgacgacttttaacttggcgagccaatctaaacctcgtatatgaa

SEQ ID NO: 131549 - DNA, 255 bp, Glycine max
agcttataaagtaagatgctgtgaccttcttcaccttcctgaagaccccgatatacttggagcctgtggagcactacattacttactccaaattctgtcattcacatctaaatccctcagagctggcctctagactttgcattccatggtgaggatttgtgcttaatgctaagatcacgcctttgatgcattttatgaaggacattaccaccctagcccaaacctagagtgttttatcatacttcaacctcaccc

SEQ ID NO: 131550 - DNA, 332 bp, Glycine max
  unsure (1)..(332): unsure at all n locations
agcttctttnggaccttgaacaagcaatcatactcctcttccagaaccatgccatgtgctcgcgactggtccctttcttcccttcgcaacttgagttcactattgctaccccatagagctccgcgaaatttgtttcggccatactcttccttgcgagccctcttggtctcttgttcaagggctcttgcggtaattgcattctcttcccataacccgacacactccttccgaacgtgtgtagcggccaacttgaacttctccttggcaagttttgcctttcctaactcgcttttgagagcttggacttcctcgtcctctttcggtgctttaaa

SEQ ID NO: 131551 - DNA, 62 bp, Glycine max
caaaccgcacacacgcccccaaaacaccgcgaaggaccgggcaaccaccagcggcccccagg

SEQ ID NO: 131552 - DNA, 414 bp, Glycine max
  unsure (1)..(414): unsure at all n locations
atcctcagagtcacctgcggatgcagcttgatgaggccagtggttgacctttaagaggacgggcccaacataaaaaacaacccgcttgccaatcatggaagaggggcaggcccaagcttttggaggacgtaaagacccctagaaggtttatctacaaggccttgcaaaaggtgggtatgattccctgcggcgtgcacagagaagactcttgcttgatgcatctaggtgtactccatgacatggaaacatgttcggaagtaagagatctattacaacggatgatagaccaaggtcggcttgagatcgacagtgagagggaggaagaacaacatgtatacatgcagtangtagatgaaaaagggcctaaaagcctaaacccttgggtatacactttactaagaacaaggttcccac

SEQ ID NO: 131553 - DNA, 466 bp, Glycine max
  unsure (1)..(466): unsure at all n locations
tcacctgatatcctcaanattagaaggatgtgccttttcattgtggctcttganaagatttttaattacacttacatgatatctccatttcccttcttactcttttttttgggcaatgtctagtgatgtcgagattcagatacatgctctactgatctcattttcagaatacacaaaacaatagntatagtaattgtaggtataaattttttaaaaaaaaaactatttccatatatttgcgtagaaaaggaagaaatttgcagaacaaatttgtcgtggctatcagtatttacagtataggtaccctgagaaggattaaagacttacatgatactcacattatagaaaagnaagacttttaagaatctaacaccaagaaccaaaaccaaaaccaaacattccccccccncccccctaatgataggacaaaattaaaaccttttacaggaaatcaaagataatgact

SEQ ID NO: 131554 - DNA, 447 bp, Glycine max
  unsure (1)..(447): unsure at all n locations
cccggatccttaagcaccgcggctgcagcttctttttgccttattaatttgatgaacataatggcaatactatactgcccaagttatatattcaagatttattgcagaanatacttgaattcattctatttcccatatgttattcttcaattgcttaccaatatgaggccaataatatttcttgggtgcccagaatgtataggtgaactgcatttatagatgatagattgggagcaaaacatctgtatgagttaaaagttatgaattatgacatattacatgtcaaattntgaatttatatcaagagaacaagtttcagatatgggtgtcattgcatctttagctgtcttcccagtcaaatctatagcaccagtgattatagaagtttcatgatgtgataactcttcacctttccctgcctgcacttgaatattttagctactaatt

SEQ ID NO: 131555 - DNA, 485 bp, Glycine max
  unsure (1)..(485): unsure at all n locations
actcagctctctctcttataattggtgatgttgccttctaaactgctctntatttgataaacaaacttcccactgcttctcttcaatttcaagttccttatactgtgttgttcaacaagtcacctaattacaatttttttaggaactttggatgttcttgctatccttttcttagaccctataataaacacaaacttaatttcaggtcacatgagtgtttgttccttgtgtattccacctctcacaaaggctacaagtgtctctctcctaatggcaaattatatgtttccaaagatgttatcttcaatgagcttaaatatccttacaatgatatntttccacctttatccaactctatcacttcttctaagagtgattttttacctactgctcatattcctcttgtttcacctttacctaatgaactcactcattcttctcaacatgctgaaactaattctatttctggaaatggtaatccctct

SEQ ID NO: 131556 - DNA, 443 bp, Glycine max
  unsure (1)..(443): unsure at all n locations
ttctctgcattcttatactctcttgtaatcaattatgaacagcatgttatcgattaaaatatagttttaactatagaagaaattttctaactctagaaactttcttctaactcctacataatgatgcattatgcacatatgaaatgatagagactaagatgcaacacacaatacaacaatcaatacaaatgtcactcangagatttaggcatgtaaaagacaaaacttcttcaagcttcaaggctaagttttcatgtagccccccccccccctatctctaacaggccatggttatggatatgggaatgtgctttaggggcgaatggaggtggaatttanaatggaggaggtcctgatttcattgtngtgaatacccacatttataaaggcgtatttttatcttgtaaatatttttttaaaaatggttctaaaaaaatcaaaaa

SEQ ID NO: 131557 - DNA, 281 bp, Glycine max
agatcgcaacagggataatcacaatatatcgcacaactgatacaatccaggattgaggaatcattcatatctgatatgggcaagtgctccacaacaacaatagcctgtccctaccttccagaatgctgctggtccaagcaagccatatgttcctcctccaatgaaacaacaaccgcaacaacaacaacaacaaagacaactagcaattggggcccctacttaaccttccttagaagaattagtgaggcaaatgaccattcaaaatatgcaatttcagcaag

SEQ ID NO: 131558 - DNA, 448 bp, Glycine max
  unsure (1)..(448): unsure at all n locations
gacaggtttctccctcaataatcatcttacaagggaaataacaatgaatagtagctctagttgtctccatgaggtttctcttggatgatcaatgctttttgcaaattttacttatttctaaattagattattatattcttttaccatacttctctgactaattcttttgatactcttcacgttctgcttgagttntgcagttagacaaacatattttgtatcgatattaaaatttattttctctatatttgtcttgggacattctttctattttcttatcttggaagaagtgtnttgagaaacaacacgaaatatgattatgtatgtttctcttagccttaagacttgattccaagatgaatcgcagctatttgntngcttattttgggcatgctngcatanttttctaatatggttttttttcaatttgaagagctgctcaaaaata

SEQ ID NO: 131559 - DNA, 433 bp, Glycine max
actttaacgatcgagcagcaactaagctcgcgatctcgtcttttaactcagatctttgctcccaaaaaaacttggaagcctcctctccatagcatggacttatactcctcatacattgcttcaatccacctttctgagtcggaatctcgcatggctcgatggaggttgactgggtcatcatccatcatgccattattttcctcatgttcgtgaagacataccccatattcatgtggaatggcacttatcctttctcctgtagatctacacaaaggtactggctcatgaagtatatgtacttgaggatcatgagttcgttctttatgaacgaccaaatttctttagtggagatcaattacaatatcttgtgaggtccgaactgtcttattaaaacaactgtataattggttggatagtcctaattctcctctaa

SEQ ID NO: 131560 - DNA, 430 bp, Glycine max
ctcagcttctatccgggctcatcttggtgagaagctccttcttccatggcttattccttaatggatgacgcctcctctcacctcttttcctttgtcttccgctgcatctccatgatggaaaatcaccattaaaggaccccattgaagctcaaaaatccagcctccatagaagccccacaagcaagcttccatcaagtggtaatcagagcacaagagcttcaaggaggtgctccttaaacctccattaattttttgttttaccttctcttccattgttgtttcttcattttttctccatgtacctcctcaaatgtcttgtgctaaatgtttttaacatgattctttagagtttccaccgattaaacttgctatagaagctagaattgatcttctatgggtcaaatatcttggtcttggtcttgaaccatga

SEQ ID NO: 131561 - DNA, 337 bp, Glycine max
  unsure (1)..(337): unsure at all n locations
atctttaagagttctaaaaacaccattttatgcttccagcttatgtntctttctacccttctctatattaagtgttaaataagtgtcaaataattattaaatttaattataattcaactacagcttaaatcaaaattaaatgaataaaattcccaaaaacaaaaaagctagggttagtccagaatggtgaaaatgaagaggacgatgcatacatactttgcgttaatcatatttccttttaaaatgtatgcacgtaaatatgcctgcctcattcaaaggcctttgtttgaacaacatatcttttatctaccaaaagaaaatagaccgaccacattat

SEQ ID NO: 131562 - DNA, 410 bp, Glycine max
  unsure (1)..(410): unsure at all n locations
tcttgcgtagccgctcttggtgctcagaanatcccaaatacttattcctcttattactagctattttgaattctttagttcctgaatgtacaactttcaaattgttgttcgttcccctctttgttttatgcaaaaaatgaaatcaatatcaaacaaaacatgcatacaattgtcatcgttattgctacttgaaccataaggaataccatctaaagaagtacttcaaaacgtttatttattttttttggtattttttgaattacaatttgacttcaatatctaattttttaatgtacttaggtggaggatgttgacgaagagaacgagaaggaagaaagtaatttaaagaagattaaggaagtgtcacattttttttcctcagcaaggaagtgtcacatgaatgctcggtg

SEQ ID NO: 131563 - DNA, 350 bp, Glycine max
  unsure (1)..(350): unsure at all n locations
agcttgaagacaagactatacgaggtatctttcttgngtatagcaatatctctaagggctaccgtgtctactacttgcaaactaagaaactcgtcattagtcgagatgttgaagttgatgaatatgcttcttggaattgggatgaacaaaaagtggagaagaacgttcttatacctgctcaactacctcaagacgaagatgaggaagaagacccaggtgaaccaccttcacctccaccacatcaacaagatcaagaactatcatcaccagagtctactccaagacgagtaagatctttggtggacatatatgaaacctgtnacttggccatacttgaacctataagcttt

SEQ ID NO: 131564 - DNA, 474 bp, Glycine max
ctcagcttgtatttctgtggagcgacaatacttttatagtttatcaatatcgaatcctgaaagatgaaaccgtaatatttcgtctgtgaacaggaacatggcaatgaaaaattcactcaatgttttaaaatgccggttactagtttcccttatatagaaaagcataagataacatctatatagccaattgtaaaagctcatcaaaccaatatcccctcagcattgactgaaaatttcaatgtaaactaagttcaagttattttgcatcatgatttcagccacaaattatatcaataataatcaaatataagcatacaaaataaaaaacaaagtcttatcccactagatgatatcggctacatgaatcacacgatgtcatttggcacggttaataccaaagttccaataatattgagcctataacaatacaaaatgcctaattttccacatttagcacacaagatatttggcaag

SEQ ID NO: 131565 - DNA, 398 bp, Glycine max
agcttctgcaaggtatatacgatgccagtactttgactctttcgattcatagtattttagtttaactattatcttttttattatcctttacaggctgctgagaaattgaagattacagccactgaactgtgcaaattacaaattgcagatggtgttatacctggaaaaagctactattaattatgatcttttctcttaaatcttattcacataaatggaatttatcatcttattgggctaaatatgagtatataggtcataactttttagttgtcaaggaaatttgcagaccttaactcctggttggatttgtgctaattgatcctttgttggttaatagaatttgaaattcagattgtaacaatatctcttggaatagacctaaataaatttctttt

SEQ ID NO: 131566 - DNA, 377 bp, Glycine max
ttttggaaaaaacaagctctgtggcaatttgttgttgtaataattgaaaaagagacctggccaacttggatgctccaggactttcgggtatgtcttcaactgcaccaaagacatttgtcaatatgttataggaatatcatggccattggtgtaaacctaacactatgcagccagatgcatgttctcatattctttaactctcttccctcccccttttctccttttataagatttgcaaaaagattaaaacattattttcctttgatgaggattcctcatcctgctgctacgcctattattagcaaattattgctacttaaccttacataaaatgataaaatggaataatgcccaacagccagaaataccaaggaatc

SEQ ID NO: 131567 - DNA, 348 bp, Glycine max
  unsure (1)..(348): unsure at all n locations
agctntgagccataatcctgactcaccatataccttgacccagggtgagaatgtcaattcttaccctcggaagcaaaaaaaagggggagagggaaaatttccaatcatagaggaagcataaaggagagaaggaaaatttccaatcaaaggaaaaaaagagaggaaagggaattcccaatcaaagagtgggagaaagcatatagaaaagaaagaaaattcccaatcaaagaatgggagaaagaacaaagagaaggagaataaggaaagaaagctcctgatcaaggatcgaaagaaaacagaagacatgtgcagagaggtctctggaccaaacaatatctgaacaaatac

SEQ ID NO: 131568 - DNA, 462 bp, Glycine max
  unsure (1)..(462): unsure at all n locations
cattacggaccataaaactcagcttacacatgaatatgtatataaataagtgggtcacaccattatctaatagcacaagtaagagaattcaacttatgaaacatttagcccaaggaccctaaatacaaggcccaaaaataataaaaccataatctaatatgtataaaggtaagtgggctcatatttagcccaagggcccaaaatctaccctaaagctcatgggaaccctagggccttctcttgcatctctggcccaatcttcttggagtctgctatccaatgccttgaggaggtaggattgcaccatcccctcccccttgaaaagggtttgacctcacatctagaggttcttgaaactttgtggttctttcctcaacacctgtaaaaagaataanaacatatatattagtggtgctgtggatgntatagtatggtaaaggaagccccaaatttcccttatac

SEQ ID NO: 131569 - DNA, 323 bp, Glycine max
agcttctaaacatagtccttcgtgtatttgggtggatgggtccttcttctgggcctttctctgggtgtagctccttcttcctatcaagtatggacaataatgtgtggtcttactcttacatgacaaaataaatctaaaaattattagatctgctatactacacaaagatgatccatatatgcttgttattactattccattttcaaaagagaacaaaattctaaagtttttatgattataggaaattgtcaatcttattctaacaaactattttccgttggcttaacatttgaataaatactaatttcacaatctcattctat

SEQ ID NO: 131570 - DNA, 461 bp, Glycine max
  unsure (1)..(461): unsure at all n locations
ttataaagaataggacaagatttactatattagcataattattagatggntagaaacattctttgtcatgttgttgtctgataagcttattacatgttgatgattataacacatatatatgtatatgaatcttaaaataaattaggaattaatagttcaaataataaaattaaattgaaggaaattattatattaagattcaatgataaatacttttaatttatttnttagtttaattatttattaactctttttaattaaaaataatatagttcgatttaatatatacatgttgngtgccatgtaaatattaatactatgtcatgtgtatataattcatgagatgtgataacattgtgctttgggattataacattatgactaataatgtgtgtatgtgatataatgagtatgtgttgaatggcaagatacttgtattgagatgtatacccattaactat

SEQ ID NO: 131571 - DNA, 422 bp, Glycine max
gtcacctgcggcatgcagcttcttgacacttctccgtctacggtgaaatcgaagaaggaccgttagggtttgataaacagactggaaaatcgaaagggtttgctttgtttgtttacaagtctccagagggggcaaaggctgcgttgatagatccaatgaagactgtggaagggaggcagttgagttgtaagttggcgattactgatgggaagcaagggaagcggtccgggccggactcgggccaggcccatcatgggaatgttcagcacgggcatggggatggtgtgggagcaagaatggggatacctccgaattcggggtcggggtcggggcccgggcaatatggttggccccggcattacggggcctacggttgggattgggctcttatggcggctctcagttcaccaccacctctttgt

SEQ ID NO: 131572 - DNA, 361 bp, Glycine max
  unsure (1)..(361): unsure at all n locations
taagctctttcaattgcacgaagctcttaatattttattagtatccttgaggaaccttcacccgacgaagacactgacaaaaacttatcttctccttcttggacaaagtatggcaggctgggggcaagtaaattttcttcccatcagaccttggatgcaactgtgatcttatacccatatcagctagatcttgactggtattcaagccatccttcgtctgccttgaatgtaaggagcgcccaatcacactgtcacaaacatttttctccatgcataaatcaatacaatgctaacgcaagatccaccagacggaatacaaaaanatggcctctcttcatatcaactctgattttatcttttt

SEQ ID NO: 131573 - DNA, 265 bp, Glycine max
  unsure (1)..(265): unsure at all n locations
agcttatctgtcgtcaatattgatcatcatgtggtcttatcaatctnatcataatcttatcaactcatctaccagatgtgcaacgataagaaccccctcccttccccccaccccgacacacatacaaacctacatcttttccttttatcaggagctgggttggttatgntaaactgatttatttaccttagcatttctggaagaatctgcaccccttggagcagattattcaaaggaccttgctggctgggaatcttggatgata

SEQ ID NO: 131574 - DNA, 198 bp, Glycine max
aatactctgatagtgagggtcttcagttatgattagaattgacagtactaagagaagtgttaagagaagaaattggcgcaccagttgtagcattgagtgatatcaaaactttatattctctttcaaatgatgacatcgcatatagaattttattgacaatcccggcaacgagtgctactgctgaaagaagtttttgaa

SEQ ID NO: 131575 - DNA, 327 bp, Glycine max
  unsure (1)..(327): unsure at all n locations
agcttagaggagcactcananctattgtatttacccctgatgtctgtactctgaggagaccgcggggcctctccctcctgattgtggactaacctagataatattttaacacacagactctacctatgaactatgcaatacatacaactactctattgttttcaaaatctcaattattttcatagtcattttaacgcatcgcacctctagtgatgtaactcatcgaggtcccacaatgggacccatcacaaaattcattgcacatttactcatcacccttaaatggtcttatagttttgtaattgcacaggtcatatctcacaactt

SEQ ID NO: 131576 - DNA, 469 bp, Glycine max
  unsure (1)..(469): unsure at all n locations
tcttatccgatgctcatcgtggtggtgaagctccttcttctatgtcttattccctagtggatggcgcctcccttctcctcttctcctttgccttccgctgcatctccatggtgaaaaatcaccattgaaggacctcattgaagctcaaagatccagcctccatagaagctccacaagcaagcttccatcaagagtagcgcacggatcatctgctgcttacccgctctttgtgtatggttggtttcgcacctattccaacaagacataaggcacccatgtccgctccgaagccatcactcttgtgtcgaaaagagaatagtatattgggaccaatacttggctgggataggaggcagaacaatcaactggtttcctcgatggaaagaaggaaaagagggagttctcttctcatgtggngactacccaaacatcctgtngatagggacgatgtggtgtattaactacaatc

SEQ ID NO: 131577 - DNA, 84 bp, Glycine max
cccttttccggatccttccattttataaacaccgggtattcggccaaattatggtagccaacctggaccagttttttttttggt

SEQ ID NO: 131578 - DNA, 468 bp, Glycine max
  unsure (1)..(468): unsure at all n locations
tgtgctgaagattttacttactctgatcaatgatccaattattctgttaagaagtctgtgaggatgttactggacagatcaaagntgcttaatcaagaaaatttgtctgtttcagtcctagagaattttaaagctggtagtgtggtaaactcatggttagaaaacagttgtgagcttcaaagtcaacctgaggccatagaaagtagtgatgtttcacgttacgttcaagaaataagccaattgcaaaacattgtcatgtttcgttcaaattgtgcaatgtgtgatcgcgaaggaacaaatgagattagttgctcagctgatcaggccatgaatattataaaatcagaccggactgtgtcggctgcttctatttttgttttcaatcttccatatttgaagacacgacttgatcagataatttcctcatagtaacatatgttgttacaactgcaataggattctagtgac

SEQ ID NO: 131579 - DNA, 364 bp, Glycine max
  unsure (1)..(364): unsure at all n locations
tactcaagctaaggtgaaccatggtgatgtgaaaatatgcactagaattttctttctaacaagacgacgaagcttagttgaagaatgaatgaggagagtacaggcgtcatcaccttatagttcaataatgtggccattatgaaagaacttcatggacatggtattgtattccgtgagaatggggcctaatgattgtaaccactggactcaaaggacctggttggctccacacaatggtaaaacatgaaggtcaatggtgaattcaacgttctatatcgctatcggaacaacttcgtatagttggtggcaatgaaagcactggtcatttccaaccatgactnttaaaggagttgtgtctctagtg

SEQ ID NO: 131580 - DNA, 435 bp, Glycine max
taatgtctctacaattgcctctcctctcagtgagccggtaaagaagcatgtggcatttacctgtggtgaaaaacaagagcaagcctttgttttgctcaaagaaaagcttactgaggcacttgttctagctctccctgacttttctaaaacttttgagctagaatgtgatgcctccggagtgggagttggagctgttttgtttcaaggtgggcaccctattgcttattttagtgaaaaacttcatggggccacccttaactaccccacctatgacaaagagctttatgccttaataagagcactctgaacttgggaacattaccttgtttccaaggaatgtgtcattcgtagtgatcatcaatcacttaagttcattagagggcaaagcatgtatacaaaaggcatgcaaaatgggataatacctagagcaatttc

SEQ ID NO: 131581 - DNA, 384 bp, Glycine max
atagaggaaggataataagagatttgttcttgtttatctattaaggatgaagaagatgtagttttgtgttatagtgtgacgggctactgtggccaccatgctggaagcaaaataaaggctttagatcttacagtttgctgtgtgtcaattaatgttttcatccagtttgttgttttgttaatttgccgcctgtttactaatatggatgacatatttgttctaaataacagaatattatttggattggctttaaagaaagttgactgcctactccagccctcattcattctggttagaactagaatctttgtcatctctctcttctctcttaaagctttaaacccccgcatgatgcttgatatgacatggtgaaatatttattta

SEQ ID NO: 131582 - DNA, 296 bp, Glycine max
  unsure (1)..(296): unsure at all n locations
accctcancgaactggcctgttgtatgaatgatgatgatcaaatgtcattgaaggtgctggtgcccactccagctgtgattgcaaatcctccatcgcaacaccctttacgacacgagctattctagctagtggtgattggttgtgatcccatctcaaagcatgatctttgcttctctggccagaaaccatgcgtggatgagaagctaataatcccacacatactaaaacaaagaaccctcgcagcaatagcaaaaaactcatcttgtcttttgctatgaaaaacttggaggaacaa

SEQ ID NO: 131583 - DNA, 258 bp, Glycine max
  unsure (1)..(258): unsure at all n locations
ctacaacatataacataacagcattattgattaaagaaacatctttttatgcatcagctggtctgntagaaaaaactcaacacttctacctactgctggcaattntacttacttgcattcttgctgtttttagcctagacttattataatcctgtactaaatcatcaattatcattgtttctttcaacaatgccttatttctaaattaaccctgtcttatactatctcctatagtatgatactaggattcatccgttt

SEQ ID NO: 131584 - DNA, 447 bp, Glycine max
  unsure (1)..(447): unsure at all n locations
gacctatanaaactcagcttctagccaaatagacttacctggagatgaattcttatgattcccctatgagcctatggtcccctttctttgatttgaagctcattacaagccttaagtgaaaaaccatgatatcaccttacccttaaggaattttggagctttggaattgttttgggaataagttgggaataagtgtggggggtatgtttcattggaagatataatttttggccatgcttaaagaattatgttggccatgcttgatgtatctgtatattgcctatttcttgctttaatctccaaattcgcactgttaaaaaaaatgaaaaaataaattcaattgctgcaaattcgtactgttcacaaaaaaaagaagacaagaagtgaagttgaataaatgacgtcttgtatgaggactcgattgagagccttggatgatttgatgat

SEQ ID NO: 131585 - DNA, 148 bp, Glycine max
  unsure (1)..(148): unsure at all n locations
agcatggattgantcagactatctaatgatcgtggantagnaanggnggctacagcatagaacacanaagcatgattgattagagaaacatccttatatgcatcagctgggctgntaaaaagacccaacacttctacctactggtgca

SEQ ID NO: 131586 - DNA, 415 bp, Glycine max
  unsure (1)..(415): unsure at all n locations
gttgcggagttggtcttggccagtgaaatgatcgttgttggtctgaaaaaaggaaaatntagtcatcctgcttggatgaatgagaaaactggggcaaatgaagatggtgaggatgaaggagaagcccgtgctgtgacttccattccaatacaaccaagtttcccaccaacccaacaatgtcattactcaaccaataaccaaccttctccttacccaccgcccagttatccacaaaggccatccctaaaacaaccacatagtctgtctaccgcagttccaatgacgaacaccacctttagcataaaccataacaccaaccaagaaatgaatnttgcagtgaanaagcctgtagaattcaccccaattccggtgtcctatgctgacttgctcccatatctacttgataattcgatgg

SEQ ID NO: 131587 - DNA, 375 bp, Glycine max
  unsure (1)..(375): unsure at all n locations
aggctggctagagacgattatctctctatctagatganctcgctcttagcgcgcggccataattcttgtgctcttccaaattctctcatcatgctaagcacgctgtatctacgcttagcggatgatgcgagctgagcccagatgttccgcttagcgcgactgctccttgtggaagcaatgtcttccaagattatgttgatgatngccaagaatcaatagttaagctagttccaaagagtcaggagtcaaaaagcttcaagaatcatagttcaaagaatcatgagtcaagaataatctagtttcaagactcaatctagtttcaagaattatcaagatcaatattcaagactcaagtatcaagaatcaagagaagac

SEQ ID NO: 131588 - DNA, 400 bp, Glycine max
  unsure (1)..(400): unsure at all n locations
tagctgtgcgctaagcctattctacagaatatacttatttttngtgtcttcgagcaaagcaccagcctactgcgcttagcgcctgagtaaaatttcataaggcgcactaagctcagcctactgcgctaagcgcccagtcaaaatttcacttttatttttgttgttgtgaaaataacctgtgctaatctcttgtgtttgtcttatgttttgcagatggcatccaaaataaggaaagctccttctacacctacccgggccagaattgatagatccagtttcacatcccaagaggcttgggagagatatacagacattgtggtgcctcgcaagctactaccagagaggaatgtggtagtttattacatatagttngactagttcaaggaggaactcgaaagaa

SEQ ID NO: 131589 - DNA, 340 bp, Glycine max
  unsure (1)..(340): unsure at all n locations
ttcgtcgggaccaatagcagctgcagctgcagcaagagcatgaccaaggatattgtgatgattctaattaangaccaaatatgacacatggaatgaccatgatcagctatgtcgagccgtgccatccaataccagatgttatgtgcttcacttttaaaaattttactcaaaatagttaaaatatagtttcgccaataaggatattcttaccttataccaaaactagaaaattttatcctatatgccttgaatactatgctaatcttcctaggattaaccataacttgagnatacctttcatagagcttaattacgctgccactcattgcacaatgctatc

SEQ ID NO: 131590 - DNA, 61 bp, Glycine max
cttcatgatagaagacactactaaaatcttgtatttgaaacttataacacatactacaatc

SEQ ID NO: 131591 - DNA, 207 bp, Glycine max
caccctataaggtttcgatggttaatctaattatatggacgtcattcttgcgtagtggttatatcccctacttggcagacaatattttccttgaggagattctttcacttgaataattatactagtgtcttttccagaacattgtgctgaaaattgcaatacgtgtgctattcggatgtggtgctcacaaaagcttattccatgatt

SEQ ID NO: 131592 - DNA, 443 bp, Glycine max
  unsure (1)..(443): unsure at all n locations
actacacatactcaagcttagaacacacatcaataaaagaaaaaccagaacattggtctattgccatggngntatacacattacaacagacacctagctagctagccattaagcattcaaaggacacctaggcattcaatacaagtgagcacgagttacctcaatcaaaatgagaccctgtcagtactagtgagcaccccaaacggattgcatagtgagcaccccaaacagatcttacagtgagcactagttccccaaacagacctgggtattcaatacaacatgttaaagagaagaataagtcacgaaacgtaccttggtgaggtggtgagctgtcacagtctcgatgtggttgaaatacaaacagatacgatcgcgaagaataagatgcttatatggagaataagagagcgcgagtaaaatagggctcacattctaatatt

SEQ ID NO: 131593 - DNA, 376 bp, Glycine max
  unsure (1)..(376): unsure at all n locations
agagatgaggaagtgttgaatggtgaaacttccttctnttttgttgaccacagagaggnacctggagatatgtcgcggtggtcaggagaccttgaggacgtcaggcggggtgctattgcccaaaaccaagcttgaccaatcccgacccaacccgggcatagtcggtcagtgagaacctgtgatgtacctaagcaggcgagctcctggctgtcaacagataaaaggaacaaagaccacaaagcaaggaggcttgtggtggctggccagctgtgaaatttgtgaaatatgaggatggtggcctctggtaatcgattaccaatggtgggtaatcgattacaaggcttaaaaatgaagacaggangctaagatggtctct

SEQ ID NO: 131594 - DNA, 231 bp, Glycine max
  unsure (1)..(231): unsure at all n locations
gctagctatcatcgcctagtaaccgagaatagntagccatggcccacgagcataaaatcgcggattagtatgctctagtatatgcggaaaaagatgctagaggaatggtgatctactctttacaccaagaggcaaccatgaggatggaccggtttgctcttaccttgaacagtagtcaagaacttcccctattgtagccgagccgaggcgatggaaacacctactcacccc

SEQ ID NO: 131595 - DNA, 401 bp, Glycine max
  unsure (1)..(401): unsure at all n locations
tccttgagaagcttccttaagaagattcctagagtagctatatgcttactacacacacccctctaatagctaagctcacttccttgagatgagaagctagagcttagctacacacacccccctataatagctaagaacacctccatgccaaaatacatgaaaatacgaaaaagtccctactacaaagactactcaaattaccttgaaatacagggctgaaatcctatactactagaatggccaaaatacaaggcccaaaagaaggaaaaacctattctaatatntacaaagaagagtggacccaaccttggcccatgggctcaaaaatctaccccgagggtcatgagaaccctagggccttcttntgcagctctagcctaatcctcttggagtattctatc

SEQ ID NO: 131596 - DNA, 253 bp, Glycine max
aagaagaatgcaggagataacttgaaacacaggcatcaaaatgcacaaagcacatagtaagcacaagcacagaggagagaatgctttgtattgtaatggtaactgcatatggcaattctatttcatattagcattttcgttgggcgcacttagcgcatagctgcgcttatcatgccaacgtgtcggatgagattaaaagtcatgtgctaagcgccacctctcgcgcttagcccaattcaattatttcatattc

SEQ ID NO: 131597 - DNA, 106 bp, Glycine max
caaaaaaccaaccccccccccagttatctcatgcgcccaaaaccagcggagccccaagcgaaagttattgaggcgaaaaaggaggccccgaagcgcaagaaaaagc

SEQ ID NO: 131598 - DNA, 473 bp, Glycine max
  unsure (1)..(473): unsure at all n locations
gttcaagtataanagcctgtaacttctcataaataaatgttgtttaattctgaaatcctgaaagtaattaattaaaagacaaanaagttaagcactgatgtaaaataatttcacacttttatcaactcaaaataaaacgagtgttacgttagatgaacatttttttctcttattcatcatttacaatgacgaattacaatattaatagatcgtgtgtagcactctcagcagccgagtttcttctactgtcgatgataacctgacatgagagcttttccaattattattgtgttgatattctaggatcaaaggaggcacatgaataataaaatcctctgagcaattgttttctgcgtctccaaatctccctaatcccatggtaagcttctgaaaatagaaggtcggttctcaaagctgcttgtctatttttgatgtcaatggtcaatgtgttttaacgtataccgaaccactat

SEQ ID NO: 131599 - DNA, 363 bp, Glycine max
tgcatgagaggctatataattaagaaagataatatttgtgtgtttagaataataagatgcatttaattttcataataattgttatggtgctctcgataaaaaaaatgtaggtggttgtttggtttacatgcaataattattattattactacaatgcaattttagatagtgtgaattattatatttgctgaaaatcaatattaatattctgctatggttggtagtttactacattcatttgtttctttattctgaaaattctattgatattatgatgatcttcttttgcaagacttcatatatatatatatatatatcagaaactatgaggtggcacatctgtggctcaatttgattctcaac

SEQ ID NO: 131600 - DNA, 216 bp, Glycine max
  unsure (1)..(216): unsure at all n locations
ccttgttactctctccttgtcncgcagctcactacaagccttagatgaacaaccatgacatcaccatattcttaagaaattttggagctttggtaattgttcgagaatattcggggggctttttgcttcatatgataacatgtgttggtggctatgcttcatgatggatgtggggccatacctgatgaacacttgatattggttaattgtaggaca

SEQ ID NO: 131601 - DNA, 238 bp, Glycine max
  unsure (1)..(238): unsure at all n locations
aggggggccaactacttatgaactgttctctctctctgaggtgctgaggaaaattagctccatgaagaacatccacgctgaggcgctatcgtcacgttcccgctagtaatcacgcgaagactcactaccgcctcttacgaatacatcgtcgatcttcttgatatcaaggctaaaatcgcttactaccttaacgcgggcttntcaatgcctcctatgaacacgaggtggtccacatttt

SEQ ID NO: 131602 - DNA, 204 bp, Glycine max
  unsure (1)..(204): unsure at all n locations
gcaagctngccgnccagctcgcccagacgagtgttgntgcttcctctataagcaacacacttcaggaagaatcttctggagggccctaggcggcctgtgtgctatttgcacccccttgatactaaatgcacccccctttctatttttgtcgtaattctttttgttcgaatcgtacgatactttacgaatgttgaacgatactta

SEQ ID NO: 131603 - DNA, 404 bp, Glycine max
cccacaacaataatggggacctctttctagaggtatttggcgctctatttgtagttttcttggcaatattcgtgaggatagttatgtggatccatgggctgaatgcttaggttaaaggatgccatggattgctatacgcctattctgattccgttgtatatattgcatgtcatatcgttccacgatcctcatttctacatgtttgaacatgctcccaccattcatttgacaaaatgccacaacgactcatctatgtgttgttttgttatctgaatgagagatttgctttatgcatgtccagccattcattatattgtatgagcaacttacgttgataatcaaaaagccatcgcatgagtcggcttgacatctagacttgtttaaatacacatggattcacatct

SEQ ID NO: 131604 - DNA, 306 bp, Glycine max
  unsure (1)..(306): unsure at all n locations
agcttaatcccttgataantgatgggaggttattcgtcctggattcagctgaggactactttccttagcacccttatgatcaagatggaggataaataaaaatagttttttttttgctatatgcatgatagtttcaatgcttgttgcacacaaatgtattatacaatagcacctatcacataaagagtggctatgctatttagaatgcatcaagaagtttaagatggtgcggctacattctttggaaccatagttattgcttggaaaaaatactacctacccatatctaacgggaatttctatttt

SEQ ID NO: 131605 - DNA, 313 bp, Glycine max
  unsure (1)..(313): unsure at all n locations
ctatgaataacgcacgctcatggtaatgtttcttgtactacctttcattgagtaacgaaactctntcattatttctacggggagagtcgatattgcaattaattgcttgcgatcaacaatgcatgcacaaggtccaatgcttcgtgattgacactgcatttatctaatatatgctccatgcctcaagaaaataatgtgtaagaggctgcaagcaagtttattaatgctttacatacgaatagcacaactcatagtaaacttgtgaagcgcgagcaagtattaggagaatgttattaatgtgtatacaacccgg

SEQ ID NO: 131606 - DNA, 274 bp, Glycine max
agcttgcattgaaagacatgctggatagagtactcaattgtctttctagcaacactatttttttgttgtacatttaaacctcaaacattggcaattcaacatgagatgttgtatttattatgtggacaatgatgaagaaatgatagaacaaacaacctaatagaaccttgtatcagaaattggtcattgcttgtatatatattggtggttttcctttctctaaattgtctcctatatttatgttggccatcaataagacttgtttatatagcgc

SEQ ID NO: 131607 - DNA, 299 bp, Glycine max
cataaagactcctggggtgatgtgggacatagactgcctacctaatagataacgtgggttagtgatcaaatatttgagtagattcaacgatgctttgtttgcttaatggtggtgggagttggcaatataatcaaaatctgttgcgggccacacctctattgtgtaaacatcgtggctggagggatatgatatctcataggaactgtagtctagacttctccctggtggaaagacctcgatgatatcttcatgcaacatctcaacaccactattttgttatatatagcttatttctgcca

SEQ ID NO: 131608 - DNA, 127 bp, Glycine max
agtggcaaccctcttgtgtggtgatagttggttatatgcaagaaataacacaaaacccttttgttgttgaaagtccaataagtgattggcaatagttgcaaccaatggtgtagctggcataattgtg

SEQ ID NO: 131609 - DNA, 352 bp, Glycine max
  unsure (1)..(352): unsure at all n locations
tggataaaggacttttttgatgaaggtnnaagaagaaattagtacaaaatctattcgancacccctatgtcatcactatcacattctctgcactaaaggatagaccttagaggtttatttgaataatgctcatgaatcatttctgctgcaatatctattatatgcatacctcaatattacccatgatgacgaaatctgtgtgtgttgtggctaacttggatgaggatgaaaaatctttgtgtaggcaatagatgtggaaatcatagaattaaagcctgactgtatgtcaatactagtccatctattattgagaggcctaacgtgggtcaatctattcgcctttagtaaaata

SEQ ID NO: 131610 - DNA, 342 bp, Glycine max
  unsure (1)..(342): unsure at all n locations
agcttgtatctggttgtggctgttttatatttattttaaatggaaaaaaataataacggacaggacacatatggtggttccttataatatcacaatccgcctttgcttgttttgctgtattattcatatttctcttatttngcactttgattattatggctttaattttttcatattttatttatgaacaacattattgattgagagagtggntgcttccatgcatacaatactacaccaaccatatctaagcgaggatttgtagaatcgacctctaatcctatctttgagaggaagagaactatcatgctggtaacctctcgtggctcttttcaatttaaa

SEQ ID NO: 131611 - DNA, 293 bp, Glycine max
atgaaaacgggtagtcctatcatgtgaggctcaatgagaatgctttctatcatatggcttggatgagcccttatgcatcatatggcatggctctacataattagaatgtgtgttttcttgctcctctggtggcatgattaaggatcaaagatttattcacgtatttaacaaactataaaatgtatctttaatactcctgaatgtttatcatgtgctatacctgattacactatgttgcttacaatgattctcctgctaaaattgctatcttcaaggattgatttgcaataata

SEQ ID NO: 131612 - DNA, 302 bp, Glycine max
gcttatggtgaacgaggttttcttgttgtcttgatgacaacaaaagatgatgacggtggtgatacaatagctcaatatccatccaagaactactttgtgaatcaagaacatctcagtagttcaagatataatcaagagaaattcaagactcatgaagatagttagtagtcaataatcaaagattcgtggtcatgatctcaagagtcatgatcaagatcacgactcattatccataaccaagaggtggcttatcatgatttgattaaatgttttcctgaaaatgagatcgtatgattttctca

SEQ ID NO: 131613 - DNA, 359 bp, Glycine max
ttggattatatgaatgaaccactctcatgtctttacaaaaagggtcatctagtcaatttgaaataccgttgtaaccgtcttgcaaaattggggcaaaagattaatctagtcacatcactgcttcatctactgccaaacataattaagattgttgatgttcttgttacttccactttcaccttgacaaagttgtcatggaccatgttgaaaaactaaatgtattcaccccactatctgtcgaaaaatttgcaatcttcaactttcattatcgcatgctccatgcttttattggtggatggcattgcttcttccttgagaataaattaataactatatgaccttatattgtttaaaaaaaa

SEQ ID NO: 131614 - DNA, 185 bp, Glycine max
ctccccttatctctaacaatctcccctcttgtggcgttgaggatgccaccctttaactatgacatggtgtgcggtggatagtattgagaaggattggaaacatgatcttattaacacttactagaggattaattcatcatgagtgatgccatcctacccccctggggcgttggatataatactcc

SEQ ID NO: 131615 - DNA, 426 bp, Glycine max
ggacctaagaaactaagcttaagagataatccctcacattattgggatatctttaatgggtaacaactagacattctcttaaagatttatgcaataatatggcttttgtatctatgattgaacccaaaaatgtaaaagaagccataatagatgataactggatcattgccatgcaagaagaactgaatcaatttgaaagaaacaatgtgtggaaattagtagaataacctaaaaattatcatgtcatacgaacaaaatgtggtttttagaaattaattagatgaacatggtataattattagaaataaagccaggttagtagcaaagggtgttaatcaagataaaggactagactatgaagatacatatgctcctgttgcatgattagaagctcttataactgctcatatcatatgcacctattct

SEQ ID NO: 131616 - DNA, 327 bp, Glycine max
atcttgtttcgaggaggagatggatgaaattttgcttctctggtggctagagctgtggtattacaggacccctagaggtaacacatgtcaagctagtgacattaaagaaacgcttacggggaggcaacccaacttttcttattttctcaatcatttttatcttgtttaatgcatgtaggtatgatttgttcacttgcgactgctataaaatagttgtgaagcttgtttttaatgaaaaagatggtggccaaaagcttttctaagctgatatgggaattactaaaaaaatttttagtcttctcctcacttatcgtgacctttccctta

SEQ ID NO: 131617 - DNA, 450 bp, Glycine max
  unsure (1)..(450): unsure at all n locations
gggaacttggaacccatctggtctntaattagaaatccgnacctgtctcaggggtttgtggattgagctcctctgctgaccaccatacagacctttgcccttccatgcagcaacctggagcaattgagcagcctgaagcttatgctgcagatatttacaatagaccttctcaacctcagcagcaaaatcaaccatagcagagcaattatgacctctccagcagcagatacaaccctggatggaggaatcaccctaacctcagatggtccatccctcagcaacaacaacagcagcctgcttcttacttacaaaatgctgctggcccaagcagaccatacattcctccaccaatccaacaacagcaacatccccagatacagccaacagtggaggccccttcacaacctctcctcgaagaacttgngaggcatatgactatgcagaacatgc

SEQ ID NO: 131618 - DNA, 217 bp, Glycine max
  unsure (1)..(217): unsure at all n locations
acactcctgatgtctatatacaactctattctaataaaaataataatgcatttatcaataatagacatatcgcatcccattagtcaaaaatattgtttttcttgaaaaccaacatgcaatagggaaggacatacatccccatagtgtggttccctaactccaactacggtatcaaagtggtaaaccaaaataacctcccctcacctatcgngagctc

SEQ ID NO: 131619 - DNA, 233 bp, Glycine max
  unsure (1)..(233): unsure at all n locations
agcattgatgatgtggtctttgccaaagatatgatctttgntggtccganaagaggaatagatgatcatcctactatgacgactgagaaaactggggcttatgaagatggtgagaaagagggagaaacccatgctgtgactgccattcctatacggccatatttcccaccaacccaactttgtcatgactcaaccaataacaaacctccttcttacccaccaaccatttatcc

SEQ ID NO: 131620 - DNA, 417 bp, Glycine max
  unsure (1)..(417): unsure at all n locations
tacctatccgatgcagcagtaatgatggctctagttatgttgtgtatactgttacnaacctggaatgggtttaggcaaagacaatggcggcataactagcctgataaatgctaaaggaaatcgtgggaagtatggtttaggctataaacccactcaggcagatataaagagaagcatcgcgggaagaaatagcggtggtcaaagcttgcatgtgaggcaagaaagtgaaggaagcccgccctgccacataagtagaagctttataagcgctggtctgggaaacgaatgtcaagtggtcgcgatatacgaagatgatgtcccgagtacattatatgtcgtacgaccatgccctcctgatttccagctaggaaattggcgagtggaggaacaccccggcatttacgcaacgagcataat

SEQ ID NO: 131621 - DNA, 258 bp, Glycine max
  unsure (1)..(258): unsure at all n locations
agcttcgcctttcctaactcgctatagagatcttgtttttcttcngcctcttccggngcttcaaaactctctttgctgacgacttttaacttggcgagccaatccaaacctcttgctgaatccttgaccacagttgcaattctgctcaaagaggggagacacccggatgaaagatatggttttcttcccccgagaggacatcctagaatttcctcaaattcttcaatgggtggtactaattggaagtctccgaatgtg

SEQ ID NO: 131622 - DNA, 393 bp, Glycine max
ctgacggtgcgtagcccaccatctgtccatagatgagtatcgattatgtgcctaccatcacaatcatcgcctgcctttctatcttggggggtgccacttgggccgccagatccctccaccttttgggcgtgttccttgaatgagccagccccctttttgctcatgttctgtcggtgcatcctttccggaaccatatttaaactgtactgattctgcctcacaaaggcaaccatttggtccttccaagaacggactcgggaatgttccgagttagtgttctatgctacagatgccctattctgactttcttggaaagaatgcatcagcaatccctcattctgcgtcggtgtccccatcttcctgcaattcatctttagatgttcttgagacagt

SEQ ID NO: 131623 - DNA, 468 bp, Glycine max
  unsure (1)..(468): unsure at all n locations
tccatcaagtggtaatcagagcacaagagcttcaagattgtgctcctttaacctccattaatctnttttctttaccttctcttccattattgtttcttcatttttctccatgtatctcctcacatgtcttgttctaaatgttgttaacatgattctntatagtttccaccgattaaacttgctatagaagctagatttgatattctatggttcaaatatcttgttcttgttcttgaccatgaattgtgatgagtttaggttcctttgtagtttgtcttgttatatattgtggctgaaacctaaaccattaaatttctacacaaatattaatagttaagaaaacctcaataatctatagtgacttgctcacctatcgtagttttgcatagaagtcatgtctgtcatgaaacttgcacatagtattcgtatgttgtgctgaatttatntcttgttctctgctactcattg

SEQ ID NO: 131624 - DNA, 232 bp, Glycine max
  unsure (1)..(232): unsure at all n locations
caccgcagctgcaactagaagaggaatgatttgtggtttacttcctgcttntattgacgaccacatagtggcacctgaagaaatgtcgccggtggtcacgatacctcgaggtactctggtgtggtgctattgcccaataccatacttgaccaatcccgacccacccgggcatagtctggtaatgagaacctgtgatgtacctaaacaggcgagctcctggcagcaacatata

SEQ ID NO: 131625 - DNA, 305 bp, Glycine max
  unsure (1)..(305): unsure at all n locations
gaggatgcttttgttattggctcccagcccagnctggactttgatcatggaatgtgcttcttccacttcctctagtgtggtagtcaattgatccatttatggtcactccaaaaggcagcggcgtcctatacaaggggatcctttctccccttatctgtttgtgctctgctaggagtactttcccagagatatgaacaacctcgatgatgatgtcaaatttaaattccatcccaactgtgcaagtattcagctatcttatctgacttttgcagatgatattatgcttctatctagaggagatatcc

SEQ ID NO: 131626 - DNA, 295 bp, Glycine max
ctcgggaacgacagtcctgaagacataaacaagagaacaacctctctaacatcttcattcttgcacaaagcgttcaacaaacactcaataacatatttatccggctcacagccggactcgggcatctcatacaacactataacacgctcgtgaagcatgctaaccgacgcaaaccatgtcataaaaataacaaacactgggcgcgtaatcaagtgaggatactcctgcctcgatgcctcaaccagggcccaaacaacaacgaactgacgcaatctactcacaaacataaacattg

SEQ ID NO: 131627 - DNA, 274 bp, Glycine max
  unsure (1)..(274): unsure at all n locations
agctattatctagccatgatcatacantatttgttttacaggacctaacagnttctaattatattggtcatcaaaactatcttgtgtggacagtaaatgattagcccgtgaatttcctcgggggctgtacacactttaacgatggccattgctgtggctagtaatcacaggaggtcttgactttcattcgaggtcgaggcgaacctatccatccacatggtcgcttcttgatgcaatgcatcaaacacccttccttttgctttcttcttggtcg

SEQ ID NO: 131628 - DNA, 344 bp, Glycine max
cttgaaacagaaatctgtacctgtcgcaggggattgagggttgcgctcctctgctgaccaccatacagacctttgcccttccatgcagcaacctggagcaaatgagcatcctaaagcttatgcagcaaatatatacaatagacctcctcaacctcagcagcaaaatcaaccacagcagagcaattatgacctttccagcaacagatacaaccctggatggaggaatcaccctaacctcagatggtccagccctcatcaacaacaacagcatgctgctcctttcttccataatgctgctggcccaagcagaccatacattccttcaccataccaacagtagcaac

SEQ ID NO: 131629 - DNA, 321 bp, Glycine max
  unsure (1)..(321): unsure at all n locations
agcttcatccgatggtcaagaatcatagcttttgaaagaatgacattatagtactccaatacttgctaaacttntccatcatcaacactgtcatattttgcaatacatgatcatcacactgaagtgtttcttgcaacaaccattcatattntcaatactgcaatatagaatcagtgggcttgtctatttggctttatggggggctaagaaataaaaagttggctgtaataaaagtgggtgcttacttggtacaaaaaaaaactaaccttctaccattttaattattttaattataatattataaaaaaatattttttttta

SEQ ID NO: 131630 - DNA, 403 bp, Glycine max
cactctactccaaattgttagtttatatgttatcaaggaagcacacgtatattcaccatgatatcattgttgaggaaggaaattgtggtgctgtgattcaaaagatccttccacccaagcataaagaccctgtgagtgtgaccattccttgttcaatcggagaagtcactgtgggaaaggcacttattgatttgggagccagtattaatttaatgccactctccatgtgcagaacgttgtgagagttggagatcatgcccactaagatgactttacaactttggtaccgctcaattaccagaccatatggagatattgaagatgtgctggttaaagataaacatattatcttcccgctagactttgtggtagtggatatttgtgaagataatgacatttctat

SEQ ID NO: 131631 - DNA, 134 bp, Glycine max
aaccatagggaaccacaagagacaaaatcatagcgcaaggaaaaacaccacaacaacaacaaacgcacgaaaatctagcgaatgacaccaaacctacagcgcaccaggaataagacctgaagaaattactcaaa

SEQ ID NO: 131632 - DNA, 466 bp, Glycine max
  unsure (1)..(466): unsure at all n locations
ttccttacaccaaccatacaacaatgaagttaaattcttacactcggnttccaccgatacctgatgtcctcaaacagtgaagcagccttcttaacacttccattcttgcacaaagcatccaacaaacacccaaaaacatattcatccggctcacagccgtacttgggcatctcatccaacactacaaccgccttgagaaccatcctcgcggaggcaaacctcctcatcaaaataacaaacacttggggcgtaatcaagtgaggattctcctgcctcatttcctcaatcagtgcccaaacagcaccgaactgccgcatcctactcaaaaccttaatcattgccttgtacgcgtcgtgatctagtcgatgaccggattgctaggatgccaggaatatatctatacgccaaatcccggatcaccacaccgactcaacacacgctctgttatccaagcctacaacaactc

SEQ ID NO: 131633 - DNA, 159 bp, Glycine max
tggtaaaagggatgccccacattatttgcatgacacaaatgtctaaatgatgatgagatatattgatgcattactggtcatgcatgcacctatgcggacacgctagtgtcaaatttttgtcgtcatttgatgctagggcttaggatatatttcctctat

SEQ ID NO: 131634 - DNA, 398 bp, Glycine max
tcctctaccgaaacaaaaaacattatcggtctttgttcgttcttaaaaagaaatagcgcaacgtctgctgaaaaatatctatcggtgctacttcacgaccgaagtcggctatcgagttctctattcaatcccttaatgaaatattcatgatgttagtaaggagatgtacgagcggtcgcatgctgcgatgcttgtgatttagaccatcgaacggcatctttgctggcggacgtcgactggaatttttcacactcatatcggtgaagaatatttttttgcctagaaggactaatgatctcgtggccgaataaacggaaccattctcacttttgccgatacaacacgtctgtagagctcgcacacaataacctatccgatcacattgcacaatatgtatg

SEQ ID NO: 131635 - DNA, 294 bp, Glycine max
  unsure (1)..(294): unsure at all n locations
agctttaatcatgatggtcaatctacaattattattgtattatcctgaggcatcatcgcctctcattggtaatgcagaaaaatctcctaggttgactattgatagcaaatttagaggggatgatcgcaaaaattgtcacgagagaaagaacaaaatgtggtatttatatatccagctaataaaatcgcaacagttgatcaccaaaccttgttattgantaattcaatcaaataccattggttctgcatttccagaaccatggtaatctaatacaccaactggttattgattatc

SEQ ID NO: 131636 - DNA, 358 bp, Glycine max
gttcatagaggaattccagtactcctgtgttatacgaaaatatataatatagtattccaattggcacttgttattttctacaaaagtagatgagatctgctagtgctaatgatatattcacttcgtatagaatgttgctatttatgaattggccagaaattcttaccttaaaactgtcaatgtaatttggttcattggttattaatatgttctttagagccactgtcagtctgttatacttgattaccttgccagcgagactatttgtcacatgattcgtagttgtctcacccatgttggtggtgtgtcagacacgtgctttgctaaaaattattgatgctcttagctattgtgataa

SEQ ID NO: 131637 - DNA, 351 bp, Glycine max
  unsure (1)..(351): unsure at all n locations
agcttgactgaatagcngctactatctacatttatcatgatacaccantacttggaattcttctagaaaagactattgatgtcattactccatccctcatgccctctgttggagactcattaatcatttatattgatggcaggacaaaccattattgcatgtgctctaactcgagatgtgcactccagagggaaactgagttacatcgaggatggtgacaatattctaggtggtctaaacgatgatcttattttcgtgtagagaacatcactttaaaaatattaggaagagtgggagtttaaccatatttttggctggtatatttctccacaatttctaccaatcatatgt

SEQ ID NO: 131638 - DNA, 248 bp, Glycine max
  unsure (1)..(248): unsure at all n locations
atgaataaattgaatcgacaaagactctatacacgtatgtctgganaaaccccaccatgtatcaagacgcttctacctcgaaacggatgctcgtatgaaacgccaacaacagtatctttttactcggatgtccgagagaatcctgaaatctatctggacgcgcaacagtgaaacttgaagctctgagcaaattggagaaaatataacttactacacaggtgtcccgtcgagccagtcatatgtccaca

SEQ ID NO: 131639 - DNA, 216 bp, Glycine max
agcttcaataaatatagcaaacatcatgttgttacacttgtttaaaacaggtcggaggaaatcttcaattttgtgatatccactttgtcaactgcttaaccattttcattcatataatgagtgccgaagacaccatccacattcgacattttcttttgcacagacaaaattttattttgctgagcctctgtaatattttttacggttgttagtctc

SEQ ID NO: 131640 - DNA, 437 bp, Glycine max
  unsure (1)..(437): unsure at all n locations
tgctttcatcctctancagcagacctaataggttcctcatccttgcataaagtaaatccgactagattatttcctcttctggattcaaaaaaaacacactgggagggatagccaccacttccacttccttaactagatattcacaaaatgcaacatcattctccagtccaaagggggtgtgatctacaaccacatagtattgtccactggatgggaataccttgaatccaacaacctttcatccttcaaacaaaatatctctctttgccatataatccctcttcaactctacataataagtagtctggtgctctaacagccgctgcaacaacacactgtaaatgatgggcagttgctaaagagaagaaagcgtgtgcctgtcgcacctcccatgataatngtggtggtgctatggcccaaccaatctttcatcctgt

SEQ ID NO: 131641 - DNA, 152 bp, Glycine max
ttattcgaggaccacagagtgtgaccagatgatatgccgcggtggtcacgacacctggaggacatcaggtgtggtgctattgccaaaaaccaagcttgaccaatcccaacccaacctgggcataatcttttaatgagaacctgtgatgctcc

SEQ ID NO: 131642 - DNA, 399 bp, Glycine max
  unsure (1)..(399): unsure at all n locations
aagcttctcaaagaagctactcaaggaagcttgtcaaggaagctttctatgttataaatacaaacacgagcaacacttgatggaacttcgaggaatgagagcctcgtgagacacaactcataggtcaacgcctctccctatcttcgaccatcaatagccgactcccccctatctctttctctacctatttcttngcctccatagaagcaacctctccaaacatatcatccaagacaatctcatgatggcgaagctccgtcgtccatggcgtatgcccaagaggaaggcggcacccatcaccgcttcgtcactatctgccgcagcatctccatggagggaacacaccatagaaggatctcattgaggctcgaagatccagccgtcattgtgcttcacaag

SEQ ID NO: 131643 - DNA, 225 bp, Glycine max
agctttcgtcactccacctaaagctggccactcatgatcaccaggataacctagtgattgctgcgcatcccacaacaggggcttcttctaatctatttgtttatttcctaaaagtgggcatgagcatgctgaaaaccgctcttgggatgatgatagcgtattatgtcttccatacaatctccaaattggacatcaaccgtcttattgtgggtggccgctaacttg

SEQ ID NO: 131644 - DNA, 452 bp, Glycine max
  unsure (1)..(452): unsure at all n locations
tgaactaagactagtgtagatactaatttacatgacactttatctttcatataggtngctaacctttatccaatatgttatatgcagaaaatcacccaagaagggattctcagtgtaaaaacaagaatacaatgccaattgtggtagtatttgatagagagacatcatatgatccaaactacgatcaatggaattatccaatgttgtcttaccatccctttgttagaaacagcccctaggagtatcttgaactacgtttctacgttaaatagatttgaacaagactgaatatagtttgttgcatatatattaattatgcagtaatttcaatatttagtagtgcataattaagcattgcaagagtcactcacaccaaatttattagtgagatatgctttatgcgtgaagaatgatatcaacctttggnttgtttatgtgactttttttaacac

SEQ ID NO: 131645 - DNA, 237 bp, Glycine max
tacacaccagaggcaaaatacttttacttgaaagagcttcctcatgtatgggaactattatgactagaataagctgccacaatatgatctctatatgggggattatttatgggacactgtgatgtatgacaatgccactcttgtggtaatcaaggagattctacatgtgccactcttggatgaattatttggttgtttattaaacgctgatagaggaacttcttttatatcaaccct

SEQ ID NO: 131646 - DNA, 476 bp, Glycine max
  unsure (1)..(476): unsure at all n locations
tgtccatatatagagtcattacttgcatgactntgcatttcgttcacgnaaatattaagcatgtatagataagtatctccttgagaagtattgaagatgtgtgccaaaataataagaacgcatgttttggcgtatgcatgatattcttaatggtacaaggtttgtaaaagtggcacttatgtggtcaaaataaacttgtagaagaagaaagttacgaccagtgatgattggcatctttaatcaagtgtgcacaataggcttatttcaattagtgctgctttttgtgtatcaattatgcacttaattggctttaagattctccgtccaaggaaatattgggggcgcgtcattgtgctagtgaatgagacagaaaatgattggagagcaagaatgaataacacatgcaataattaattgttagaattgcttctatttcacatagttaatcatgcacgatcagaatttgaccacgacat

SEQ ID NO: 131647 - DNA, 306 bp, Glycine max
  unsure (1)..(306): unsure at all n locations
catgcaagcttataagatgaacttacatacttatatatattttacacaccgctcttattagncaaaataaactctaccaagattttcatatatttcaagccaaaagaaagtataattngcaaaagcattttcccttatagggggccatgctcaatagtcaatttatataatactgggagcatagaagcagtaccacataaacaaaccctatacataggtgctttcataaatgacttaatctgtcatgcggctgagtggtcgcctgttagcatatgattatgacagaatcaacatcatccaaaccta

SEQ ID NO: 131648 - DNA, 119 bp, Glycine max
  unsure (1)..(119): unsure at all n locations
agctttgagcaaaatcaaacaatattaactttntactcggatgnccgatggtgtcccgtagtatatcgagacgctcgaaattcaaaacagatgctctgagaaaataaaacgaaaataac

SEQ ID NO: 131649 - DNA, 433 bp, Glycine max
tctattctgaatttcgagcgtctcgatatactactgtacttttatcagacatccgagtaaaaagttgttgtcgtttcattttgctcagagcttctgttatgaatgtcgagcatctcgatatactacgggactcaatcagacatcctagtaaaaagttattgtcttttgaatttgctcagagcttccgttttcaagaacgagcgtctcgatatattacggcattcattctgacatccgtgtaaaaagttattgtcgttgattttgctcagaacttttgttctgaatttcaagcgtctctatacactacgcgacacaatcggacatccgagtaaaaaagtatagtcagttgattttgctcagagctactgtcctaatttcgacttctcgattactacggacacatttgacacccagaaaaagtatgtcgttcgat

SEQ ID NO: 131650 - DNA, 265 bp, Glycine max
  unsure (1)..(265): unsure at all n locations
agctnatcgattcattctatgcacccatggttgttcttatntngnntcgagcatttttattctcgtgttgattacttattataccccctgatgacgtgcttaagccattctactttagtcatttctcgcttaactcaaaaacaaaatctatttccaccgaacgattgaattgtattatgccgtaactgcggataaaaagaattccgactcgtcggtcgagccgttacctcgttggttatcaacaagatggtaaaaataatatact

SEQ ID NO: 131651 - DNA, 379 bp, Glycine max
  unsure (1)..(379): unsure at all n locations
agagatgaggaattgttgaatggcgaaacttcctgctnttantgttgaccacagagtggtacctggagatatgtcgcggtggtcaggagaccttgaggacgtcaggtggggtgctattgcccaaaaccaagcttgaccaatcccgacccaacccgggcatagtcggtcagtgagaacctgtgatgtacctaagcaggcgagctcctggcagtcaacagataaaaggataacaagaccacatagcaaggaggcttgtggtggctggccagctgagaatnttgtgtaatatgaggattgtggcctctggtaatcgattaccaaaggtgagtaatcgattacaaggcttaaaatngacgacaggatgctaagatggtctctg

SEQ ID NO: 131652 - DNA, 277 bp, Glycine max
  unsure (1)..(277): unsure at all n locations
tgcttcaacatcagaccacttccgttgtgcttgttactactncacaaggacttgagggggcctatgctagttgaataccttggaggaaagaggcatgcctatgttgttgaggatgatttctccatatttccggcgtcaactttatcagagaaaaatcagacacctttgatagattcaaggtgtttagtctaacacttccaagagaatatgactgtgtcatcatgataatcatgagtgaccatggagtatagtttgaaaacagcatgttcactgaatt

SEQ ID NO: 131653 - DNA, 291 bp, Glycine max
  unsure (1)..(291): unsure at all n locations
agcttgaacggatataagaaacatcttcttttatcgtggngattctngactccatctcattgaagcacatgtccacttgtatttccatagtatcaaacctttcaccaacagggtttgaagaccatcaaacctatccaaaatcttcgaaagaagagaggaatcttcttcatcatgtccttcttcaccaacatgacgagcaccctttttcacccaagagccatcatgctctttgtgataaccaaatgatgcaatgacagaagcgcctattagagatgatctcttgtatggaac

SEQ ID NO: 131654 - DNA, 485 bp, Glycine max
  unsure (1)..(485): unsure at all n locations
tacggacctatgaaactcagcttaacatcagaccacttccatggtgctggaactacttctcttggacttgatggggcccatgctagttgaaagccttggaggaaagaggtatgcctatgttgttgtggatgatttctccagatttacctgngtcaactttatcagagagaaatcagacacctttgaagtattcaaatagttgagtctaagacttcaaagagaaaaagactgtgtcatcaagagaattaggagtgaccatggcagatagtttgaaaacagctagtttactgaattctgcacatctgaaggcatcactcatgagttctctgcagccattacaccacaacaaaatggcatagttganaggaaaaacaggactttgcaggaagctgctatggtcatgcttcatgccaaagaacttccctataatctctgtgctgaagccatgaacacagcatgctatatccacaacatagtcacactta

SEQ ID NO: 131655 - DNA, 319 bp, Glycine max
  unsure (1)..(319): unsure at all n locations
catgcaagcatgatccttgaatcatgattcttgatctttgaaatcaactctcctctataatcaagaagtgttcttcaactttcctcttgaatcttgaactcattctttgattgacctttgagctttttgtcatcacctttgtcatcatctttgttatcatcaaaacatctttgaaccaatcttgattcatcatgaagctgtgcttctacaatatangangncaatgctggttgcatgtacaactntgcatatctttctttgaattataggatatgttcaagacacgggttattgttctgaaaaaaatggctcatgacat

SEQ ID NO: 131656 - DNA, 282 bp, Glycine max
  unsure (1)..(282): unsure at all n locations
cttgaatcatnactgaggatatggtgttctttgattgctagcgaacaacttgctactagtaatattcgttgcatcaatctctgaatttaagaatgaatngtataactgatgacatgatgaaggccatgattgtagatatacaagccaattgaccaaaaagcttacctttgaatataatagtatcctttgcaccctttgtgcgctaaatgatattgtaaaaattgaaccctgaactttaatgaatatctcccacaaccttgctaacattctatgaaagcatat

SEQ ID NO: 131657 - DNA, 421 bp, Glycine max
  unsure (1)..(421): unsure at all n locations
atatacaaataagcttgtggcaattcttctagactagtagtgataacatacaatcctcttgaacccttagcttccactctcttgtcatgccgagacttcgaaacctcaacaggtgttgccttttccatgtaatcgaaacaaaactcaatagcttcatccacaatgtacctttcaataatagatgcttcaggatggcgtagactctttgtatacccatttaagatcttcatgtatctcttaattgggtacatccaccacaaaggaacgggatcacaacatctaatttccctcaccagatgaacaatnaagtgaaccatgatgtcaaaaaatgaacgaggaaaatacatctccaactgacacaagataatagtagtcttgtttccaactcatccacttgagaggacatgactttgctcatatg

SEQ ID NO: 131658 - DNA, 186 bp, Glycine max
  unsure (1)..(186): unsure at all n locations
agcctggagtagaagaaaccggggaccaactctatttatntttttagaggaaggcatatctagncgagggctgaaagaccatactagcttcctaacgattactaatgatggtggacacttagacgatcagatgccgacaatagccgagaagcccatgaatctcttcgggggcgtaggatgtgtctg

SEQ ID NO: 131659 - DNA, 466 bp, Glycine max
  unsure (1)..(466): unsure at all n locations
tcataagtgaggcttgatgatcatactaacatcaagtgattaattgtttatgttgaatacatacaaagaattccagtatagtaggaaagtgggacattaatgtgctcaattttgaaacgtatttgagctaatggtatcaagctatactcttcccatgtagtaatcccccatactaaatcccctttcttataatctagatgtctagatactagaacttaagccacaccatatcctgtcaatggttgcaaacaattactcaacagctactagttagctacatttatatatgactaagacgtngtttcaatagtgtagattccttgatcaactggctttatgattatagtcgtacatcaacatattattttattgtatttatataacagaaattattatgcatgatccacttgggccttatgctgntctaacattggacctttgagattgaaatgctcaaaccaattca

SEQ ID NO: 131660 - DNA, 267 bp, Glycine max
  unsure (1)..(267): unsure at all n locations
agcttggctgcaactaagtcagaattgttttttactgatggcgcgcngaacgagctgtatcccgctaagcgcttattgttaatttaggactttatttctgttgataaacttgaacaattttggactaatgaatttttagttctttttaattacagatggcatcaagaaaaaaagctagagcggaggacattccttcatcatccactcctgttccttcatcaaaaacccggaggacaggatgtccaaaagctcacaatactttaatcc

SEQ ID NO: 131661 - DNA, 451 bp, Glycine max
  unsure (1)..(451): unsure at all n locations
cctatttctcagntgcaaaatgatagactgctggatctctttcaggcgaacgatagaaaacaagctgtgtgggattgtgggagcgacaatagtccaggcccgaacggactgaacttcaaattcatcaagaaatcttggcagattcttaaaccggacgttctccgcttcctagatgaatttcatgcaaatggtacctttccaaaaggttgtaatgcatccttcatagaactaattcctaaggtagctgaccttcgtgaacaattacagacctatctcattaataggatggatgtacaagataggggcgaaactattggctaaaagagtgaacatgatgtcattcatcatagatgaagcccaatcaacattcatagagggtcgtcatctacttcacactgcatcaatagctaaggaggtctttggaaaagcttaaagaagtcagaaatcatgt

SEQ ID NO: 131662 - DNA, 285 bp, Glycine max
ccatctgatgatggtgtttgtgatgatgcttgtgatgattatatgctgaatttgcttatggaaaactgattgtggtgaatggtattatctacctctgggtagaaagtgagaatgtgttgttatttatggaaaactaatgaggctttgataggtgggatgtttagtctgaattctgtggaaacggatgtaaagttagttaatctaactgaaatgtatttaagactatgagaagcttggctgtgctaacagaaaaaaaatcttatgccatgtgaccatacctttctg

SEQ ID NO: 131663 - DNA, 320 bp, Glycine max
  unsure (1)..(320): unsure at all n locations
taaaactaagcttgcgcgaatttccttggctgctgactgcttgcagacattttgttctntctcgacctcattgccgatctctagtcacccttggtatatcatccgctgcaacagttcctccacacgggaacatgttgcaatatcatgcggtacgccctaatgcatcaagcaagaggcccctatatgcccaccgagaagaaccatgcctgtcttttgcagggcttcaaacataaacctgctagatgcattatcggctctaacatggtaggcttttgtagttgacacgcctcagtcgcatatacatctagacctacatgggt

SEQ ID NO: 131664 - DNA, 246 bp, Glycine max
gttttcaagatggcgacgcattttttttcttgctatttgacgacagatacaatgctgatggagatggtgcatccctgcattcttcttccgaggagacattgataatatagttggcgttggaggaatgagcttttgttatacatcattatttatatacacataatatttttgcctttagaaaataagctatcatattcattataatggagacacaaaacatgaactctgttccttctgagctagaaa

SEQ ID NO: 131665 - DNA, 331 bp, Glycine max
  unsure (1)..(331): unsure at all n locations
gattactctctagcttctcgaatgcttagctagccactcatcttgcgatgccagggacttgtggaacctcaacaaggttttgtctcttccatgtaatcgaaacaaactactcaatagacttcaatccccccatgtacactccaataaaagatgcatcatgatgggtaaattcttcgatacccatcaagaactcatgtatccttcaaatgtggacattcaccacaaataaacgggatcacaacatcttacttccctctccagatgactacnattggaaccatgatgtcaaaaaagaaggaggaaattcatcttcactgacacatgatatagt

SEQ ID NO: 131666 - DNA, 384 bp, Glycine max
  unsure (1)..(384): unsure at all n locations
agcattatccatagatctgtcttgttggactagactcacaccaaacaacattattgtaacagcttacttaanaccaaaacttaatccgatgatccctcttgaaagacttaatttcaattctgcttcattcatagtctgggcaacaatacatttcccaatgttaaaatcacctaactgggcacacaaattgttgatcagaccaagatcatacaatatttaagctcttggaagaagcattgaacaaaaaaaacaatatctatttgatatgaaaattattacatcatgttgtcattagaaatccctaacactggtggttagcctgtcattacagaacaaaccctaacaatgatatgcttaccaaaccttggtatctctgcaaaagct

SEQ ID NO: 131667 - DNA, 478 bp, Glycine max
  unsure (1)..(478): unsure at all n locations
tggagaggatgctcaatggaggaaagaatgggtgttttttatggaggcgggagcacgaaattgaaggaagaaaaggggagagaagttgatctctgagttgagtctcacaagactctcattcatcaaagttacaacaagtgttacacatgcttctatttatagactatgtagcttccttgagaagctctcttgagaaaaattccttgagaagcttctttgagaaaacttccttgaatagctagagcttatctacacacacctntctcataactaagctcacttccttgagaagcgttcttaagaagattccttaggaagctagagcttatctacacatacctctctaatagctaagctcacctccttgagatgagaagcaagagcttagctacacacccgctataatagctaagcgtacccccatgacgaacaacatgaaaataacatagaataagcctctattactacgacaactcac

SEQ ID NO: 131668 - DNA, 182 bp, Glycine max
  unsure (1)..(182): unsure at all n locations
agctggcttctacaaccatacatatattattgcacattttantagnttttgntactacattaatttttgttgtcaccatatagtggcatttctcccaaatgagcaccatggttgtttcaacacaccgctttagtacgatgtcaatatttgatagacattaataaaaggaggtggtaaaaaaa

SEQ ID NO: 131669 - DNA, 283 bp, Glycine max
tgatcttatagatgaccatttcttatgtatccatagaagccattgcatcactcacccaatactacgaccagcctttgagatgtcttatcgtcggagacttccaattagtaccaaccattgaagaatttgaggaaattctatgatgtcctctcgtgggaagagaaccatatacttcctcctggtgtctcccctctatgagcataattgcaactgtgtgcaaggattcaatatgaggtttggaccgcataaaacatattcataacggcatagcgggcctaccaca

SEQ ID NO: 131670 - DNA, 226 bp, Glycine max
  unsure (1)..(226): unsure at all n locations
ctcaacattcagatacgagcggctcgtgatattatacgtctctantagacatccgagtaagaagtcattgtcagctgtagtggctcacagctccaacattcaacttctagcgtctcgatatatgaccagactacaccagacatcctcgccaaaagttattgtcgtctgcgacggacgacagcctcaacaatccatgtcgggcggcccgatatgagacgggactcaa

SEQ ID NO: 131671 - DNA, 216 bp, Glycine max
  unsure (1)..(216): unsure at all n locations
gcttctattttagatgaggcagagtgttttgcttttttctcangcactcctctaacgactatggcattattgctggcactaaactgctgggagaaggaagccatcttctccatttaatttctggcttcagcagtagtcttgtctccgagggctccaccactggcagcatctatcatacttctctccatattacttagaccttcataaaaatattgg

SEQ ID NO: 131672 - DNA, 428 bp, Glycine max
  unsure (1)..(428): unsure at all n locations
tcccgctnagcgaatatttggtcatgtgcttagctgatgttgtttatctcttaacgcttaacccttacattggaagctgacttggtccgctaagcccatttcaattcgatctgaattgggctaatcgactgcctgctcgctaatcgtgacatgtcacgactaagctcatctccttgcggccagaattgggtttcattgagctaagctaaactcatgctagctaatcacaatttctagcggtcatagcagcactaaacgatccataagtcactaagcgcctacccctctaaatcaagatgcattatattagctaagtcggcccagagccatgcttagngagagttgcatgtatttgttcttgagaactcgctaagcggccctatatgcacactaagacaagctctttctctgtgcataaataaataata

SEQ ID NO: 131673 - DNA, 309 bp, Glycine max
ctttttttcactttgtttattagacaattcatgcgaggaaacttccaaagaacatcgtacgaatgatctttttgattattttatttaaagatatgcggaatattttattattattttgcctttggtggttaaccgttgttactgcttgaacgatcagattaatttgctttaccatgattaacgagaatacacacagagacccggtgaaatcttttatcatttatgtgagagcaagggcttaacgatctgttaagcttgttataactgagaatagacccgatttgactaataatataaacccaaaacaga

SEQ ID NO: 131674 - DNA, 340 bp, Glycine max
tgcctaattaacctgaaatggagagagaacgattagtattcactcatattggtagtacttaatattattacctatactcaacagaaaatacttataacactacaaaataaccataaattggaagaggtagatacaatttacacaagttttatacacaaaagatagtcgtattcaccgactaacaactcccctaaatttacagttgtgcttgtcctcaagcaaaaagagaacaactcacttgtcctctagtgacaataacatgcagggactatgtacaaagtgtgatgcaacaaaagttagtgtattcatgataagagaatgaagtaaaatgccctgatca

SEQ ID NO: 131675 - DNA, 140 bp, Glycine max
ataccagagaggggaactgcggtactagcagctttgctaccagaacgagtcgggtgaactagaccggacgtgccacctgtgcattgcatatgccacatagcatcccatctcaacaaaaagtttaaaaaaggggacataaa

SEQ ID NO: 131676 - DNA, 218 bp, Glycine max
  unsure (1)..(218): unsure at all n locations
agctnttagccaatacaaacgtattttactttttactcggatggctgaatgaggcccgtcatatatcgagacgctcgaaaatgaatgttgaaactctgaacctattcatacgacaataactttttactcagatgtctgattgaggcccgtaatatatcgagaccctcgataatgatatgtgaatcttctgacccattcaaaccacaataacttattac

SEQ ID NO: 131677 - DNA, 271 bp, Glycine max
tgcagcattctactctcatataaatagtgggtcacttttgctaatcaatgtgatgaatagtcttctctcattccagagtattagaacacactttcactctatatatatatccacacttagatctataacaatagtggcagctgggcttattcaaaaacaacctttgtaattccaataacaatcatattaatcgtattttgaagggagaattcactaatatgatgcatggacacatattttatgtgcagcatcaacttccaacttacaacac

SEQ ID NO: 131678 - DNA, 466 bp, Glycine max
tcatacctcaaggacatcaaagaaccccgggaggacactattttgtgttatgaaataccaccttggacttaaatggctaaagaataacactttctaataatgtggacaacattctcatgcacatgataaatataacaaattcgcaaggtaaacttcaacttttatttattatcttcaatctttgagaggaatatcatctctttatttactatttttcttaatataatgtaatgcattgagaaacaacacaacaacatactttataagattgtgttgtgttgattaatctagcaagtctgcatactcgtctactattagaaagaataaaaacattccaaatttgacatgtgttgtttaatgaatatgccattgaagaagttgctcattatctaataaacacacttttaagttgttgcatggattaatgcacactaaacttattaggatgccaaaatattcatatgct

SEQ ID NO: 131679 - DNA, 268 bp, Glycine max
  unsure (1)..(268): unsure at all n locations
agctcgctctataagatgagatgtgaggctttttttccaattnatantaagaccaaaggtcgtccataatacttggcaactaaattaggattgatcttgggcagcatggatatatttctatgagacctaattatgagataaacctatattgtccatgtcgatttcttcccatatggccttaaaaattggataatgttaccaggaccctgctggagaagagcatgatatttacttcgttggcacacaagacatgctgctacaaaaataa

SEQ ID NO: 131680 - DNA, 386 bp, Glycine max
  unsure (1)..(386): unsure at all n locations
tcgatcacctaaggccaagctgcatggaggttcgggctttctattacatctgcctaaacataaggagggagagcgatctcccaattcaaattggaccccacatatgctaaattactttccaagtgatgtacataaaccctacctatagatgcttactangccggcctaggattcatttagtaggagtgggcccttcatgctacaacaaacgctgaaatttgtggtggaggggcaattaattatagtcttgggagaagaggacattcttgcgagatttccttcttctacatcttacaaggaggccgaggaggaatacttggagatgttctctcacaccttggaggtggtagcatgcttatgtggtagtctcctcagtactaccaccc

SEQ ID NO: 131681 - DNA, 344 bp, Glycine max
  unsure (1)..(344): unsure at all n locations
acacataaaactaagcttaaaaaccatgctcatatgtcattgatgttgttcacctatcacttggngggcgcacgtttaggcatgaatagcaagatagtgggggcaatgtggcatgccccattgcttcaggatgcaccctatgcttaaggccatcccctacaacccctcaattcaaaccaatcaagcatgagaacaaaccaaaattgccccacaaatatgagcatattcccacaatttagagcaccaaaagaaggccaaaatacaccaatggaaagctagaaagctcaaggatgagatacttacttgttggagtgagtaggagtaccaaanatgaaagcaaaatg

SEQ ID NO: 131682 - DNA, 392 bp, Glycine max
tgcatgttgctattgaagaaaataaatttatatatgtattgataaaataatgaaaacaaattcagcaaaatcatgtttggctgctaaaagttaaaacaaaaagaagtttaatccacatgtgttgaagcagaggaactacataagatttataaaagatattcgcatattcaagtgtcgtttgtgatatttctacacacagatataaaggaacaattacaaatatttggtatgttccatgcttcaatatttgattagatacataatagtatcaatcggtagagtttaagcttgaactaccctcacaatacaatttcaaagaaatggaatatgagaaaaacatatcattgaacaaaatacaacgtcttaatgtgaggaaatggagaaactacgat

SEQ ID NO: 131683 - DNA, 412 bp, Glycine max
  unsure (1)..(412): unsure at all n locations
ggatatactntccccaccaaaaataattatgagcctatgttgtntcccacatatcaacaaaaactaataaataaataaataaaatataataattttacaaaaataactctattaaataaaaaataataatattaatattagattatatatatatatatatatatatatatatatatatatatataagagtaatctatcacttgtgaggttaaaggatatcagaaaacatgtatataaaaaattgtataattttaaacttttcactacatgaatttgggatttgtctcgaaaagggatagagtacaaggaagaatattttatattttactcaaagcgggagatcgttgtgttctgggtgcgtttacattggtgtaattgatggaaaaaaacactttcacatggattatacata

SEQ ID NO: 131684 - DNA, 266 bp, Glycine max
  unsure (1)..(266): unsure at all n locations
accaatagcaccgctgctgcagcttgatgctcattggagagggtattatacactagatgatgcgctccatgagaggttgcatctaatggagaatagtgatcataatgaagaggagaggaggagacgagggaatgatgttgttcctanacaaaaccgagatgatggtattaaactcaacattcctccatttaaaggaaagaatgatccggaggcctacttgtagtgggagatgataatagagctatgtttctcatgcaacaactatg

SEQ ID NO: 131685 - DNA, 382 bp, Glycine max
  unsure (1)..(382): unsure at all n locations
taaccttagaaagcctctccttttctattgnctatatatccaggggaagaaggaagcttctcctcacgaaacaatggggaagatgttcatcaagattgtcagcaccatcatcaacaaagcctacttcatgactattgtcaggaccatccggtgcttgcaatagcaatgcctccacttatcaacaacacaccaagagaaaacgaaaccttcctggaaccccangctaatattcaactaccccaactccatttttttgttctatatccgtaattacagtcgaacgaacacaatatttcatgtatgaaaagatgattttgctttgaaagataatgattattgctgcctacttggcaaaactacctcgaggtgtccttgcttgcta

SEQ ID NO: 131686 - DNA, 195 bp, Glycine max
  unsure (1)..(195): unsure at all n locations
ccaatacttngacaacattttacagagatgaaagactcgggaatacgtatgctatgcatggaaaatgtaatcatgagattgagatgcctgaggtgtcatcatgatttttttgagcttccaccgagtaaacttcgcatagaagttggatgtgattgtctatgggtcaaaataattgtgcttgtgctcgcaccatgg

SEQ ID NO: 131687 - DNA, 311 bp, Glycine max
agcttgatcgaagcctcaacatttattgtttcttttctccaacacctacatctcgccctcatgatccagatgtacccattcagaccatcgtgaggcaataatcacagttacttaatcatgatgtgaggccacttaaccctacttagaggatggattacctagatggtgatcaataaacacaagcccgtggtccatagcccaacaatgttggtataaaaatgggaggaccccaagataacactctttttcattgatgcacattattattcgtattactactctttgtgaatcctacttgacatggtagcctt

SEQ ID NO: 131688 - DNA, 418 bp, Glycine max
tcctgcaaccctccttccattatgttaatcacacctcgtagccatagtttgagtgggaaagtctcactctagcacaatgattttgttgtctcttgagactagttgcactctcggctctattgcattccctttcttgctctcatgaaggttccttatccttaatgaatctctgcagctaccccttctaaatcaaattttctattttttccttgaggttaatgcattctttagtgttttgatcaatgactcagtgataacgacaatatttggacttggctactcctagtggaggtctacttttagacgacaactgaattatctctacactgtgagggtgctctagcaatcgacttcaactctccattagtgtagtggactggctatacttggactgaggtggctatctactcttggactt

SEQ ID NO: 131689 - DNA, 270 bp, Glycine max
ctgacacactgcaccgaataacaaatagaaattggaactatgattcgaagactaaagtggttatgatgccataggcaagctctatgaggatatatagaagaggacccacctcccatatattatgatatatatgtcctccctctcagaaaaattagtgttctcttatccggcacaattaatatatagattaacaatcattgttgatgaaattaatcttatatcatgagtatactacttataattgttgtattaatcttactatatttgtga

SEQ ID NO: 131690 - DNA, 343 bp, Glycine max
  unsure (1)..(343): unsure at all n locations
tccgccgtaagcctctggctaacggcgtttctttatttatttattttgacgctgngacttgtatccaaggttagtttatgctttgattaaagaaggaaaaaaaaaaataagtgcagaaggctgaagcttttattttatctgttgtcggagtgaatagcggttaataaaaatcacatgatatagtttctcgcgattccgtcttgctcccttgattctgattttgacttgctagtatggggaggtgagacatctnttccaaacgtgtgacatgacgattggacttttgataattaccgcttcttttctgagacatgcttatccaaatggtgattacggctgcata

SEQ ID NO: 131691 - DNA, 187 bp, Glycine max
  unsure (1)..(187): unsure at all n locations
agctngctcaagcagganaaagattgtggtgtntactgaggataaagagaagactactatcaatattgngtataatacaatgatttcgtcgttntaacattggcttaagcatgattaatacttctcatgatgtctgacatcaatatacaataggttgtgtgcttatagntactaagaaaaggaatga

SEQ ID NO: 131692 - DNA, 412 bp, Glycine max
  unsure (1)..(412): unsure at all n locations
acatgcctacctcacttgaatgtcntttgtatagagtggggaattatgtgttgcatcttagtctctatttttttcatatgtgcatcatgcttcatcatgtaggagtaagaagaaattgtctaatttctttagtgcataaaactctttgttttaatagattacaagctaaccataatcgattacacaagtgtttttagcttgcaaagaagtttttcgtatcggtttaatcgattacaagctaatcataatcgattacacagtttagttgagacaatgatttggtttttaggagtctctgctntaatccattaccaggtgatcgtagaggggattgataaatattggttatcaaaagttgtgatacgatcttggnaagaagttnntttttactctgattttaaagttgatttga

SEQ ID NO: 131693 - DNA, 423 bp, Glycine max
  unsure (1)..(423): unsure at all n locations
ctcagcttctgaggaagctattgtgaagatgctatcctgctatganaggcgctgcaaactgggtacccaccaatcatacttccactgttgccacatggatgggtaaatttctgtatgctgttggaaccatacccaaatttaattgtggaaactatatttatgatcaaactgtgtagcattcagaatcttttgcttgcaaatgacccattgccttcccaactgtattgtgtggcattatgttgagtcaacatcccaatatattaaacaacattgactctgtgatgaagagagaatcgggtcttgccctgcattacaaactgtttgaggggacacatgttccatacattgtctcgacatcatggatagctgttgcttctggtgctgtgatcaaagatgctttgattgctgaactcaatgacacat

SEQ ID NO: 131694 - DNA, 374 bp, Glycine max
  unsure (1)..(374): unsure at all n locations
agcttaaccatcaagagcaaaagctaaactttgcttaaccactcaagatagaagcaaccgatgcttaatcatccatggaagaagctaaaatagtactaaaccaccatggacaaaagcaaacagaggaatagtgcttaaccaccacacatggcagaagctacaatcatcaaactagtctaagaggctaaaaacaataagccagaacaggccaaatatcaatgaaacaatgaaatgattaatcaccaaacaggtgtggtgcagctttctgaaatagtgcaggacttcaaacagtcgcaatatatcttcaaatcttcagaatcatttaatcaaacacctcgtangaaaaaatgggcaatgctagacatggagagaac

SEQ ID NO: 131695 - DNA, 417 bp, Glycine max
  unsure (1)..(417): unsure at all n locations
ggacctataaaactcagcttgttggttgattagacaaatactttctctgtattatntaaattacaatggccaattttaaaaaatacacattttttcctaaaagttaacatattttagtgtaaacaagtctgttaatagctataaactactatggatgtaccttctaagttcttacaatatttttcttttttccagcttcaaggccactgacaaatgtagagagaaagaaatgaatgtggtgaaatgttaccgcagaagtgaactaacatatagatgaccgatccattaacatgatcaaaataaccaagtcagtaatcacaaattntagtggaattgtagttgacatgattggacatcacaactcctggaataactatagttaaactttatactctatatgggatgattatatactta

SEQ ID NO: 131696 - DNA, 151 bp, Glycine max
  unsure (1)..(151): unsure at all n locations
agctcgctcatagcatggataattatttgtgtatntattgagganaaagaggagactactatcattatttcgtataatacaatgattgtgtcggtataacattggctcaagcatgatcaatacttctcatgttgtctgacatcaatataca

SEQ ID NO: 131697 - DNA, 272 bp, Glycine max
cctgctacacctgggcccctacgacgagcttgatattctgctctaagcatctaccactgagatgcagcgacatcttcctaaaaggagaacgagaattaagacatgagaaggttttcttgaacacgcattccctctctgcccatctactcatcatacctcattctcaccgagctaacctccatggagccatcatctcgtgggcataaccttccactgttctcaagctacctttgaattggacacccccgggtcataggactctgcctgcacct

SEQ ID NO: 131698 - DNA, 357 bp, Glycine max
  unsure (1)..(357): unsure at all n locations
cttagtcacaccttaattatttttcaactcccgtcacaatgagatatactcaagagaaaatcgccggctgcatttccgcttgattttactaaaaggcataatctnggtattatattattatttcatctctttttgatttccaatgtggttacggaacgaccgaccggacggaatctattttaaccaaagtttacggatcatacaattcaaaccgtctggtggaaacttattttattcttaacgtaagcgagaaattactctaagaaaatggcttaagcatgtcaacacggggtatataatgttaatgaaatgagaataaatataccctaaacacatagtcgaccaccacgggtacat

SEQ ID NO: 131699 - DNA, 254 bp, Glycine max
  unsure (1)..(254): unsure at all n locations
agctnggactgtgctagagagaaaaacatttgactctaagtgaaccaagagccatttctagggcaaaattgggtgttgaggagtcaaattctgattcggtggaaatttaggtgtaaatctagtttgagcaagtttagattgatgttatagactcgtgtgaggtgagagtttgctccaaaattacctcattctcaatttcgcttttcaaaccttgaaaatccattaaaatgaggggttttggacacctagatttt

SEQ ID NO: 131700 - DNA, 389 bp, Glycine max
aaaactcagctatgctgaaatatttacatagacctcctcaacctcatcagctttatcaaccacagcagagcaattatgacctctctagcaacagatacaaccctggatggaggaatcaccctaacctcagatggtccagccctcagcaacaacaacagcagcctgctccttccttccaaaatgttgttggcccaagcagaccatacattcctgcaccaatccaacaacagctacaacccctgaaacagccaacagttttaggccacattatgtccaataagggtattgaagtacatcctgcacaaatttctgttatttcacaattgccttaaccctcctgtgtgcgagaggtgagatcttttcttggtcatgcacgattctacaggcgc

SEQ ID NO: 131701 - DNA, 342 bp, Glycine max
ctctctagtcgagctgcatgcttgcacgctttgaatggtcatggataatgatttagtctttgtttcgaccttgatgttgatttcacttgatggtaagctttgtgctcgctttgcatttttggaaacgattgaaaaaccgagttggtcgaagatttctagaagctactattttggccgatgaattccgattgtttaattctttttcaactgtattatcactcctttgttgcaatgattatctcctcaagatggaagtgtttcaacaccccaagcttgcgggggatattagagatcttatagatatgttagtagttaccagtatctacgttgcccaactttact

SEQ ID NO: 131702 - DNA, 450 bp, Glycine max
  unsure (1)..(450): unsure at all n locations
tactcagcttccaggcgcgctcttagcattaagcacaaatcctcaccttgttatgcaaagtctagaagccagctcttagggatctagatgtgaatgacagaattcggagtaagtgatgtagtgctccccaggctccaagtttatcggggtcttcaggaaggtgttgaaagtctcagcatcaaactttataagcttgtagcggngacttatcctctagatcatataatttagcatagaattccttgaccagggccacatcattgtgaccatcaggctgcctggtcaaggccttatgccagttcctctgcttgagctccctgcgaaactcatcatactttatggcgtataaaatgacgttcctctccagaaggatgtcccgagagtaaatgttctgtgcatattctctctangcgccctcagatatgaatctactgggtatcataggctctc

SEQ ID NO: 131703 - DNA, 190 bp, Glycine max
tctctctccatctcgccaaaaggcccattcgtgagacgcagacatcaattccaatacgccatgaaatcccttctggacgacggttgaatctctattaccctcgcacttcccacagggtagatggttatttcttctttgctcctccttaaatgaaaatacaattttcaacttggattctgggcataacatt

SEQ ID NO: 131704 - DNA, 361 bp, Glycine max
  unsure (1)..(361): unsure at all n locations
ttgagattgatcataattctataaccacaacttaattatttaacatcccaatagtttaaattaatgaataaatccaaatacacgttcttcacttattcaaggattatcggatcatcactattagaaaatatgctttctacatcggttatttatgactttcaacatcggtttttcaaccgatgttgaaagtaccgacgttgataatattatcgttaacatcggtttttgaaaaaccgatgttaacgtaaaattaccaacatcggttatataaataaccgatgttgctaatatgaattacacccagaaaatgaatattaatgttgaaagttaacatcggnttttacaaaaaaccgatgttaac

SEQ ID NO: 131705 - DNA, 454 bp, Glycine max
  unsure (1)..(454): unsure at all n locations
taaggtaggggataacttatcagacatactntgtcatattatttgaaaatatcatattcctaggacaataatgaatatcaattcatattgatctactattcagattatgacaggagtcataaatggagttaaaataaatatcaaatcttatttgaacttaatgtattgttcttgttctcttcagaggacctagaacaatttcatacaaactggaaacttgataattaaatgagatgaagctcaattactccaaaaatgaaaaagtattggtgtcatgcccatatctgataccaatatgtgtacaatactcctagatatgtatccaagaactatcctgcttttgtttntttggtcttaatttattaactgatacgtttgagaacaactcacatactttgataagacttcattacacacgctctatcttgtctcaatatcttaaagcatagtaata

SEQ ID NO: 131706 - DNA, 384 bp, Glycine max
cttggcttgagtcatcaaaagactatatgcacggtatgatttataatgcgagatcaatcatctgtctttcaatcatttcgtaaacatcgtgcaatatctctcaactctttctgcaaagtgttgagattctttatctttccatctttctgaaagtggttgttgaaaactttctcttccaaggatagatcttcgaacaaagacttgagctattcatcaattacagagtctgctaccattgccactagaaccaaggactaaccgcttgaattcttttgtggctctgttctctcttactatggattcataggactcaccgcctgagaagcgcgttgaccttccctctcccttcagcataagatggctacggactaaccgcgtgagatc

SEQ ID NO: 131707 - DNA, 250 bp, Glycine max
agcttcagaaaactatatatgattatgcttctgcgaccgccttcaatacagctagggaagcggaaccggtgctatagtccgcaataaacttaggccgagatagaaacacgatggtgttcggtcggaagtatagtcctcaagcatacccttatggcttgcctccagacttcactccccgtaccgctccggacgaattgaaccaagcctctacctttgaggggcaacttccttcctgtgccgattatcccct

SEQ ID NO: 131708 - DNA, 358 bp, Glycine max
tcctcggggccatttcctatgattacaaacatttggaatgttagtctacaggataatgcttattttaacacaaaaatgatatgctaatctttccgatttagaacaaactcatgcacacattaatgtagcacatttatgaacatgcgtatgtgtaaaatatgctactatttatgtcaacatacaaggacattcaacacattctagttaccacacacacacacacacacacacacacacacatatatatatatatatatatatatatatatatatatatacatctttgaaaagaaagaacacacattctcgtgctcaaggcattgtgtcaaaattacacctaaacacaatctaaatattc

SEQ ID NO: 131709 - DNA, 254 bp, Glycine max
agcttataataagacataccagcattttattgattcagtctaaggaccacaatattgggcccagacacagtatacacaccctgttccaccacataaaaaggtccaaagaggaaggccaaagaacaatagaaggagatctgtatatgaggacaatgtcacaggacaagctaaagaggaaattggctgagtttacatgtggaaggtgtggccaaaccaatcataacattagaagcttgaaaaatattggagttctg

SEQ ID NO: 131710 - DNA, 412 bp, Glycine max
  unsure (1)..(412): unsure at all n locations
ntccggatttggtcttcgccagtgaaaggatcgatgtgtgttcgtataaaggcaaatttagtcatcctgcttggacgaatgagaaaactggggcaaatgaagagggtgagaaagagggagaaacccatgctgtgactgccattcctatacggccaagtttcccaccaacccaacaatgtcattactcagccaataacaaacctcctccttacccaccgcccagttatccacaaaggccatccctaaatcaaccacaaagtctgtctaccgcacttccaatgacgaacaccacctttagcaaaaccaaaaacaccaaccaaaaatgaattttgcagcgagaaagcctgtagaattcaccccaattccagtgtcctatgctgacttgctcccatatctactngataattcaatg

SEQ ID NO: 131711 - DNA, 319 bp, Glycine max
tcagagtcacctgaggcatgcaagcttccatgtattgccaatgggtatcttttatttttttctatatggcttcaaatatttttatgtaggctcttggcattgggccgctgaagttgttggaagagacataaaaatgactaaactgggaaatccatgcttggtctttaaactggcaatgggaccgtacaacttgttggctcgcaaaacacaatacttcagttcttgtaaagtttgaagccaatggggaaagacatcctttatttgattgttccaagatctaacacctccagactagtggcaatggacaaagaatctggca

SEQ ID NO: 131712 - DNA, 367 bp, Glycine max
  unsure (1)..(367): unsure at all n locations
tactcagcttacaatcacttcaacaaccaaaggaagagtgcatttctctatatgtagatttgccaagaggcaaacgctggaatgtgcaagtgtctctgcttaatttgttggttggggggggaaaaaaggcacgcgacgctntaagctttaagcttttaatgaagtcactgccctagtgccctttcagcaaaggcacaatagatttcattccgtttacttcttttgtggggttgcaggttgcatggttaacaaaatgaccgaccacggaactttcaatttcttaagatcacacatttttctttcctcaagatgaaggaaggcaaaagtaatctatttagagtacatttacgaaataacaattaaataa

SEQ ID NO: 131713 - DNA, 426 bp, Glycine max
  unsure (1)..(426): unsure at all n locations
agcttanacatatacaataacactgtctgttcaaccatgaattccttcttaataatcatgctatcatggaacttattggtcttttctttgtaaaacgtggcattctcgtaggtctagtgatcaatctccactggatctcatctaactcactcagtagcaactttttttcctcaccatcttgatccatagagaagttgtatgtcttcactgcccagtatgctttgtgttcaatctccactggaagatgacattgcctttccaaagacaacccgataaggagacatttctatggtgctttgttggctgcctattggcccaagaacatatctagcctggactccatctttctgcttggctgccaatttctctaaatcttttgacttcctgtaacatattagttgtcattgtcgggggtgatgggtgaaa

SEQ ID NO: 131714 - DNA, 251 bp, Glycine max
  unsure (1)..(251): unsure at all n locations
agctagctgtatctcttattataggaattatattatggatgcacgttattgagtgtatttaaatgtgcctgccatcatctgccattgtcttaacattcatgcaggacattctntaatactttcttacatggattcgttttgcataaattggcatcctattatattgtgctacacaagcatctacttttatggtatttgctgttaatacttcattactaaagagatctaacaatattctggtgatctagttg

SEQ ID NO: 131715 - DNA, 482 bp, Glycine max
ttagatactcaagctggcgcattcctgcattctactaatatatggaattgcccattgctttgtctgagaataacaatcgagtgaccacaacagcgctgggggcggcaacggacaatggtctttcaaataaacctgtcgtacatgaacaaacattatattatgcgctgaccgtgccaaactaactcagcgaacgcaatgcataattgttacactcactatgtccaatgtacctgaacaatatgatttccaaacacgtgaccgacacatatgacgcggcggccacaacagtcaagtggcggttgacttcctacacgggaaaatgacctgccttggtgctgtgacaaccatacaatgattacctataccgtaatgactcacatattccatggctgtatattcatacaattgtcacacttactcaatgagccaacaacgcacgtacgcatttaccacttgtataaaaaatttacctaaaacaacct

SEQ ID NO: 131716 - DNA, 338 bp, Glycine max
  unsure (1)..(338): unsure at all n locations
cgcttcacncgcagatgcaatctcagggtcttgcttttcttctgagcctctggttggtccctccggtcctcgagtgagcacaaaggggacttgtgttgatccctcaggaaacgatcctgagacgggtgactctaataggtgcggcttgtacatagaagcaaatcctacccgcctggttgccatggggagagtttatgagggatccactgttgctcataacattcctttgttgcctggccaagtaaaggtgagtgtggaggagcttacagatgcagatgctccagttcctgtacccactgatgagggttccttaatgggacaggcatttcacaccttcc

SEQ ID NO: 131717 - DNA, 446 bp, Glycine max
tgaccaaacgtctattttttaatgtactcgtgtcaactcaaaatagagacatgagaaaatctccatggccatattaataacttcaactagctagtatgtcattggtatgctgaatgctaatgaaaaaattactgatgaaaagcatgaggtggtgattttatcttcactaccaaggtcctacaaatctttggtttaaatgttgcttttacggatgataatgcttaaggtggatgaggtgaccaaccctctaaaagagaatgaaagaatgatgagaaatgagaatagtgataataaaggtcatgcagtgattatgcaagaagtcaaatatataaatgaaggatcactcatggaaattagatggaccgagagacagatcaaaatattattgttcttcaatgagatatgagtaacgtgcaatgttactatggtggggaaaagggcacatg

SEQ ID NO: 131718 - DNA, 417 bp, Glycine max
  unsure (1)..(417): unsure at all n locations
gaatacacaagctnccacaataaccaagcaatgcaagcccaactattatgattctaccctgaaccgagaaaacagagtagaagcagataactctgcccaaaacacattcaaataccacaactttccctactcaaataccccagtaacattctctttatttcgattcgttaaccattggatcaactcgaaaattgtactggaggttcctagtacataactctacattttgaccggtgggatctgctagaaaatgtctaacactcaatatgtactacctttcccataaccagcaatgcacaagcattttctgcacatgttgataaattttggtgcacaaatcaacaacatttttctgcatagggcagaattcgaaatccatcttgcccacatccaattttgctcaaattggatcttaca

SEQ ID NO: 131719 - DNA, 331 bp, Glycine max
agccttgagttgtggctggaccgataattttgcttgttcgccggcacatcatctattttattctcctaaattagttgctcgataaaatgtctcaactgacgtatctaccacattctagctctccatgattgtttcttgttctatcaagctctatgacctcgcgctgagcttgtatataattatctgcatcttgagttatctcatcggatccataaaaatgctacactattgagtaacctccttgtggttagtctttctgatctattctgggtggtcaccctggtaggaggttaattacctcttggcctttaatttaaacataatatgcttt

SEQ ID NO: 131720 - DNA, 311 bp, Glycine max
  unsure (1)..(311): unsure at all n locations
gagctagagtattggctgtgcncttagtgttagatactaattgtgataagcttgggaacaagactgcgaggtcactaaccatataacttaaacacccgctttatgtccaaacaatatataaactcagtattatggacattagacctcactcattcaaacaagcggcttatatcaccttcgggtgttatatatacaacatcttttgaaacgcaatatattctacgctatatattgaatattacgcattgttgcaatagaaatcaattcattaaacacacccacgttatatttctttacatctatatcataaa

SEQ ID NO: 131721 - DNA, 413 bp, Glycine max
tgagatgaggaagtgttgaagggtgaaacttcctgcttttattgttgaccatagagtggtacctggagatatgtcgcgggggtcatgagacctcggggacgtcaggtggggtgctattgcccaaaaccaagcttgaccaattccgacccaacccgggcataattggtcagtgagaacctgtgatgtacctaaacaggcgagctcctggccgtcaacagataaaaggaacaaagaccacaaagcaaggaggcttgtggtggctggccagctgtgaactttgattgatatgtgggttatggcctctggtaatcgactcactagggtgggatatcgattacaaagcttaaaaatgaacacagggggcttatatggtctctggtaatcgatctccacgggatgtaatcgattaccac

SEQ ID NO: 131722 - DNA, 221 bp, Glycine max
agctcgcattaccttaactaggttatctatccttcctaagacggagccaaacccagatcctctcattaaaaactagctcctttcttcctctatggtctttatatgaacacacctttgtttggtactctatttgggtcctaaccttctcatgcaactaatttacaaactgctacctagattccccttcttatgtataaaagaagtgtatgtgggaggggaat

SEQ ID NO: 131723 - DNA, 428 bp, Glycine max
  unsure (1)..(428): unsure at all n locations
ntactatgcagtgaatatccaaggaaaataccttcatctttcttagcatcaaattttcctaagttatcttttccattattcaatacaaaacatttacaaccaaagatatgaagatgtgagatgtttggttttctgccattgaacaattcatatggagttttctttaagatgggtcttattaaagccctatttaaaatgtagcatgcagtgttaacggcttcagcccaaaaatattttggaagaggagtatcatttaataaagttctagcaatctcttccaaagatctatttttcctttcaacaacaccattntgttgaggggttcttggtgcagaaaagttatgctcaatcccatgcttatncacaaataattcaaattctttattttcaaactcacccncatgatcactcctaatagatataaatct

SEQ ID NO: 131724 - DNA, 230 bp, Glycine max
  unsure (1)..(230): unsure at all n locations
agcttgaacgaacgtaatactcttcttcttcaacctttgngattcttgactccatttcattgaagcgcatatccatttgcaattccaaagtgtcaaacctttcaccaacaaaggtttgaagaccatcaaacctattcataatcttcgaaagaagagatgaatcttctccctcttgtccttcttcaccaacatttctagcacccttcttcaaccaagagccatcatgctcc

SEQ ID NO: 131725 - DNA, 307 bp, Glycine max
tgcagcatgcaagctgtaaaaagttattacagtttcatttgcaatggacgcgcgatggaatataaatactatatcttaagatatacacatgtcgatggcatccttaggacttcatgcagctgatgtttgtcgccagtttcatcatccaccacccttaccttctgtggcttctcacgtttaattgttggtaaacccatatttatgtcttcttcccttcatgtcttggtatatcacacctttagccgaatctcctatttttatcataatggaatctcgtgtttaatatgcaagacccactttatgggct

SEQ ID NO: 131726 - DNA, 350 bp, Glycine max
gaccctgaaactcaagctgccacgaaagctagaccctagacagtagaccattttatttctcagagagaatcacatgcacgcgtggccctctttctctggattgggaacccgtcgtccttcgcaagaaggctcccaccgctgccgctaagaacgacgagaaagccgtcaacgccgcccaatgctctggcttgaatcaaaaccctaaaaagcatttgtcgcccaacccctatcgaatcgaccactaattgctgtcttcactatcgctgtaaatgtcggctagcacagccaacctttggagtgtcatgtcgaagagtttggcggtataattgctacggatagtatatacgatc

SEQ ID NO: 131727 - DNA, 277 bp, Glycine max
agcttaaagtatgcccgagtcattcattctctatgtgatgttgttgaagtattggcgatcagaattgccattccttggattatagggttgaaccaagctcatgcttttacaaaaaggttcatcaagtcaagttgaaatatggaagtaaccatcctgcaaaattggggcaaaagatgaattgagtcacatcactgcttcgtctactgccaaacatatttaggattgttgatgtccttggtactttcagtttcaccttgacaaagatggtatggaccat

SEQ ID NO: 131728 - DNA, 397 bp, Glycine max
  unsure (1)..(397): unsure at all n locations
ggacctcagaaactcaagcttntaanatattacgaaaatgngatgtacacgattcttatttctcatccaacaactnctntacttgaggaataaactcaagcccaagaggtgtggcaatgctagcaagtgcctttctacaaaagagaaaatgtggaggttgtctaacagggaaagattctttaatgattgtctttattgtaaaatgagtttccctcttagctaaactcttggaggagacacttacctccttacacttctctttaaccactaattggtagccttcttcttggggggagaacacttcactacatacttcccctcttgctgtttcactctcactagacgaaggagaagtagtagcctcctcgtggctactataaatggcttaacccctcat

SEQ ID NO: 131729 - DNA, 346 bp, Glycine max
  unsure (1)..(346): unsure at all n locations
agcttgngaagcaatgctgctgccaatattatcctgcanaatatgtcgggaagctatgcaaaccaaccatattatgcaaaaagctctaacaacaatgccggtgctgtctttccatcagatggaacaatgggcatggcttgatgatttctgcaaatggagtggcttaagaagaggtgtgaaccatggtgacaaccaatttatgtatcccaactatggttcatggggaaatattcacaactttagcaatggccaacgaaattggaacatgagatctcggaacaactcgaatactaatcttcctcggactacttctacttataatcccagcgcaataactttcaactga

SEQ ID NO: 131730 - DNA, 457 bp, Glycine max
  unsure (1)..(457): unsure at all n locations
tgacaagaanactcaaggaccgcatgtcgcttgggacttgatgttgcatgggatgtttccgaaccagtataatcacttgtgcttgactccttctatcctacactctttaattcacactgtgcactataattaacactcttacttttggataaaataatatctatgatctttactatcttaacagttatagcaaaatcctacgaagggtaaatttttaattagtaaaggtgcacaaataattaatctaaaccccccttcttaattattccgaggccacttgatccaacaacttaggctataaatagaggtcatgtgtgtgcattttttcaacattgagcatttgaaaactaaactatcaaattcagagatctctagagcacaaaatttcgagctcttctatatctctcccttcattcaaatccttcttcctccaagctcttatccatggcactctatg

SEQ ID NO: 131731 - DNA, 282 bp, Glycine max
gggagcatgtaattatatgctccagcttgaggggaggggtgttatattaatatggtttgtcttgggcatggtgtattaactttcttattttgcactctttctctgctatacaaagggctggaaactgcacccatacttgcaatgcacttgtttcttctttaatatatattcaatagtctcacctgagggagacaaggtgagtgctccaacatataggtcatagtttaactagattagccaagcaataacttatccaggggtgcaaccagcaaatttattcac

SEQ ID NO: 131732 - DNA, 237 bp, Glycine max
agctttgtccacaagaatatcactattaattcgtttaaggtccaacgccttaaacgatcctctttgcttttatcggttaacatggaccgttcaaaagcataaaatcaacatgtaactttaccgcttttgcaataactacgtaggtctgatattcttttcgatggaggatacgtaagagcaaaagccccgcttttgccaacctcgtgagatggttagaggtccaatgccttagctttc

SEQ ID NO: 131733 - DNA, 343 bp, Glycine max
tacttgctgcggatagcttcttttagaccgttatatttcttacatgagacccattcctgaactcgtgggcttgactcctggtcattacccacaggatctttgatgcgattttgcccttcagaccgtcgcacctccgagtctcgtcttctttggacgtcgccgtctgtgctcggaggaaaatactcctccgacgggtctgcttctagtggactaccttcaatcgccatttgcatccttgctcactgtcactatcggcggaacttatttccaagatgtagcatgtttcttcagctatatgcacatagtattcaacctccataatccatgcagaaaccttgtgctg

SEQ ID NO: 131734 - DNA, 264 bp, Glycine max
gcagcaagcttaaggaggaaagaaatataatgttggctctaaattgacggacgacaagagggagagatgctaaactttgaagtatgccttacagtactctcattcaccaaagtacaacaagtgtgacacatgcttctatttatagcctcgggtgcgttctggagaagcttccttgagaaggtttcatgagaagctgtcttgagaaacttcctagagacgcatgaacttacttaccacacccgtccagtacctagtgcacctttt

SEQ ID NO: 131735 - DNA, 433 bp, Glycine max
  unsure (1)..(433): unsure at all n locations
tcagaccaaagcaactcanaatctaggcatctaatacccctcaatttagtggattttcaaggtttgagaagtgaaaatgagaatggggtaaatttggagcaaactctcacctcaaaaaagtctatatcatcaatctaaacttgctcaaactggttttacgaagaaaactctaccgaatcaaaatttgactcctcaacacccaatttttaccctagaaatggctcttgcctttactttggtcatttgtttttctctcttgcactgcccaagctttctcataagtcctagatgacatttcaaactaggatttactcactttaacctctatttaccactgaatcccattttagccttccaactctcaaagcctcactctttntctactcataacactacattctcactttctaaccctangttaactctacccttc

SEQ ID NO: 131736 - DNA, 181 bp, Glycine max
cttgataaaatgcctatacgagcacagattgcaccattattagcactaagtgactgactcggaggacgacataactggtacttaaccaaatatatgaggcaatcaaagtcttcaaagatataattgatgcatctatctttgaaataggcaacaataggtactagtttttcgccaggtcgct

SEQ ID NO: 131737 - DNA, 454 bp, Glycine max
  unsure (1)..(454): unsure at all n locations
ntaaaagtgtgagcataagaagtaactaaactaacgttgtgttggatggntaaaaaagaggaaaaggtctcgagttgtactaacaaaaaactaatcaactaacaattaatatttaccaataaaaaaacaaaaaagtaacaagagaacgtactagtacttatgtcatttagcttccatttatgccctaaagactgcgccacgaacttaaatgggaacttttgctccgaggatattcttctggaatacttgctgtacacacaaaaatctctgtggggagaaatcatatacccgggcgatgtccccaactgggtcatcggaaactntgaccccataattnttttttcggtattcaagattcaaacttgagaagaagcatcaaggaaatgattacaacagataaagaggatgagacttgagagagaaaatgatntgaagagatcatcaattcatactt

SEQ ID NO: 131738 - DNA, 308 bp, Glycine max
  unsure (1)..(308): unsure at all n locations
agctttctataaattnttcactgtttaatctattacaggntnnctggaattgattacatagttatatntttgaagggtcatgactcttcaaagtgttttctgaagtgtcgttactggtaatcgattataaacatctggtaatcgattacaagattcaaaatttaaatttcaaaacccttttgaaaagcttatttcctaatttgtctctggtgatcgattacacttgcctggaatcgattactagtgtctttgatctcttggaaacaatttattttgaggccaaaaccaatcaacttgtgagatatttg

SEQ ID NO: 131739 - DNA, 425 bp, Glycine max
  unsure (1)..(425): unsure at all n locations
ntacagcagaatttagtaatgacccactaaccaagaatttttataacttaatgccattaacctagggaattaaaaaaaaacttaatggctgagtgtaactgaaattgtggcaaccaaaagtcacccccaacaaccaacaagttagccaccatttggtctcccaaaaggctgatgcctaggttgccaattgggcccttattacaacttgaactaaacctaactaaagcccttttagttgattaacccaaaacatatttttggtcagccaactttacaaggattgggccattatttagacaaactaaacactctaaaattgaaacaaagtggtgtcatttagtcctcctccatttgggccatgatacaactcacaaccttggacttttctccttgaaacttgggcttgtattcaaacagtatggaca

SEQ ID NO: 131740 - DNA, 310 bp, Glycine max
  unsure (1)..(310): unsure at all n locations
agctntagtgaagatattcactcgttgttatacaacatacactgtgactatgaacctacacataaacattcattgtcttattgtaaagaactcgttataaatgtctatataactccccagaataacttgattatcttaagaaacatgactaagggctaacattgtatatttgtttgtaagacaattaagagcccgtcattgtgcacacaaataacaaatgtgttcgaattatataaaggctaataagattgtctattcattctgaagaagattaaacgctagccattgtacaaacaaacaacaaattcat

SEQ ID NO: 131741 - DNA, 330 bp, Glycine max
tgaagaggatgctctaatggggctttttatagagagaatgttggagcacgaaatcgaatgaattaaagagggagagaagtggaaattcgaagtgtatctcataagactttcattcatcagaggtaccacaagtgtcacacaagcttctatatatagactacgtagcttgcttgagaagctttcttaatgaaacttccttgagaagctttcttaagaaaacttccttgagagagctttttgagaaaacttccttgagaagctagagtttagctacacacatccatctaaaaaccaagcataccttcttgagacgcttgcttgagaagctag

SEQ ID NO: 131742 - DNA, 300 bp, Glycine max
  unsure (1)..(300): unsure at all n locations
agctntgcanaagatgatagggaagattcttaagatcgcaaaaacgaatgtgtgaatttgtaatacatttgctagttatatttacccttatctcaagatcgtaaagtgataccgttgtcttcattctgcagaagttctgttgatgcttaagagaaaaatggggtaacgaaaatgacttatcatgtttaagcacctctccaatacaaagaagttctctttcttgaaattattttctactcttttcttcattcttatcagtggaacttcttgttgttatccaaagcaagggttttttctctc

SEQ ID NO: 131743 - DNA, 432 bp, Glycine max
ctgagctgctctaaatacactgatgtttatgtgaagaggccgtatgacattcttgctataagagtagagccctactggttaacctcactatacacatgctggccttcacaagagatggccccgacgaaaccagcctcgaacagaccatgaaggaccgagccgccgaaaggactagctccgctccggagaatgacagccccctgtctatgagcgctgtacgccaacagctctttgacgacatctaagaatggttatatctacggagcgaatacatcatcatgtggacggctacatgtctgataacacgtaagaaatgatgctccgtctataagtgaccctgagttgaaacaactgtgagtaatttctacaatatattcacaattctgtattgcattatactcctcaactttagtatataataagacatcccaa

SEQ ID NO: 131744 - DNA, 288 bp, Glycine max
agctcaagcaagacgtgaccatacctttgtgtatgcctcactaaagagaaccgagaactcttttatacctgagattttttgttttagttcgcttcatctgctcatgtgtgtatgtataatatagaaactctaagatgattcatatttcttggattagggagatggtaggatggaaatgttttcaagtaactcaattgaatttctagtctgtatatcagagcattcatagaatatcctgttacaggaatggatgcccaagtggcttatggccttcctcatctacccaat

SEQ ID NO: 131745 - DNA, 279 bp, Glycine max
  unsure (1)..(279): unsure at all n locations
catcggcnctcacagtctctagattcgggagtttatcctatccttgngttctgactctcagctacttatgatagccgccgatgatcccattactgcttcccctaaactctctgtcctttcttcacaccgcaatccatgccttgcgaactccttggagaaccctngtgttgaggacactaaaaccccgtgcgatgaaaggcgtgatgctttcgnctaatggcgctcctctcatgcggtagccaagctggcttatggcgagaacgagaatattattaatac

SEQ ID NO: 131746 - DNA, 364 bp, Glycine max
  unsure (1)..(364): unsure at all n locations
agcttcagctcttctcttctggcagcactgtgtttgctctnttctccttntccttgtacattgtaatctactctagaatagttatgtatgtctgaagttgcagtatatcttattgccttgaagttgttgtgaggttagaagattgttgccactgtattgtcctctactgcatgaggtatgacggngataaaattaattattgcattgtgaactgtatcggtttggcactgatgaatgatgcaaataattttttcctatgattttgaactgggtagatcaactttatttatccttaaaacagttgtctgatagaactggtagtgtacttctacacttatggaacttaagtagcacatgtttcaca

SEQ ID NO: 131747 - DNA, 372 bp, Glycine max
tgaagtgagaaagcgtggaagagtcagtcttcctacttttatttgttgacgacagagtggtacttggagatatatcgcgggggtcaggagaccttggggacatcaagtggggtgttattgcccaaaaccaaacttaatcaatcctgacccaacacgggcataatcagtcagtgagaacctgtgacgtacctaaataggcgagttcctggcagtcaaccaataaaagaacaaagaccacaaagcaaggaggcttgtgtggtggctggccaactatggatcttgagtggtatctggaatttggcctctggttatcgactaccaagggtgtgtaatcgattacaaggcttaaaaatggagacaggaagttgagat

SEQ ID NO: 131748 - DNA, 310 bp, Glycine max
agcttgtctctacttctgcattgactttttatatataaatattctactatgtgcttcataacaataatttgcattatatgtcaattttctttatacaaatatatcactgaccacaacaaaattaattttaatttacgaagcttcgagatagatgacgaacatctctaatcgagaactaactattatagaaaaatgtgttataatgcggttaccttgtaggagtattaagtttgaaaggcacttcaacaaatattaatcctcatttgaaaattctagaccttgttatattttgaacaatgatgcttaccat

SEQ ID NO: 131749 - DNA, 372 bp, Glycine max
agcttgtagaatggctagacatgatacatgtcatgttttggtttggttcaaggataaaagggatgccccacattatttccatgacacaaatgcaaaaatgatgagttggaaactttatgcaaaactggtcatgcatgcacctatgtggacactcaagtgtcaatattttatggtcatgtgatgctagggctcaggattcatttcctctattttagtcaacccaacgattccaaaatatgttcttttatcaatgtgtgcattcatccgagtccatattgggcgtctgggaaaatcttcacagcattcacccttcatgtgtatacacattgtttcataaactatgtatgatcagtgaatttttcaaagaaagtt

SEQ ID NO: 131750 - DNA, 487 bp, Glycine max
  unsure (1)..(487): unsure at all n locations
tatgcgcatatttccttacgaacgttcacttgcgcaagacattctattaactaagaaaaatgcacccatatacaatcaaggcagcttcgttacctagattatttacatgcacttccaaggtgtatttgttacttacatcacacacatctccttggctgaatttacatacatgcatactcaaagcantttggggtaccaaaaattgcacatgtgctcatcttggtatttctaatacctatacatacacaaactttatgatgaatcttgactacctacacaataaggtgctacatttcatgcccttttcaagtttttgctacctaaagccgcatgcaaattcaagtatattttcctttgctgactaaaattgtattcaaattaaaaggtatatattnttttttaatggtatttctttacataacatgcaacatanttatatatattntntgtgagacattnntgactaccaaaaatatatgtacataca

SEQ ID NO: 131751 - DNA, 346 bp, Glycine max
  unsure (1)..(346): unsure at all n locations
agctngacaggctgccatagcaacaacattatattctgcttcacatgtngacaaagcaactacactctgcttctttgagcaccaagagattggtgatgttccaaatttgaacacatacccagcagtggttttcctatcatctttatcaccacaccaatctaaatcactataaccaaacacttctccttctatattcttttgattgtaaggatataaaatgccaagatccaatgttcctttcacatacctcagaatcctctctgctgccaagaagtgaggtgtctttggtttctccataaaccagaatctgtgtntctgacataaacttcatgctcagtagttcact

SEQ ID NO: 131752 - DNA, 443 bp, Glycine max
  unsure (1)..(443): unsure at all n locations
tttgtgtatatttgctttgtactgaaaaaaaaaacatacttgagctttgtctcattttgattgtcatttactttcattgtatttggttgtatattgctttggactgaaaacaaatgttgtctcattttgatttttgctttggactaaaaacaaatgtaacctttgtctcatcgtcactctcattttgattagtactgtttgacttcttctatatccaatcgtgaagctgtcatttgattcttctttttccacgatcgtgtatgggtattgggtttctgtccgttntcattgctgagttaaaatcttttattacttctcgattagatttnttttatttcctctggttttgtccaatttttttcctgttaccctttacctttttgatgggctttactgatctcgtgtgctattttcttctcttatatgcagggttctatttttcg

SEQ ID NO: 131753 - DNA, 375 bp, Glycine max
accttaagcgaccgcggcatgcagcttgtacactctagagaaattttttttattattaacgatccagagacactagctttcattctcaagaagttaagaagaggaagggaacccattggatgcatcatgagaggaaatcatctagaaagtcaaattattggcgatccagcggatcatgctcaaacaagataattacttagaacacatgggcatactgcattgaattctaaaatgaagcccaaacacatggatgatgccatgtaagatgacaactatggctaagccattaaagaagaagctaattagttctaaaataatggtgcttggaattaatccaaccaccaaaaggaagaaagttgtggagcaaattggctt

SEQ ID NO: 131754 - DNA, 313 bp, Glycine max
agctagtaggattacggggtacctttatttgtggtactaggtggcggacgggcgatggtgcacaacaagttatccacattcacaaagcgcgcatatacccaccatcccctcgtggcccaacctgcaactagagcgtcacgtacgtcccacgataacccatatcctctattctctcaacaccgggtccccataaatgctcccaagctttgcaacatcaaagtaaaacgacattcaaacagcacaagctatcacaggcaagctaaacagagcaaatgcagaacactctgcaaaacaacaaccaaatcacagcttt

SEQ ID NO: 131755 - DNA, 444 bp, Glycine max
  unsure (1)..(444): unsure at all n locations
cttgatgcaacattnggagaggttaatgaaacaacgagnatttgctctccatgagaggttggatcaaatggagaatagagatcataatgaagaagaaaggaggagaagagggaatgatggtgttcctagacaaaaccgaattgatggtattaaactcaacattcctccatttaaaggaaagaatgatccggaggcctacttggagtgggagatgaaaatagagcatgttttctcatgcaacaactatgaggaggaccagaaggtgaagcttgccgccacggagttttccgactatgctcttgtgtggtggaacaagctacaaaaggagagagcaagaaatgaagagccaatggttgatacatggacggagatgaaaaagatcatgaggaagcggtatgtgccgggctagtactcaagggaacttgaattcaagctccaaaaact

SEQ ID NO: 131756 - DNA, 167 bp, Glycine max
gaccctgagcaccgcagcagcaagcttttacagggagcaaagatcttgtttttctggcactatagtgaagaccctggttaacaaacatgccccatcaggtagagtaacaaatcattctagaagtcacagattcatgcaaagatcattattcacagctagtcattcac

SEQ ID NO: 131757 - DNA, 464 bp, Glycine max
  unsure (1)..(464): unsure at all n locations
tgtgcaaatcaaatcactcctacattntatctctagcatttattgtatgttggtctcgtcctttgtcacgggaagccggaaggtccatatcaccttcttaattgtacacatggggcactgcgcccccaaatgcgcaagtaagaagagataattttctaggctctcgtgtccgtaaaatgcattcatatcatgcatcgcataagcatctcttcataacatcataatgggcatatcctgcatttgtccgttatcatattccagcctcacattttgcatgagtcatggcatcatcatgcatatgcgttcaacaaactttttggtctgcaaaattgcataccatttgttttcatgtttgctcatccttgcgtttcctctacaaacanaacaaaaaaggggaacatgaactcacactcattcttagttatgtgtaggaccacgaccaaccatgtgggatcataacccgt

SEQ ID NO: 131758 - DNA, 430 bp, Glycine max
  unsure (1)..(430): unsure at all n locations
tgtagccattagaagagaatgagcatgtgattggttgcatgactgaaaatgttagtcagtttgtcggattgattgtgaaggaatgcattaaccatatcccggtgagagtgtgatccttaaattttgagagaaatgactatcatttagtattgatttttgcatgaatctctgaagtatggattgaatgcatgaaattgaggatgatgaaggccatgtttgattgtgatagccatttagccaaaaagctgaccatgtgcttgaataaattatcccttgtacccagtttgagctgaatgaattattgattgattgaaccctgagcctatacaatgttattctcctgctaccttgacttagattgtaggagagcatcatccacaagaagcgcagttcaaagcaaatttgtcccanattttgggagtaattatta

SEQ ID NO: 131759 - DNA, 354 bp, Glycine max
agcttctccctcatttttctataaataggtggagaagtgaacggaaaaaatgttcagccctcctggtaattcgagatcacttgaaattagtgaaaaaaattgttttcgtgaagaaaatccaagccgaggcgcttccgtaacgtttccgtaacgtttctatgggtgatttcgcgaaaattatcaaccgttcttcgacgatcttcgttcattcttcggtcttcaaccggtaagttcccgaaatcgaacttttcaattcattctatgtacccttagtgggcctcaattggtttcacctgctcttattttcatttatatactttccgacccccttttgacgtgctttaatcaattact

SEQ ID NO: 131760 - DNA, 178 bp, Glycine max
gcagcaaccgacgaattaataacattgacaaacgaagagaaaggagggcggatcagcaaggaccaccccgacgcaggaaggatgcaacgctcgccgtatggggtgttgataaagacagtgcccacagaacaaagaggaacacgacccccacgtacttgacgtatgcaggagtgacacc

SEQ ID NO: 131761 - DNA, 364 bp, Glycine max
  unsure (1)..(364): unsure at all n locations
ntgatggtgtcgagaagaaatcacatgtttgtcatcatttttagggggagaatgtgaatgtatgtatacatgatgtcaaagaagaatctaacaaggctgcttcaaatgataagcatttgcttcaagaataattcaagattgcttcaacaaacaaagccttgtttcaagattcactaaagaccaagccttgccttaaaacanagtgctttcaagacatgcaaggctctggtaatcgattaccaggaagtgtaatcgattaccagaagacagggttgagaaatagctcgtgaaaagggttttgaatttgaattttcaacatgtaatcgattaaatgtgaatgtatgtatacattgatttgatgatg

SEQ ID NO: 131762 - DNA, 306 bp, Glycine max
agcttgacgaaattagttgagtaatcaattatacttcaagataaaaatttactcaacctatatttgtgagtcatgatgaaattgagattttgacaaaagtatcgaattactcgagtaacataataataagtatggttttcacaagaatttgtgcaataattaaataattaatagtaaattagatattgacgcgtgcaatgcatagattaagaaatatgtaaattgtatgattagaattagaattatataaataaataaatcttgtctcgtaaattatagaaatttgagtgaaaaaaggttgtgcta

SEQ ID NO: 131763 - DNA, 428 bp, Glycine max
  unsure (1)..(428): unsure at all n locations
tctagtatntataagtcattttctttaggtgttcgctgttttatatatacagaaatcttcacttgagctcgtgtatgaagattgttgtcattggagcatttaatgcttgcattaaatgcacattcttcttcatgttggaaaaccactctctttagcttccttgaagaacactntagcaggataccacttgctttttgtcaaagcaggtctatcacagcaggatgtatcttttaatactatttgaaattccaaagttctgaacttcgcttatttttcttacgattttgacagatcctagaagaatgtcttgtaacatagttcctgcaaaacanatctcaaacacaaaatattaaatgaagtcctaaatgcattcttaaatgttgtatcacaatgcaaagtatatctacttccaactagaacttcatatg

SEQ ID NO: 131764 - DNA, 404 bp, Glycine max
  unsure (1)..(404): unsure at all n locations
agctttgtgagttgaaacaaattgaaggttcattattgggtggttgaaacattaaatggtcatccaagaaattgttatgaaacattttgaatgatgtcatcccaatataataagctatgtgagttgttaaaagaaaggaaaaaaaattaaagacatagtctttaactattcaagagtacgttgccatatcttttgtcactatttgccaatcaactactactatatctacatcgggtcatttccaacactctgtagacactattcataggatatttaagagtgttctaaaatccatttgctatctttctaaggaattgattattcctggttcttttgttgaagtgcttccgaaatcaaatcaattcaagattaattatttttcagggagaattnttcttttcttt

SEQ ID NO: 131765 - DNA, 473 bp, Glycine max
  unsure (1)..(473): unsure at all n locations
ccttgatactcagcttaggctgctcaattgctccaggttgctgcatggaaggtcttatgtttgtatggtggtcagcagaggagcacaaaccacaaacccttgcaacaggtacagatttctgattcaaggccagctgggttaccaagttaaccaatgcatccagtttgccttcaagcttcttagtttcagatgatgcagatgggtttgtagctacctcatgcactcctctaatgactatggcatcatttctggcgctaaactgctgggagttggaagccatcttctcaattaaatttctggcttcagcaggagtcatgtctccaagggctccaccactggcagcatctatcataattctctccatattactgagtccttcataaaaatattggagaagaagttgttctgaaatctgatggtgagggcaactggcacatagnttcttaaatctcttctagtactcatacaggctc

SEQ ID NO: 131766 - DNA, 329 bp, Glycine max
  unsure (1)..(329): unsure at all n locations
agctttatagtaaaagaacttgtgtcctttacttgtaagaaccagggttntaaaaatagagtatctattggtgcacatacactagaactatatgactntgcttaaacattntattcattcacacaagtcaaagtctagtactcaccgatggtaagatcacggtaaagagaagtaatgtaatgttgctttntacaagtcacatctgcctttctttttgtgtgaataacttttttattcaagcaaaagtaatcagaagagcactttcattctttatcattatcacagtagaaagaacaattgtctaaaagggaactaaaagctaaagtcta

SEQ ID NO: 131767 - DNA, 456 bp, Glycine max
  unsure (1)..(456): unsure at all n locations
tgatcaagtagtacannattttgctcaacataaattctatgttatatttgctgctatttttttccgttctgtttttagtaccaactttcctattataatttacaccttttgattgtttacaagttactagcttatactttgtgcaggtgggtgttatcatcatgcctagaaaacatattatggggcatgcagatgaaagagccttcaaaacattggttattctcatctctgcatcattattctcatctctgcatcataccgactaatggattaagggtgaaggtgagtttagatacagagtattttcttagacgccaatcactaattattagttaagagttttcttagatgaaaataattttttttatggaaagataaaaagaaattaaaaaacaatgattacntaataagtttattctccatgataatatagatccctgaaggatctcaatattc

SEQ ID NO: 131768 - DNA, 392 bp, Glycine max
tgagatgaggaagtgttgaacggtgaaactttctgtttttattgttgaccacagagtggtacctggagatatgtcgcgggggtcaggagaccttgtggacgtcaggtggggtgctattgcccaaaaccaagtttgaccaatcccgacccaacccgggcatagtcggtcagtgagaacctgtgatgtacctaagcaggcgagctcctggcagtcaacagataaaaggaacaaagaccacaaagcaaggaggcttgtggtggctggccagctgtgaactttgattgatatgtgggttatggcctctggtaatcgattaccaaggatgggtaatcgattacaagggcttaaaatgaagacaggaggctaagatggtctctggtaatcgatcacca

SEQ ID NO: 131769 - DNA, 396 bp, Glycine max
agcttaagctccttcaactgcactttgctcttaatatttgaagagcatccttatggaaccttcacccgacgataacactgacaaaaacttatcttctcctttatggacaaagtatggcatgctgggggcaattaaattttcttcctttcagaccttggatgcaactgtgatcgtatgcccatatcagctagatcttgacgggtattcaagtcatccttcgtttttcttgaatgtaaggagcatccaatcacactgtcacaacatttttttcacttgctacatcattcatgtctacgcaagataaccagacggagacaaaaaaaggactcttttccttgcaccttaattatcctttttaggcttcaaacagattaagggtgacttctgttacctgtt

SEQ ID NO: 131770 - DNA, 417 bp, Glycine max
  unsure (1)..(417): unsure at all n locations
tgcttgagaagcttctatggaggctggatcntgagcttttatgggccttctttggtgattnttagccatggaattacagcggaagatagaggagaagaggtgagaggaggcgtcatccactagagaataagccatggaaggagaagcttcaccaccaagagagtgtcttggataagaagcttagaaaggaagtttcaatgaacgaagagaatgagagagggagagagaaagagtggcatggaaattgaaggagaatagagagagaagttgaactntgaagtgagtttcacaagtttctcattcatcaaagttaccacaagtgttacacatgcttctatttatcgcctaagtagctttcttgagaagctagtgttacacccctccaataactaagctcatcccatgccaaaatacatg

SEQ ID NO: 131771 - DNA, 360 bp, Glycine max
  unsure (1)..(360): unsure at all n locations
agcttgttgagccnccaagtgaggtctattgttgtccggtgtcaagagcagtaacctcaacatgtgtgagagttgcaggtttgtgaagcttgtcaagcccccgagcctagaaaagtgttgtctaaactgcttcaatcaatctgttcggcgtggacatgcttttgggtttgtaggcaagatctaacgagtcaggtgagggaagtctttatgtctgacaactctgcacttttttaaccatcggacggtgcattgaagatagacgttacattatgtctgctactataagtgagtatgacacatatgcaggactcttgcatacgtgtctctattgtagtaacccatactggagtcatgtgtttg

SEQ ID NO: 131772 - DNA, 434 bp, Glycine max
  unsure (1)..(434): unsure at all n locations
ttataatgggctntctctttattgctactagaatatattttattaacaaacttgtctttcaacatagcaagatcaagatccaaaacgctgatgtgaaattggacttgctcaattcagtcagagaagttaagcccattaaaattgacacatatgatacatgagaattcagtgaattgggaacatgtattgcataataaaattcacataagtgttttgagacataaaacacatgtcatacatataatttattcagataacagtcaatgtgtattgatgttctcctttgggtgatacaccaacacacaacatacaaacatgatgatgctaaaaaaattcttaacattatttgacaattaaatatgcaccaattagtagtatctatttnctttgggcatataaataaaactaatgatgcacacaaatttgcaacaact

SEQ ID NO: 131773 - DNA, 106 bp, Glycine max
agcttgtagggccaaagcctcactattgttacgtgctcatgcaacaatagacagccgtggctaaacgagacatctagccaaacaaaggcaggatagccataacacg

SEQ ID NO: 131774 - DNA, 412 bp, Glycine max
tgaagggtaactagatgccttggtaacctggttatctttctggccatgaataaaaaatatgcacctgtcgccagactctgtggtttatgctcctctatcgaccaccacacatacctttgcctttctgtgcaacaatctgaagcaattgaatagcctgaagcttatgctgcaaacatctacaacaaacctcctcaacttcaatagcaaaatcagccacaacagaataattatgacctctccagcaataggtacaatcccagatggaggaatcatcccaaccttagatgatcgaatccttcacaacagcagcagcaacaacaacagccttattttcaaaatgctgctggcccaagcagactatacgttccttcaccaatccagcagcaacaacagcaacatcctcagaaatagc

SEQ ID NO: 131775 - DNA, 339 bp, Glycine max
tgcagcttgaatctctcataaagaatttttttatcttttgcaagagaagcaatagtgcaaaaacagaaagaagctgtaatagaatgaaggagaaaataatactgatattacttgctttgcaaaggaagctgactacattatttgtagttatttacaaggataatcaacttggttaactaactaaagcacaactaacctaagcaaactagctaaaactagttaatacaaaatcaggagttagttaacaacttaagtttgtggctacaacaaaaacctagggttcacaaatcgcaagaaaagccaaggatatgcaaaagaaatgatgggacaaattggttg

SEQ ID NO: 131776 - DNA, 446 bp, Glycine max
  unsure (1)..(446): unsure at all n locations
tatccagaagtacttttaggagaaaaaataagaaataatgttatgagcttctccataagctaatttgtagaagttctacaaattagatgagagaacttctacaaattagtatgtgcacaagtaaatttgagcttatgcaaaaactcatttaagttttttcttcctagaagtgcttctgggtaagcttaccttaatcaagcggggtggggggataaaggtctaataaaaaacacttcttgttttgcatttgtactaaaatcaatctctctctaagaacatactgtgttaccctgattattctttctgttgccagctacctttattggtgtctagataatggatggataattgattattgatggctaattatttgntgcaaacatgcaggactgaaacagaatatgtgagccagatgcttaccttaatcaagcgttgtgccaacatca

SEQ ID NO: 131777 - DNA, 293 bp, Glycine max
  unsure (1)..(293): unsure at all n locations
agtctttaaatatctactatttatcatattatcatcnaatacgactcttcactctcataagaatggtgtcataataccccgagctgatacttatattcactgacatcttggtcttttaaggttttttttcctaggcaattaagtcttttaatttataaaagtgagtaaatttagtcataaaatctttaaactctcatttttgacataaaatcttcccatattaaacttagtaaattatctcttacttaaaaattaaaacttcaaatttcacatgaaatatttcttttttaaaa

SEQ ID NO: 131778 - DNA, 291 bp, Glycine max
accaaatactactgcactgtttatgatgctccaggacatcgtgatttcatcaagaccatgattactggaacttcccaggctgattgcgctgtccttatcattgattccacaactggtgggtttgaagctggattttccaaagatggacagactcgcgagcatgctctacttgccttcacccttggtggcaagcaaatgatctgttgctgtaacaagggataatcctggtcttagtcataaataccttgctgtatgttaagataatttatttagtagctgttttctaatgat

SEQ ID NO: 131779 - DNA, 285 bp, Glycine max
  unsure (1)..(285): unsure at all n locations
agcttaggttctaggaaagcattcacctattattaaccttcactntntttattcattccttccccatacttgccctttttttcttaggcacttagctttcatacctgaagttatagcatacacacttattaacttcatttatacttacagtttttttaacacagaaaacataatctgtgtgtatatactattttctttgaccatttcaatccttaccccactgcctcccccaaatttgggataaatttaccttgataataactggccccaaattggaaacaaatt

SEQ ID NO: 131780 - DNA, 387 bp, Glycine max
  unsure (1)..(387): unsure at all n locations
ctgcccttaaactcgctcaagctagcttatggtctccctatcttactacattattactgngtgttaatcactgagattaatacagttaacaactttcaaatattgtgaaacattaagcattatccccataaccttcagattaatgatacatgacacttgtagaacttaaaatgtagtacaattatatttaagcacttgttcgtcataccaaaacacaaataacacacacacacgcacgcacagacatgaagtaaaatatgcaatttcaacatgcatggaatgaaccaaaactatattttggattctacaaaataatagatctcgaatcctaactcaatcatggcagagacattgactacgtatcgcactcaaacatatgactaaaca

SEQ ID NO: 131781 - DNA, 414 bp, Glycine max
  unsure (1)..(414): unsure at all n locations
agctnncgaacctacaagnnagggataatctttttcaaattccccctattaactaagcacatacacgaataaatatatagttatcaatacattaataagccaacacacaaataaactgaggtgtatgcaacaattgtgaggctttgataccttcaatccagaatgctcgcagaagttgcacttgcagccaatctcatctacaaaagtcctctcgaaatttcctcacgaagaaggccgctccccatgtcattataatggtcactatcagagctgagatactatgccataagtacaacattatggatgcaaccaccatcttttcatttcgacagtatggcaaaagctcacaaaaaaacccttttacaaaacccattgatcgaacatatacggggaacaattagatgacgcccttat

SEQ ID NO: 131782 - DNA, 402 bp, Glycine max
  unsure (1)..(402): unsure at all n locations
tactaagcttctctttggcagtagcaagttaaaaccatgttcttgatttggttggcagcaaaagcctggatctacgatcgcgaccaagaacaactgtggaagctagcgccgttcaacgaagcaaacattgtccatgcacagtgaaatagaattagggtacgacatttatgaaggtcttcctagaaaagaaaaatatagagaggaggagtgagcatatgaggtttgctcttttatttttttctcaacataaacaaccacatgcatcaaaacaacanatgtaataaaaaaataactcagatctagaacaacatanacaacatgtttaagaacaattgctaaatatgagctttcttctttgcctcttcattcccttgtgttactggtgcagaaccttctccacac

SEQ ID NO: 131783 - DNA, 352 bp, Glycine max
  unsure (1)..(352): unsure at all n locations
agcttcacgcaagaaaagagaacaatatgttcgtgcttatatnggtgttctactacaagaacaagtgaaattcaatgggttatagtggtatatagatatatataatccatagtggactctctcaaccgtgatcaaatggtgaccacgtaacacatgcactttaaagaaagttccgtaacaataatttaaaaagtgacaaatcacgtaagtatatgtaccacgtatcttcttctaaacacaaatgtaccacgtatctatatatgttgcccatgctaaatgataagtattgctaagtatgatataatcattaatgcatggttgtggcatatttaatggacaaaggaatttgtct

SEQ ID NO: 131784 - DNA, 422 bp, Glycine max
tccaatcaacaactgagataatttatcagattaaaggtctcttattcacaaaaataggaaaactaatttatcaagttttgagggtgagcaatccacatttataaatcatattcttgtttaaaacatgcacaatatggctaaagtgaatgctcaaatgctaaagtttaagaattcaactctctttggaatccagccaaacttgtttgtatgctttcatacacaaagtagaagtaagttcaacaaaaattaatcttttcctagtttgttcttcttgggaattttgaattgtgttcgagattttagtctcttagtttcttcagcggaatatggtaacacttatggaaattgactttataatgtggattccaacaacatatgtatataacattcgtcacataatatctcgacgtggatataataat

SEQ ID NO: 131785 - DNA, 361 bp, Glycine max
  unsure (1)..(361): unsure at all n locations
agcttgggaggattgatggngacccggttttgttataaacaaggatatgggctacgtgggagtacgtgagctcagttggaggtggacaacaggggatggtgggtttatgcgcgctttgtggatgtaggaaaactggtgtgcaccatcacccgaccgccacctagtaccacatgtgatgggtaccccataatcctataggctngagatgaggaagtgttgaagggtgaaacttcctgcttttattgttgaccacagagtggtacctggagatatgtcgcgggggtcaggagaccttggggacgtcaggtggggtgctattgccaaaacaaacttgaccaatccgaaccaacctggcataatc

SEQ ID NO: 131786 - DNA, 396 bp, Glycine max
  unsure (1)..(396): unsure at all n locations
aacttctnttatgaccacatatgccctatgaatagcatatatgcacccacacaaaaaaaaactaaaaacaacctaatcatttcctaaactatatttttacttttttattcacaacacaaggaattataaggtaaaaatactcaaaaatactatgatgattgttcactaaataagggataaaaaacaattattttaacaccacaagtagttgtgtatgtccagtagcatgcgttattgagggtgaagcctacagaggtgaaagaaactcaagtggagcatgtagaggcttataaactactattttaaaagcctaggaaggcttcacaaaagaaagaataccacataatgtttggtcttagtaaatcatacaagtataggtaatggacataacccatg

SEQ ID NO: 131787 - DNA, 386 bp, Glycine max
  unsure (1)..(386): unsure at all n locations
agcttattaaatgagctctgttatattttatttaagcagtaagtaatgaaatgcaactaaaagagtgtaataacaaatttggaatttacagttggcaaaattgggatacttttaatntaaatagtaatgacacatgtacctatagacatggattggtaagattgataaggaacttcatatcaactatgttgcaagcaatagaagtagcgttcattcattgataaaatatttagcctcggcttctttaaaggcatatcttgtataatatttaaaaagttaacgacattacatgatgaatacatgacaaccatatttgttcttccttgtatactgcggaaatggataccagaatttggctgatcatattattaattggcttaaattaa

SEQ ID NO: 131788 - DNA, 318 bp, Glycine max
  unsure (1)..(318): unsure at all n locations
agaacccaaaagaatgatgtcaagattgagtcagcaagttcaagatcaagattaaataaaagacatcaagaagaataaagattcaagagaagatgaattcaagattcacgagaagaaaccaaaaagcaacaagtcaagacttcacaagggaagtattgaaaaagatttttcaaaaaccaaacatagcataattntggtttacaagaaaagtttttccaaatttttctaagttaccagagtatttactctctggtaatcgattatcagtttcctgtaatcgattaccagtgggtaaggttggattcaaaagcttttaac

SEQ ID NO: 131789 - DNA, 253 bp, Glycine max
  unsure (1)..(253): unsure at all n locations
agcttntggtttcaattntgagctgtctctatatattataagactcaatcggacatccgagtaaatagttattatcgttagaatttgctcagagcttccattttcaattacgagcggcgcgatatattacgggattaattcggacatccgagtaaaaagttattgtcgtttgaatatgcttagagcttttgttctgaattttgagtgtcttgatatactaagggacacaatcggacatgcgagaaaaaattta

SEQ ID NO: 131790 - DNA, 416 bp, Glycine max
  unsure (1)..(416): unsure at all n locations
ctgagcaaattcaaacgacaataactnnttactctgatgttctatttaatccataatatatcgagacactcgttattgaaatggaagctctgagcaaattctaacgataataactttttactcggatgtctgattgaagcctcgttatatatcgagacgctcaaaattgaaaacaaaagctctgagcatattcaaacgacaataactttttactcggatgtccgattgtggccagtggtatatcgacacgctgcaaattcagaacaacagctcttagcanaatcaaacgacaataacttttttctcggatgtccgattgtgtcccatagtatatcaagacgcctcaatttcagaaaaaagctctaaagcaattcaaaccacaataaccttatactccgatgggcgaattaatcccg

SEQ ID NO: 131791 - DNA, 354 bp, Glycine max
  unsure (1)..(354): unsure at all n locations
agctntgtatataaagaanaaattgcatttatataattctttacaaaatcatcgcgatcctcgataattattgttaactaacaatataacataggttgtacttttatattctttaaagtgaataattatacaaaaacaagttgatagtaggagtaaaattggattcaaatttcttaaataaaatcttgtaagttttgtatataaagaaaaataatgaatattttttatttataatatgataactcaaataaattaaataagtagattgaaatggtgaaaatttaaaataaaaaatacatatacggaaagtngaatattgaattaaattataatttttaaataagaatccaaatt

SEQ ID NO: 131792 - DNA, 325 bp, Glycine max
caccaacgtgcctggcagacactgcaataaaaattctgccttctcctgaaagcgaggagggccacactggattaagtaccgcagcaaacggacagcatctgcagcagctattgactgagctcttgaaactccagctggacatgctgaccaagcctgcctaagcaagacaagtgcattcaaagcagacttctgagtagccccacagcctgtctttaatgacagaaccaaaaggagaaagctaagtagtgctggttcagttgccctcaaacttgggaagatgctgaatagagaatgtaaggctctaagatactcatcattcacagat

SEQ ID NO: 131793 - DNA, 386 bp, Glycine max
  unsure (1)..(386): unsure at all n locations
agcttataagaacaaaattgccttatttatttccaattatgcatgngaattaggacgcatcaacaagaatcaagccaaggctattgtgcaagcaatcaatggggcaaaacacaccaaatgattataatgatggatggctcanattctcacaaaggtaaaatcattactttcaaattgagctttcaaaactatcatgacatgtagagaagaatcaaggatttcaagtcacaaaatgtcaagaacttttattttcaaaacaattacccattgcttgaacatatcctataattcaaagaaaaacatgcaaagttgtacgtgcacacaaaattgacccacaaatataaactaaaaatccgacgaaacttaccacattaaccaattaacac

SEQ ID NO: 131794 - DNA, 349 bp, Glycine max
taactctcgctaagacaggctctatccagcttagctaaaatgatgcatctttagtacagaggagcatgcgcgcttatgataaggactcacttatcgctcacattgcggcgatgaatttagcttaactgccatgactggcgcttagctttaccaacctcaattatggctgtaaggaatatagcttggcgacaataagtctcgcttagccaaggataagttgtcgcttatcgaacccggctgaagcttattcgaatttagattgaattgaaggtggcctagctcatccatgtctatcttatcgaaccacaacagcctcagatgcacaggatgggggctaagcgcttgagac

SEQ ID NO: 131795 - DNA, 421 bp, Glycine max
agcttctagccaaatggacttatcttgtattaattcctttgatagccctttttgagccttcgttccctttccttgttttgaagctcactacaagccttaagtgaaaaaccatgatattaccatatccttaaggaattttggagctttggaattgttttgggaataagtgtggggggttcttgtttcattggacaacttggtttggtggctatgcttcatgatgtattttgggccatacttgatgtacattgtatattggttaaatgttggacatgctgaatgaaatgtttgttctcaatgctaaacaaaaaaaaaaaaaattcaaaaaattcggaagaaaaaaaagaaaaatgtacgccttatgttggtggataaatcttaagggcaagaagaaaaactttggctacctaaggtaaattaa

SEQ ID NO: 131796 - DNA, 367 bp, Glycine max
  unsure (1)..(367): unsure at all n locations
tcaaaccacagcaacacaaaatctatgttctcaaacccctanattcaatgggttntctaggtttgaaaagtgaaattgagaatgaggtaaatttgaagcaaactctcacctcacaccaggccataacatcaatctaaacttgctcaaactggatttacgcttaaaatctcaccgaatcaaaatttgactcttcaacgcccaaaattgccctagaaatggctctttgttcactctggtcatttgggtttctctctagcacagcctaacctttctcataagtcctaaatggcatttcaagctaagattaactcactctaacctctaaatactaccaattccagatttgggctttcagtccttaaaaatt

SEQ ID NO: 131797 - DNA, 235 bp, Glycine max
acctataaaactcagcttgtatcgttacacacatcttgtaattgattaacataatgtatgttcaaaaataattttcaaaagtcacatctgctcaaatggtttttgaatggccatcacaggcctatatatatgtgacttggaacaccaatttgctcagatattttctgctcaaaaggtcttatcctttcaagagcaaaattatcttattctctaaaataatccttggccaaaacac

SEQ ID NO: 131798 - DNA, 303 bp, Glycine max
ttaagcaccgcggctgcagcttagtaagaaacaaacctccactgttttatcgacatataatttttgttgaaaacaaatgtgtttattggggaaggagagtatgctaatgaaattttctcataaccacaaatgagattttggatgctagcgtttcatttctaaatgaccatttagaggaaacactgggtccaacaaaatagaagaaaatcacacgaagtgtatcaatctcacacaggtaagtgttttatcctaattctgaaccatagatatgacttggattggcaaatcatttcttatcaaatc

SEQ ID NO: 131799 - DNA, 325 bp, Glycine max
  unsure (1)..(325): unsure at all n locations
tatccaagatattaagttattntcttggttctggctgatgtattttatgactatagaggttgggacattctcacaatggcagctaaatacacaagttcttttgaaggagtttatgtgaaaaggaggataggtgtggaaataatatatgatgaacatggcgtggaagcttatatgcagcttaaaaggggcatgtgccggcatgcaagggtacactctcattttttcatgttggtaccagttgggacaacaaaagttttgtgagacaggtgtggtcgaaacattgattatagcattaatagcccatgtgtgatgctctctagttgga

SEQ ID NO: 131800 - DNA, 327 bp, Glycine max
  unsure (1)..(327): unsure at all n locations
agctntatcatagccatggctagnttactctattatgtccacgactttgatctctacaaaatccctagcgattcagatatgaaattgctcctcctccaaatgacgtccagttgggctgttaaatcaattatcactgccttgcaagcgaacggttatagcagggggtgcggcttgatgagactataaacaaaggatgatgtaatggatgaacctgatggggttgtgtgtggtgagggtctccatacgttaaggatttgctgaaactatacgaattgggggcaagctcttcttggttattggatgcaacattggatttagaactcatgg

SEQ ID NO: 131801 - DNA, 313 bp, Glycine max
  unsure (1)..(313): unsure at all n locations
gcaagcttagcccttgggagagggaccttttaggttttggagaggatcaataacaatgcctataggttggaactcccataagagtatggagtcagcaccacttttaacatttctgatttaattccttttgcaggtggagctgatattgaggaggaggaactaacagatttgaggtcaaatcctcttcaagggggaggggatgatgcaatcctccctaggaagggaccagtcactagagccatgagcaaaaggattgagctagagctgctgaaaaaggccctangattctcatgaaccttanggtagatttttg

SEQ ID NO: 131802 - DNA, 493 bp, Glycine max
  unsure (1)..(493): unsure at all n locations
tcaagctttgatctaccaccaccgccgncaccattatcttagctatctattatgttctattattagcactttgatttctagccttgtattntggctatattattatgatatttgaacaatttactatttccttatatgcatggtatgtttgaacaaatattaagaatgttatttgactatgtggattttatagataatctattcatgattgttgcttcatggttcttgcttcatgatttggctgatatttttccatgaatgttgtatggatgcttagttatatgtgtatgcctcacatttgttacgcacttttggcttttgttgatgccaaagggggagagaaatatggattatatcaagaactcacatgagtaatcaacttaattttaagagaagcataaattctaaaacaaagggggagaatggacattatgtgagtgatcgactaggaaaaagagtgtgtgtgtggttcttgatttcagaagttgcatca

SEQ ID NO: 131803 - DNA, 312 bp, Glycine max
gtaactgacgctgcagctgaatatttgttgggaagacattagttacttttgataacgaatacttgggtcttaatcttaggggaagattaagtgtagtgccaggagtgacctatagagtactcattgtatctagaagtggcatagagaatacttgattgtaatcaaagaattaattagtgaaatccttcaaagtttgaaggaaaactggacgtaccccaagagttgggatgaaccaatataaaaccggtggttcctttactgcttttatataactagatcttttccatatggtactcctacactactctatcc

SEQ ID NO: 131804 - DNA, 472 bp, Glycine max
  unsure (1)..(472): unsure at all n locations
tgcttctacaaagggagaggaccacttcaagttgtggttttctttcttttattatatgcttgtgagaattcaaatattgtctggttcgaagacctttctgtatatttcttttgttttcttccgatcttcgatcaagaatttctctttttcttttgttttcttccgatctttgatcgagaatttctctttctcttttgttttcttccgatctttgatcgggaacttttgtttttttggaagcgtgtcaacagctcaatagtgaatgactttgtttcttcttgagagaccccattgttccttcttccaaggacaacgatggaaattctcatcctgngtcaaggtttatggtggttcgatgtcttgggtcaaaaggctttcagaacggtcgaacatgatgtatgtcagggtgttgtgttggccagcggttcatggataaaggcgatgtcccacatttatttgcatgacacacata

SEQ ID NO: 131805 - DNA, 218 bp, Glycine max
agctagcatgaatacattcccttttttttatacaaaatctcaatccttctcgacatcatcaaaatcttcatgatctacattctccccctttcacaagcagattcttaattcttcttgacaacatcaaaatcttcatgatttacatcaccctaatctcaaattgtctagccctcaacaacaacagcagcagcttggtccttccttccaaaatgctgctg

SEQ ID NO: 131806 - DNA, 388 bp, Glycine max
  unsure (1)..(388): unsure at all n locations
tgctagctntggttggttccttgcttcctttgcatcttttgtttctgctgctaggaacttgntggtaagnttattttaatttgataataaattgatgcatgtttaggttataaattttaagtgttatgtgttaaatatgtttaggttaagtttgttttatatgttaatgttatgtatgtttaggtgctatctcataaatttaagttgtaattggatatattgatattatttatattatatgtatatattatttgtattataggatacattagagctcagttatttgttaatattattagcttgagttttgtatttatatagtagattagatttagttcaaaaaatttatatggtagattacggaatagctaaatttttatatggtaca

SEQ ID NO: 131807 - DNA, 301 bp, Glycine max
  unsure (1)..(301): unsure at all n locations
cttaagcaccgcggctgcagctttacttcctgggtattttatctctttgggcnctaaatggagggaatgtgctcaaatatgaggggcaattttggtttgttttcttgcttgattgggttgaattgggggtttgtatgagatggccctaggcctataatgcatcttgaagcaatgggacatgccacattgtccccgttctcttgctattaatgcctaaacgcgcgcccaccaagtgttcatgtgaaatgccctaatggcattagcgcgtgattttcgtaggaaaacaacccatggggcattt

SEQ ID NO: 131808 - DNA, 412 bp, Glycine max
  unsure (1)..(412): unsure at all n locations
accttagaaactcagcttanacctttccacagganaagaaaaagtaatgtttgtgtgtctccaaactctaagagggttggtcgaatccttacatatgaaagagtcagagtccatttctgattatttttcaagaattctcgctttctcaaatcaactaaaaagaaatggtgaggagttagaagacgtaagaattatggagaagatactgtgctcgttagatcccaaatttgagcatattgttgtgacaatcgaggaaaacaaagattcagaaactatgaggatagaacaactttaaggatcactacaagcttacgaggataagcataataagaagcaagagatcactgagcaactcttcaagatgccacttaacgagaacgaatanagttcagaaaatgagagaagtcaacca

SEQ ID NO: 131809 - DNA, 356 bp, Glycine max
  unsure (1)..(356): unsure at all n locations
agcttctccaaagggcatgcttatttcctttttcctgaaaatatctaaaaagctcaccagatgacgatctttatccttcttggaaggtaccataggatatggtacttccataccttcatccatagctttntcacttctactcttctttgcattcctattatttttgttcttcttattcattccgcccattttctatcttgtatctactccttttttttcttgcgccttcaattctttattcttgaccattattcgttcctctttttcttgagtactttcacctcttacctcatttttcatgccatcggtacctttcttgcagcagttttcttttatgcacacattatctcatctca

SEQ ID NO: 131810 - DNA, 487 bp, Glycine max
  unsure (1)..(487): unsure at all n locations
tataagaacannaatgcctcaatcatttccaaatatgcatgtgaattangaagcatcaacaagaatcaagccaaggctattgtgcaagcaatcaatggggcaaaacacaccaaatgattatgatgatggatggctcaaattctcacaaaggtaaactcatcactctcaaattgagctttcaaaactatcatgacatgtagagaagaatcaaggatttcaagtcacaaaatgtcaagaacttttattttcaaaacaattacccatttcttgaacatatcctataattcaaagaaaaacatgcaaagtcgtacatgcacacaaaattgacccaaaagattaaactaacaatccaacgaaactaacaacattaacaaattaacaaaaccaacataactagcaaaaccaaagaacacttccctccccctacttaaacaacacatttgcctcaatgtagcgcaattgaaagattaaaaataattaaatcatc

SEQ ID NO: 131811 - DNA, 243 bp, Glycine max
gaactcccataagagtctggagtcagctccatttataacatttttgatttaatagctttagtaggtgagagatgattttgttgaggaggcaactacatatttgatgtcaaatcctctccagggggaggggatgatgcaaacctcccttagaaaggaccatccactaataccatgatcaaaagtgattgacctaaactgctgaacaatgcctctaagatcttcatgaaccgtaagggttgattt

SEQ ID NO: 131812 - DNA, 439 bp, Glycine max
agcttgcttaactatttctaattattattctttaagacacaatgctatccaaggccatatttttctgtataactattctaattcaaggtttgttatttgattatttatgctaatcatttataatggtatcttttcttgtagaagcaaattaatacattgcctcgaacgcattcttatcttatttatatcacataaaaaagtgagcaaaaattggttcaactataaaaagggttacgacaaatatcattgctgctcaccagaatttatataactcttttaaattaaattacactaatttgaaacacgtctcttagatagaagaagattgtatcttctaacacactttaataatagctaaaatttattataatttttaaaactaccactggaacttattaaattatatagtaaagctaccaaagcttatattgttttttta

SEQ ID NO: 131813 - DNA, 386 bp, Glycine max
  unsure (1)..(386): unsure at all n locations
tgctccatcaactntatgngattatacacattctccatatcatactccgcctgtgcataactgcaaaacattgagagaaaaaacacctctttaaactagaaaaaaaacataatatgcaaaaaacaaaacacccatgaattcataacgcatggtttgttgactctttaagttattaaaagctaaagcagcgagctcaaaatttttttagaaacagtcagtaaccgtgatttcagccttgacgcttttggaatgttgcaccgcaatgcggcttgggcttataaccacattgtcgcatattcaaaaataaaagaagaagaganacacatctaaaactgaaggactgggaagataaaatgcaaaagcaaaccatgatggaactgaaatga

SEQ ID NO: 131814 - DNA, 444 bp, Glycine max
  unsure (1)..(444): unsure at all n locations
acctgagagacgacctgagatgcagcttgacaacgataagtacttatacattatgtaagganaagcatacggacttatattgtaaaatacaacacacaccaaccctccttaatgacggtaagttcttttaactgcagaaatcaaaacaaatttaaaaatgtatagagacttaagcaaataaccaaataaacattgaagtgtaggaataaaatttatgcaattataagaaactaaataaataagtaaacctagttattatataaaaaagtatatgtaaagtcacacccacacgcatctatatatacgccatcaatagactgtaagtatattcttgataaatttaaaaatgtcgtttattttaaaaataagcacacgcttgtaacaataaacgcaagtgacagaatagtatagcatacaatttggcgatgcatatataaagcaaaa

SEQ ID NO: 131815 - DNA, 469 bp, Glycine max
  unsure (1)..(469): unsure at all n locations
tgtcgctggagctgacccatcaactgccctaactctnttatactggtgatccctatgctcttgaccttgacttgatagaacctctttttaagcgaacgcatttgacttgatcccatgttttactaaagtgaacaaaaatcggcgcgaatcaaaactccaacatctatcatgggtggaatggatgaatgcatgaagaaatgcatatgacacacatgcaatttatgaatatgggagcccaggaaattgtctccttcttagatacaacgtcttgcggtagcaaagtgcccaacgtatgtatttaagaaggtgacacgaaccctccgttggtttgtttaaagagaggggatcaagacagaatccgtgcgtgacgcatatgtgaaaggcacaacatagtatgacaatattcacaaaatataaaaagggtacatganacttatgcatggcagtggaaaaatggcacacagcgtgt

SEQ ID NO: 131816 - DNA, 379 bp, Glycine max
  unsure (1)..(379): unsure at all n locations
ttaagcaccgcggctgcaagctggtgtttgcttatatccttattctatgtgctntctttttgnatctctgtagcacctctggtactatccttatttaatatctaatatatgatacttttggctgttcaaaaaaaaaaaagagtaccagaggtactaaattacaaaatactggattgcccattgcagtggttccacagcagtctaaaatggagtctggattggaaccatagccgagctaccccagccaagggcagaactacagttagtcaaaatattactggtgtaggagccctgctatattagttatatgccgagtgacaattgtaaatattaccttaccacaagaagcgcatgtttataactataagggaatgattat

SEQ ID NO: 131817 - DNA, 328 bp, Glycine max
  unsure (1)..(328): unsure at all n locations
tactcagcttagagtaagtctgattctctanttgntgcttctcttatttgtatctgaacgtgttcgtgtttttttttatataaaaaaaacccattagttttttcgagctggagtgtgggtgttgttttgttagggcctggaaatattcttaaactccaattttcactatccttgtatttttactttcgcgtagagttcagtgttgttaagcagttntgattttatttgatggaaatagttgagtggagtggagcatgtcttagcctggttgttgattcaacgggtattnttttactttagggtctatgttatgaatatctgatatctc

SEQ ID NO: 131818 - DNA, 328 bp, Glycine max
cttgcccagccgagctcagctcgcccattctatttggttgcttcctccaaaagcaacagccttctggaggaatcttcaggagggcccaaccgggcatggttgcaatacgcacccccctgtctactaaatgcacccgcttcctatattcttgaaagtctttttccgcaacgcgatgaaaccttacgaattgcgcaacgatacttagtttccttccacacgcgaacgaatactcacggaagatgcatataaactttttagctatcgaagaaacccccaaactcaccggattgagcaaagcacgccgtatcgatatccgccacattacgga

SEQ ID NO: 131819 - DNA, 211 bp, Glycine max
  unsure (1)..(211): unsure at all n locations
agcttgaagcccaaagataagtttgaagattgtttatattatgttcnggctattacatgcccaactcctttgagaggcatttgtattggctgttctcttgattagtgcatcttatcgcatttaatatctgtgagtgaagaaaattttcctaaaggtagaacaaaaaatttcagaagctaaaactctttgtttaaataattacaaagttgtc

SEQ ID NO: 131820 - DNA, 382 bp, Glycine max
ctgcagctgcagctgaacataatgataagaaacatttgaatatattcggagaaaaaagttttaaaatacttgttttaaaaaaatacataataatttcatattcaaatttggcacaataaagttaattaagtacaagctatatatatataaaaaaaaaacatacaatgttgcatacaacttttataattcaaaataaagacgcacaaaaaagtaaatttaaagaagacaacttttatcaaagttcttttactttttttttacagcaatcttttaaaaaacaaactacttattttactcttgttctttacaaaaaaaacacttctttatttgttaaacagattaattattagaaaggacaaactaacttaattcaggatttatt

SEQ ID NO: 131821 - DNA, 444 bp, Glycine max
  unsure (1)..(444): unsure at all n locations
acatagcctttaacaaaattcatttatttaaatagagaaattttaagttgttataccctaaattagattgagaaaacttcactagaatcatgaaatcaaccactataaatatgtttgttgtaccaagcattttgagttcaacatatttctgccaggcagttttaacttcaaagcaacaagagacaacataactgtattcaattttgaaaaagaataagtaagcaatgcagagctttgacccttgcatgtttatctaataatntctcaattgcttatagtaaaagtcatatcatagaatatttaatccttcatgaatagaaacagtaaaagaattgcaagtggaagggttggatacaactaccatgggtaatcttagtgatggtatgccctctggtggaaatgaatagtcatcgcttatataatctgtatctatctggagatcct

SEQ ID NO: 131822 - DNA, 338 bp, Glycine max
agcttcaggctgctcatttgcttcaggttgttgcatggaagggaaaaggtctgtatggtggtcagcagaggagcacaaaccacaaacccttgcgataggaacaaatttctgattcaaggccagctgggttaccaagttaaccaatgcattcagtttgccttcaagcttcttagtttcagatgatgcagatgggtttgtagctaccttatgcactcctctaatgactatggcatcatttctggcgctaaactgctgggagttggaagccatcttctcaattaaatttctggcttgagcaggagtcatgtttcaaaggcttcaccaactgcagatttaat

SEQ ID NO: 131823 - DNA, 422 bp, Glycine max
  unsure (1)..(422): unsure at all n locations
tgcgaatgcaaacatttggaaagttagttntaccaagaaatgctactcttaaaacaaaaatggcatacaacctcctccaataaacacaaacatcaatgtaaatttagagcgaactcatgaacatacttccttacgaacattcactcgcacaagatattcttctaactaagaaaaatgcacccatgcacaatcaaggcaccttcgttacctagatcacttatatgtacttccaaggcgtatttgctacctacatcacatgcatttcctttgctaaatttacatacatgcatactcaaagcactctggctatcaaaaattgcatacgtgcacattctggtatttctaatacctatacatacacaaacttcatgatgaatctttgctacctacacaataaggtgctacatttcatgctttattca

SEQ ID NO: 131824 - DNA, 363 bp, Glycine max
agcttttcccctatatgctatattatgtatgaagtgaagaagaaaagggttcagccccttaggcacttctctctctttcgaatttgcttaggaaaattggttccgtgaagaaaatccaagccgaggcgcttccgtaacgtttccgtgagtaattacgcgaagattctcgaccgttcttcaagattcatcgctcggtcttcattctcttcaggcttcaacgggtaagtacctcaaaccaagcttttcaattcattatattgtcccggggggcgtcacattttgtttctgcattgcattctcggtgtatttacttttataccacctttgacgtgcttaaccattaattaatcttttctcctttat

SEQ ID NO: 131825 - DNA, 346 bp, Glycine max
  unsure (1)..(346): unsure at all n locations
nttcattggttgcattgctcattgcattctttcttgattataaaataaaaataaataaataaataaaaaaaataaaaatgaacttaatcgttattatcaaaaagaaaaaacacgctttacggcgcccttaccgaacctatgctagagctagagtaatggatgaaatagagaaggtgcaagagcagatgaaggccgacacggagaccttgaaagagaaaatggccacaatggtagaggccatgatgagcataaaggagatagtggtcagtgcggcttaccaaacccgtgctagagctagagtaatgggtgaagtagagaaggtgcaagagcagatgaatgccgacat

SEQ ID NO: 131826 - DNA, 188 bp, Glycine max
agcttgcaaagctatgccacgcatcagtatatttctattacaaccgtatcaataccgacggaataattgtctgtcagacaatgactgacttattcaggagtctctcgcttaatccaaaataaacgattacatctctttctataagggtctcagaagtaaacaagaacactttattcgactacttagag

SEQ ID NO: 131827 - DNA, 296 bp, Glycine max
  unsure (1)..(296): unsure at all n locations
tatcgatttaatcgattacagctttatcattatttattacatagnggggtttgagacaaccactaatttatttagtctctgctttaattgattaccatatgatataatcgaacacttctctttctataagggtgtcaaagtgaacaagaacactttaatcgaatactttgagtatctaatcaattacattgttcttgagctatttccaagttttaggaaaaacactttaatggattatatggttcttgagttgttcaagggtttggaaagaacatttaatcgatcaaaagatatct

SEQ ID NO: 131828 - DNA, 135 bp, Glycine max
  unsure (1)..(135): unsure at all n locations
agcttctaccccaatgttcgatattatggtggagaagngaacgacgaaagggttcanccccttttgcacaggtatctctatcgaatgtgttcagaaaaaatgcgtccgagaagaaaatctctatcttgaggcggc

SEQ ID NO: 131829 - DNA, 438 bp, Glycine max
  unsure (1)..(438): unsure at all n locations
ggggttacaactttaaaaccataaaagaaaactaatnnttcatattagtagctnggttgtattagatccttctggttgtaactatgatgccatgatacttacatactagtggtactttatgattgatgcatgtggtaatactcgataattcacatatgcttatctttcctctctcaccaatctccgtaattccccctaacaagatccactaacaagtatatggaaatgctaagttgcttcttctaattatcaggcttggcgggtctagtagctacttatggtttgaacttgaatgtcctttaggtgtgcgatcaatctaactaaaatcctgtcatgcattctaggactaaacacatagaaataatgcatcattttcttagagatcatgttttgaaaggtgaatactacattgagttcatagatagtgagcatcaacta

SEQ ID NO: 131830 - DNA, 386 bp, Glycine max
  unsure (1)..(386): unsure at all n locations
gctngcactagccagtgtccatatgtttcaacttatagaaacctattctccacccagttatcaaggaacgttagatccattctcaattcagttccccacaaatactgatcattcgagttgttgtaccaatgacagtagcaacaacaacaccaacaactattggagcatggaggatatctggtcaatgcaattagccaattactaaacgggaattaaacctataatttaacatatttttattttatgataaacctaagtgtctaagtccataaattagctgtagtcttggattaaacatgtatgtttggtatgcaagattggatgttggactctgtgtatcgtacatcattattaaaacttagtaagttcctatgtatggctctaat

SEQ ID NO: 131831 - DNA, 476 bp, Glycine max
ctcaagcttaaccatgcaatcataccatgaataactgcaatattgtattttcttacagatattttagaccattgtatagccaaaattagtcattatgaaagcatgctcttacatgatatgatataatggatatgggacataatgctcttacatgaatgtagattattacctcatcctcagaccttgaaggagtgttaagagcttgtttattaaatctctggacgttgtatagatccatgattctgtcgtaattctcaccccaccatctttgagcttgccatttattaaacatctctcggcttcaaattcaaatgctcagtattgtcaggctttgctcctacaggataattaagttctcaaaaactaaaaatcccatatgctttgcttaatatttatatgaagggctaaggtacacattcttttcacaccttcaattccacatttcaccctaatcttttaatctgccaagttattta

SEQ ID NO: 131832 - DNA, 330 bp, Glycine max
  unsure (1)..(330): unsure at all n locations
agcnttgacttgagttatcattatattatttatatgggaccatgacatgagtttcaaagctcatcaatcatctttgaatcatctatatttaaatctgtattcaacatcatctctcaaacatctttcagtcaatctttcaatatctatctatagaatgtgctaattcatttctcttcatctttctaaaagctttatatcaacactttctcttccaagaacagtgctttggtcaaaaacttgcgctattcatcttgttcattctcttctccctttgccgaaagaatagaatgactaaccaccgtaaattctttgtgtctctcttcttccttt

SEQ ID NO: 131833 - DNA, 186 bp, Glycine max
ccgcattccatgccttgcaactccttgaataccctcgcgttgtggtcactaaaaccccgtgcgatgaaaggcgtgatgctttcgtcttatggcgctcctctcatgggggtaccaagcttgtcttatggcgaaaacgggaatataattaattcaaccccttggtcccatcaaaggaacatttggaca

SEQ ID NO: 131834 - DNA, 372 bp, Glycine max
  unsure (1)..(372): unsure at all n locations
agcttgataacacgcagagacttacgccttcttctgcgaccttcgtcaatcgcgggcgacaagcctgttgacacgtggagatttacgtcatcttccgccctcacaagatctgtcatactgactnttgagtcacactgacgaccggaaatacccgaggggctatccgtataaactttttgctgtctgtaagacgaagagcctgataacacgcagagacacacgtcgtattatgcgcccttcgtaatcgcggccgacaagcttgttgacacgtggagatttactgtatctttctggctcacaagatctgtcatactgacttttgaatcacgctgacggacggaaatacccgagtggttatcgaaataaactttt

SEQ ID NO: 131835 - DNA, 284 bp, Glycine max
  unsure (1)..(284): unsure at all n locations
ggtatttccgcccggcagcgtgactcanaagtcaatatgacagatcttgtgagcgcggcagatgacgtaaatctccgcgtgtcaacgggtttgtcgtcgcgattgaccaagggcgaagaagacgacattagtctttgcgtgttatcaggctttttctcttacagacaacaaaaagtttatacggataaccactccggtattttcgcccgtcagcgtgactcaaaagtcagtatgacagaacttgtgagcgcggaagatgacgtaaatcttctcgagtcaacggg

SEQ ID NO: 131836 - DNA, 305 bp, Glycine max
  unsure (1)..(305): unsure at all n locations
agctttataagcatnntttaattcttactatcagaagtctcaaaccgcacaaactgaatcgaaccaacctacaacatattggtgtggatctcacaaaaaatataaagagcaccatacgcgactgtaaaccaccctagatcgcagtattggtagatagctaatgctttctgcatgctgggctctctgaaattcttcgagctaactgaatttgctaaacacattgttggatagttgccttaattgcagatgtccctaacctgcacttagcgcaacctcattgtgttgcctaatttcagtctcacatc

SEQ ID NO: 131837 - DNA, 391 bp, Glycine max
  unsure (1)..(391): unsure at all n locations
tggcattngtttgaaatggaagtgagagaagatgaactttttttgttggggcatgggggtgatatgaccaagagtgcttaccaccatgccaactcttgacaaatagcaccctgcatctgatggggccctttcctatttaagccataggaaatgggtcattgggttgaacttgacccacagactcaacatgtccccttgtgaccctttgggcatgtcaaggggaataggagttttgaacttttgataactatccatccatcaaatagtgatttcaatgatatgttttctccttttctgcatgtgtttggtttaacccttgaaagtgattatattgggtttatcattatccttgcgtgcttgtgctatggccatatcatatgacattacttgt

SEQ ID NO: 131838 - DNA, 362 bp, Glycine max
  unsure (1)..(362): unsure at all n locations
tcaaactcacactacattatctgttgaagattataactatctaaacagcatatataataattacttctgacacctttagaattataaaggtaatggataatggattaaggatcacattccacagcctatagtgaaaaaatatactaagctggcatatgatgaataatggattaacacgtctgtttaatacactattaattattccaacactaactatggataaggaatntgccgtggaacatcatagtatgacatgacatgctcactatccaaccattgaacaataagttctactcaaaccaaaaatttggaccatatcctgatatatcaacaatcatacaatattattttccagtctgcaa

SEQ ID NO: 131839 - DNA, 328 bp, Glycine max
actttgacttggtcataagcttctttaggctaatgcgattaacaaatggcttttttgggaagctgatgatagtcctatacttgtaccttctaaacttttataagatgttccatgagcatcaacctgctgcttgctatacttttgctccactagagaagctggtccttctacaatttcaccgcttctcttttcaacacaatcatgtactgatggatgagctagagtgcccacaccatctaagtctctaatctgagacgaactattatttatagacgccatgtaagaaggtgttgaccacccacgctgtattctatttaactcacatcta

SEQ ID NO: 131840 - DNA, 494 bp, Glycine max
  unsure (1)..(494): unsure at all n locations
tctaagtcacctgcggcatgcaagcttctntgagaaaactttcttgagaagctatagtttagctacacacacccctctcataactaagttcacctccttgagaagtttccttaagaagattcctaaagaagctagagcttagctacacatacctctctaatagctaaggtcacctccttgaaatgagaagcaagagcttagctacacaccccctataatagctaagctcacccccatgaaaaaatacatgaaaatacaaaaaaaaaaatccctactacaaagactactcaaaatgcctcgaaatacaaggctaaaaccctatactactagaatggtcaaaatacaaggcccaaatgaaggaaaaacctattctaatatttacaaagataagcaggctcatacttagcccatgggctcgaaatctaccctaaggctcatgagaaccctagggccttcccttggatctctgacccaatctacttggagtcttctat

SEQ ID NO: 131841 - DNA, 361 bp, Glycine max
atatggtggaaaatattattcgaaatcatgcattgcttattgtggcatatggtatcatgatcaattgtgcaaagacatgaagcgtaaccccagaagaaagaaaggcctttttgcggaagttgttgaaccatatggccacgctgattacatggatcttactcgcaaatgaaaattttaatgcaattaaatttcttttaagtttctttggttggtgtatctctttcataacgagaagttgaccgtgtctttaaatcctgatggggtggtaattaaaaaaaaaaggatttctttaatttatttatttattgaataaataaattacataaagagataaattatgaaccaatgctgatattaaaaa

SEQ ID NO: 131842 - DNA, 407 bp, Glycine max
agcttgtaattggtggagacatgtgatgatattggtgatgaacgacatatcactctctatccaaaacagggatgcaatgtaacaaatggcaatcttaattgaatgtattaaacaagaaaatcatattttagagagtgatgagcaaattagagtatatacaaacaacagcgagctttcttgtaattaatagtagtagaggatgaatggaataagtagttatacagacctgaacctgagtttgaagacctttaatgtgttgaacggccaaatcgagcatgtctgcatagcttgtttgtacaatagaataaagacagacatgatgaagagtgaagaagaagactagaggaggaaataaaaacttatctatggcaagcctgtatctgactgcctgtctgtttttccgtcga

SEQ ID NO: 131843 - DNA, 465 bp, Glycine max
  unsure (1)..(465): unsure at all n locations
tgtgaagcgttgcaatgtagtcaatatagtatagntcattgttccgtctctttgtcataaccagcaagaaggatgttcacagagtatgggttctgtagaaaaaagcaaatgaatatttgaggcaccaaatgaatcattaaccaactaatggatggtctanggactgtttggagaatatgaattgctctaatagagctaaattggagcaaatgcataaattgattttagcttctcaatttgttttcctaaaagtgagaaaggagatgatatatgggagatagggtttagaagataccttgcggagagcagtggcgagttcgccacgcgtgaaattggcggcggcggcggtggtaagagggatgccgttacggaactgatacaaggcgacgttcttctgaatgtactctgtgaactgaaccctanaacagaacggaaaggaacgggatcagaggattggaagagagt

SEQ ID NO: 131844 - DNA, 467 bp, Glycine max
  unsure (1)..(467): unsure at all n locations
agcttctaatttagagtattttgttattgttattccgggtagtctgatatttgtttccttgctgtgacctgtctcgcggatgaaattgagatgaataaatagagattaggtaaatgctaaaaaccggcattaagaaaaaaaatatattgagaacaagtgcttactatatcaaaaacaattttttttttaattaaaagcatttcatagtaaattttaatgctgttcaattttacctgttctttcgatatacaactttaaaatatattaaaaatactttttttttttgcatttaacaaattgatgttattattagtaatggatatattatttcattaaaaaagtaagagattaaacttttgaagctatagtaaaatntatgtaaataaattgcttattgacggtggttaaatttatgtttaaaatttagtttacaaaanaaggaaaagtatctntaaattaatatatta

SEQ ID NO: 131845 - DNA, 434 bp, Glycine max
  unsure (1)..(434): unsure at all n locations
ctattatgctatgtagcatacttttatctgaatctagaaatatgaattatgtaagcaaagttggatgagatggagaccttagattcagtaaaagctgttcaaagttcaacttaaaacttaaaaattgctgcttgagtgttagtttgttgtcaaattgtaatttgttttcccccttatcaaagagattgagttgctacttgttaaaggaaaatttaaggtagaagttatgatatttttgaaaagacaagctatggtctttacaagtaacaaagggattgaagtgggcactgtcatgccatcgtgtgtcttccttaccactttatccaatcaactggatctgtagttgcatgacaaatttatgatgaaccttttatttattggtcccttgctactctatgtttcanaataaacatttcanaatttaatatatgaat

SEQ ID NO: 131846 - DNA, 433 bp, Glycine max
  unsure (1)..(433): unsure at all n locations
agcttgcattgtgtgtggaccatttatggtatgattggcaactntgatgtgtttgtgaaaacataaattacatgcaaactgagattcttcattacttgtttttgttcttccatgtgggttttaaatgttgtatctcttagatgtgcacatcatgtttttgtcttgaagtctctctatgactcgtgtttttatatattctaaaccacatcattttcaaatattgaaccatatcatacatgactgtattaagatgttccattgttgtttttcatgtctatcatttgagttttggaacaatctggattatactgtgcatatatgctacaatatatatatatatatatatatatatatatatatatatatatatatccttgactgttgtcaagattatttgcatacacttatagcatgtgaaaccgctctcatacat

SEQ ID NO: 131847 - DNA, 449 bp, Glycine max
  unsure (1)..(449): unsure at all n locations
tactcagcttccaaagactcgcgtnatcgattacaaatagatttgtgttttaatatagagngatgcactaaaaatgtttcttaccttagaaacaatcttcctacttctacatgatgatgattaagactaagaagcaacaatccatacaaatgtcactcaatgagttgggcatttaaaaagacaaaactcttcaaagcttgatcttcatgttgttcccctatctctaacattcttatcctttatctctaagtgaaactcttgaagaagtgatatccacccgatgagcctaggtttggcatttttttactgagcaaaaacttaatagcagagtgatcagtataaaaaatgactctagacaaaacaaaaggtaatgcctaaatntattaatagcaaaaacagttgctaaaaattaattttcagtagtggagtaatttttctgggcctcatct

SEQ ID NO: 131848 - DNA, 460 bp, Glycine max
  unsure (1)..(460): unsure at all n locations
agctngaaatgaggaagtgtggattttgatacttcctacttttattcgttgaccacagagtggtacctggagatatgtcgcgggggtcaggagaccttggggacgtcaggtggggtgctattgcccaaaaccaagcttgaccaatcccgacccaacccgggtatagtccgtcagtgagaacctgtgatgtacctaaacaggcgagctcttggcagtcaacagataaaagaacaaagaccacaaagcaaggaggcttgtgtggtggctggccagctgtgaactttgagtgttatatgggatatggcctctggtaatcgattaccaagggtgggtgatcgattacaaggcttaaaagtgaagacagaaagctaagatggcctctggtaatcgattaccaaggggtgtattcgattaccaggcttaaaaacgagatcaggaagctaagagggcttctggtaat

SEQ ID NO: 131849 - DNA, 441 bp, Glycine max
tgcttgtggagcttctatggaggctggatctttgatctttattgaggtccttcaatggtgatttttcaccacagagatgcagcggaaggcaaaggagaagaggagaggggaggcaccatccactatggaataagccaaggaagaaggagcttcaccaccaagaattgccttggataagaagcttgaagaggatgctttaatggaggaaaagaaagagagaagcagggagcacgaaattgaaggaataaaagagggaaagaagtggaactttgaagtgtatctcataagactttcattcatccaaagttacaacaagtgttacacatgcttctatttatagactaggtagcttccttgagaagctttcttaagaaaacttccttgagaagcttctttgagaaaacttccttgagaagctagaagttagctacacacacccat

SEQ ID NO: 131850 - DNA, 468 bp, Glycine max
  unsure (1)..(468): unsure at all n locations
agcttctaatttcttgaatgacctgattcttgatggagactcttgtgatgaaccatcagtccttctgggggataaagggggcagagaatttcgactaggatctgaaaaattaggagaaagatttctagagcttttgcccattactgaatgaggtatagttacaggggctgtctcagaacgtatgcgagtttgcattggattgccaccacagaagtatgtaggaggcgatggagatggtgagggtgaaaatggaggagaaagttgatactcatcgtaacttggagatccttgccgattctgcattcgatagttgtgcaatctgacgccgtaactatcagtaggtggggatggataatcatatggcctgggagaacctcgatacactggcggngagccaacataaggatgattctgtacaaaaggtgctgctttatggaagccagatgtccagctatgaggacgatcaag

SEQ ID NO: 131851 - DNA, 459 bp, Glycine max
agcttgtaatccgtacacgattattggcatgcagcagtaatataatggactccaaagccgcccgcaagaaaaccggaaaggtggtttcgaggacccgtggtcaaaggaaaggaaaggagcacagattttccaattttgaattggggtaacaatcatagaatcaagattctctaattaaatcaagattgttgacatggattaatggtccttcgaaaagatacacatattctgacttcttttttgatttatttgtgtattataaatatttcataattgccatatcataccaacatgttatttgcatgagttaaattgaccccagttgtaaataaaaaaaatataattagataaagagactccattaaaagtaataataattagacaaatttcctaccctatattatatgtcatcaacaactaatgaatacgacaacaaaattaatgttacatatcattata

SEQ ID NO: 131852 - DNA, 422 bp, Glycine max
  unsure (1)..(422): unsure at all n locations
tgtggttaatcatttagaatctattaaattaataagttcaagtgttcaactgttcaactgttgaacatgtcataaataaataaataaaaaacttgcagcaatgtagaattgcacctcaaagcgaacagcagttcctgcagctatattgaggcgcatgccatatgctttccttcgatcaaaagtcaagtagggatttacttcaataaaatgatagtggctaccaacctgaatttttcataactattaggcaatgtttgcttcaattcacttggaaaacctaacaagaaatcaatttggttggatatttgaactcctaaaatntattattctgacaagtgtcaaaattgtaacaatatttggtctgacaagaaagaaactcaagcttctgatttgtgaaacagtagttcacaagagagatgaaa

SEQ ID NO: 131853 - DNA, 435 bp, Glycine max
  unsure (1)..(435): unsure at all n locations
ngataactnttccccagctctatgtctcagacaagggtancttctttccctttattngnttgttctctatatggagaggctagcattgaggattgatgagcttanggagaataatactggctccctatttccctttccagagggggacgggtcctcctttgactcacttgttctttgcaaatgatgttctcctcttctgtaaagcaacgaaagaccaagccagggtagtggattctacccttgctctctatggtgctgcgtctgaccttaaagtcaagcttcaaaagtctaagatgatatgctctagaggtgtgaatgttgatcttatagggagaattgacaatattatgggatatagctgctcaaactctttgggaaaatatactggtcaacacctcattgaaggacatgctactgataatgactttaatcaca

SEQ ID NO: 131854 - DNA, 421 bp, Glycine max
  unsure (1)..(421): unsure at all n locations
agcttatcttacctatctatctcctaaatgtctttgcanagattcaatggataaaaaacatgaagttctaattcaagatgttttctttgttgcatgggcataatgcaatcactctatgtctagcaatgattttattaagatgtccctacctttgagttctactaaaaattatcctctctcgagcgactaatccctaaaactgatgcatataaaaccttcaatgtatttctactaaggattaccctctttcaagcgccaaacccctaaagatgatgcaaggatgaagcatataatacatttgttggcattttaggcctgccaagccctaactaaacgggtttagcctttcattgtcatgagagacttttacactttatggggttgatatgaatggaagaagatggatggatagaggaagaaa

SEQ ID NO: 131855 - DNA, 437 bp, Glycine max
  unsure (1)..(437): unsure at all n locations
actaagctttacatgcatgttcacaccatatnnactatacttcgatctactgatgcaatctatttgattgaaaagatnatttatattactcttctaatgtagtcgacaactaanaaaaaatattacagaaagtaatgcttaggccaatctaatcaagtcattttgaatctcgtcattactatcatgcatctcaaagagaaggagaatcaggcatcgtaatacatagcacaacaaaacatttaaagaaaacatgccttccaaagccaaccaaggttaaaatgtattcatatttggtgaactttttcaaaataataacacatatatataaacatggtggaacaatctgaccacatgcacaacacattccacacattatttctgaaaatgagtggcaagggaatataataaagcattggtattaaaactggacatgcact

SEQ ID NO: 131856 - DNA, 459 bp, Glycine max
  unsure (1)..(459): unsure at all n locations
agcttccatcaagtggttatcagttcacattagcttcaagntggtgctccttaaacctccattaattttttttgctttaccttctcttccattattgtttcttcatttttctccatgtatctcctcacatgtcttgtgctaaatgttgttaacatgattatttagagtttccaccgattaaacttgctataaaagctagatttgattttcaatggttcaaatttcttgttcttgttcttgaaccatgaattgtgttgagtttaggttcctttgagttttgccatgttattttttgtggctgaaacctaaaccatataattcttacaaaaatattaaagtagaagacaacctcaaaaatctagagtggcttgttcacctatcgtagtttgtcatagaagtcatgtctaatcatgaaacttgtcacataagatttcttatgttgtgctgaattttattttc

SEQ ID NO: 131857 - DNA, 331 bp, Glycine max
tgaaggtgtgtaacccaccattgtccataatattattcttgtatacgtctactatcattgctattatttctttctttgtcattaagggaaacacttgggctgccagatccctccacctttttgcacatgttctgtagttgcatcctatctgaagacattatactgacactgcctaatgaaggcaaccattaggtccttccaagaatggactcgggaaggttccaagttagtgtaccaggtaacatctaccccagtaagactttattggaaggaatgtatcagcaattcctcatcttttgcgtatgcccccatcttccgacaatacatcttt

SEQ ID NO: 131858 - DNA, 475 bp, Glycine max
  unsure (1)..(475): unsure at all n locations
tctaagcaccgcggctgcagcttgctgattacattctccccttttgatgatgacaatcacctgtaggttaggagcaacaacaacaagaaaatatccatttgtatatatntttattccccctttgttttgcaatgattgcttatatgagacatgaagatttcataggtttcatatataaaaagttgtctcataaagatttcatatatcttttatctatctctctcccttggtcaacataaaaaacaaatcatgaatagagaggaaaaagatgttaccacttgttgcaatgtatgagaatcaagtgataccaaaaggcattaaaacaatcattcaatattaatcaagcaaaaacaagtacaataacacatcaatcaaaaacacaattaatcaaacacacaatcaaaagcaatcaacaaaacacaataaaaaaaattatcaaagacaatcaacataactatcaatcataatcatcaat

SEQ ID NO: 131859 - DNA, 390 bp, Glycine max
  unsure (1)..(390): unsure at all n locations
aacaaattttttttttaggcttaagaacccctaccttaaaaaaaacaaattggtttgtggttgatgacaattagcttaagtgaatgggttcattttggctaaccccaacctcgaaaacttgagaaaaaaaaaaagagattatctatttacatacgtgtcacccagctggacccaattataattaattttataattttagttatctatttactatctatntactaaatattaaaacaaaccacctagctagttggacacatggatgtcatctctatcaaaattcaaactctgtaatgattaaagaatggatcatgtaatttaattaatgacccactagttcaagtgaactccaaaaaatatctttatgcttaattaactaatagacaagca

SEQ ID NO: 131860 - DNA, 404 bp, Glycine max
agctggagttgctgcacatgatgtccaacgttatgtcaaggaatcagatcgggctgcacaatgcacaaggcaagataaaatgtcaaatgaagaattgaagctgcaggatccacgatgtcggatacaatgtccaggacatcctgcccgaaaatactgaagttgctaaaagcattgaagctgcaggatccacgatgtcggatacgatgtccaggacatcttgcccgaaaatactggacatctaaatctgttatatctttaacagattattgtgcagttagcaagagattagatgatctatctttaggaacgaattaaaagataattaaagttcgaattacaaactagaagagttcgttcagggattaaagaataaagattaaagataaaaactaaaagatcaaact

SEQ ID NO: 131861 - DNA, 234 bp, Glycine max
  unsure (1)..(234): unsure at all n locations
ggggaatttcatgtgtctcccccatgggttgagagacatgtgcatgatcagattgaggtttgtggctctcaataagtatgggagtggagttattgacattctcattgggagtgtatgccacattgngtggtgtatagttggcangcaatccatataactgtaatgcgtgcttcgtttgaatttccacataatggtgggcacctgtgctaaacaaatctttgcctaccatatctg

SEQ ID NO: 131862 - DNA, 395 bp, Glycine max
  unsure (1)..(395): unsure at all n locations
caacttagggatgttggtgaagtcgagcaatattgcttgagagagaactggaatatccatcagcctaagaaaaacaagttccgactttnttaaaaccaacatctgaaagcttcaaacaatattttgaagacaacttagggatcttggtggagtcacgaaatattgctaaaaaggtaacattgccagagatctagatttcccatcagcctaagaaaaattcatggcaagtgaagcaagttctgactttcttaaaaccatgatttggaagcttctaacaaatattagtgaatacccaaaattatttaaaacttgagaaagagaaaaatcttcaccaatagcaagattctcttgagtctcataatgggctaaaactagatgagcaaaacatgtgctac

SEQ ID NO: 131863 - DNA, 177 bp, Glycine max
  unsure (1)..(177): unsure at all n locations
agcttanggatggaatacttacttgntggtatgtttaaaaacgcaaaatggaatcaaaaaatgcgaaaaaggatgaccctagggctgcaaactcgtcaatcccgtgggtatggcttttgaaaggggggaaaggagttttttgaatgaaaaaacgtccctcccttcgtcatttttata

SEQ ID NO: 131864 - DNA, 257 bp, Glycine max
ttttccccatggaaatccaccggagggcaaaggaaaaaaggataggggaggccccttccccttgggattaacccaaggagaagggaccttcccacccaaaatttgccttgataaaagcttgaaaagatcttttatggaggaaagaaagaaagaggggggagcacgaaatgaagaatataagagggaagaagtggactctgagtgatctataagacttcattctcaagttccacagtgtacacatgctttattataac

SEQ ID NO: 131865 - DNA, 495 bp, Glycine max
  unsure (1)..(495): unsure at all n locations
ttaagtcacctgaggcatgcaagcttgttacctcatactngactntgacttgtataataccttttcttaaaagcatgtgcttggttcgaccccataatccaagaaatagaaattttgattgtcaatactttgacaaccagtcatagagacgaatgattaaggcatacttatgctatgcatgacaaatgtaattatgagatcaacatgagacgcccaaagaaccatcctttcctagttaacaatgcattaggtatcatgttcatgtaattttcaatcatttttcaagagaaattagtgtacaatcccaacaaggtttgtttatagctatcatcatggtactcaacacatgtaattaacaatgtggtgtaaactttcacgcttcattgngaactttcttttgttctttttattttgcggagaaaatgcaaggcataagcaactatgtgtcaggatcatgcacgagtgaatataacatgcgaacgatgaaaatagaat

SEQ ID NO: 131866 - DNA, 403 bp, Glycine max
  unsure (1)..(403): unsure at all n locations
tttttgccactggatacaaaggtgaccaaaaaataaaaaacatattcaaatctccaatcttccaaaattacatcattagaccagcaacctcaacagtttctctctacaagttagtgtgtgataggtttgccccattttcttctgcaacctgttaattttcttaaaaaagattgtggacgaaaaatgagccaaacaagttatctattatagctttaaagatgttatttgttattaaaatttatttaattttaattntagttnttttaaaatattntttaattaatttatgattntattaaattacatgtttaaatgaatttattccttgtcattatttttgcttttgatgaaagggcataattaggctatttcatacatgtatacttttaaagagcagntcgga

SEQ ID NO: 131867 - DNA, 418 bp, Glycine max
  unsure (1)..(418): unsure at all n locations
ctggctgagtcatcaattcgcgaagactcttatggtcagtgagtatcacgaaggcatggcccatgagatattgacaccggcgtttcacaacagtggtaatggtgtgaagctcacgaatgtacgtggaagagcgaaggagcttggggcagaattgcttgctaaagtaagcaatgggatgacccctttgcattagaacagccctcataccggacccagaggcatcagtctctataacaaaaggaatggtgaaatctggcaatgccagcacgggtgtggcggtcatggcttctttgagcttgacgaaggcttcctgggcctcgggtgtccatttgaaaccatccttgcgcangagctgggtcaagggctccgctatttgtgcatagcagtggaaaaatcttcagtagaaccctggtaatcc

SEQ ID NO: 131868 - DNA, 356 bp, Glycine max
ctaggccatgtactctgcttcagttgttgaaagagcaacaagtgattgttgatttgctttccaactgattgttataccaaacaaagtaaacacatatcatgttaaggatttccttgtgtctacatttcctgcaaaatccacatctacatagcctatgattgctgcctcatgtagtgtcttcttgtaccttaatccagctttcaaagatccatttagataccttaatgtccacttcatagcttcccagtaagcactgccaggatcttccatgaacctgcttattatgcttactgcatgagccaagtcaggtctgctgcaaaccattccatacattatgcttccaacaccactgacat

SEQ ID NO: 131869 - DNA, 462 bp, Glycine max
  unsure (1)..(462): unsure at all n locations
agctnttcgattcattctatgtgctcgtattggttcacattgngtttcgtgcattttgattctcgttttgtttactttttataccccctgttgacgtgcttaagccattttacttaagtcatttcttgcttaacttaaaaataaaataaatttccaccgaacgtttgaattgtattatccgttaacttcggttaaaatcaattccgaccgttcggtcgtgccgtaaccacgttggaaatcaaaaagaggtaaaaaataatataataatcaaaaaatatctttttagtaaaataaagcggaaaatcaatcggacgttttctctgtgggatttctcattcttaatcgaattgattaataactaaagtgaaactaaggctaanatcaactcgcctagtcaagctcgtccacaaaaataggctattgaaagttcgtcatttaattcctcactaagtaaaatggatc

SEQ ID NO: 131870 - DNA, 431 bp, Glycine max
  unsure (1)..(431): unsure at all n locations
gcattccaatgattaaagatctctagatgtgaactaaagatccttttagatcttgagaaaaggatgaagaaatacttggttatgaagtaccatgtcttagtgttattgaaacactaatgtatcttattgtgcatacacggcgtgatatatcattttccactaattcactagcaaggtataattccttaccaatataaagacatttaagcatgtactttgttattttagaggttatttgttatatcctcacaatgatatatcataagtttacatgaggtgatacaaatattccttgataatatgtgaaataagccaaaataggcacatcaactaatcatgtcaaaattntagctcaacatgaggaaaaatggcatcgacgatcacatatgaagacaantgtacatgtatttctcagtttaaagaataataca

SEQ ID NO: 131871 - DNA, 490 bp, Glycine max
atctctaagtcacctgcggcatgcagcttctacttatgaccctgagttggtatatgctacatgagctacatgaattaatttggtaaataaatatttttctgaatattaatataagacctactattttatgcagcggatcactgccgaagctgctctaaatcatgagtggtttcgtgaagttcctctccccaaaagtaaagaattcatgcctacatttcctgctcaacatgctcaggacaggtattttgacctaataagaaatgctggagcaattttattaaagaaaaactttttgtaattctcttgtctagataaaagagggaagttgtgtaaatatttgttgaccctatataacatttattcttgacaagttgtcataatttcatcaatcatcatataaataggcgtgtgcggagaatatacaagagtccggatcctttataggagcagcgccggaagggagttgcagcaggtgatacatggactggtg

SEQ ID NO: 131872 - DNA, 313 bp, Glycine max
gcgcttggaacatagtcgatgactgtgggaggtggtttgccataaacgatttcaaacggcgtgatgccggagctggaatggagggacgtgttataactccattccgcgagaactatgtactgatgccatgttgaaggttgaacgtggatgaagcatcggaggtattgttcaacgacacgattcatcacctccgtctggccatcagactggggatggtatgaagtgcttaaccggagtcgcgtgccgctcaatctgaacaactccttccaaaatctgctcacgaagatcggatcccggtaggagacgatgcttt

SEQ ID NO: 131873 - DNA, 476 bp, Glycine max
ttaagtcacctgacgctgcagcttaagaaaaagatggcctatttatatttcttatttccagaagggaattctatcaatagacctccaatctttaatggagagggttaccactactggaaaacccgaatgcaaatttttatcgaggcaatagatctaaatatctgggaagccattgaaatagggccttatatacccaccacagtagaaagagtttcaatagatggtagttcatcaagtgaaagcataaccatagaaaaacctagagatagatggtctgaagaggatagaaaacgagtacaatacaacctaaaagccaaaaacataataacatctgccctaggaatggatgaatatttcagagtttcaaattgcaagagtgctaaggaaatgtgggacactcttcgattaacacatgaaggaactacagatgttaaaagatctaggataaatgcactaactcatgagtatgaattatt

SEQ ID NO: 131874 - DNA, 406 bp, Glycine max
  unsure (1)..(406): unsure at all n locations
agatgatgaccaaggtgatgaccaaaagctcaatggtccatccaagaatggggtccagatattccagattggatccagaagacctccagaatccagaaggaaggttgagaacacttccagactcaagaggaaaaagtgaagaacacttcaagatttaagaggaaagttgaattcaagaatcaagattcatggatcaagcttcaagaatcaagatcaagattcaagactcaagattcaagaatcaagagaagacttaatcaagataagtatgaaatggtttttttcaaaaacggagtagcacatggatttttctcanaacaagtttaccaaagagtttttactctctggtaattgattacccagatggtgtaatcaattactagtagcaaaatgaatttgaaaaagt

SEQ ID NO: 131875 - DNA, 488 bp, Glycine max
  unsure (1)..(488): unsure at all n locations
tcagagtcacctgcggcatgcaagcttccttgagaagattcctaattttctatagcttanctacacacatcccctataatagctaagctcacccccaagccaaaatacatgaaaatataaaaaaaagtccctaatacaaagactactcaaaatgccctgaaatacaaggctaaaaccctatactactagaatgaccaaaatacaaggcctaaaagaaggaaaaatctattctaatatttacaaagaagagaggatccaaccttggtccatgggctcagaaatctaccctgggattcatgagaaccccaaggccttctttagcagctctagcccaatcctcttagagtcttctatccaatacccttgtggggtaggattgcatcatcccctccaccttggaaaggatttgacctgaaatcccgaggttcttcatattttgggcttcttccctcgacacctgtaaaaagaaataaaacatatgtattagt

SEQ ID NO: 131876 - DNA, 389 bp, Glycine max
  unsure (1)..(389): unsure at all n locations
atctgnagcaaaatagtcatcagtctttataagaatgatagaatcaatgaagctactgtgatcctagacaagatggtggattttgatcttcttacagttcataaatgttcaaataagtctgtcaaaaatgatttcataagtctagaagctcagagaattgcagactctcttgataagagtgatatatgcaattctcttcccaacaatattgtgtacaacatagctatctatggtctttgtaagtctgggaagattgatgaagcaagaagtgttctgtcaattnntgtgtctagagggtttcttccagataatttcacatatggtgccctaattcatgcctgttcngctgctggtgatgtgggtggtgctttcaacttaagggatgagat

SEQ ID NO: 131877 - DNA, 324 bp, Glycine max
agcttctccctcactttttataaatggttgaaaagtgaagtggacaagggttcacccccttaagcactgctctctctctctctcaataggcgaagacaattagatccgcgaacaaaatccaagccgaggcgcttacgtgactttccgcgagtgattacgcgaagattctcgaccgatctcaagatacatggttcattcttatttcttcatcttcaatgggtcacacctcaaaccaacttttattatcctatgcacccgggcggccacattagtgacgtataaatgccgtggctttctcttatccctcttgatggccaaccatta

SEQ ID NO: 131878 - DNA, 282 bp, Glycine max
tggagaggatgcttcaatggatgacacgaaatatggatagaaacagaggccggagcattaaatatgacgaatatgactggatagatagtgcactcttaggtgcgtctcacaagactctcattcatcaaagttacaacaagtgatacacatgcttctatctatagactaggcagcattcttgagaagctttgttgagacaacttccttgagaagctgctttgagacaacttacttgagaagctatagcttatctacacacacacctctaataactatgctcac

SEQ ID NO: 131879 - DNA, 486 bp, Glycine max
  unsure (1)..(486): unsure at all n locations
gatccttaagcgactgcggctgcagcttaganaatgatttcttacaaaagttattcgtataatgcaactaacaaggatgaagctttaagtgtgattcctttctttttcttatcattctcctcatgttgattcagtctcattagttccatttcgtgttcctataactttccaaataaagttgcaagagacatgttagaaagatcccttgattctgtaatagttgttacctttggttgtcattccctacttaaacatcttagaactttattaataagatcctcattgggaaatatctttcctaatgatgcaagatgatttactatgtgtgtgaatctcttttgcatatcatgtatagtttcatttggattcattctaaacaattcatattcatgggttaaggtatttattctagaaccttntacatctattgttccttcatgggttacttgtaagggtatcccacatatcttttgcactcttgcaatt

SEQ ID NO: 131880 - DNA, 401 bp, Glycine max
  unsure (1)..(401): unsure at all n locations
tcggngccattcctgcgaaggcaaacatttgtaaattatttntagtgggacattactcttaaagcaaaaatggcatataacctcctcccataaatacaaacatcaatgtaaatttagagcaagcttatgcgcctatttccttacaaacgttctcttgcacaagacatttaaccgaaaaaatgcacccatatacaatcaaggcagtttcgttacctagattatttacacgtacctccaaggtgtatttgttacttacatcacacacatctccttggctaaattcacatacatgcatactcaaagcattttggggcaccaaaaattgcacctgtgcacatcttggcatttctaatacctatacatacgcanacttcatgatgaatcttgactatctacacaat

SEQ ID NO: 131881 - DNA, 426 bp, Glycine max
  unsure (1)..(426): unsure at all n locations
gcattatttcagtagataaccaaaccctatgcttaactntaaataagccttaaataacccataatataaatgtcattgtctttttttaaccaacaatgtaaactgtaaggtaaaccaattntaccgcagccacatgaattaataactaaactagaaaatagaaatggatgatcccagttcagcattctaaactcaaaaatattccatacacataattttcaaagcacaagcttcacaatattgtcactagcaacagagcattatttcagtagagcattatttcagtagataaccaaaccctatgcttaactttaaataagccttaaataacccataatataaatgtcattgtctttttttaaccaacaatgtaaactgtaaggtaaaccaattntaccgcagccacatgaattaataactaaacta

SEQ ID NO: 131882 - DNA, 383 bp, Glycine max
  unsure (1)..(383): unsure at all n locations
tattatttacctggtattttaatataattttttaaattaagtcttctggttttccaaaaatggtacaccaataattggtttattaccttttatggatgtatcaaatgcctttgtggntggaaataacagagtccctaaatacaaaaataagaatcacacacaacaaatattttcaacaccaaaagtggatcccgaccaaagcacacacatgaacccgtgcatgataattccattaattcattcaaaagaagaataacaaaccacaccaaataaaagaaccattctgaaagaaaaacatgcgccccattttacacacaatacatgcaacacatcaactatggcactaacgaaagtcgcagtagacttgctactcaaatcgcact

SEQ ID NO: 131883 - DNA, 471 bp, Glycine max
  unsure (1)..(471): unsure at all n locations
agctntatacctaccaggtatgtaattgcttgcttctcagttagatctggaaattcatagcaagaggcaatcccagagtatttaaataacctacatttattacggtgtcaataataatatattaattagcccgtgaaattctaactcatctcttgtaatccctgcttaattgtttttcttaaatttttgtattaagttcctcagctttgactttatctgatatgacgaatttgagtttctcacatatggcattctttttcaaaagaattgtgaaaacagtaaaaaaaaaaactcataatagatgttgcttttgtatatgagcagtagacttttagaaggaaagtaaggtattgtgtgatttactcattttaaatccctattaatttcttgttcattgattatttatttcttcttttctctgattntggctgcagatttgcagggcccttgcttatatacataactgcattg

SEQ ID NO: 131884 - DNA, 469 bp, Glycine max
  unsure (1)..(469): unsure at all n locations
tttctcacctagtgagataaggcttttttgttgctcataaataatttttgaccgcatggatattttattccatctacccacccttgtgggggaaatcattctaatcaaatcattttttctattcttgaaaggaggaaggatattgctaaagattataacaatgagatagaagcatactcaatcagttatccaaaattctgattgaattaatttgcataaatctgatcatctattaaagttcagctttaccttttggttatttatgttatgacaccagcctcttaatattcacatggtgcataagtgctagaggattccttcctcaagacacaccgattcatttcaaacctgaaatgctataaatatgaagagaaaaagattcaaaacttacagaatcaaaagtctccaatggaagaccctncaggtgccgcctaatcacagcattacccctcctatggacaagtttatg

SEQ ID NO: 131885 - DNA, 392 bp, Glycine max
cgcttgtctccacctcacgcgcctgcaaattacctccattctccaaaaccatcatcgccgtcaatgccaccggcttcgccgccgcaagtctccgaccaggcttccgcgagactaatcccgaggaccggacggacctccggccattgggtgttcggaaatcgcgggcgtcggcccaagctatgggaccagaggaagagctacatcaagctctggtacagagcgagggacatgcgcggcgtggtgtggctcgacgagaaggtgaaatcggaggaaaacaacagcgacacgctcccgccggtgagaatctccggcgacacggcgaggttcaagtacacgaacaggcaagggcaccggtctgcgattaggatctcgcggatcgtgtcggagacgct

SEQ ID NO: 131886 - DNA, 361 bp, Glycine max
  unsure (1)..(361): unsure at all n locations
cctcaaangtcagaaatctcagcacttcaaaacggggggtttggcaatggaaagtatttaggtctttcatttatggtgggaataaacaaaaaagtagtcttcaatttcattaaagatagactttggaaaaggattaagcatctctcaaaggtcagtaaggaagtacccataaaattttgtgcacaagatatcccaacctattgtatgagtgtcttcttcctcccaacttttctggaggatgaacttcaaaacatgatgaagttcttctgatggaaaaaaggaactctttacatgatataaattggatgagttggaagcaactactgaatttgcatgttcaacccaaattcaaacatctacc

SEQ ID NO: 131887 - DNA, 418 bp, Glycine max
gaaaagattgattgaataagtgtaaaagtgtattgaaaagcaaatcaaagccttgcttttatagactcttcatgtctggtcaagacaaccattagaagagttatgacttttagaaaaacttaaaaacccaattgaaaaagtaaaaaactatttgaagagttacatcttttgattttattcagaaacaatcactggtaatagattaccaaatcagtgtaatcgattacacaaagcttttatgtgaaaggatgtgactcttcacatttgaatttgaatttcaacgttcaaaggcactggtaatcgattaccaaaacattgtaatcgattataagctttttgaaatcaattggaacgttgtaaatcatttgaaaactttttaaattcattttgtactgtaatcgatacaacaatctggtat

SEQ ID NO: 131888 - DNA, 357 bp, Glycine max
  unsure (1)..(357): unsure at all n locations
tactaagctttaccaatggactacctgattatttctttgattcttttttgagccttgtttccctttccttgttttgaagctcactacaagccttaagtgaaaaaccatgatatcaccatatccttaagggaatttggagctttggaattgttttgggaataagtgtggggggtttttgtttcattggacaacttggttngttggctatgcttcatgatgtattttgggccatacttgatgtacattgtatattggttaaatgttggacatgctgaatgaaatgttgtttctcataggctattcataaataaaaaatcttaataaaaaaattccagatacagaaagcgataaagttga

SEQ ID NO: 131889 - DNA, 337 bp, Glycine max
  unsure (1)..(337): unsure at all n locations
agcaccgcagctgcaagctgagaaaaagcgagcagaactttggtttgcttgactcaacncnctattctgatgaagaagcattagacacgaaagaaaacataaatccaaatacagagatcaattcaggggaaagcaaagatgatgggctggagaaaatactaattaagcctgtgctcagattataaagagagaagctgcttgcccagtcactgggaagccatgttgaaaactataaacaaagaatgaatcatggagcaaccaatgtngccgattgcgagagctcggataaagttttagaatagcacatctctaggctggagatcgagaaaatgaggat

SEQ ID NO: 131890 - DNA, 381 bp, Glycine max
  unsure (1)..(381): unsure at all n locations
ataataataagcattatttgttgttgtgaatgcatngggacgaataaagtgatatattaacagttttggctgcaagttattaagcagcaagtgacagcttgccactgaaaatgagatagaataatgtgttgtaagtcattgctgaacttaaaatatgaaaccagagagggtgaataagtatactctctctgatatctngattcttgactagaaaagcatgctacaccttgactgacaattctctatccaagtaacaatatctggtcatttatatgcaaccttatcatagaactgcagacaacatgtgatgcataaataattttactagaacaaagaagcaaatgattctatttctctggtactgtntgaatagtacatgta

SEQ ID NO: 131891 - DNA, 460 bp, Glycine max
tgcagcttgtcaccacgtgcgtgggttagactgtcatggccgcggcagcgttcaacgacgtggccccatccacttccgcggcagcgtttaacaacttggccccatccacttccacggcagctcgcatccttcgcaaatgcttgagcccacctcttctccctcctccaactgccccaccggctcttccctcacccccgtctatccctccgaccccgcctccatcagtgaggggcccgctgactcccccgtcgtcagccccaatagccacgcccacctccgcagagtctccggctccggatctgtcgccaccgttgccttctctgctgcggccgccttgatgatgtagattcgtgattggaaccataaactctgcacctagatgatacttatttcgatgactctcaaacatgacattgattgcttttgtgggccttacttaccccaatttaattattctttt

SEQ ID NO: 131892 - DNA, 376 bp, Glycine max
gtctcctgacccccgcgacatatctccaggtaccactttgtggtcaacgaataaaagtaggaaatctcacccttccacacttcctcatttcaagcttgtaggattatggggtatccatcacatgtggtactatgtggcggtcgggcaatggtgcaaatcaattctccacatgcacaaatcacacataaacccaccatccccagttgcccaccttcactgagctcacgtactcccacgtagcccttatcctcgttcctgtcaacgccgggtacccatcaatccttccacaacatccaagtaagtcaacatccaagcattatgtaataacacagtccaaaaaacagggcagaggcagaaaactctacccaaaacacaa

SEQ ID NO: 131893 - DNA, 336 bp, Glycine max
  unsure (1)..(336): unsure at all n locations
ncaaaccacagcacacaaaatctaggtgtgcaagattctttattgtatatagatatctaggctccagaagtgaaattgataatgaggtaaatccgaagcgaaatctcacctcacaccagtccataacatcaatctaaactagcgtcaaactggattcacgcttaaaatctcaccgaatcaaaatctgactcttcaacacccaaatatgccctagagatggctcttggatcaccttggtcatctgttattctctctagcacagtccaagctttctcataagtgctaaatggcatttcaagctaacatggactcactctgacctatgaatactaccaa

SEQ ID NO: 131894 - DNA, 483 bp, Glycine max
  unsure (1)..(483): unsure at all n locations
ggatcttaagcaccgcggctgcagcttatgacaaattgatngtactttatatatacaatatgctaatgagtaaatttttcagttaattataaggtttcgtgaacttntaatacaaacagaaagcattagtgaaacctttgatgaacaagacaagtaatgccccaaatatgtcacaagcaaataaagcaagaattggaactttatggtcaatcctgaaccacaaataagcattgacaagtacattgagaaattgactggaacataaagaaccaaaccatgcaacaaaaaagggtacatgtattgtaatttaaatgtagaaatataagagataaaacatcattttaccttcattctgcgtttcagagtcatggattactttatcagcccagtcatcaccgataatgccagtcttggagacaaacctcaaaccaattgtgccaaccaagccacaaattaaagggggtaccttaaactccttaccag

SEQ ID NO: 131895 - DNA, 365 bp, Glycine max
aactatgtttttcacaatctttgtgcttatgaacacttgtccttttactctaaccatttgtatattgtggttgtgttgaagataaaaaaaaatccattttcaggaattgtaatgataaggaagtttgaggaagacagaagaatgcagcttgttaaattatgtgcttacaaggaaaaagtgaaagtacgaaatattttaccattgtaagcttcatttatctcttgaaattttgcagtaacagcactatctcctccgtgcttgtcaggatgccatttctatcaaatgtataaaaccatgtgtacacagtaataaatcaaacttgtaggagaaaaaaaattcaagcttgtaaaattatgccactaaaa

SEQ ID NO: 131896 - DNA, 459 bp, Glycine max
  unsure (1)..(459): unsure at all n locations
ctgcagcttgtgtatcgatacactgtatngtataatgattaccagtgatagtttctgaacaaaatcaaaagttgtaactcttccaatagttttcaaatttttctaaaagttataacttttccaaatggtttctaagtttttctaaaggttataactcttctaatagtctcttgactagacatgaagagtctataaaagcaaggctttgatttgcttttcaatgtatcttttcaattcattctttagacaacaaactnttgccaattgatttctgagtctctttgaacttcttcttcttcctttttccaaaagctttccaaagatttatggttttccaaaccttgaaaacttatgctattcatccttatcattctctcttcctttgccaaaagaatgctccaatgactaaccgccttgaatcttttcgtgctcccttctgccttttcccaaagattaaag

SEQ ID NO: 131897 - DNA, 357 bp, Glycine max
tactgcatgaaacacctccatcgccttatttaaaattccacatttagcatacatatcaaggaaagaggttgctaaatgacagtttagattaatgtcatgcttctttatgtatacatgaatccagtgaccaaaatcaattgcccccaactgggcactagcacacaatgcacaaataagagtaacttcatctggttttgcatccttactgagctgcatttcatggaagagtgacaaagccaccctaggctttccattctgttcatatgcagagatcagggcattccatgcagcagtccatttatgaggcattgcatcaaatatacagtgagcctcatcataatttcctaatttggcatg

SEQ ID NO: 131898 - DNA, 465 bp, Glycine max
  unsure (1)..(465): unsure at all n locations
agctntcccggtgtcaggatccatattattatgtagcttcttctcatcagataatctttttagtcgtgtgaattgtctagtcctcctagatgtagaccatcactactagaaaatattcttttaatgtcatcattttaacattagttttataaaagccaatgttaaagaaagtgtgggggcataattgtaaataagttgagttagtcaagatcggttcttttaataactgatgtcgtgtgctaacattaatatcagtttgtataaaaaccaatggtgttttatcaattgttaacattggtttttttaaaaattgatgttgtatgtctatgttaacatcaacttttataaaaaccaatattgtggttttttccaaattaaaaccccaatctgtnttagtctcttttttcacccactctcatcaccactcttaatcgtggctcttgcaaacccttgagacgctctttg

SEQ ID NO: 131899 - DNA, 457 bp, Glycine max
  unsure (1)..(457): unsure at all n locations
tatgctgcanacatntataatagacctcctcagctgcttatctaacaacaacagaataattatgatctttcaagcaatagatacaatccaggttggagaaatcatccaaatctgagatgggcaagtcctccaccacaacaacaacctgtccctcctttccagaatgctgctggtccaagcaagccatatgttcctcctccaatgcagcaacaggagcagcagtcacaacaaagacaaccagtaactgaggctcatcctcaaccttccttagaagagttagtgaggcaaatgaccatccagaatatgcaatttcagcaagagacaagaacctctattcaaagtctgacaaatcagatggggcagatggctactcagttgaaccaatctcagtcccaaaattctgacaaatggccttcacaaactgtgtagaattcgaaaaatatgagtgctatcacct

SEQ ID NO: 131900 - DNA, 438 bp, Glycine max
  unsure (1)..(438): unsure at all n locations
catgcaagcttctgcagaagtattccacctgaaagtaatataagaaagggctcgctaccagtacgagtatcctagttgtgcttgctaccggcgcttgtctaccttntcaacttaatcatattatagtatagctctagctagttttgcagtttattatttactgtagtctacccttttattgtaaagatttctacgttgaaaattttgtagtgaatgatacaaatataatgaatatatgatgaaacttagaaaaggcttgagatttattggacaaaatatagatgcagtttcacaaatatttttagtgttatttttttcaatcagaatgaaagtattctgataatatgcataataaagggttaagtttccttttaaatgtcaactngaattatcgaggcgaaattttaatttcgattgaaacattgtattatcagtctt

SEQ ID NO: 131901 - DNA, 440 bp, Glycine max
  unsure (1)..(440): unsure at all n locations
ggagagtattccttagttaaatcctagatatgttttaattatgattcttgtaaggaaatggaagaagatttttttatatatatataaaaagcgtatagatatcaaatcaaatgtacaagtataatgaacaacttaaagtactagctattatgaaaaaatgagatatgataattattcatagctaacaagaatgcatgttgtgtttctcattgctacaaaaagagtcaaaataagtcagaataatttatcaattaaattggtcagactgcaacccgttatgtcagaccaaaatccggacacaaactctntacaaatgttgaanacttatntatacatatgtcattatttaaaaaagatacaaaaaataggtgcatggtaaaatggtaatattcttaaatcgaaactctagttgaactagtaatacactgaccacaaaaatc

SEQ ID NO: 131902 - DNA, 422 bp, Glycine max
  unsure (1)..(422): unsure at all n locations
tctcaagcaagctntcatcacaaggtataaaaaggtattatgttagtggtagtgttaataaaaatagaaaagaagaagaaaataacaccgttaacttatccatgcaagaaagctctccaatccctctgcatatctgattgggaaagcatatgttaaaagaagtcatggttcagagtatcaaagaaaagtcatttgacttgtttcatgtatctgattgcataacagtagtaggatactaatgatgggcctttgacttggtagcatccttggcttagcagtgaaataagaaagaagaaaatatgaaaaaggtaactaattaataaaataaaacactcaaatccccctcttatctganggaggttcctgtataatgtcatgggtcacaaaaccaaagaaaattcattttgacaatcgcatcacat

SEQ ID NO: 131903 - DNA, 309 bp, Glycine max
  unsure (1)..(309): unsure at all n locations
tgtgagatgtttgattttctaccattgaacagttcatatggggttttctttaaaatgggtcttattaaagccctattcctgatataacatgcagtattaacggcttcaacccataaatattttggaagaggagtatcatttaataaggttctagcaatctcttccaaagacctatttttcctttcaacaactccattttgttgaggggttctaggtgcagaanagttatgttcaatgccatgcttttctaaaaataaatcaaattctttatttncanactcacccccatgatcactcctaatagatata

SEQ ID NO: 131904 - DNA, 471 bp, Glycine max
  unsure (1)..(471): unsure at all n locations
ctgcagcttgcacagtgcttgtacagatctcatttccacccgcagcacanaagaaattaggtggaaaaatgaagataaactgtgttaagcaagaccaaaaaacatacaagaagatactgtcagtttgtttcactaattaaatcaaataacaggtttttgtagcttatatatatcattaagaaaccagtacggcagtacctgaaggaagtgaattgtcttttaatcgagtcagaaaccagtatatatcatttaagatatgtaagtgagtgttgtcttttcagacaaatgaagcattagcgaagcgaagacacatcatcatgttgtgcatgtggaggtggcaggagctgaactgcatattcaattctatgtgggcacgttaaggtggaaaatgacactggctggcggattagagagaagaatgangcttatttatatntccttngaaatttgttcaaagtaatcatgatggat

SEQ ID NO: 131905 - DNA, 455 bp, Glycine max
gacactatgatactaagcttaccctcgccgaagacaacgacaagggatcccagatgtttatgcaagcttgccaagtggttctatggacctttccaagtcatagaaagcattgggcccgttgcatataagttacaattgccagaggaagttaaaatacaccccgtattccattgttccaagctgaagccttttcgcggttcactggaaaatatggcgggaattgcctggcacaaggagttactcaatgaccaacccgttgtgtttccattagctatcttggattattgtagagcatccaccgaggatccctgatgatacctcgtgggaggactggaatcagctgtgtgaaaactaccaccttgaggacaaggtggtcttacaagggtagagggatgatacaagcttacaaacagacgcaagggcaggggtcacaaaagcaaaagagggggtgcatg

SEQ ID NO: 131906 - DNA, 458 bp, Glycine max
  unsure (1)..(458): unsure at all n locations
agctntggaaaatgatttctatacataagttatttttatgaagcgactaacaggtagcatgtgatgaaccttgagagggtgaaaatgtgtgggacaagggcactattccttaaaccaatggaatcattagatagtccaccttcatgttactatttttgaccatttcctattacccttttatataactttttttatttttcatcccttacccttaggatgtagagacttaacttgattatcaccattttaattatatattttttacacagaacttgccagtaaattttttggtttaaagggtgtagccagcagtataattaagacttcaatatcatatgttaatcatacctatcttattnaaaagttgaactcgaaacaactttcaaggtatatctttnnttttcatttctcttttaaaatttgaaagatatgcatttagcagagaggatctanactgg

SEQ ID NO: 131907 - DNA, 447 bp, Glycine max
tcctaaatgcatgatcaatgaactgaagtagattattgtttttagtagagcaagcattatgtaactagaaggcttaagctaaacttactagtaaaaggtgttcttctaggttgaattttttgcacttccaacatgacctgaaatggaagatcagaataaattttctttgtccacgggaagttttaacaaatttgaaactaactattaccctttaaagtctaaaatatgtagaagtagagcgattaggcctcaaaacatcctgtaaaatcacgcgcaatatgaatagggagaaatcatacaagtaatcctagttatgccatctaaagataaggctcatatgtatcaagataaaaggatgggagggtagagcaccaggaattagaattcacaatcctttataagtgaatatgtttctttatgaatgtcactaacatcactacatattta

SEQ ID NO: 131908 - DNA, 438 bp, Glycine max
  unsure (1)..(438): unsure at all n locations
agcttggacttggcatgaagaaggtgacgttcatttaatgcaagcattaaaagcttcaatggacttaagaccttagacaaagaaccaagtgaagaatccaactgttgagagacaacaaatgcttagagatgaaggctatatatagaagaagctttgaagaaacaagatatgaatcatttacgtgaatcattctttcatataaagctttttgtaaattcttgtaaagaaacaaagctctcaaaacaccttgtataccttgagagaaaaaactaaaagtgtcatgtgtaacaccccaagttttaagtactaggaatataccataaagagaattcttattaggactcttctgctatattttccataaatatttggtattattatttgtatattaatggnnttgtcctaagcatgtttgtgatagtgtgtatgttcctatac

SEQ ID NO: 131909 - DNA, 388 bp, Glycine max
  unsure (1)..(388): unsure at all n locations
ttcttttccattgtttaatacaaaacatttacaaccaaaaacatgaagatgtgagatgtttgattttctaccattgaacagttcatatggggttttctttaaaatgggtcttattaaagccctattcgtgatataacatgcagtattaacggcttcaacccataaatattttggaagaggagtatcatttaataaggttctagcaatttcttccaaagacctatttttcctttcaacaactccattttgttgaggggttctaggtgcagaanagttatgttcaatgccatgcttttcaaaaaataaatcaaattctttattttcaaactcacccncatgatcactcctaatagatataattntgagaattttcttattttgaataact

SEQ ID NO: 131910 - DNA, 277 bp, Glycine max
  unsure (1)..(277): unsure at all n locations
gaagcaaaaaaaaaaaaaaacagaaaaaaaaaaaggaagaanagaggaaaaagaaaaaaaaaaaagagagggggagaaagggaaaaagagaaaaaaaagagaaaggggggaaaaaaaaaagggaaagggaaagaaaaaaaaagaaaaggaaggagaagaagaaaaagaaagagaaagaagaaaagggaaaaaaaaaaaagagaggagaaaaaaaaaaaaaaaagaaagaaaaaaaaaaaaaagaggaagaagaagaaaaagaaggaaagaaaaaaaa

SEQ ID NO: 131911 - DNA, 310 bp, Glycine max
  unsure (1)..(310): unsure at all n locations
agatgtctgctggcccacgtgatggtatgggcctaacagtgaacatgggaccagaggagcagaatgagccgcatgaacccagaccagtgtggatgaaaattntatgattacttttataatattcatgagaaatcatattacttaatgagagttaacgagaatgagaataatttaaaaaatgttctcgttcaaaaatatatattttaacataaaggaggatgataaaaaaacacggaatcgaatatattggtgttcatattttcagcattttgcttagtgaatgagtctaatctgagctcaatattaaaaa

SEQ ID NO: 131912 - DNA, 314 bp, Glycine max
  unsure (1)..(314): unsure at all n locations
tctcctaggtcttttccccctcattatatcaagaagaaattgaccactggaatatgaaaaataaaagaaaaacggcnacgacaacatttcaaattaattaagatatactccgtagtccatgtagtatcgacgaaaacatcaaaccacaaactcaaattaattgcttacctctagttacggcaacggctagcgaaaccgtttgttgcagatgttgtcgaatgtgaaatgttggaaaatgttttgtcttgtactgctgctgaagtgaggactgaaacttcacgtgtttcttcagacgttgaagattcctatgtcaa

SEQ ID NO: 131913 - DNA, 454 bp, Glycine max
  unsure (1)..(454): unsure at all n locations
agcttctaagggtgccctatngtgtgcngttttttttttncttnagataagaatactntgggcttacaagcttctgagggtgcctattgtgtgctgctttttttttaggcaaattcccttacgaatcatccaaattaaggacttatcataacttgacaagtgtaccaaatttgtcacaagtagtaagggactctgcttgtacttggattaatgcaaatcaaatttaaaagcaatggataaagaatttaaaataaagataaagaaatatattagataagataaagatttaaagatgaaaataaaagatttaaattaaaagatgacaaagatagaagataaagaanattagaaagaataaagaataagatcaagataagataaaaatagaaaattagataaaataagaatgtgataagggtgcgacctgacctgccttgtttgcctaggatgtatg

SEQ ID NO: 131914 - DNA, 451 bp, Glycine max
  unsure (1)..(451): unsure at all n locations
agctttaatggctctagccaatgagttatctatgtgagtagttctctntaccaggttctctaatgacacaatagtaatttcccgccgtgtcatcgataaagacatgttatgtaggtggtcttgccatttgtctaacagacaactgtctgtgcgttacagtattttgacattaactaactaccactgatacacaagaaatgtcacatgtggggatggtattagatgactatgtctgtatatgaaggtaattatggttttgatacatagcataagacatgaaaatttaggtgataatttttcctatttattgtttaggcatattgtcctcttagaccgggtatgtgaaaaaattaggttgagaaattcacttccttgttcaaggcttgcatggtgaaggggaatttctgtggtataccctcggtttagattcaactgtaaccaataaattcca

SEQ ID NO: 131915 - DNA, 451 bp, Glycine max
tactaagcttcatttaaggcataaaacataaggggtttctactaatttatttatttgtcattcggaacacactaactttgcccatctaatgtttatattaacaacttaaaaaaagttattttctagttttacaaaaaaaaaaaattgactaactagtgggttgcattgcagaggatattacagatgcacacatagaaatgtacaagggtgtctagcaacaaaacaagttcaaaggtcagatgaagacccaacaacaattgaggtgacctacagaggaagacatacatgcacgcaagctaagcatttaaacaaggcattcccatcaaacatcaaggcatgtttgggagaaaatcaatttcaaaagaatcaaccacttctagagaaaatacaacaacaaacccctgaggtgattttacctttgaacagacttaaagtcaaacagaggaatgga

SEQ ID NO: 131916 - DNA, 483 bp, Glycine max
  unsure (1)..(483): unsure at all n locations
tcttaagcaccgaggctgcagctatgcgcatatttctacaaacgttctcttgtacaagacattctattaaccgaaaaaaatgcacccatatacaatcaaggcagcttcgttacctagattatttacacgtacttccaaggtgtatttgttacttacatcacacacctccttggctaaattcacatacatgcatactcaaagcattttggggtaccaaaaattgcacatgtgcacatcttggtatttctaatacctctacatacacaaacttcatgatgaatcttgactatctacacaataaggtgctacattttatgctcttttcaagtttttgctacctaaagccgcatgcaaattcaagtatattttcctttgctgactanaattgtattcaaattaaaaggtatacattntttggtaatgtatcttctttacataacatgcaacatatttatgtatatnntttgtgagacattttgacta

SEQ ID NO: 131917 - DNA, 365 bp, Glycine max
  unsure (1)..(365): unsure at all n locations
ccttaatggatggcgcctcctctcacctcttctcctttgtcttccgctgcatctccatggtgaaaaatcaccattgaaggacctcattgaagctcaaagatccagcctccatagaagctccacaagcaagcttccatcaagtggtaatcagagcacaagagcttcaagtaggtgctccttaaacctccattaattnttttgctttaccttctcttccattgttggttcttcattntttctccatgtatctcctcacatgtcttgtgctaaatgttgtaacatgattctttagagtttccaccaattaaacttgctatagaagcaagatttgatttctatggtcaaaattcttgtcttgtcttgac

SEQ ID NO: 131918 - DNA, 491 bp, Glycine max
  unsure (1)..(491): unsure at all n locations
ttaagtcacctgangctgcagctngannacaattgaagctacccgagttcacttaactgggaggttagttttgcatgtcatcgtaacttgaaatgaatatttttacaccaatttcattattttcatttaaataaacttgatggcaattatgtatgccacattatagggtattaggaaatgagcacaatcaattcaaaaacacaacgactggcctcacctactttcacgcgggggatacgatttgcttgagaagaaattattagacaagaagagaaaaagagtagaagaggaagcattgttgagtgaaaatccagcaagtgttgacaaccccccatctccaattaaaagacatgttaagtggaaggttgctcggaccagggcttcaggcaatatgacatctaagttggcacaggaaatagcagataaaattgtaagttgaccaatatgttgtagtgttcatatgtttagtaatatggtcgaatcacaatcac

SEQ ID NO: 131919 - DNA, 426 bp, Glycine max
  unsure (1)..(426): unsure at all n locations
ggggagcacgaaattgaaggaagaaaagagggagagaagtggaactttgagttgtgtctcacaagactttcattcatcaaagttacaacaagtgttgcacatgcttctatttatagactaggtagcttccttgagaagctttcttgagaaaacttccttgagaagcttctttgagaaaacttccttgagaagctagagcttagatacacacacccctctcataactaagctcacctccttgagaagcttccttaagaagattcctaaagaagctacagcttagctagacatacctctctaatagctaagctcacctccttgagatgagaagctagagcttagctacacacccnctagaatagctaagctgaccccaatgacaaaatacatganaatacaaaaaaaaatctctactacaagactact

SEQ ID NO: 131920 - DNA, 496 bp, Glycine max
atcctctgagtcacctgcggcatggcaagcttgagccaaaatcctaacacaccatataccttgacccgggatgagaatttccatcctcgcccttggaagaaaacaaaaaaagaaaaagaaagttcctgatcaaagatcggaagaaaacaaaaaagaaaaaagttcccgatcaaagatcggaagaaaacaaaagaaaaaaaagttcccggtcaaagttcagaagaaaacaaagtgaaaaagaaaatccctgatcaaagatcggaagaaaatgaaagaattatgtagaagggtcttcggaccagacaaatatccaaacaatacaaaatagccataaccaaataaggaaataaaggaaaccacgacttgaagtagtcctctccctttggttaccaaccaaaatcctatgcgctaatgactttcttgccccgcactaaacaaaaacagaaaagggaaaggccaaaacacttagagccaaatttcccaccaaaaacactat

SEQ ID NO: 131921 - DNA, 433 bp, Glycine max
tctacttatgtggcagggcgggcttccttcactttcttgtctccaacgcgagctttgaccaccgctcttccttcccgcgatgcttctcttcatatccgcctgagtgggcttatagcctaaaccatacttcccacgatttcctttggcatttatcaggctagttatgccgccgttgtctttgcctaaacccattccgggttcataaccgtttcccaacataactcgggccatcattactgctgcatcgggcaggcaaggctgcccagagaaggagtccacggaggaaatgctgaccacctcaaaagactggaaagtggtttctaacgattcttctgcggcttccacataaggcatagaggatgggcagctcaccaagatgtcttcctcgcttgacacgatgaccaaatgcccttccaccacaaacttcaacttt

SEQ ID NO: 131922 - DNA, 482 bp, Glycine max
  unsure (1)..(482): unsure at all n locations
agtcacctgcaggctgcagcttattgattatatactctggctatactctatgataatagagaatgttaagatgaatatatggccacataaaaaaggacaggatacaaaataattatacacgagaatatattggtatagcaccaattaagaaaaagataaaaaaaaaaaaaaaacagttaatgtggtttggatacacagaaagccactgaaagctccagggaagactgaggagagaaaattgcattgtttatagtcgtgtaaaaaggagaagagggagactaaagaagaacttagggagactaaaggagaatgttacgagagatctcatggtaaacaataataaatcgcatttatgttcatattgatactgttgcagctggcgaacagcctgtaaactctnttattatcagcattcaattaatatagaaagcccaaatctccaaacagtttactagtatttagtctatgaccggacataactg

SEQ ID NO: 131923 - DNA, 345 bp, Glycine max
ccgtcttggtcgattctggttctgggaacacagatgttatgtatgattacggagaggcagataaagagaggggtaaggaagagaaggaagccaaaaggtaccatccagagttgggtatttgatggatggtatttgtgtagccagaatccaagcatggaacctcctgctatgcttatcaacaaggacgagaataaaataaacaaacatgaagatgactttgttgctatccacctactacttttcttgttgtagcctccctctccctcagtctcatttgataccatcctgaaacagaagagaaatgaattagcaaaaggtcatttttgatttggtaatgaaagggga

SEQ ID NO: 131924 - DNA, 394 bp, Glycine max
agcttctgaagaggactcgattcttatgtgtgctttcttgaccgggcttccaatcaactgggcccatttggttcgttaccgcatgcataacgcattgcggtctggtgcacctctaccttaccctcagctcgtgactttatttcttacacattatgaaatggctatggattctaagcctttagtgctaattaaaagctccttttctattggtgttggtgcggaaacctcctttggctaccgtaacgacgtagatgggtagtggctgaaaaaggacacacaacctctgcatgacgagcgtactccttcttctccatctcaaccagatgattcctcagcccttatgaatgaatgtctttctgaagtgtgacgcctctgcacctatgttggcagacac

SEQ ID NO: 131925 - DNA, 456 bp, Glycine max
  unsure (1)..(456): unsure at all n locations
cactagaggaacccaacccgggcatagncagtttgtttgatctctgtgatgtacctaaacaggcgagctcctgtcagtcaaccgataaaagaacaaagaccacatagcaaggaggcttgtgtggtggctggccacctatgaattttgagtgatatatggaatatggcctctggtaatcgattaccaagggtgtgtaatcgattacaaggcttaaaaatgaagacaagaagttacgatggtctctggtaatcgattaccaagggtgtgtaatcgattactaggcctaaaaatgggatcaggaagttgagagggcttctggtaatcgattaccaggcttagaaatagagacagtatgttgaggaggtctctggtaatcaattaccaatactgtgtaatcgattacacagagtaacgggtcactggtaatcgatacccagtatgtgtaatcgattacac

SEQ ID NO: 131926 - DNA, 419 bp, Glycine max
gtttgaacgtctaaaatagcctttaaaaatttgaatttatatttcaaagtctgtaatcgattacagagtgtatgtaatcgattaccagagttaaaattcaaatttcaaatgtgaagagtcacaactctctagagaaaaaataactgtgtaatcaattacaccattttggtaatcgattaccagtgaggaattttcaaaaataactcctgacagtcacatcttttcaaatgattttgaatggcgatcaaagacctatatatagatgacttgggacacgaattttctcagagtttctactgaatgagaaaaagtctatcctctcaaaaatcaaattgtcttatttcctcttcttattcaaagagaactggttaaggttaccgtctcttgttacacaaagaagagatgtgcttatgtgggtg

SEQ ID NO: 131927 - DNA, 382 bp, Glycine max
tgtgcccatgccgaattcgtcaatctttgatgggtttggaattgtgaaacgttgtcatccaaatataaagagtgatggaactctaaatttaacgcaagagaatggtaatgccaatgatggaacactttctctttttccaaatgctgctgccaattcaacaagccaacttgtaaacaatggtggtcacgcctatgatggaacactttctctttctgcaaatgctgccaccaattcatcaagcctacttggaaacagagaaattcttgcgaccaaaattgatgatcattccatgccacaagaaacctccaaagctgcttctgacaatcttgatttgtcacttaagctctaaatgtagaggctttctttctttctgtgttcatac

SEQ ID NO: 131928 - DNA, 490 bp, Glycine max
  unsure (1)..(490): unsure at all n locations
ggatccttaagtcacctgcggcatgcaagcttgcaagaatacttatggtattatcttatnttatagtacgcacattattgaatatgtaatttgtccaatttccaaaataaaagagaagttgttctgcaggttatccagaaaagcttgctttctttgtggggtgttgctttgggcactagcagaattgctggtacatccaacagaatttttaaattccaataatacccctcccttataacttcttttgggattttgttcttcacgtgagctttttttttttcccttcacattcgttctcctgagaggtattccgagagagttgctcgtttgttgttgggtcctctttggtggaggtgcattgtttacgatggtttgtcggcaagtgatggttgtggcggtggttgaattggccattaacggcgtaggtaaggtcttcgatctgtattttccgctttaaacttatagattgataatctgtaagttatataaa

SEQ ID NO: 131929 - DNA, 364 bp, Glycine max
tcttcgagttaattattaacggcgcgaaactgtgtgtcgttactatctccttgaggcaaatcgatttcaacgaagaagaggaagtaacggaaagaggcaccgattccgcgccgtcaccgttaccgttttcaacccctcgaagcctcttgatggaaacctcttcgagaacggtggagtttgtaacgaaagcgtaaacgccctttgcgccgaacgcgcacgagccgcacgagagcttcttcagattcgtgcagtttttcgcgacgccggccattccgagctccgtgacttccctgcacccgcgcagcttcagccgcaccagattcctgcaccgcagcgagatcaagaccaaagcgtcgtcgtttac

SEQ ID NO: 131930 - DNA, 467 bp, Glycine max
  unsure (1)..(467): unsure at all n locations
tgcagctntcactgacgtcttatattcttagtcaggatttcctagttcattcatgagaatacaggaggtgctattagtggaacattgttggaagccatttacaaaactgggtattcttaaaacaggttggatgttctctaactttgtttttggtttatgttttctctcgacactcaaggttctcactcagtccctcaagatcaaataagctttgataccaattgttgacacaagagattcacaaaaacagaaaatcttaaaatgttctcaaaagaaatagacactccagcactcaacaatgttctcaaaagagaaacttgaaatttgatattcatgcatatgtagggtgcttgagtccaatacatatatgcttacaaaaggcacaaaacaaaagttacttctacctaacaacttaattgctcatgtacccatcttatatgaaaagcttaacacttgtactttaatct

SEQ ID NO: 131931 - DNA, 286 bp, Glycine max
  unsure (1)..(286): unsure at all n locations
aaatgcttcctcttgctccttccccaaacaaaatcttctaagctgcaacaatggtgaaaaagatttcaacttgctagtcaaattttctatgaatcgcttaaggaaattgatcttccttattaacctttgcagctccaatttattcttggtaggggaggcttctatgactgccttgttcttttttttgtcgacttcaatttctttcctatgcagcaagaaacctangaagtggcttgttattatcctaaagacaccgttttccagattcattntcaattccttttga

SEQ ID NO: 131932 - DNA, 451 bp, Glycine max
  unsure (1)..(451): unsure at all n locations
agctntgaaggggngtaactcactcatttttcatagnagaacaccgatcacgtgtctactatcattgtgataatctctttctctgtttttggggtgctacttgagttgccaagtctctccatctttgggcgtattctttgaaagattcatgcccccctttttgcacactttttgtagttgcatcctatccggagccatatcagaattgtactgacactgcctaatgaaggcaaccattaggtccttccaagaatggactcgggaaggttccaagttagtgtaccaggtaacagctaccccagtaagactttcttggaaggaatgtattagcaattcctcatcttttgcgtattcccccatcttctgacaatacaactttagatggttcttgagacaagtagtccccttgtacttgtcaaagtccagcaccttgaacttgggaatgaccatg

SEQ ID NO: 131933 - DNA, 297 bp, Glycine max
agtttggcagattgattgtgaaggaatgcattaaccctatcccggtgagagtgtgatccttaaattttgagagaaatgactatcatttagtattgatttttgtgagaatctctgaagtatggactgaatgcatgaaattgaggatcatgaaggccatgtttgattgtgatacccacttaaccaaaaagatgaccacgtgcttgaatgatttatcccttgcacccagtttgagctaaatgaattattgattgattgaaccctgagcctatactgtgttatctcctgctaccttgactt

SEQ ID NO: 131934 - DNA, 471 bp, Glycine max
  unsure (1)..(471): unsure at all n locations
agctnttcaactccaaacttataacttatatactttctgctaattnataagntaattntaccggtagtagatgaaagaaaaataattattntataaaattaaatttattatcattaattcattnttaatttttgttgttcatcattaacattataagggatataaataaaaaaaaataattaatattatattaaaaaatttaaataacactattttgaaatttattatttttctttttccacaacgattattacatgagaaagtagtatcacatcacatgttattttagcgtaatcaaatatatgtgcctctcacgttgcttttctcgcttgatgggcaactctcttgaggaaaatcttctaatgccaagggactaaatgagtagctatgtaataatcctttangcgatcttttggcttttgttacatctgcaacatgtcattagtgtcctatcaagtaatattgagaatg

SEQ ID NO: 131935 - DNA, 343 bp, Glycine max
  unsure (1)..(343): unsure at all n locations
acacaaatcanagttcaaattctctccctttntcttccttcaatttcgtgctcccccctctgtctttctgtccctctttcggttcctgcattgaagcatcctctgcaagcttcttatgcaaggctcatcttggtggtgaagctccttcttgcatggcttattccttaatggatggcacctcctctcacctcttctcctttgtcttccgctgcatctccatggtggaaaatcaccattaaaggacctcattgaagctcaaagatccagcctccatagaagctccacaagcaaggctccatcagtaagtngccaaatcaaggctttcagttcattctatgtaccc

SEQ ID NO: 131936 - DNA, 471 bp, Glycine max
agcttgttgttttgacattacattcttactctgctatgaaagttaaagaaaaagcagctaagctcaggaagttttttcctaatgatctattttccaggtctcggtctaagaatgtacttgctatgacctttaggctagttttacagcagatttagagctttgacctaaccgtctttcaaccgggagaggaacggaagatggttgatcttgaaacaccgagagagggtcgctgcctttcatgggaatttgacgttttttgagttttgatatctctgttgctattgtaaattgtaatttcatattataatgtatgtccttcaggtgtacctgatactgatgcattgagttctttttatgcatttcatatgagctggttcctgcatcttttgctcttagctcaaccgatgaatatctcatctcagtgctttcagaagcgaattgcatctcagcacttcaaagcacccaaataca

SEQ ID NO: 131937 - DNA, 477 bp, Glycine max
  unsure (1)..(477): unsure at all n locations
ctgattcggccttgatctagctgatttctgaaaagaactgatgctgaaatcttttttttttttccgaaggaattcctattccatagtagctataagcaataactaaattgggtatgcagcactttagaaatattagcattaggtagcatcaataaagtgaaaacaaaaatattaaatagtacaaagtttatgcagaanaaaatgatgtggacacaatttatatgttntttctttntcattttagatatttgaaaaaaatataaagactttgggaaaaacaagtgtaagaaaaatatagtcacattttatgagcagctacagtaaactgatcatatgcagatgactagaccaacatctgttagtaaaaggtgctatttcaagctctttntattggaaagtacttactgacatcagatgaaggtcattantaaaattaaggtgtcattcttaaagaatatccatcctaaagcttgcata

SEQ ID NO: 131938 - DNA, 477 bp, Glycine max
  unsure (1)..(477): unsure at all n locations
ttaagcacctgngctgcagctgattatggacattttggctttttttatatntagccttggtacgattnttagctcagctaaaattcagtagaattagaatctctacaaatttaactgaagctaaaattttaagttgaactaatttccaaaggaattgggattgcacgatcgtagctgaactgaaggaattgagactacgtgattttagttggagcttaattaatgcaattttttattttaccttgaatgttttcttgagagttccttgattagttccaagtgtatatataattgatttatgagttaaatggaagaagtaaagttggctttcttttaatttatgatgttcatcattcataaggattttggggtggtgattgtaaagattcatggtattgaatgccttattatacttgtagagctgctagatgggttattaagttgataaaatatgaatgatgaaattataacatgtta

SEQ ID NO: 131939 - DNA, 413 bp, Glycine max
  unsure (1)..(413): unsure at all n locations
tcacaaagtaatcactatttcataattgatggataccaatgtaaccataaattttaaacattcacagtgaatgaaagcacctcacaacaatgtaatatatttattgtcacataatcatcaacaatgctacaaatgctgataacaattttacgaattctatcgaatacaccaaaattgttattcctaactgatgattaagcctttttacaccgcatctctttatgctttaaaaaataagttgtccatttcttgcgaattgttgtcatggtgtccttgtccaatggcatgccatcaccaaaccactacaagttataatatataaaagttagtgatgcagataaaaaaattgagtacaactgatagtcaacaaataacgaatntaactatatatataccatggtccaatcattctt

SEQ ID NO: 131940 - DNA, 481 bp, Glycine max
  unsure (1)..(481): unsure at all n locations
agtcacctgcggcatgcaagcttctggttgacatcttgacttgctttcttatctgacattcaccacagattctgccttcttctattttcagattgggaatgcctctaacagcacctttgtcaatgattttcttcatgcctcttaagtgcagatgtccaaatctttgatgccatattctgacttcatcttctttggaggatagacatgtggaggagtaactggtttcttgaggtgtccataggtaacagttgtcctttgatctgctgcccttcattagaacttcactcttctcatttgtcaccaagcattctgactttgtgaagtttacattgaatccttcatcacacaactgactgatgctgatcaggtttgcagtcagtcccttcaccagtagtactttgttcagactaggaagtccatcaaggactagctntcccattccaatgatctttcctttagagccatctccaaatgtcacata

SEQ ID NO: 131941 - DNA, 462 bp, Glycine max
  unsure (1)..(462): unsure at all n locations
ctgcagctagcacctgganaccaactttcattaactagcttgtcgatgctgggcagagggtatgcgtctttagggcacgccctgttcagattagtgtagtcagtgcacattcgtcattttctgttggccttttttaccataatgacgttggtgagccaggtagaaaacttgacctctctaatgaagtttacattaaggagcttgtcgacttcttctttggctttactttgttcttctcccatcttccttttcttttgtgatattggtttgacttgtgggcaaatggcaagtttgtgacagattatgctgggatggattaccggcatgtcaaacggcttccaagaaaagaaatccatgtttttgtgtagcatgttggcatgtggcgatgctcatgactggtgaggtacntgagccgcatgcactacccgagttaggtctgagttgcagttggacaagctcttt

SEQ ID NO: 131942 - DNA, 413 bp, Glycine max
tcgcgcacgcgccagttcaatgaaggttgcgcttatggatggatgtgtgtactttatccggcacttatgactagtttttgaagaataaacttccgacattagaaacatttaactaccacgtaatccaatgcaatatgtgtgactaaaataagggtggctggactatgtttatatgtcaattagtattaccataaaatacgttagataccatcaactaaatctcctgaacaccaacaaaaggaacatggttgcctaccgggaccaatatctagccatttgttaaaaaaacaatgacaatgatagttgtgccatttcccaccctacaaggtttttattttgtagccactattttaattattaaaattaaacttgtgtgatactaatagctaactcgccaatatatgtaacaagag

SEQ ID NO: 131943 - DNA, 309 bp, Glycine max
  unsure (1)..(309): unsure at all n locations
atgagagtgataaagatgtacaaatacataaaaaaaacctcaaaatttaccacgttatttccttggatttgaattccctaccattntaaattatgaagtaatctttatcttgctggagaaaaattaaaatcgagagtaatcattctaggaacttgtgatgtgaattaaaatgcttatgttctttcacgaatgttagcttattggatcttgacaaatttctgttattcttgagctacttattctttacaacctaaattttgcatcagaatggtagtttattaattcttgacacgtagttgagacaatttt

SEQ ID NO: 131944 - DNA, 438 bp, Glycine max
  unsure (1)..(438): unsure at all n locations
caagcttgcggatttggtcttcgttcttgtattgatcgaagnggatctgaaaagaggcaaatttaatcatcctgcttagacgaatgagaaaactggggcaaataaagagggtgaggatgagggagaaacccatgctgtgactgccattcctatacggccaagtttcccaccaaacccaacaatgtcattactcagtcaataacaaaccacctccttacccaccacccagttatccacaaaggccatccctaaatcaaccacaaagcctgtctaccgcacttccaatgacgaagaccacctttagcacaaaccaaaaaaaacaccaaccaagaaatgaattgtgcagcgaaaagcctataggattcaccccaaattccggtgtcatatgctaactngctcccatatctacttgataacgcaatggtagccataacccct

SEQ ID NO: 131945 - DNA, 473 bp, Glycine max
  unsure (1)..(473): unsure at all n locations
acacttaaaactcagctttactatgggcaggcggcttcttcactttttttctncaacgcgagctctgaccactgtccttccctcccgcggtgcttcttttcatgtccgcctgagtgggcttatagcctaaaccatacttcccacgatttccttgggtttttatcaggctagttatgccgccattgtctttgcctaaacccatcccgggttcataaccgttccccaacataactcgggccaagggcgccccaacaggcagctgtagggggggttaatatccattatttggaaggtgacttgacaggtgtgagggcctatttgtactgngagatcgatctctcccctaacctctcggcgagtgccgtcgaaggcccgaaccaccattgaacttggttntaaatgggaagcattgaatggtaacttgtccaaagtgctcttatgcatcacgtttaaacttggaccattatcgatga

SEQ ID NO: 131946 - DNA, 428 bp, Glycine max
  unsure (1)..(428): unsure at all n locations
agctntatctatctgcccagcctttctattatcnttaattaacgcngcacatgccacaacattgggcttgtaacctacaagcaacatcatctcatatagtttatctgcatcaaacacctttcttgctctcaggtgtgcatgaataagacacgtttatctcaccacattcgggggcaattggctcttaacattacatcaaaccaaatgcgagcctgttgaataaagccagctttgcaaaagctatcaattaaaatagtatatgtctacacactgggaacaatgccatactttttcatatcttccaattacaaaagagccatctctaccttggaggcttcacaaagaacaccaatcacttcagaatacgtactatcatcgggaacaaaacccttgctcatcaatacgcatgtaatctgcaaggctttatc

SEQ ID NO: 131947 - DNA, 437 bp, Glycine max
ttaacgtcacctgaggctgcagcttgagccaaatcctactatcattaccttgatcagggtgagaatgtcaatccttacccttggaagcaaaaaagaaaagaaggaaaatttccaatcaaagagaaagcaaaaagaagagaaaggaaattcccaatcaaagagtgggagaaagcaaaaagaaaagaaaggaaattcccaatcaaagaatgggagaaagtaaaaaaaagaagaagaagaaggaaagaaagctcctgatcaaggatcgaaagaaaacagaagaaatgtgcagaaaggtctttggactggacaatatttgagcaatacgggattgtcaccaaatgaacaaaaagaaggaaaggaaaccacgacctaaaatggtcttctccctttaattgacaaccaaaatcttgtgcgctagcgacttttcgccccgcact

SEQ ID NO: 131948 - DNA, 286 bp, Glycine max
gcaaaacagagcagaggcagaaaactctgctcaacacatcaaccaaaatcacagcttttctcacgtaaagaccacagtaacaattccttcgatccaattcgttaaccggtggatcgactccaaaattttactggaagtctatagtgtataagcctgcattttgaccgttgggatatactagcaaacatccagaactcattctgcactagactttccacagccaaccacacacaagcatttttctgcacttgtgcaaaattctgctgcacaatttcacagcaaaaac

SEQ ID NO: 131949 - DNA, 461 bp, Glycine max
  unsure (1)..(461): unsure at all n locations
agcttgtccaacttcaatttttatattctttattngaacatcaacattcttcatttgagctggaattntatcaccctggacaataaatatttgacagtgattcgtttgagctaggtgatcttgtttgaaaaaaaatacaacaaccaatggatacaccatattgaataaatcaagtaacctgacctccttgtcaattataattagttcgatattaaacctaggtgatcttggtatagtcaacatgtttattagtcaaacaacaatcttccaggtttccttgtcatcatttatctctgctatggaattcaatctacgaaacaatgctaaacaaatatgaaaactgcagttatatcgagaaataactcaaacgaatcctacatatggactaagcagccatgtatctgatcatttctataatcagcataactcaaatggaatctactattattagatcattaaaa

SEQ ID NO: 131950 - DNA, 402 bp, Glycine max
  unsure (1)..(402): unsure at all n locations
ccgctctgaagagaggttatgaaccttacgagcattctctcaaattctntatgcaaaaacatatccgtaaattcttgtaaagtttagaaaaaatctcaaaacacattgattatcttgagagaataggctaagtgttgggattaatattgtatattcgtttgtaagacgctcatggagttagtcattgtgcaagcacaaacaacaaatctttcttatttgtatagagtcaatagtgacttagtagaacaaagaatactaggttgattcaagcttgcagtatagcttgatttgtcagagcaaaaaatgttagaaataatggcacgtggaactataaaccaagaaggatgaattggttccaaattgctnttagaaccaaatgaaaattnttagaaaatagcttca

SEQ ID NO: 131951 - DNA, 469 bp, Glycine max
  unsure (1)..(469): unsure at all n locations
atccttaagcaccgcggctgcagctgaccagaatatttgttggtttgatgttgaaatcangtagttcctggtgcggagatgatggtacagcgggtgaaccaggagctgcagtttcttttggtgaggtagccatggaaaagcaaagcgtttggaatgatttcgtaaatctcagaaggctattgggaaatgctggtgaaaacacgaatgccaagcagatataaatttgaatgaagaatgtagaggggcgtgtgaggcaacggtcgaatttgctttgtggtgaacgtgctattaatgttaagtgattcgtttgggcacgttcagattgctgtagttgctataattcttctagcaaacaaatgcccagcttgcccctcagtttttcaaactgatttgcatccaaagtctttgtaaaaatatctgctatttgttcctcagtgtcaacatgcttcaatgtgatcactttatcatc

SEQ ID NO: 131952 - DNA, 444 bp, Glycine max
  unsure (1)..(444): unsure at all n locations
agaggatgcttcaatggagganaagaagattgtgtgttgtatagagaggggggaacatgaaattgaaggagaaaaagggagagaaagtgaactttgagttgtgtctcacaagactctcattcatcaaagttacaacaagtgttacacatgcttctatttatagactaaggagcttccttgagaagctttcttgagaaaacttccttgagaagcttctttgagaaaacatccttgagaagctagagcttagctacacacatccctctcataactaagctcatctccttgagaaacttccttaagaagatttctaaagaagctagagcttagctacacatacctctctaatagctaagctcaccttcttgagatgagaagctagaacttagctacacccccctattatagctaagctcacccccatgacagaaaacatgaaaatac

SEQ ID NO: 131953 - DNA, 430 bp, Glycine max
  unsure (1)..(430): unsure at all n locations
tggaccttattaacactnttcacctctgttccaatagccatttcatccctgctgtctgaagagaaaactcgcttcaccccactttctctaaccaatttatcatccctttcggttactgattttgcatccatattcaaaactatatacttcttctccctcctatttacattgccttctttaccacatttcatatcgccttccaaggacaatgttttgttatgtttctcactatccagccagtcagtcattttccttttcttaattgaaccaattntgctgctgtttgtagcatccaatgaaccatcatctgatgaaaactgtgcccagtctcctttcttcaccggaactaccaacttgtcctccagatcatcagaccaacaataatcatcatatttccccatatttttcccactagcctttgttggtaaac

SEQ ID NO: 131954 - DNA, 495 bp, Glycine max
  unsure (1)..(495): unsure at all n locations
tcagagtcacctgcggcatgcaagcttgaagaaagagtcatagatgctngtatatnactataatttatagntggtaattgaaataggtattattgagctcatcacctcacgaacgaattctattaattattntaatacggttaattctttggacataaaacataataacttgcatttgaaggatcaaatcagtataaagtaaaataaaggaggtaaataaggagaaattgtttacctttgaaggacataatgagaaattgttaagaaaataatcaaatactactgcccagttagatactttgacttggtgcccaacagcaattagagtgcatcgacaatttctattttgacttagtgtgcatgtgcaacagcaattatagctttcaacggtcaaggttctcactgccacattaactatngntgcccaagtggcacttatatatctacaatagtattacacaatataaaggagtaacgatgacatcctaatgaagt

SEQ ID NO: 131955 - DNA, 151 bp, Glycine max
taaaaaggtttttgtttcttacaggggtgttaaattgaatagtttataaaaaaaaaatattatatttaattttgtttgtgagttgacttcatatatgcactaactttatcataaaaatgagaaatgtagtattaaaacagttatgtttttt

SEQ ID NO: 131956 - DNA, 485 bp, Glycine max
  unsure (1)..(485): unsure at all n locations
agcacctgcaggctgcagctntaacanatgtcttcacaaataatattacacagcatatacctagcaagactacccatcatatctcccaaaaccccatacccacgaaatttaagagagaaagaagtccacccaaacctgaattttcgaagacccactcgtagccacgcacttcacgactccaaaaatgctctcctttcgcgatttggagcagaaatgatggccaaaggttgaagctttgcttggagcttcaatggagaatgagggagaagaaaatggcaacgtgagggagagagagagctatctgaaaaagtgtgggggctgagtgaagagagagaaaagctttttggttttaaataaaaggggtttctctttttctattattttatttaagcaatgccacatgtctccattngagtggagcaaaaagggcccactttccctttttgactgtgacccatactcagccacaaaagtgagaaaatctg

SEQ ID NO: 131957 - DNA, 300 bp, Glycine max
atctaggcaagggctaagagaccatacaagtttcctaacgatttctaaatatgtgggccatgaagtctatcatatgctgacaatagccgagaagcccgtgaatctcttcgggggcggagtatgtgtctgccatcgctttggccttggctaacaatcggggaagttcttgactcccgttcaaggtaagagcaaaccgcaccatacacatggtggcctctgggtgtaaagagtagatcaccctatctctatgtctttttgagcgtgtactcgagcatacttgtacgtaatcctatgctcatg

SEQ ID NO: 131958 - DNA, 481 bp, Glycine max
  unsure (1)..(481): unsure at all n locations
tcagagtcacctgcggcatgcaagcttatccncacaagagtgcagaacagctggcgattctgcatngattataggaggctaaatcaggtaaccaaaaaagatcactttcccttgcctttcattgatcaaatgcttgagcgcttggcaagtaagtctcagtactgttttcttgatggttttttttttggttatttacaaattcatattgctcctgaggatcaagaaaagaccatattcacctgtccctttggcacttttgcctatagaaggatgccctttggcctatgcaacgcccctggtaccttcctgcggtgtatgcttagcattttcagtgattntttagagagctgcatagaggtgtttatggatgattttactggttatggatcctcttttgatgcatgtttggaccaattggagagttcttaatagatgcatcgaaactaaccttgtgctgaattttgaaaatgtcacttatggt

SEQ ID NO: 131959 - DNA, 477 bp, Glycine max
  unsure (1)..(477): unsure at all n locations
ctaagcttcactgattacacatctattatttcaaattgtgttatctattacaatatattggtaatcgattactagtgtgtttgaacgttgaaattcaaattcaattatgaagagtcacatcctttcacaaaaatgctttgtgtaatcgattacaatgatttggtaatcgattaccagtgataagttttgaataaaaatcaaaagatgtaactcttccaatggttttcaagtttttctaaaggttataactcttctaatggttttcttgaccagacttgaagagtctataaaagcaagaccttgacttgcatttctataacttttgaacaattattacaatcctttacaacctttgaatctccttgaacatcttcttgaatttcttcttcttcttcctttgccaaaagctttctaaagttttttggttttcaaacctttgaaacanaagtgtgctattcatctttttcattcacttct

SEQ ID NO: 131960 - DNA, 457 bp, Glycine max
  unsure (1)..(457): unsure at all n locations
tcagagtcacctgcngcatgcaagcttgtggtaagtatgaattcataaaggtatcactattatagaaattcaaatacttcaaggattgcagacaatgtggtcatagctaaaaaattgcagagctaaaaacttttaactaaatgcttaggtgtaacataaatgggaaaatcaaaattttgataattactaggtatagttcaaaatcagcagctggcccaatgtttaatatgttcagaacctcaacttttgctaggtcatgttgtttaacacttgtcaagaactcattgatgctctctcttgtttgaacagaggcagtagtgtcagccaaataatcataaacccgctagatatacaacacattcatctaccaataaaacttacaagtattcccatttattagaaaaatcaaatctaaccttgtattcagactgcactactttggcaataactctaattg

SEQ ID NO: 131961 - DNA, 403 bp, Glycine max
  unsure (1)..(403): unsure at all n locations
cgatgctttagtcaccgggaaagtactatgatcaggttattgcaattattttttctctgcataaatttaaatgttatcaagtgaacaactctttgttttgaataataaaagggctgggagtaagaaataaataacattaaattgtaagcccgataggagtataataaattggtgcaatttgcatcaatgaaaattcaaaggcgaaacttctacattcctgccgaatgccaatatatgggtccttcatgaaagccaacatttaacaaagaccatctcacagaagttgtgagatttaaacacaagaacctactggaaatgggaacaactattntatttcagttttcctacaatttatacatataccttgaattggcaggtgcacatataatcatcatctacaatg

SEQ ID NO: 131962 - DNA, 487 bp, Glycine max
  unsure (1)..(487): unsure at all n locations
gatcttaagcaccgcggatgcagcttgcatcttgtgatcaggtttatgttattggaatgaaaagcagatagcatagagaacacacaaaacatcattgcatagatagaaatatatttacatcaggtacctacagggaagatccaatagaggatttagttttccatagtccggaaacctcctttacaacacagagaagaacaaaatgaaagattgcaaaaatacaagtggtgaggatgtctccttcacctctaggatctcacaatcactcacaaactcatctcaagctctcagaacagcttccgcttcgagctctcgtctctacagatcttcacacagcaaaatctctcataactctctggaacttggacctttctctctctagaacttcctaaacatgcaaaagcttcaagccaaggccagactctcgtgcatgcagaggcttctcaagaanaaatgccaaactccaccanaaaatctgatttcaagt

SEQ ID NO: 131963 - DNA, 484 bp, Glycine max
  unsure (1)..(484): unsure at all n locations
tttattatactcagctttatggttctagaatatacctcatgacacgnatctaatacttataatattcatatttcatatgttacagagtaaatagcttgcttgatcctattcagcaggcacctaaacaggcataaaactttcaaactcaaacttcctctttcacaagttaaaatttcactcgatgctattgattctaaattggaatataacaagattgttttttttgtctgaacaagaaggaagacaattttattttttatattttagtgtgtattttttcacacattaccaaaaattttgacaacttattttttatgggaaacttggaaatcatgagactaaaattggtcaaacttactaatgacttattgttagattatcgagaacaaaagtttaaattntatgatttaagtatggggtgaaagtaaataaagcttgttccagaataagacatgacttatattntagtgtgtattttttcaca

SEQ ID NO: 131964 - DNA, 480 bp, Glycine max
  unsure (1)..(480): unsure at all n locations
atccttaagcaccgcggctgcagcttgagggtgncagcccactatttttatattatagnaccgataatgtgtctaccatcacgattatcgtctccctttccattattgggggtaccacctgngccgccagatccctccaccttttgggcgtattctttgaaagattcgtgccccctttntgcacactttttgtagttgcatcctatccggagccatatcagaattgtactgacactgcttaatgaaggcaaccattaggtccttccaagaatggactcaagaaggttcctaagttagtataccaggcgacagttgtcctagtaagactttctcaggaaaaatgtataagcagtttctcattctttgcgtatgcccccatctttcgacagtacatctttagatgggtcttggagcgagtagtccccttgtacttgccaaagtccggcaccttgaacttgggaaataaccatgttgggtatt

SEQ ID NO: 131965 - DNA, 445 bp, Glycine max
  unsure (1)..(445): unsure at all n locations
actcagcttagaaaatggctagcaactcctatttccagattgttttctatcaatagacctccaattnttaatggagagggttaccactactggaaaacccgaatgcaaatttttattgaggcaatagacttaagtatttgggaagccatagaaatagggccatatatacccactacagtagaaagaattacaatagatggtagcacatcaagtgaaagcataacaatagaaaaacctagagataaatggtctgaagaggatagaagacgagtacaatacaatctaaaagccaaaaacataataacatctgccctgggaatggatgaatatttcagggtttcaaattgtaagagtgctaaggaaatgtgggacactctacaattaacacatgaaggaactacaaatgttaaaagatcaagggataacacactaacccatgagtatg

SEQ ID NO: 131966 - DNA, 490 bp, Glycine max
ggatccttagagcacctgcggctgcagcttgaaggtgcgtagcccacctttttataatagaacactggtaacgtgtttactatcattatcattttttctccatcattgaggtgccacttgagctgccaggtctctccacctttgggcgtattctttgaaagatctgtgcccctttttgcacatgttctgttgttgcatcctatccggaaccatatcaaatttgtactgatactgcctaatgaaggcaaccattaggtccttccaagagtggactcgagaaggttccaggttggtgtaccaggtaatagctaccccagtaagattttcttggaaggaatgtatcagcaattcctcatcttttgtgtatgcccccatcttccgataatacatctttagatggttcttggggcaagtagtccccttgtacttgtcaaagtccagcttctttgaactgggaggggtgatgatattgggttctagggacaactct

SEQ ID NO: 131967 - DNA, 361 bp, Glycine max
  unsure (1)..(361): unsure at all n locations
tgagctcccatcacgctcttcagtgcaaccatcattgttttgaatgccattccctgattcatcgtgttcctcatcgtcacactctctcttctcatttcctaccacgatgtactctttctcctccacttccatcatgaatgcatgacacaccgctacagattcaaacacatctctcccaacaccagtaacctacacaaaatcagtggtgccaatggtttgtctatgtcattcgttctaatcacattgcacttcagatcttgcctccaacgacttctgcacatcaacaacactcattgatgacttatcttgaagttngaaagagaaagtaagtgttaaatgagaagggacgatggaaataata

SEQ ID NO: 131968 - DNA, 486 bp, Glycine max
  unsure (1)..(486): unsure at all n locations
ctctaagtcacctgcggctncaagcttgatatgacaaagtcagacttgcttaccattacaactaanatagttaacaaaaatgaatgaaagtaatataacttagtcagtattctctattgaactgaaaatttctgcgtcacctctgcatgcagattgaggcctattggctcaaccaggtaatctattttgctacgttgccttctcatttgctcaaattagcacgtaaatttctatattgcgacatatatgtttcgaagacattgtaaaccaaccatagtggagttatgtcattatgcatcctaagaacccgaaccgttgacgcttgaactgagtacatgttccatcatcaatcatttagctacagatagttcctaactaaggtcattctgttgttttggttaactcggacggaagagggtgaaatcatatggccataagagagatgtgaaaggacttntaattaagaagatacaaatttacagtaga

SEQ ID NO: 131969 - DNA, 437 bp, Glycine max
  unsure (1)..(437): unsure at all n locations
actcagctttgattccgacgtcattctttaccatnctctctatatatatgtgnttggacacttcaataaagagatattatacttacaccggcccactgatgcaacatcgacctcttcctgcatactcagtaaataaccactttgtatttgaactttagagaagctcagacagatgggatttaccattctttaagatcaaaagaatgaaacttcatgtgtttaaccatactcaatcaactagcttgttaatttgtgttcttattagaaaaatttagagagggcctaacactgtaaggtaaacaaagaaattaaagcaaagagatcagtgagctatttatatgaaagaaaaatactaataacatttttttaatattagttataattatgaagtagactcactagantagattaaaaaaaaaattataatttataataat

SEQ ID NO: 131970 - DNA, 423 bp, Glycine max
  unsure (1)..(423): unsure at all n locations
agcttgccgccacggagtttttctactattctcttgtgtggnggaacaagctacaaaaggagagagcaagaaatgaagaggcaatggttgatacatggacggagatgaaaaagatcatgaggaagcggtatgtgccggctagttactcaagggacttgaaattcaagctccaaaaactaacccaaggcaacaagggggttgaggagtatttcaaggaaatggatgtgctcatgattcaagcaaatattgaagaagatgaggaggtaactatggctcgatttcttaatggtttgactgatgatatccgtgatattgttgagctgcaggagtttgttgaaatggatgatttgcttcacaaagcaatccaagtggagcaacaattaacaaggaagggagtggctaagaggagttttacccaacttg

SEQ ID NO: 131971 - DNA, 477 bp, Glycine max
ttcatgtaaagaaatgtactaattaacaagttgtgttgattattgccacccatacgctttttagtagtatttttgcgtaattattgtatatctgctatacttttaaattttgtttgtgctaatttgtttaataaattattttttagactagaagtttagtctttatacttgttgtatttgatctttgcttggttttgttttattttgaaggaagtactttggagagatgatttgatgcgctatcattggagcctgagaattttgaaaatctccgaagccactaagctcgcttaagtgagctaaaattttgaagcctggagccttatatattgtgctcgcttcagcgagcaaaccctggagagtctggtatgtttgtagagctcttaagcgagcttatcagacagacccatatgtgtgtggtgatataaaaggtccatgactcaagaagaggacacaaattccaagacaaaaaaagca

SEQ ID NO: 131972 - DNA, 243 bp, Glycine max
  unsure (1)..(243): unsure at all n locations
agcttcggagagacttacattccnctcgacttttatgataagaaacatatatctatatatatatatataaatgattcctaaaacttatcatagaaaaaatggagtaaggattagtttcaactgagcagaaaacgagcaagagaaatcagtgtctcactaaaggagcaatagcaaaaaagagagataacatgtgagaaagagttttagttcaaaaccggcatatcttgtaaaagtacaaacaaa

SEQ ID NO: 131973 - DNA, 281 bp, Glycine max
  unsure (1)..(281): unsure at all n locations
tgagccacataatcggntgcacaagtctaactgctctaaactactacttgcaactatataaatagaatgcctacctgccagactgtaagattgtaacatgatgtcagctaagcacacactatagctatgtcctaatacaatgcagtcttgatctgacttgtgtcaattatattcattataatggagtaacaattccatataagctgcctttcgctgctagatcaattgtctctgacacatcacacaagtgattgggatctctattagtggaccatgaccta

SEQ ID NO: 131974 - DNA, 414 bp, Glycine max
  unsure (1)..(414): unsure at all n locations
cctatctctaacagtggtggaaatgagtttaaagctagctcacaagagcctcgatttagtcaagggggcaaagatgatccctatgtctataaactattattttttttgataaatatctggatgaagtaagagatagttaggtggatttggatgttntaagttggtagaagctaaactcaggtcgatttccatttcttgcaagcatggcaagagatgtgcttgctatacatgtctctattgtggcctttgagtcttcctttagtagcgaagcaagagttttggatctatatcattgctctcttactccccaaatggtggaagcatttgtttgtacacaagattggatgaanagaacatcaacaccattggcttcaaatgaaaatgaagaatttttagggtctgagagaattaaag

SEQ ID NO: 131975 - DNA, 411 bp, Glycine max
  unsure (1)..(411): unsure at all n locations
tgtcttgccccttgatatatttgagggactcatggtctctatgaatgacaaattccttgggataaaggtagtgttgccatgttttcaaagtccgcactaaggcctacaactccttatcataagttgaatagtaaagggtaggaccacttaaattttcactaaaataagcaattggatgaccttcttgcagcaacacagccccaatcccaacatttgaagcatcacactcaatttcaaaaaaaatttgaaagtttggcaacgcaagtatggnggcattagttagcttttgcttaagaacattgaaagcttcttcttgtttctctccccatttgaaaccaacattnttcttgagcacttcattgagaggtgctgccaatgttctaaaatccttcacaaatcgtctataaaaac

SEQ ID NO: 131976 - DNA, 359 bp, Glycine max
  unsure (1)..(359): unsure at all n locations
agcttcttattntcaacggatgaagatgattttgtgggcatatcatggactcctttaaggacaatagcatcatttcttgcactgaattgttggaagttggaagccatcttctcaatcagatttcctagcctcaataggagtcatatcaccaagagctccaccactggcagcatcaatcatactcctttccatgttgctaagtccctcatagaaatattgcagaaggagttgctcaaaaatctggtggtgaggacagcttgcacacaatttcttgaatctttcccaatactcatacaagctctctccactaaattgcctgatgcctgaaatgtcttttctgatggaagtggtcttagatg

SEQ ID NO: 131977 - DNA, 252 bp, Glycine max
ctttttatttcaatagcttttaaaaggaacttaccacatgaaaataatttaatcttcaatgatagaaaaaacgtatagataagcacttacattatgctcaaagtcaaagacttttcttctaaagagtgcaaatcgagaatcgtcctaatgatggaactatatattgttctacatttcgagtttcatattccattataggactacattggttattgagagaagaaatatatagcactatatatatatatatat

SEQ ID NO: 131978 - DNA, 466 bp, Glycine max
  unsure (1)..(466): unsure at all n locations
agcttaacanaaggcatgtgaagtgggtgtgttttctagagcaattcccttatgttatcaaacataaaaagggaaaaggtaatattgtagctgatgctctttctcggcgtcatgcattactttctatgcttgaaacaaaattgattggtcttgaatgtttgaaaagcatgtatgaaaatgatgaaacttttggagaaatttttcagaaaatggtttctttagacatgaaggctttcttttcaaagaaaacaaattgtgtgtgcctaaatgttctactagaaatttgcttgtttgtgaagcacatgaaggaggtttaatggggcattttggggtccaaaagactctagaaacattacaagaacattnttatgggcctcatatgaaaaaggatgtgcagaaantttgtgaacattgcattgtatgtaaaaaggcanagtctaaggtanagcctcatggattgtatact

SEQ ID NO: 131979 - DNA, 397 bp, Glycine max
accaaccaatccaaccttaccagaccattatagttggtggttgaatacctcacccactccagtgtatcacaccattatggcttttctctaatgaaacactcttgccttttaccactctaattccccttgagttcttaggtaattcaagagattatggccacaacaaagaacaattcaccaatatgtgtaagggaaggctagagagacaaggaaaaggttaaccaagaaaaaggctaacaatgtttttaggcacaaatgaaggaaataaaattcagaatttatgaattcaagtaacaatccttcatgcaaccaatatattaccttaaagagatatttttttaagtcttcagcatgaccattcgcccaattttttttttttaatttgttatataaaatc

SEQ ID NO: 131980 - DNA, 360 bp, Glycine max
  unsure (1)..(360): unsure at all n locations
agcttcgaaagaaagtgatgaggtacaagttctatagcagatcttgaaagagcccgggtagtcaaagagaagttcaagtccatagccatcaaagtctgaaaagagtatgatgaactaagggacgtcaatatggccacagctgaagccttggaacgagaaaccaagaaagcccgaaaggaagaacacgtgcaagcaaagttntgaggggctttatagggcagcaatagtaagctcaagctccgaagaggtgaaaggaatcatcacgggtcaaaggcatgatcttgaaggacgagctaaaggcttaccttatgtcgaaaagaaatttgtcccaacagttaagcgagactgaatggaatatgt

SEQ ID NO: 131981 - DNA, 303 bp, Glycine max
aatttttttccttaacctctctttcaatggtggttcttcaattttcttcatggatctcctcacatgtcttggtctaaatggtggtaacatgattctttaaaagttccaccgattaaacttgctatagaaactagatttgattttctatgggtcaaatttcttggtcttggtcttgaaccatgaattgtgttgagtttaagtccctttgagttttgtcttgttattttttgtggctgaaacctaaaccataaaattcttaccaaaatattaaagtagaagaaaaccctcaaaatctagagtgac

SEQ ID NO: 131982 - DNA, 464 bp, Glycine max
  unsure (1)..(464): unsure at all n locations
agctntaacaaaaggaaactctatagcctatgcccatccgtagagtttaaaagtcacaaagggttacattatgcttgtcgcataaatgcccgggcgctcctccactcgccaatttcctagtcggaaactaggagggcacggtcgtaccaaatccgacccactcggagagtcatcttcgcatatcgcaacgacttgtccttcgtgtcctagacccgcgcttataaagctcctactgatgtggcaggcgggcccccttcgacttttcgtcccaattgcgagccttgactttcgctctttcttcccgctacacttttccttatgtccgcttgtgtgggtttatagcctaacccaaacttcccacggtttcctctggtgcttatcaggctggttctgccgccgttgttcatgcctaaacccatttcgggctcgtaaccattccccaacatcacttcggccaccattac

SEQ ID NO: 131983 - DNA, 442 bp, Glycine max
  unsure (1)..(442): unsure at all n locations
tactaagcttgtaacttaatattactatttctggactctattaatattcataatgtatatcctattatttaagctgattgggaagtctattttaaatttaatacaatcaattaatttgttcgttgatgagttagttaattttctaactctaattggtaggtattggttaagtttggggaataagggctactgttttgtacctttgttgaagcttatatggcatattcaattaaatatgttttatgtagcgagaagaccttcaactcaaaatgtttctatattatattgttgaaaatcctgagcttgtaactntgatacatatttagttcttcactgataaaaatatatcanttttatagtatatttttggccttttgcctatacccgcattaacccttctcctcaacccggaaccatcctaaactataattgcccaaatcga

SEQ ID NO: 131984 - DNA, 430 bp, Glycine max
agccttttggagtagaaacatggtaccattcattttatttcaaaaagttgtatctagtcaaggtctgagaaaccatacaagtttcctagcgatttctaattatgtgggtcattaagtctatcatatgctgacaatagccgagaagcccgtgaatttcttcgggggcggagtacgtgtccgccatcgccttggccttggctaacaatcggggaagttcttgactcccgttcaaggtaagagcaaaccgatccatccacatggttgcctcttggtgtaaagagatgatcacccttcctctagcctctttttccgcgtatacttgggcatactcgtccgcgaccctatgctcgtgggccgaggctagacctaactcttcttggtacttggcgatgatagctagcatgttggtctctgtctcgcataaacgctt

SEQ ID NO: 131985 - DNA, 359 bp, Glycine max
  unsure (1)..(359): unsure at all n locations
tcgngccatttcttgttggtgatgaacaattgcgctaactgaatcaaaaaatgcgaaaaaggatgaccctatggctgcaaattcgtcaatcccgtgggtatggcttttgaaaggggggaaaagaaatttttgaatgtaaaaacgccccccctttcgtcatttttataatttggtgcaggggtggctcgcccaggcgagctaacctgcacttttttttttttttttttgggggggggaccctctgtctgtacacctcaccttataaggattaatatatgccaaacttgatagaatcactccaatgatacaaccttacatggtttatatacctgtggataaaatacctatggatatatcat

SEQ ID NO: 131986 - DNA, 305 bp, Glycine max
  unsure (1)..(305): unsure at all n locations
agcttgtaaagccactagcaatggcgggatcggcnanngccccattggcagcatcgggacggtgtctgactaagagaaacccatactgtcattctattggcgggacaaggctgacaaggagagatgaaggcgttacaccattgatgctgacaggacatgtgaaaatggagagagacttgtaattggcactggcgggacatgcctacgtgggcagttcggacaatgggtcctgcggcacactaacatgagagcgatataatttattaaagtcagtgacgctattcgagagattctctaaaataaaa

SEQ ID NO: 131987 - DNA, 465 bp, Glycine max
  unsure (1)..(465): unsure at all n locations
tgcttctacaaattgttgcataatgcttgctaatttttattttgaaattgatgagtgttattgtgtcttgactcgagtgtgtgattcatgtgtaatgtgattagtgattgaaaaattaattttaaagataaagtggtgaagtgatgtggattgtattaagttgagttacgttataaatattttcataatttattttgattatgtcttgtttatttgttttgtttttgtgtgtgtgtgtgtgtgtgataactcactccctgtgtgctatttgtgtttggatcctatgatgatcttgaaccttgtattcgtgggagcagataactaggtggatgactntaaagaaccttgtgcttagagggcgtggaacacaatgctctgataggatgtgacattggngatgagttcttattntaatttcatgatggcatttatttcatttaccttactgacttaacaaacattttt

SEQ ID NO: 131988 - DNA, 462 bp, Glycine max
agcttccagattggtgttctacgctactgttgctccggctaagctgtcttgaaagaagtgcattaacagcttttcgtccgttgaatatgcccccatccttcggcagtacatccgaagatgactttttggacacatcgtccctttatatttatcaaaatctggtactttaaacttggggggaatgatgatgtcaggtaccagacacagatccgctaaatccgagaacggatagttgccgaggccttctaccactctcagcctctcttcaagtagatcaatctttcccttgtcttttgcaaagggaacgagttccttaacgggtgcggactatgtttggttggggcaactcatgggggcctagttccttgaggggaagtagagggcctaaatgggcatctccttcatcatcttcttgcagaggatagtcagctggaggagggagctgcccctcgaagatagggg

SEQ ID NO: 131989 - DNA, 455 bp, Glycine max
  unsure (1)..(455): unsure at all n locations
tccacaatatccaagcaattcaattccaaatatcatgattctaccctaaaccaagaaaacagggtagaggcagaaaactttgtccaaaactcactcaaataccacagctttccttactcttataccccagtaacattctcttcgttccgattcgttaaccattggatcgacttgaaaattttactggaggttcccagtaaataaatctacattttgaccggtgggatctgctacaaaatgcctgtaacccgaaatgcactactcttcccatgactagcaatgcacaagcattnttctgcacatttggtcaagttggctgcacaatttgacagcattntgctggcataattggcagatttcgaaatccaacttgcccacatccaattntggctcaaatggatcctanncagtcctaatcatgtatagatcatatttaaaccaaaaacaagctttag

SEQ ID NO: 131990 - DNA, 452 bp, Glycine max
  unsure (1)..(452): unsure at all n locations
agctntatttattggttatttgattattgtacctaatttacacataaatgtgaatcttcgatgcaaatctaaaaaaataaaattaaaatatagtatttatattaaattttgacacacaaattttactcattcaccatatttttttcttaagcaataaaagtatttcacaggataaaatatagcattaaaattgataatttaaaatttataaaataattttataacttataatttatatttatgtattttttgtcataatctcgattgttaagttttcaaacaattaaaatcctcagctgagttttatttttaacttgaggatcgaataccaaaattattttttaaattcattntatattaaattagtgtaaaaaagtcctttaacactcagctaatttgttgaatgacctttttacatccatcaatatatacttagggtttagcccattact

SEQ ID NO: 131991 - DNA, 435 bp, Glycine max
  unsure (1)..(435): unsure at all n locations
tcagcctganaacaagtaanaattagcagttgcctctattgggaggagcatcagaagctagaagctgaaaaggtgctagttgattatacatagataagaaatactaatatgtattnttccaaaatagtgtgtgtgtgagagagagatctaattaagtatgagaactaaaaaaacctggacttcgttgcacctatgtacaggatgctntctagcaattgatctttcatttgaaagtctagcatgaattggagtcaactgagagagaagctctctatgtcgtggaagtcttggtaagtgacacattgtaacctacacaaganaaaatttgaagagaaacatgaccganaaattctgcatggtacagtatatgctatcttctggttagaaaacattntagaaatagtcaaagatatgacanagtaaattaagtgtgac

SEQ ID NO: 131992 - DNA, 459 bp, Glycine max
  unsure (1)..(459): unsure at all n locations
agctccaggagggagctagttntattttgttttttgtagctaagctctagcttctcgaggaagcttctcgaggaggtgagcttattttntagagtggtgcgtgtagctaaactctagcttctcaaggaagttttctcaaagaagcttctcaaggaagttttcttataaaagcttctcaaggatattttcataagacagcttctcaaggaagctacctagtctataaatagaagctngtgtaacacttgttgtaactttgatgaatgaaagtattatgagatacacttcaaagttccacttctttccctcttttattccttcaatatcatgctccccccttctctctatcttttcctccattaaagtatcctcttcaagcttcttatccaaggcaattcttggtggagaagctccttcttcatggctattccttaatggatggtgctccctatcctttct

SEQ ID NO: 131993 - DNA, 419 bp, Glycine max
  unsure (1)..(419): unsure at all n locations
agcttcttgcataggggcatatatttacttgcatatagtggctcaatttcactggcaataggttgttctgctagtgcaacgcggntagtttgctacttccatacgcaccacataccaacaagcatcgatagtctatgtcatattgactaattgacttcctcgatacacccaagaacttgctcacagctttcttagagatgctcgtgtcaaactattttaaattgctaaatcaattaaacaaattaaaaactcaataaatctttaattgaataaaatgtaaattgaaaagatggtacttttctctgaaaaaagaggattgtacttttatatgattgttggttccaatgtttanaacagaattcaaacacaaacatattaaatntaattatatatattagctntatatnttaccagcatat

SEQ ID NO: 131994 - DNA, 208 bp, Glycine max
gagctcttcaatgtgtggtcaagcaaaagaatgagtctggctattcgttggtggagatgaatcaatggttttctcatttgacattcaacacggttcttctagtggtcgttggaaagcgacttttcggtgctacaactatgaatgatgaggaggctcacagatgtctgaaggctgtggaagatgtcattgcgtctgtggtggtgttcac

SEQ ID NO: 131995 - DNA, 435 bp, Glycine max
  unsure (1)..(435): unsure at all n locations
ctactatagttgagcatgcggtcactagntacgagcanaatgtcctgttgttaaaaatttattgatgtatagnagcatagtattctttcaccttaagtctcgatcatatcgaaaattttgaaatgttaaacacggtcaaagccgaaatggttttcttctgtggtgaatcgtggncaacgttttgcttattatatatggaattcgtagttttcaaaccattgacactttttttagaaactcaacggaacttaccttgttcaatggaagcacctaatccctagtttaatntcatgcgaggaggaggccaataaaaataataaaaacataaagtgctgagctagtggttgctggcccaattcaaataaatatgtacgagataattataccattagaaggagtgatgcatatgagtaattaatatattaactaattact

SEQ ID NO: 131996 - DNA, 294 bp, Glycine max
  unsure (1)..(294): unsure at all n locations
ctcatacatagaataatttttcttaatatgaaaaattaaattatttcatgaagaatgggaactggtatcatgcaatcatagtaatgatattcatgtaacaaacattcacattaaaaatttatgctattatatgaagccatacataataaattgaaaacctactcaatggtcatgatagaattcttgtacatgtaataaagtggccgcaagaatgtgacacagaaattgaaatatatgaaatatgattaaaactaaccctcttgtagtggtaatttctgagntaatttatctttc

SEQ ID NO: 131997 - DNA, 465 bp, Glycine max
  unsure (1)..(465): unsure at all n locations
ctagagggacagcctgctgaagacatcttatttcttnctgataatngaagaaacccaggagccagaaatcgaaattatccacagctactatgactatgtactgtggcgagtgcttctgcacattctgactnttgctgacagactattattttgtgaggggatttgagacctgaaatggcatacaatatgatgtacatatcagcaaatgtatgaagaatgatcaaggagatagcccggtagcacttgcatgatagacactatataaaatataataacaagaaagtcaccttataatggactctaacatcatctccatttgaggaagagatcatgaatgatctatcactgctaagggctaacttatcagatgatatgaagagaataccagctctaggaccttatgtgtggattagtacatgtgatgcttcaacacttctttcttctctcacataaaaagtgcacgaa

SEQ ID NO: 131998 - DNA, 425 bp, Glycine max
  unsure (1)..(425): unsure at all n locations
tattagtgactatagtgaaaacaggagccatttctgtggtaaaatttgttgttgagtagtcatatcttgatgcgggatggttttcgtcgnataacctagtggagctagtgttgattgatgatatatacttggttgagaggataggttgctcctagattaccccattctcattttcacttctcaaaccgtgaaaacccactaaattgaggtggtttagctacctatatttttagttgctgtggtctgaagcttgtccttggtttatacatgattgattcatgatttaggacttggagattcaatttgggcaaaagtggatgagggctagtcttgattcgaatatctgcactttatgcagaattgtgctgcaaagatgtgcagatgatatttggtttgagcagatatgttgtgtattgctgttctgg

SEQ ID NO: 131999 - DNA, 479 bp, Glycine max
  unsure (1)..(479): unsure at all n locations
ttataacaacatnttcttattatttaaacgttttatgatttatattgtatntganaatatgcttggaaatntaatttattcttaaatattcaaaataaatcaaacaggtaagatcttttgtaacttaagctttcataaaagtattttcttatattttaaaatattttatgatttagatattaatgttgttaagattaaatttacaataagaaaaatttaaatatattttcatatataaatatgtaataattaattaataaaattgattagtatttcaaatttacatgttatgagtcaattataggtaatccaagaattaaatattcaattctaattattctaaatcaattatatgtaattaagaatgggccattttttgggttaatttattatgaagtatttgaatgganacttagtttcatttaanattcagatgattctntatcctcttttatatgcttggctccttccctttcact

SEQ ID NO: 132000 - DNA, 412 bp, Glycine max
  unsure (1)..(412): unsure at all n locations
agaaggactcttgtctttttctaataggcctactattatatgggccaagtggtctaatagtaagcccttctcttagtgtttgtaatctattaaaaaattagaatgaactattgttaggatctttatgtggttgctaataaaatcttctcaactcaatttgttgaaaaacaattcgtggtgtngtggatgactcgtgatatttctcaactacgctaatattatgtgattagtacccgaataagtttatcaattgtccactctttgttgtggtagttaaatcctacgtttattgtgtttaagattttcttgtctaataactatgaattatattatagtcattttgtaatttcttgtcttaagatacttatcacatagtaagtaatatatatttgatgataccatattttaaatc

SEQ ID NO: 132001 - DNA, 313 bp, Glycine max
  unsure (1)..(313): unsure at all n locations
cacttatgctacagccacttttttttttccaagaacaacatgagagccatgctagttanttggaaagatgatgacctggatggcaatgcaaaaaaatgatgtctcttgccgccacagaaaaagagaggggcttgacctgggagacctgacattggggcttgtttcagaagaggatgtgaaatccgaatggcaataagctaagcctatggaaagcagcgcctggaaaagagaagccttggaaagagaggcagagcaaacctatatacattttgtgtgctgccattattggtgcgtgcatacttaccgtattttt

SEQ ID NO: 132002 - DNA, 342 bp, Glycine max
  unsure (1)..(342): unsure at all n locations
ggatggcatggtgatagnggatgcacaaacaacatggcgagggattctagtttcttcacctctttagacaaagctattaaaaccagagtccagcttgaaaatggagaaattgttcaagttgaaggaagaagtattgttccattcaactagcaaatgtcctaaaattattcatgatgntttggttgattaaatattgaataagaatttgctattgtgtgcttaagtagtgagagggaaatctctctcattctaaaagtaatgggtgtatcatattggattcaaatgattctaaagntattaacgtcaaaatgtatgataatagttntccaatcaatttgaatc

SEQ ID NO: 132003 - DNA, 371 bp, Glycine max
  unsure (1)..(371): unsure at all n locations
agcttganatgaggaattgtggagtgtttatatttcctactcttattcgaggaccacatagtggtacctgaagatatgtcgcggtggtcaggataccttgaggacgtctggtgtggtgctattgcccaaaaccaagcttgaccaatcccgacccaaccctggtatattcctgcagtgagaacctgtgatgtacctaaacaggcgagctcttggcagtcaacagataaaagaacaaagaccacaaagcaaggaggctcttgtggtggctggccagctgagaacttctagtgttatataggatatggcctctggtaatcgattaccgatggtgggtgaacgattacgaggcttantagtgaagacagaaagct

SEQ ID NO: 132004 - DNA, 305 bp, Glycine max
ttcaccacagagatgcagcggaacgcaaatgagaagatgataggggaggcaccatccactatggaataagccaaggaagaaggagctttcccaccaggaattggcttggataagaagctagaagaggatgctattatggaggaaaagaatgagagaatcacggagcacgatattgaacgaataaaagacggaaagaagtggaacttcgaagtgtatctcataagactttcattcatcccaagttacaacaagtggtacacatgcttctatatatagactaggtagcttgcttgagaagctttctt

SEQ ID NO: 132005 - DNA, 443 bp, Glycine max
  unsure (1)..(443): unsure at all n locations
tgcaagcttaagctccttcagctgcacgatgttcttatatatgaatagtatcctngaggaaccttcacccaacgaagacactgagaaaaacttatcttcttcttcttggacaaagtatggcgatgctgggggctagtaatttttctttccatcagacctaggatgcaactgtgatcttatacccatatcagctagatcttgactggtattcaagccatccatctgcttgccttgaatgataaggatcgtcccaatcacactgtcacaaacatttttctccacatgcataacatcaatacgatgtctaatcgcaagatcacaccagtacgaatgatcaaagaaaatgtacctcttcttccatatgcaactctgactatcattcttctatatggatttcccaaatacatngttcaagtgaagaacccgctgatataccttgtcac

SEQ ID NO: 132006 - DNA, 258 bp, Glycine max
cccagtgggaaatattagttgattcccaagggaatttaccaaaaaggactcaacgcaacttgtggaccttaatctaccttctaaatatgttcgcaagtgtgcctcacaacagataaacaactatggtatctgtgaaactattgctcaacgcatatgactggtgacaagtcatagctatgtccggtaagaaggatgattttgacatatgggactaacacaaaggaggatctcggtgttagaatatcaacatacttacta

SEQ ID NO: 132007 - DNA, 374 bp, Glycine max
  unsure (1)..(374): unsure at all n locations
cctgcggcatgcaagctatgatgcttgctgtggactctttgtttctctcnaagatttctcgatattttgattatgaccattgnctttctgacttgtttcataatattacatgtttccatacttttctcgctctttttttttactctatctccattaaagatgatgcattgtattctccaatagtagtattgtttctcaacactttcccgcttgcgtgtggattacacataaaattaatttacctagttattctatactatatgagttaggtattgccggctactctagcttattatctttcatcgttatataaacacatcattgttgtcgcactttgaatgaaggaaggactcctacaactatttgtcatctat

SEQ ID NO: 132008 - DNA, 366 bp, Glycine max
  unsure (1)..(366): unsure at all n locations
cagccccttaggcacttctctctctttcgaagttgctgaggcaaantatgttcgtgaagaatatccaagccgaggcgcttccgtatcgtttccgtgagaaattacgcgaagattctcgaccgttcttcaggattcatcgntcgttcttcgttttcttcagtcttcagcgggttagtacctcacaccaagcttttcaattcattctatgtacccgtggtggccacatgttggtcatgtattttattctcatttcattacttttatacccctttgacgtgctaagccttttattaagtcattctcgcttaacagaaaaaaatatattccccgatcgttgagtgatctccgtaatttggtaaatgattc

SEQ ID NO: 132009 - DNA, 484 bp, Glycine max
  unsure (1)..(484): unsure at all n locations
atcctaatagcgacctgcggcatgcaagcttgagcatccaataccccgatgatgtattcccatatgtnctnaaaactgagctgatccatttgctaccaaagtttcatggctttgcaggtgaagacccgcacaaacatctgaaagaatgccatattggctgctccaccatgaaacccccagatgtccaggaggatcacatattgctgagggcttctcctcattctctggagggagtggcagaggactgactatattaccttgctccaggagccatcacgagctaggatgacctcaggatagtattcttagaaaaaatattccctgcttctaggaccacgaccatcagagaggatatttcgggcattagacaactcagtggagaaagcttatatgaatgctgggagagatttaagaaaccttgtgctagttgccctcaccaccagatttctgagcagcttcttcttcaatattattatgacggact

SEQ ID NO: 132010 - DNA, 379 bp, Glycine max
agctattttcattgaagaaaaacctatatagccctcttataataggggaagaaaggagacaagttgttgaagtagaaactgacatattattgaaagccaacatcattcgcgaagtggattacaccacttggttagccaatgtggtcatggtataaaaagaaactagaaaatatatgatgtgtgtggcttacacacaaccttaacaatagtcttcccaaagatccttaccctttgtctagcattgacagactagttaatgggggcatgtgtggttagactgctcaattttttagatgcctactcgagctaatatcagatcaagatgtatccactaatgcaataaatgacaacatacattattgatagagccatattatgc

SEQ ID NO: 132011 - DNA, 399 bp, Glycine max
ctgcatcttaactcatcaatttcattcagattattgatctaatatgtagaagatatttctatggattgaaatgattttaaacattggatgcgcatccaagtaattgtatggagtcgtatctcaatatatagaagacattgctgcgaaatttgattaatacattagttattcctattttccaaactataaaaaaaaatattctacgaaaatattgatttcgtatacattttccaagatagtacaaacatagtattgatatgttgtacattatgcaacaaaatcacacttctattgaacatgcttagttgaccgcttctcgaagaacataatgatgttgttgctggtactatttccataccccatgatcacaacatattatcatcttctgccaagagggag

SEQ ID NO: 132012 - DNA, 194 bp, Glycine max
cctccacagaagccccacaagctagtttccatcaataaacttcataagattttatccatgtgatcataattatcataatatctacctagagagcaaagctcattcataatggtgtggaagccgccaaacatgtggtagatatcttctccttcttccatactaaagaagtcatacttatgttgcagagactcaac

SEQ ID NO: 132013 - DNA, 447 bp, Glycine max
  unsure (1)..(447): unsure at all n locations
taacatactaccacattgtaagatattatttcttttanacgctaccaataatagactagaggtgtaacaccactttagtcaaacatacaatacatatcaatatcaacacaaaattataacttatgcatgcatccacaagaagaggagtcattagtctaagtaaacttntcgaggcacacatatacccaattgcaagtcttgttgcaaatacaataaataagcaattattatacatcatagaggaaaatatatatcgtggagttccatgtagcttctagtacaaatttaaaatagatagcactgattaaattggagaacattttccaccaaagaaaatcaatcaaacttcaaatcaacttagagcaatatcacataatcaatatcatatatatgattatgaaacactgcgcacagaggattcattatgattaacaatgagattaaaga

SEQ ID NO: 132014 - DNA, 316 bp, Glycine max
  unsure (1)..(316): unsure at all n locations
ttctctctctttcgaagttgcttagaaaaattgttccgtgaagaanatccaagccgaggcgctttcgtaacgtttccgngagtgatttcgcaaaggtttttgaccgttcttcgacgttcttcattcgttcttcatcgntcttcagncttcaacgggttagtacctcaaaccaagctttntaattcattctatgtacccgtgggtggccacattttggttcatgtatttntattctcgntntcatttacttnttataccctctgttgacgtgcttaagccatntattntagtcatttctcgcttaacctacaaataa

SEQ ID NO: 132015 - DNA, 407 bp, Glycine max
  unsure (1)..(407): unsure at all n locations
ttgggacatggaggaatcaatttgggcaatattggatgaaggaaaaagtggttttcgataactgcactttatgcagaattttgctgatgaaatgtgcatcagaattttgaattagtgcataaaaatgcttgtgtatagctggttgagaaaagtggagtacatatgttgttctaggatatttcaacagatcccagcggncaaaatgaagacttatgtactacagacttcccgtaatattgatgagatgatccaacggttaacgaattggaatgaaggaaatatcacgggggtatttgtatgcgaaaagctgtgattattagttgtgttgtgggcatagtttctgtccttgccctagtttgcttggtttcgttgtccatgatgataggatgtggaattacctggatgtt

SEQ ID NO: 132016 - DNA, 248 bp, Glycine max
tggctttcttaattttatttttcaagttttaaaaattgaataacttgtgcctgattaattggtggattcctctggccacagatggattccaaaaagagaaaaagcattggtacaaggcccacatcttaatatgacacaaggagattctcttcattagatgcttggaccaaatacactgataatgtcttgggaagaaacattttacctgagaggaatagagaactatatcacactgagctagatgactt

SEQ ID NO: 132017 - DNA, 401 bp, Glycine max
  unsure (1)..(401): unsure at all n locations
atgcaagagaatgaagaagcatcaacatgaatctagccgatgctattgngcatgctatcatgggtgctaatcacaccataatattatgatgagggatgactcattgtctcactaacgtatcttatttctttcaaatgtgctttcaaactatcatgacttgaagaggaaaaacaagatntcatatcacatattgtcaagagacttttttagtagaacaatttcccatgacttgaacttatcctattattataagaataacatgataatttatcacatcacatctaacaaatttatatctataacccaacttatcttacataattgactcatgtacactacttactaaccataccaagaacacctccccctttattatacaactcatgtcttattgaccttgg

SEQ ID NO: 132018 - DNA, 338 bp, Glycine max
aatgattattatgatggatggctcaaattctcaccaaggctaactcatcactttcaaattgaactctcaaaactatcatgacatgtagagaagaatcaaggatttctagtcacaaaatggcaagaacttttattttcaaaacaattacccatttcttgaacatatcctataattcaaagaaaaacatgccaattcgttcgtgcacaccaaattgacccataatattaaactgaaaattcgacgcaactaacaacattaacatattaacacaacttacatatttacaaaacccacaaaactagcaaaccaagaacacttcccccatacttatacacaca

SEQ ID NO: 132019 - DNA, 308 bp, Glycine max
  unsure (1)..(308): unsure at all n locations
ctcacgcaaccacaagctgcaataatgtgtgaacatggatagtgaagcgcataataccttccgcattgacaatgacgaccattcaagtttacttgccacttttgtccgccacgctgcgttatagggttgaagctctcctctacttcaaatctggtggagtggatatcatacacgcgaacgatgtgcgtacaagcttggtcttgatttatccttangtctttaacaagctttgaacaatatacttggccttcatttaactgtctttgcgcttggcggccacgctcaacaaagtattttcgacacctact

SEQ ID NO: 132020 - DNA, 209 bp, Glycine max
attcagaagccaataaaaatatttgattaaaaaattctatatccaattcaactaatattatgatgataaaaaaaattataatcaatttttttatcagatataataaataaatttatacgtctataaaaataatctatcaattcattaaatatgatttgtctacagataaatcaattattcctataattgttttaagaatgtattcttta

SEQ ID NO: 132021 - DNA, 450 bp, Glycine max
  unsure (1)..(450): unsure at all n locations
agccaacactttgttgtagtatgttttacaaaagcacttccaggcgcggttgttgagaatatcattgcctactgtagtgggtatcacgagtaagcagctgctggttgtacaagaagttatggtagtagtaggttggtactagaagttatatgagtaggtagtggtgtatgacagttagttagctactagaagttattggagctagntatggtggtactcaaattaattattttctatctttggatagataaactaactttgtaatactatgacgaatgaatcgtgtttttcatctatccttcatgtatgataaccataataaagaacatgttaatatcgataaactatatctctcacaattaaatgaaatacaagagctgtggtaacattaccatttcgacttattcaattggcaccatgaatggtngggcactgatacctagaataaac

SEQ ID NO: 132022 - DNA, 386 bp, Glycine max
  unsure (1)..(386): unsure at all n locations
actccaactgaaatacacacagttctgcttcaccaattggtaacgggtcaactaatcaaaactgattacaaaacaagtattctaacttgccactcttggctattcaagtattctacgagccactactttcacacttgctagactccccttaaatcgaagaacacccaagtattatgttgtcaccatgtcactcttggctctcataaacaaagttgtttgattgaatacaaacaaagattcgcacactcaaagagtggataaacaatattctcaaatacacatgataactntactaagcaaaggacaaaactaatgganatacatcatgtattgcccatgattatacaaagataacttcactttgtactcaagtcgatacacttact

SEQ ID NO: 132023 - DNA, 434 bp, Glycine max
  unsure (1)..(434): unsure at all n locations
atgcaagcttgaacttctcgctgtgcaatactggtttatattngnggcacactagaacttaaattatcctccgtggttactcttctgggctcttcagccatgagggtgtcttcaactggttctatgtgatagtgccctgcaataggataactagaagattcctcgaatgaacgaggttcttcttcagtagttgctgctgcttctaaatcctgcaaaaaaattctgattctctctgaattacgccttctacatagggcggtaatttccaaatcaatgggaatcaaatcacctgcagaagatcttctttgcatacaagagaacagaacaacaattatccagttcataagaacaatgattgcatgataactaaaatatgaacaacaagaatcaatgtatcaaagagaataatataaagcattggtcgcaaactgaac

SEQ ID NO: 132024 - DNA, 291 bp, Glycine max
tctgcttgatgggatttcatcgaggattgtgacaagtagttaatagtcttatatgagcttatattaactctattgggttgagtgagaatctctcataaattagttaagagaaatacacacttgtggcgtgatcaatattgataaattgatattgagacgtcggaatacctgttgagcatatcttgtctctcaagagggaggatcgttttcctatagtcgatgattacaatgaaacaatatttagtatggacaataatttccatcccttataataacaaacacagataataa

SEQ ID NO: 132025 - DNA, 290 bp, Glycine max
caataatgatagtggatcatgctcaataatatgccttcgcttattctgaacattgtgtgtcgtgtgaatatttctttcatgcagggacaagaatcctatttgttgtgagagtgaaatgatgggcagcaccaccaaccaagggggagggatatttcctctttttttgcctttatctttgggaggtgggtatatatcttctactttatatgcgtgaggtttaaatgcgggaaaaataaaaatagaaaggggctgtgaatgcttaagaattcctctgctgttcatggcattcc

SEQ ID NO: 132026 - DNA, 468 bp, Glycine max
  unsure (1)..(468): unsure at all n locations
catgcaagctnnctatatacagatgatgctgattgttttgtagctacctcangcactcctctaatgactatggcatcatttctggcgctaaactgctagtagtaggaggccatcttctcaattaaattgctggctacagcaggtatcatgtctccaagggctccaccactggcaacatctatcatacttctctccattttacagagtccttcataataatataggagaagatgctatcctgtaatatgatggtgagggcaactggcacatagtttcttacatctctcccagtactcatacaggctctctccactgtagtgactaatacctgagatatccttcctgatcggtgtggtccagaaagcaagataatttttgctaatagtactctcttaatagcatcctacctcgtgaaggacctatgagcaaggtaatacagccactcctctgccacctcctctaatgaaa

SEQ ID NO: 132027 - DNA, 339 bp, Glycine max
  unsure (1)..(339): unsure at all n locations
cgatagaacaaaactcgcatgtattctcttgattntaggaatggcatcatcaaagagggggaaattgtggaagcaaagctttccaagtttattatgatgatgccaaagctttcaagaatcaagagtcaagctagtatcaagaatcaaagagtcgttcaatcaagaatcaagattaaagtgacgattcaagagaagactcaattaagattagtattaaaagagttcttcaaaatattgaatagcacatcttgttcaagagaatttntcaaagaaaaatcttctaccaagagttttactctgtggtaatcgattaccagaaagtgagtatcgattaccagt

SEQ ID NO: 132028 - DNA, 295 bp, Glycine max
  unsure (1)..(295): unsure at all n locations
gcagcttacaagcgcagctgcaaacgagttatttcttcatagaggagattgccaagaggcttttttcatgaagatatgagctggtcaatatgagtacttgcagataaacaggagcttatctcaatcttagttccgctcacaacaaatgtatgatccctattatccttatcgtggacttgcgccccttgtattaatntatcccctgctgaaatgagtgcctgaaaattaatattttggcatgataccaatatgctcgctcccaactctttttgtttttctcatttctatctgaccc

SEQ ID NO: 132029 - DNA, 153 bp, Glycine max
aaaaatatattaaaaatacatatataacaaattataatgggttgttatatatatatatacacacatatatatatagatatatatatatatatatatatatataaagcctcacatatgctatttgtacataacatgatgaaagtgtggggattc

SEQ ID NO: 132030 - DNA, 374 bp, Glycine max
  unsure (1)..(374): unsure at all n locations
gcatcgatattcatcttcagtgctcaaccttgccttgactntctgcttcctgaaccactatgatatctagtttgagccaagaatgacagttgttcctgatgtggattggctgtcatcaatatctgatgcccaatcagcatcacaaatagcatatagtgccattggttttgaaacagaagctggatgaaggaataaaccatgaattatagctcccttgagatatcttaatatcattatgaccacagcccaatgagaatccatttgagtagccatatactgacataccttattaacaacataactaatctgatgtctaataggggtagcatactgcaggacacccactacttgacctatagagtaggggatcatga

SEQ ID NO: 132031 - DNA, 274 bp, Glycine max
agggcttatacctttgagatctgatatatgccacccaattactttcttgggttcctcagaatttctactaacctatgttcttctttggatgtgagtgcattgctgatcaccacatgcttagcctcatcttcttccaggaaaacatactttagatggtgggataatatctttaattcttccatcttcatctcagatggagtcttgctctttagatcctcaaatctggttcctcctcaaggatgctatcttatcaatccaagtcttctaagcaagc

SEQ ID NO: 132032 - DNA, 239 bp, Glycine max
gcatgcatgcttctcaccgaggcaccccactctggccttattctcatacgaccactcaccacaccgcagtaccaccatgggccaacatagtcatcgtgccatccctcctaggacccataacccttgcatgcgcaatcacaaccttcgaggctatgcacacaggacttttcttcttcagatctataaagggctgcactgatcttgttatgacttggcctagatggtttagaggaggggga

SEQ ID NO: 132033 - DNA, 393 bp, Glycine max
  unsure (1)..(393): unsure at all n locations
actcagctcaaatcanatgcaataaaagttgttttagaaatggtttatattcttgaatgaggaagctaaatctatatgagcaagattggccaagaccggcaagccatggaccagctaattcaatcatatatgtggctctaatttaaaattattgcacattgtaggtttgtctatcaactagcacctctatcttcacacagactagcagccgaatctctactcaaatttggttgggaataatacaattattatattatatatttagtatatatatattattgttatatattataatcaaagacattttttttagaagggattgcctttgagtttccattgacccgtcagagctttgatatttatatttcatttaatatatactaatgacgggct

SEQ ID NO: 132034 - DNA, 369 bp, Glycine max
  unsure (1)..(369): unsure at all n locations
agcatgtctaattcagcgctcgtatttcaggacttatatccttattctaggaagacggtattgtcgggtgaatntgctaggagcttctgttttcaattactagcgtatcgatatattatgggactccatcggacatccgagtaaaaagttattgacggttgaatttgactatgggtaccgttttcaatttggagcatgacgatgtattacaagacttaatcggtgttcctagtaagaagttatcgccggttgctaatggtacgagcttccgccttcaatttggaggttctaaatatatgacaggaatctatcggacatccgaagagattgtattgttgtctgcatttgactaacttcgtttctattcca

SEQ ID NO: 132035 - DNA, 382 bp, Glycine max
  unsure (1)..(382): unsure at all n locations
agctttgatggtgcgcagcccaccatttttttatataatagnaccgatgatgtgnctaccatnacgattatcgtctccctttccatcattggtggtaccaccggggccgccagatccctccaccttttgggcgtgttcttagaatgatccgtccccctttttgcacatgttctgtagttgcttcctatccggaaccatatcaaaattgtgctgatactgcctaacaaaggcaaccattatgtccttccaagaatggtctcaggaagcgtccatgttagtgtacctcgtaacagcttccccagtaagactttcttggaaggaatgtatcagcaattcctcatcttgttgcgattcccccatcttctgacaatacatcattaga

SEQ ID NO: 132036 - DNA, 385 bp, Glycine max
  unsure (1)..(385): unsure at all n locations
tactcccactgaacttgtggtatacacaatcatcaactgctattgcctcaaaatcatatgaggtaatgacttgaacgaacttgtaataccattgacgggaagcttgnttcaaaccattaatggatttatttagtttgcaaaccatagacttttgagtacctgatacaaagctttctggttgtatcatataaatatgttcttcaatgctaccatttagaaacgcagtcttaacatccatctgatgtagctcttaatcataatgagctaccagtgtcattattggtctataagaatacttcgaagatactggaaaagaagtttcttttaatcaatgcctctctttgggagaatccttagcaactagacgagcctatatcttctgaca

SEQ ID NO: 132037 - DNA, 460 bp, Glycine max
  unsure (1)..(460): unsure at all n locations
catgcaagcttgccgcccagctcgcccagacgatcgttgttgcttcctacagaagcaacatccttgtggaggaatcttttagagggcccaagtggccctggttgctatttgcacccccctttttactaaatacaccccatttgctattaggtagtaattctttttccggaacgctacgaaactttacgaatntgcgaacgatacttattttccttccgngatgttatgaatccttacggatgatgtatttactctgttctacctttcgaagaagntacgagaactcacgtgatgcgcagaaacacctctttacgacttccgccacattacggaatgtcactgatcacgcaatcctgtcttctgtaggatttatgagacgtctcaggacttcatttatggcatgtaatctagtaataattctcggacgatattatggatgacagttgtcctctttactacc

SEQ ID NO: 132038 - DNA, 338 bp, Glycine max
  unsure (1)..(338): unsure at all n locations
ttagagaccatacaagtttcctaacgatttctaattatgtgggccattaagtctatcatatgctgacaatagccgagaagcccatgaatctcttcgggggcggaggaggtgtctgccatcgtcttggccctggctaacaatccgggatagtctngactccccgtcaaggtaagagctaaccgaaccaatcacattgttgcctcttggtgtaaagagtctatcacccttcctctagccttcttttccgcgtatacttgggcatattcgtccgcatacctattctctgtggccgtggctagacctaactcttcttggtacttggcgatgatagctagcat

SEQ ID NO: 132039 - DNA, 397 bp, Glycine max
  unsure (1)..(397): unsure at all n locations
cacacccaagcttactggctagctggtggngaatagtggaaagaggattatcaccgctaattggactcgtagtcatcttgtgtacatcccaggacccatattaagatagttacattttataaccactgtgtgcttgtgttaattcatatctatagttgcatattttgttggtaacctgtatataaagagaggtggctgcttctattgctggggcctgctatatcatttgctttctttccatcgcgctgatttctactatcaacaggaccatttgtcagggacactttattgagccttccctgcgcaacaaagcttaacgaatgtggaagatgttatctcaacatctcattatgagcactattaatctaaataagctttgtgtggcgagactttctta

SEQ ID NO: 132040 - DNA, 312 bp, Glycine max
  unsure (1)..(312): unsure at all n locations
ttcaccttctcgctagcttacctcngtgttacgagccgccgtaagcacaacacttattggcttagcacaaggaagaatctggaagaagatgatctggccatggtcgcttagcgcaccgcttcatcttactaagcgcaccacttcagtccatccactaagtgagaaaggcatgcgctaagccaaaattcactaatgtgcgctaagcgggccagaattgcactaagcgcatgagcacgaacaaggccacctatttaagcctgatatttgggctgggantcagaagcttgcatgtctggagattctagagagaga

SEQ ID NO: 132041 - DNA, 120 bp, Glycine max
gctgcatgcaagctgcactttgcttctcgtaacagactctattactatacttggcggaggtaggagcacgggaatcctattctattgtcccggatgtggtgatcactcccaactattatt

SEQ ID NO: 132042 - DNA, 258 bp, Glycine max
  unsure (1)..(258): unsure at all n locations
cctaccatccagagactgatgttcttatctaggggaccattcacnccctggatgatcttatgacgacgtgtgtcttacaccaaaaggaaggaggagagttccttccatgacagagtttacttacaacaacaggtttcactctaccattggcatggctccctatgaagctttgcatggaacaacgtgcaggacaccattactgtggctagagcctcgagaaaacctcaccttaggacctgaagtggacaacaaaccacc

SEQ ID NO: 132043 - DNA, 399 bp, Glycine max
  unsure (1)..(399): unsure at all n locations
atatatctactcttatttaanaaaacccataataagtattattataatcttttttaatgcaatattaattattttctccacttatactcttatatatttaataatcaactataaaatttaaaaatctattaatgatgtaagactaattctataaaagtattactttttccatttttgtcattatttcttcttaaatcatataaaagtactgaggatgataattatctgaggatgatatatgactaaacaaaatctatctcagaagaggtgttaacatctcgagcaagaataaaaatattataaattatgatatatttataaaacaaatcgtagccaatacctacctgcaagatagtgacacgtcgctgcaagataatanatgactgatgatcaactatt

SEQ ID NO: 132044 - DNA, 304 bp, Glycine max
  unsure (1)..(304): unsure at all n locations
tgcaagcttcacagngcatatcaaccattacactatctcgtggggctcttcatccnttttctcttctttcttcttatcctctgtggtctcttctttcctttcttcttccttggtctcctttaacagcaaagagaatattaattgaatatagcaaagatgtgactgaaaaatctccaccatgtgtagaactatagtatatatggcatgcattactcgataatgatgccaccaccatatatatcatagagcagacattatatacaaaagatcatagatgttaaaaaaaagcatgaacctattccta

SEQ ID NO: 132045 - DNA, 321 bp, Glycine max
agacatttagtccccatatttcttaaaacccattattttaatcccctattttaaaatgtagacctttagtcccttgcttttaaaacctataattttgggcattctctcaaacctaaagcaatgatggtaaagaaataataatgaatatgacatataataaacaaattatcttttgtcactaaatttggaccacatcaaagtaatttcttaccatcaatggtttttaaatttgatgaaagatcataattggaattttacaagctcaggacttatgtcttattttataataaagactaaaatttgaaatttaaaaataaaaac

SEQ ID NO: 132046 - DNA, 434 bp, Glycine max
  unsure (1)..(434): unsure at all n locations
ggatccacagagcgacctgatgctgcagctaagcaaannagtggtggaggcgngtgtgcgctatcgngacctacaccatataaggaggacaaaaatatcaataaccttagttgtattaataattgtattggaaagatattatagttatgtactactcaatttaaaacaccaatgggaaattgttaatttctcattcctatcacatgggcatgaaatctacaatatttttttctcatttcttgcttgatgggtggatgttctattataaaagttagggaggagtaataatcaatacataatgtgggattcaacgcagatattactcatagttgctgcaacccataatcaattgtggacctaatatcatctctaatctctctgcatcgtgtaatcaaatatgatgatggtatcagaatcaattcttactcatcact

SEQ ID NO: 132047 - DNA, 413 bp, Glycine max
  unsure (1)..(413): unsure at all n locations
acattcacaatgcgcgcataaacccaccatcccctgttgcccaccttcaactgagctcacgtactcccacgtagcccatatgctctgttctctcaacaccgggtcctcatcaatcctcccaagctttcacaacatgcaagcaaaacaacattcacacagcacaagctatcacagccaagcaaaacagagcaaaggcagaaaactctgccataacaccaaccaaaaatcacagcttttcccactcaaagaccccagtaacaatttcctacgatccaattcgttaaccgttggatcgactccataattntagtggaagtctatagcgcataagcctacattttgaccggtgggatctacatagatacatccagaactcattgtacattacttctttcacaaccaagcaaaataca

SEQ ID NO: 132048 - DNA, 203 bp, Glycine max
accacatagtgtgacctgaagatatgtcgcggtggtcaggagaccttgaggacgtgataggtgtttctattgcccaataccaatcttgacaaatcccgacccatcccggtcattgtcgggctgggagatcctgtgatgttcctaagcgggctagctcctggctgcaacagatataaggaacaactatctcaatctatgatgct

SEQ ID NO: 132049 - DNA, 425 bp, Glycine max
  unsure (1)..(425): unsure at all n locations
tcttatgagattcaaaattaaaaaaatacaaacttaggactaaaaccaactaaaaaacttacaattattaaaattgaaaaatacaaactttccaagaacaaaaacatatttaaaccaaataattatgaaaaaaaatatnttatcaatctaatgtagttatttttctctttctctctctttctatatactttctttctctctctctatatatatattatttatatgttatggatgtgaaattntcaaatatttattattaatattattatngtaccttcttcaaatcgattttttggctgtgtccctgaatttcaaggtactggtntatattatttcttattacatattaacaaataaaaaattcgggatgaaaagctatctgaaggagcacccttcagacattatttcattttctatgtttcact

SEQ ID NO: 132050 - DNA, 330 bp, Glycine max
  unsure (1)..(330): unsure at all n locations
acgagcatccgctttgtgcaacactcatgggcttatcgcgaggatgactctggaagaagattagtcgtactaggttgcttagtgcaccgcttcatctcactaagcgcaccgctttttccatccgcttagcgagaagtgcacgcgctttgccaaaattcactattgtgcgctaagcggtccataatggcgctgagctcatgagcacaatcagtgccacctattttagccatatattacattttgtggaagtgagttgggntgggatatagagcttcgcttgtctagagattctatagagcgaatggtcctagttctagatagttatgagag

SEQ ID NO: 132051 - DNA, 462 bp, Glycine max
  unsure (1)..(462): unsure at all n locations
agactcaagactcaagaatcaagatttattatttatcatgatcaagattcaagactcaagattcaagaatcaagagaagactcgatcaagataagtactgaaaagnttttcaaaacattgaatagcacaagaagttttcacaaaatcttttaccaaagaantttactctctggtaatcgattaccagaaggtagtaatcgattaccagtagccaacattgtttttcaaactgatttacaaagctgtaatcgattaccataaacatgtaatcgactatcagtgttttaaaacgttaagattttcataattcaaaatgaagagttacatatgttgatgtgtaaatcgnatacacattaatggtaatncgataccagtgactggtttcgaaaaatacatttccanaagtcacaattcttctagtgacttgtttctgaagaaatctttcaaaatcacaacttttct

SEQ ID NO: 132052 - DNA, 344 bp, Glycine max
tatcaatttagtaattaataaaaaatttcatgtcagttaatgagattattgtaagagacagaataatataatggttgaacataaagttagtgatgattatttttaatattagtacaatgtaccaagtacattgcctttttatataaaattaccatttttctaccattacaaatatacactttagtcattcatgggcttttaatacctaggtagagcatatctcatttatgtaattgaacttataggctaccatgagcttgtttgttattaagacagatgagctagattgagaacttaatgagaggagctaaaatatgccatgaactactcagcttattgacacc

SEQ ID NO: 132053 - DNA, 320 bp, Glycine max
tctgtattttactatcatacatctccctggaaatgtggctatctaatggtctatggtgatgatatagtgattacaaggaatgatactactaagagtgcccagctaaaagagcacttattcagtcttttccagacccaagatatgagatctttgaagtacttccttggtattgaagtggctcaatcacgagatggtattgtgatttctcagaggaagtatgctcttgatattttagaagaaacatgtatgcagaactgtagacctgttgaagccctattgtcctaattgaagctcaggagatcaagtgagctatcctgacc

SEQ ID NO: 132054 - DNA, 414 bp, Glycine max
  unsure (1)..(414): unsure at all n locations
agctagcctagcccgtagagatagatgtattgactttggncactatgaatgacaaagtccgtgggataaatgaagtcttgccatgtctacatagcccgtactagtgcatactgctccttatcataagatgaataactaggggcaggaccacttatcttttcactaaaataagcaagagaatggccttgtagcatcaacacagccccgatcccaacatttgaagcagcacactcaatttcaaatgatatttgaatatgtggcgcgcaagtataggagcattagcgaggttgtgcttaagaacattgatagcttnttcttgtttctctccccataagataccaatcattttctggagcacttcagcgagaggtgctaccaatgtgctattaatctccataaatctgctataataac

SEQ ID NO: 132055 - DNA, 339 bp, Glycine max
  unsure (1)..(339): unsure at all n locations
tactgaaataaatgaacaagatgtgacccattgatattatatacatggcaacaaaaattaatatgaaataatgtgatacaaataacattgtttctgatagctaccttaagaagttctaatactagtagttcaaacacttgcatctccaacacttatagacttaatattagttgtattcaatgccaaaccaaacaactctaaaacttatgagcggttttgatcagctcagtttggttttgagtgtatctataaatctaaacccatgacccaaccttgacatgaacgggtaggatttgatcgatcgatnttgactcaaatacataatgactcaacccatac

SEQ ID NO: 132056 - DNA, 298 bp, Glycine max
  unsure (1)..(298): unsure at all n locations
gagaacgngaatggatgcatacattgatttgatgatgcccaagaaatatccaacaatgctgcttcaaatgattagcatttgcttcaagaataattcaatagtgcttcaacaaacaaagccttgtatcatgattcactaaagaccaagccttgccttaaaacatagtgctttcaagacatgcaaggctctggtaatcaattaccaggaagtgtgatcgattaccagacgacatggttgagaaatagctggtgaacaatggtttgaatttgaattttcaacatgttatcgattaccatat

SEQ ID NO: 132057 - DNA, 363 bp, Glycine max
tcgatggtgctcaattaattttccacctgcttcatgcgcgcataaacctcacattccttggtgtccatcttctagagagctcacgtactcccacagagctcatatcctcgtttctctcaacaccaggtccccataattccttccaagcttctctcaacatcatagtaattctaaattctcacatcacaagctatcacacttaagcataacagggcagaagcaaaaatctttgcccaaaacaccaaccaataatcacagtttttcacatacaaatacccacagaaacatttctttgtccaattcgtgaaccggtggatcgactccaataatttactgtaatgttctagtacttaatcctacatt

SEQ ID NO: 132058 - DNA, 401 bp, Glycine max
  unsure (1)..(401): unsure at all n locations
tggctctagacctggtcattgcccgtgcaactcatgttgtgtttctaggtccttatgctctttggatagccctctatcactcatgttgagggagccagtataaaacttagtagttctattactctcttttaagcttttcaaagtattttaaagcacactgttgacacatctttgcacacaagtttgcacttcacaagactgtttataaaccattgaacgatagtccatggccttttgtgtaaacataagacttgtcactagacgacaatctttgtgaagttataattgattaagaatatcactctcaatgcgagaagtttgagaagtatatcaaacaccctaatcaaccctctntctagtgtgatttgttatgatttagtatcaagatcataatcatcaac

SEQ ID NO: 132059 - DNA, 458 bp, Glycine max
  unsure (1)..(458): unsure at all n locations
acctgaggcatgcaagcctttcttatccttcattattagaaatgttttataatngcatcacttcagtcttactttattttcttggaagaggaagaaggataagagattggatatggagcatggctcttgtagaatcaatactataaactttcaattcatacaaattcaaattaaactgtataagaaggatatctcaccgaagaatatctaccataactctagatgaacacaaatgagacttacaatcaattaaaaatatataggagcatgaagaaattatacctgtcccccaggcattatattatctactatagcatcaaccagaggctgctgcagaacccttctatgatgaagtcttttcttgagatgggtggctggacactgcatttgtaggatgacatcatttaaacacaaataaagggcctttagatgtanaactcttatagtaataacaatgt

SEQ ID NO: 132060 - DNA, 370 bp, Glycine max
  unsure (1)..(370): unsure at all n locations
gatacaaaataatgccatatttgaacacccattaaatctcctttcattaacataccaattcaacaattccacaactactatctgcacattacaaagaaccaaaaaccatttgcacagacccagcaaataaaccaccaacaaccaataacattcccctacgacattgccaaattacattccttgctacattatcaaattacagtcctttgctacataataaacacactaacaagaaaacacggacctaagaaacaaccaatacaatccttataatttntccttcatcttcactaatgctgcgttgcaaatccttntccctcaacttcaattcatcaaccttcttcatcaatgctacaatgatcttcttctg

SEQ ID NO: 132061 - DNA, 464 bp, Glycine max
  unsure (1)..(464): unsure at all n locations
gatcctactgagcgacctgcggcatgcaagcttgttgctgagagatgctgtatagtntctgttgtaacatngcctgaattcttatctaagatgaatatgaattactgtagtagtattcctaactacagctaacattttataatttaaatcaggggcaatgatggagaactgagattaaggattcgcggggcagctcagaggaaaggggctggttctcttgcagttccctgatgcagcaatagaatcctgcaactctcatggatgttgttaatgcattatctacaagatgtgcatgtagtggttgctataatccagggtatttttctctttattcacttgtaccttccncagtagttattgaaggaaatctgttaatgtcagctcctgtgcacagttattatgtagtttttctctgttgtataagaggaggagggggattctgacatctgaaacatgtttagtca

SEQ ID NO: 132062 - DNA, 389 bp, Glycine max
  unsure (1)..(389): unsure at all n locations
gatcatcaaacaggttgttgagcaaagaactcaatttgctactggacatgcaacatacattcagtctttgaaaagaagttcaatttttcaacaacagcaaatatcaagaaaatatttaagaacttcttaaattttgcatcatagtctatattatttgtcataatctgggataatttgtcatcgtggatagtctatgtgacactaataatgaaaacaatacacttcactaacggtcgtacttttaaatntaacggcaaatactatgttgcataatttatgcagaggtaaagactatnttttacatttcaaaaagatatgatctaatttacangaggagtcaaanattagaaatcanaatatctatgtactcaantaatatatatcgtctt

SEQ ID NO: 132063 - DNA, 496 bp, Glycine max
  unsure (1)..(496): unsure at all n locations
agcgacctgcggcatgcaagcttaatccaatgcagccataataatccaatctctaattaggctgaatggagccaaaatgagcatgattcatatcacaccaacatagaagaaaattataatagggaggacacaatgatctctatcagaaacagaaatttagctaggtcccatcactgcccatccaaataacatgtatattgacataatgcttagcaaatctataatgaaaaactcactgggcggccatcaattatgtgcttatccataatgactctctccgcagcagaatgatcagcaaagacaacaaatccgaaaccacgagcacgggctgttgtccgatctctcatgatcactgcctctatcacctctccatatttcccaaaatattctaagagacggtcgtcatcggtggcccaggatattccnccaatgaagagcttgccatgatccgattccatcagttctgtcatcaaccatgcccaggtaaccatcaatc

SEQ ID NO: 132064 - DNA, 445 bp, Glycine max
  unsure (1)..(445): unsure at all n locations
tcagctgatgttggatcttgcattgaaacaaattatatcttagaaagaatacttcagtatacttgtattccttgtgagccttcccttggtgtagacgataatcggccagatccttcttggccttcatatggcgaggttgatatacaagatttgaaggtagnttgagctattatatgtttatgggttggggctnttgttttctnttcattttcggncaattgatttatgaagttcatatcaaggttttcctttccgtaatggcaagaaattagcttctgaaacagaaaaatcatgccaacatatttcatagcatatattttaccagatgtttgtgcgacgtttgtaatgatgtctcgcccatgatgaaggggtcgtattgctcacatcntccacttgtcttgcgcgtcttacatgcatattcgtggaggactgaaaactgcattgt

SEQ ID NO: 132065 - DNA, 470 bp, Glycine max
  unsure (1)..(470): unsure at all n locations
gcttctataggagggtcgatcctaatntctctattatagcatcacctctcaatgagctggagaagaatattgtggctattacatgtggtgaanaacaagagcatgcctttgctgtgctcaaagaaaagcttactagggcacctgttctagctcttcctgacttttctaaaactttagagctagaatgtgatgcctctgtagtggtagttgtagttgtattgttacatggagggcaccctattgcttattatagagaaaaacttcatagtgccaccctcaactaccccacctatgataaagagctttatgccttaataagagccctctcaacttgggaacattaccttgtttccgaggatattgtcattcatagtgatcatcaatcacttatagtcattagagggcaaatctagttaacaagagcatgcatgggtgtatagtacctgagcattttcatatgtatctaaaca

SEQ ID NO: 132066 - DNA, 435 bp, Glycine max
  unsure (1)..(435): unsure at all n locations
ttgatgatgacaaagacgccaaagaatgatttcatgattgagtcaactagtttaagatcaaaatttatttctagtttcatgtgaagaaatcaagaagattcaagaatctagtgtagtttgatttcaagattcaagagaagatgaattcaagaatcaagagaagaaatcaagaagacttcacaggggtagtattgaaaagatttttcaaaaaaaaacatagcacagttttgtttntcaaaagtagttttttctcaaaattttctaatttaccagagtttttactctctggtaatcgattaccagtttcctgtaatcgattactagtggaaatagttgatttcaaaagcttttaactgatattgcaacgntccaatttgattttaaatggggtaattgattacaatatattgtgtatcgattactagtgtatctgaa

SEQ ID NO: 132067 - DNA, 362 bp, Glycine max
  unsure (1)..(362): unsure at all n locations
tccatatagcacctgcagcatgcagcttgataatattattggtataantcgtctgttctatgaagctcttgatgtctntagagggtactccctcgatgacatcttttgtcttgaaaggaattgccatgacatgtttattggtactctctatgatatttggtagatgatattttgttgcaggaggtaattacgataggattatctcgccatccttaacttgccaatttggtatgacatttgttgtacatcacctatgatgtcttgtttccaagtggtaatctatatcctttctgatggcattagcatgataccaatctaagaagatgatattaattatgactcggtcgacaaattcgaagaac

SEQ ID NO: 132068 - DNA, 351 bp, Glycine max
  unsure (1)..(351): unsure at all n locations
agtaaggatagagatgaattattggaggaattgaggaacaatttgctcaaggctcatgatcatatgaaaagatatgtgaataatcatagaagggagctagtcctgcaggaaggagaatgggtctttntgaaattgcaaccttatagaatgaagtctctagcaagaaagccaaataagaagctatagccacgattttatggaccctgcaaggtgatactgtgatatcctggaatttctacccggaattgttgaaatattacatttaaataattaataaaatatattattcaggggataantatatatatatatatatatatatatatatatatatatatatatatatatata

SEQ ID NO: 132069 - DNA, 350 bp, Glycine max
  unsure (1)..(350): unsure at all n locations
ggagacanaacacatgtntctaccgtggtagtaggaacttatggatatgctgctccataatatgtcatgactggtaagcatgtagcagttagcatcttgaaagcgacaaaacatctctttagtatccaatacaacacaggagctgctgatacgctatgctaatatcttgatcatggattacaanttctgctaccaagcggcacattatgtaagggcggaagatgccaatcattccacagggcatctgaatcatgtgctgagctgcagaggatatcatcccaagataattgagctgatgtgtctaactatgtagcttctttgttgacatatctcattataactgcaatact

SEQ ID NO: 132070 - DNA, 348 bp, Glycine max
  unsure (1)..(348): unsure at all n locations
tccaaatataaatgtttaagtgtacaagacaaatctgaaaggcataactactgagcagtgacaaacataacatactaagaaacttaagcatcatactacaagctaaaatacaagtatcaaatttgattcagttgccatcatttttaacaccaacaagcagctcactcttctccagatgttatttgtgccattttggtnttggacaggatgagcccaactgtgatttttgaacagcagtgcacatgcatccaccttagtctggttaaatgggacatattttgtcttcctaagagcagaggggggttaggaattaaagacttgaacaagtttaatggtaccttacttggc

SEQ ID NO: 132071 - DNA, 370 bp, Glycine max
  unsure (1)..(370): unsure at all n locations
tttaccagcgggacactactcttaaagcaaaaatggcatataacctcctcccataaatacaaacatcaatggtaatttagagcaagcttatgcgcatatatcattacgaacgttctcttgcccaagacattctattaaccgaaaaaaaatgctcccatatacaatcgaggcagctttggtacctagattatttacacgtacttccgaggtgtatttggtacttacatcacacacattctcttggctaaattcacatacatgcatactccaagcatttgggggtaccaaaaagtgcacatgtgcacatcttggtatntctaatacctatacatacacaaactgtatgaggaatcttgactatctacacaat

SEQ ID NO: 132072 - DNA, 353 bp, Glycine max
  unsure (1)..(353): unsure at all n locations
tagtcgaagagaagntcaagtccatagccatcaaagtctgaaaagagtatgatgaactaagggatgtcaatatggccacagctgaagctttggaacgagaaaccaagaaggcccgaaaggaagaacacgaccaaagcaaagttttgaggggctttatagggcagcaatagtgagctcaaactccgaagagtgaaaggaatcatcactggtcaaaggcatgatctggaaggacgagctaaaggcttgccttatgtcgaaaagaaatttttcccaacagttatagtgagactgaagggaatatgtgggccatcatcgattagtgcaaagagaagctaaatctagcggcgactcac

SEQ ID NO: 132073 - DNA, 297 bp, Glycine max
  unsure (1)..(297): unsure at all n locations
ggaccnccgatggcacacaaagagtcctgaagtggggttgtttgacctccatcatgatcacttagtttcaacaaataatcttctttttgtaggagcgtatgaaagtatcgtcatctagtcttactatggtgcaagaaccacatgaggaggaatgatgatttgtttagcattttattcggcatttgttgcatattcttctatttcaaagaagtggtagtttgaacatcttgggaataagttgcgcatatgctactatttgaggaacaagagagtgagattagtttttgcattccagtt

SEQ ID NO: 132074 - DNA, 252 bp, Glycine max
tcattctcaactctacctataccttaggccatccaatcgcaatctatacatatagaaggtcgtaatatagcatgagtatcccatgtgctgaagctccaatatctacatgcagtcatgttagtggatataatgacggacgatgaaactatatactcctaacaatggaagacatagcaattttggtagtatatgatatgaatttcttatattcattatgggctaactcatcaatatatgttgttccacataggt

SEQ ID NO: 132075 - DNA, 463 bp, Glycine max
  unsure (1)..(463): unsure at all n locations
tccgccatgaccaatagcatcgcagctgcagcttcccggatgacgccgatcgatctttttctaaccgacggcatgcaaatgtcggtcaaggattgaattgaaaactcgctaggcgacatctgtcgagaagaaacgtccgattattttcagccgacatcgcacatttctttttagaaaagctcgctggacaataatggtcttttcacagaggagaaagtttncttgtgtgggtgctgcataaaaatagtacaatgtacttcggctatagttctcgcgcgagatcaaccgacattttgtttcggccacgagaacattatcccacctctgcaacaaaaatatttgctaacctgtgtcatgcatatgtcattcaacgattgaatagaaaactcactactcgacacgggcgtgaatattctcgactgatattcacagacggtcttgcgcatttcttgtaaaaacgctc

SEQ ID NO: 132076 - DNA, 343 bp, Glycine max
  unsure (1)..(343): unsure at all n locations
agctagcccacaatcagaagagcatattttattctagtgaggataacatgtccgatgattgtcttgtaggtattcattggcgtagacgttgtcatcacatgctttaatattgataatgtggatgtgtagatgttttcacctcggctgtacgacgatgtaatagaataagatgagaatcaccccttgttgtttcttgtaggatgcgaagacgcctatcgcgaccattgctcctggtcgcggaagtngaggcataagatgcttcgaccatggtgtagttgctggacaatgatgatagtactatcagtggatagaacaaccaggcancctgctgaaaatcaccaaa

SEQ ID NO: 132077 - DNA, 379 bp, Glycine max
  unsure (1)..(379): unsure at all n locations
accattttcttttccacttagccaacatcaaagaggccaaagtgcgtatatcatgaataatttaaaaacatacataaagcataagttgaataaaaccaaaatgaatatataccactcagtcatatatcatcaaaataatcaagtctaagcataagacataaacatctagaggcaaaatacatagnaacatcatgttcagtcataattgactaagtaccaaatacttaacacataacctatgttcagagaataaataacataatgtcatatatcattcacagaacataatacacgcatgtgtattaaacaagtcatcgtaacataaaacatatcatttggctaagtcatgggcatctagatagcctaattctcttctaat

SEQ ID NO: 132078 - DNA, 247 bp, Glycine max
  unsure (1)..(247): unsure at all n locations
agtcgaatcgctttgatcttaaatgtcttcattctccacacgngtagggcggacaaaataattcaaatatcttccatttaaactcctatgttaggagaggacaattctaattcctccatatgcaataatctaatattatattccaaatagatgaaagtgtaatattagactttatagaaaatacacacactctaatggtgaaatattaactaacaacaatcctcaatttgtcattatttatacatac

SEQ ID NO: 132079 - DNA, 331 bp, Glycine max
  unsure (1)..(331): unsure at all n locations
ctcccgaatatgacaaccaccgctttaggagtgctgagcaccaacaacgcttcgaggccatcgaaggatggtcatttctctgggagcgacttgtccacctcaaggacgactagtatactgacttccaggaggagatagntcgccggcattgggcatcactggctacccccatggcctagttcgacccagacatagtcctcgtaatttatgctaatgcttggcctacagaggagggcgtgcgagttatgcgatcctgggtgaggngtcagtgtgatcccgtcgatgcggatgctctcagccatgtgctgagataccctntagtgctggagga

SEQ ID NO: 132080 - DNA, 358 bp, Glycine max
  unsure (1)..(358): unsure at all n locations
gacctcgatcggtcatctttccaggctgtttgtctatcgtcattnttttcgaaccatggcggagaataatattttnttgccgagatgggctaatgttntcctggccgaataaatgggaaaatgccagtttcggccgaaacgaatagtcggttgggctcgcacaaaataacctagccgacctacattttaaattttttatgcaacaccaaaacaagaaaacttcctgtgccgtaaaaaaaaaaaacattacatgacagcgagcgttttgaaaaacataattgcgcacagtcggggctttatcacgaccgatggcggctattgagttctcaattcaatccgtgaacgaaattcgcatgat

SEQ ID NO: 132081 - DNA, 374 bp, Glycine max
  unsure (1)..(374): unsure at all n locations
acctgaggcatgcaagcttgcatatgtaatagcgaaagccnctctctattattatgagtagcacctgacatctcaaacaaacaaatcagtcgtaacatgacaattattgttgctgtttgaatacctcacccactctagtgtatcacacaattagggcttttctctaatgaaacactcctgccttttaccactctaattcccctcgagttcttacgcaattcacgatattatggccacaacaaagaacaattcaccaatattttgtgaggtgatgctacagagacaatgatgatgtttaccaagaaaagggctaataatgtttngaggcacataagaaggaaatataactcataattgaggaaatcaagtaacaa

SEQ ID NO: 132082 - DNA, 387 bp, Glycine max
acctgcagctgcagcttaacagtcaatagcgagcgtgtcgatttattacaggactcaaccagacatccgaggaagaagctgttgccggatgaattgtctcaaatcttcatcattctattgcgagcggctcgatatatgacaggactcaatcagacatcctagtaaaatagtattgtcggttgaattggctaatagctacatcattcaactacgagcgtggcgatgtatgactggcctcaatcagacctcctagtaaaatgttatcgtcgtatgaatcggccaatatcttcatcatacatttacgatcgtgtcgatataggacaggcctctatcagactgacgtagaaaatgttattgttagttgatttggctatagctccaacattc

SEQ ID NO: 132083 - DNA, 419 bp, Glycine max
  unsure (1)..(419): unsure at all n locations
cctgaggctgcatctaatgatatgattgatcacactatttttctcacacacacacactacttaatcaaagagctattagaaattngacaatacttcccctttattttcaatgtctcaaataacaaattcttgccaatcacacaacttaatgtactatattctatcacccatgtcttgcatcantctcatacaatgattatcattagttctcaaaggatagcagctataatgtactatctctgactgaccaactaccatccaaaaagaagaggagaaatcctatacctatagctccatcttgatgaaggcaacaattagtagttgcctctaaaaatagaatcctaccaaaatatgagagaactccttgcanacctacaaatcccagtaaaaatcttcgtggcacctatgtatttgaagaa

SEQ ID NO: 132084 - DNA, 476 bp, Glycine max
  unsure (1)..(476): unsure at all n locations
gctgaagacaactgctgagcttatctctctaatcttgngcttagcgcacaaccttgatattgatgctctgccagattcttcaagcacgctgaagttgcacttaacgatgagatgcgcgcttagcccactgaggagctaagctcaactggcactattagcacttcgagacttatcctctgtttcacctgaaattgctcatatttcatcattatatccaatgtacatatgctagagacatctttaacaataaaacaagattgatttacaatatcactacaaaataaccattagttgaaggaactatacatagtgaggaagattgtttctatacaaaagttagtcgtataagacgactaacacccaacagggcactacaacaaccaacatagaagggcccatgatgaatattataccattcaagcacttagccgattatttctaaagatgtattaacatattctgatagaagagtgggg

SEQ ID NO: 132085 - DNA, 239 bp, Glycine max
agccatccacgcacaaacgatacgagagggaaacgaaatgcaaatgaacggcacgcagcagcaacaactcagcaggatgcacaaagcagcacagcaactcaaattctctgatgagggcgaggaccttcacaaatcacaaggaggacaccttttgtacaaaaaacgctaaaagggaggacaaaccctaggaaacaacactctcacaaaacaaacagtatctctctccaaacaaacgaccc

SEQ ID NO: 132086 - DNA, 384 bp, Glycine max
  unsure (1)..(384): unsure at all n locations
acttttaaatcatctcagtacctttcactctgccccaatacaatccgattcaggtacaaacataattgatatctgcatcaactcgtgctgaacttaaaatgggtcataatagctcagacacagaaatgaacatggaccccgagtcccttaactntcgtacaccatgtgcccacaatgttgtatgcatggttgccgacagtttttttatttttttatgtcaacctccacgagactaatatattatgaatatgttggatggatgaaaagaaaataggaaggaaataaaatacatacaatgatgtatttcttttgttgatggaagaaaagagannaaaatggagagaagattgatatagaaaaattaatttctttctcatttctctc

SEQ ID NO: 132087 - DNA, 320 bp, Glycine max
ttgacatcatcaaatcttcatgatttacatttattggagatgcaactggctttgatggtttgatgatgatcatgataatgttgtgcaattgatgcaaatgggcttttcaagattaaaattcaagacaatacttcaagattacgaggcacaacatcaagatgatcacttgaatattaggaagggaattcctaattgaattagcaaaggtttggcctagtgatttaaaataaaaagtgtctttcagaggttctactctctggtaatcgattaccagaggatgtaatcgactaccagtggccaaatacattttataacagcta

SEQ ID NO: 132088 - DNA, 349 bp, Glycine max
  unsure (1)..(349): unsure at all n locations
tttttcacctccaaacccaaaattaggagacccgaaacagagacgggnaaaagnntnnaanataccagaaagtaaagggagcagcacgtgcttgataattaaatttggttattctcaacttaactaacacctgcgtgatagtaacctaccaccggtcagcacattacagaaaccgaaactcaaaagatgcttacatcaattattgcagagaatgatgtacaagctaatacgtgtaacttttctgagcaccaaattcagaaccctggacgacgtggatattgtatgcaacaagcattcaacaagaggatatataggggacagacagttcacatgggtcatcatgatctca

SEQ ID NO: 132089 - DNA, 342 bp, Glycine max
  unsure (1)..(342): unsure at all n locations
tatctactcctcttngagacatgctagctgaccatctcttacacttctttttactaaaactctcttataaatcacaattttttttttaaagtttgtctctcatttacttattgtggttttaatcttatattaaatgagaagtacattttacgatgacgttaaatttttgtatttttcaagtagtttccagaatcccattttgtatctcaaaagacttttgaaagcaaaaattctataagactcttcaaattaataaaaaatgtttgattattcccaatcaaagacatatctacaaatgacccaagaacattatgctttatttcactctaactcaccaatatc

SEQ ID NO: 132090 - DNA, 291 bp, Glycine max
aataacctggccaattagcaataaatttaattagtgaatacttctcaacgccacattttatttcaatttgaggcattatgcatatgaattaaaatccaccattgagtatatcatctactctacaaagacccgcaaagtttgatgaaaaacaatattgtttctggatgaaatattttcttctcacccatcccctttgctcatgccattaaatatagagaggatgtgccattcaaaaaaacaaaaataaggaatgtgtgaagcactctttcattctattatttgtgtactata

SEQ ID NO: 132091 - DNA, 428 bp, Glycine max
  unsure (1)..(428): unsure at all n locations
atctatatagcacctgaagcatgcaagctgtagctaagaatagttgttttgataatgctcacgcacgctcttgtacatgcatattaattatcttgtgacaaggacaggatcgctttaagcgatggtcaaattccgcgccacttccaatacagacattaatcgtggttagtggtatcgtgaccacatatttgctgcgcaatgacatntcctgcttcctagtgctcgaggactagtactaaaggatgctangcccgtgaacaacagatcgttgtcccgcgtctggcttcggactatcaagaagtgctactgggaggcagtctagtatcctataaattcctgcctattattattgttatttctctaaggagatgaactgatgcctaacttaccctagtggtattgagaagcgaacactcgcccatagagaa

SEQ ID NO: 132092 - DNA, 332 bp, Glycine max
  unsure (1)..(332): unsure at all n locations
cgacaacatccaagtaattcaacatccaatcattatcttctaacacagccaagaaaacagggcagaggcaaaaaactctgcccaaaacacaaaccaatatcacagttnttcacattcaaataccccagtaacattctcttcattcctattcggtaaccggtggatcgactcgaaatatttactggaagtctctagtacacaattctacattttgaccggtgggatctgctagcaaatgtccagaaccccatatgtactacccttttcacaaccaaccatacgcaagcatttttctgcacttatacaaaattctgctgcacatttcaacagca

SEQ ID NO: 132093 - DNA, 84 bp, Glycine max
acaacagcgccgcagctgcagcataggaagaagagatttttttttctagagaagcatacctgaaatagtcgaattttcctcacc

SEQ ID NO: 132094 - DNA, 361 bp, Glycine max
  unsure (1)..(361): unsure at all n locations
aacctganattgcatgcagttttctgttgattggtggcactatagcatttatatctggaccataaatggtcagtgataggtagttggaagctaacatggctgctgaagttgaaacaaggggtgccttatttgntactgatactggcaaaatttcagaagcttttgttacagatggtacagaatacttagcagaagatgcagaagatagagatgatggtgcaggatgcattgctgatggagcaggagccaaagcagattgtgctggaggcaaggaagctgatgttatactaaggatactggcactcacaggcagcaaagatgatggtaattcatgcatattagaagattcattacgcaaaga

SEQ ID NO: 132095 - DNA, 463 bp, Glycine max
  unsure (1)..(463): unsure at all n locations
cctgccgcatgcaagctttgcttctacagataccttagagccttactctgtggcaatgaacggcaccatgcataaacctcaagcgaacctatgggcataatagaagttctcacccaangggttcccaactacgtggtcatgacgaatgataataatggatacctcagaggcctacactggagcaatgaagggcaccatgcataaacctcaaacgaacctaggggcagattagaagttctcacccaatgggttccttgctacgaggtcatgacgaaagacaatgagtggtacctcaaagccttacactggggcaatgaagggcaccatgcaaaatcctctagcgaacctaagggcagataaaaatttctcacccaagaagttcccagctacgaggtcatgacgaaagataacaattggtacctcatagccttacactggngcaatgaggggcatctagagaaca

SEQ ID NO: 132096 - DNA, 358 bp, Glycine max
  unsure (1)..(358): unsure at all n locations
ttgcttagctaaaccaatggcttgagaaatgttagatggttgangaatagccatctcgtggtattaaaaagaagctgatgatcacatcttgaagtaacctcatatatctgattgatgattctctcacaattgttctgatagttaataacaaaaccatattgtcgtagtttaaataattcttcctgataatttttatatgaagaaggaccaaaacacatttccaaaacccttttaaaagaaccccaattttgaaactgatcattttgatgcatccacttaaaccaactatgagcatcaattttcatattaaaagatgcctagtatagtcgttgctctacttgaaataaccaatcaagat

SEQ ID NO: 132097 - DNA, 484 bp, Glycine max
  unsure (1)..(484): unsure at all n locations
gctgacagagagntgagaagtatggataatctcactttgatgctgtgagtttgattgataatttttacattcgttcaagcttccttacttaagaatgtctctgaaattgctagttttttttaccatatatcgatctgaagtttcttcttaaatgtatgtttttatgaaaatttggtaaggtgttaattacaaggattaagccatatatagtttaagtgtgaggctctaaggtcagagtattatttggaaacaataattgttttctcaggactgccttntaaatagtgtagtaccctatacctagcctagacatgaaattgttagaaattggtaggaagaatatacttacctttattcatagtttctttataacttagatggtttccctatcatccacatacacattagtttgagcctcttaacccacacttatttccgaatgtatatggaacaaaccccactagngatccagctagttgtatgc

SEQ ID NO: 132098 - DNA, 281 bp, Glycine max
  unsure (1)..(281): unsure at all n locations
tattactatggtatttgaacacattactattctcctaatttgcatggcatgtttgaacaaactataagtttgttggttgactatattggttttatagataatctatttatgaatggtgcttcatgatacttgcttcatggattggttgttagtttcttaatgaatgttgcatggatgtttaggtatttcaaatnttttacgcactctggctttttgttgatgcccaagggggagagaaatgtgataaatcaagaactcacatgagtaatcaatctatattt

SEQ ID NO: 132099 - DNA, 361 bp, Glycine max
  unsure (1)..(361): unsure at all n locations
ggacactactcttaaagcagaaatggcatataacctcctcccataaatacaaacatcaatggaaatttagagcaagcttatgcgcatatttcattacgaacgttctcttgcccaagacattctattaaccgaaaaaaaatgctcccatatacaatcagagcagctttgttacctatattatntacaccgtcttccgaggtgtatttgttacttacatcacacacatttacttggctaaattcacatacatgcatactccaagcattttggggtaccaaaaatagcacatgcgcacatcttggtatttctaatacctatacatacacaaacttcatgatgaatctngactttctactcaata

SEQ ID NO: 132100 - DNA, 188 bp, Glycine max
tgaaaagagtatgatgaactaagggatgtccatatggccacagctgaagctttggaacgagaaaccaagaaggcccgaaaggaagaacacgaccaaagcaaagttttgaggggctttatagggcagcaatagtgagctcaaactccgaagaggtgaaaggaatcatcactggtcagaggcatgatctg

SEQ ID NO: 132101 - DNA, 441 bp, Glycine max
  unsure (1)..(441): unsure at all n locations
gcttgagcaagtagataggccaagcttatttgtgtaaagaatacaacaccataccattaatggagtagttcaccaactagatcctccccattatggatgacatatatctcttccaaganattatattacatctaattctatctgcaagatgtctaagatgacaaactgtgtgcttgccgaggaataagggatctcccaattttgggaatggaagactgctaattctgaatcccaattatttttgtatttatgctacctttctagtcgccatatcacccaaaaagaacaagcatttctcgaggttgatgtgatgaccagaggcttgagcataatcattaaacatattcataagattcgtcaatttatcttggctcctctacagaatataagaatattattatcataaatagtgtgagaaggaatgggatattncatggaact

SEQ ID NO: 132102 - DNA, 356 bp, Glycine max
  unsure (1)..(356): unsure at all n locations
tttcaccatggagatgcagcggattgtcaatgagaagaggagaggggaggcaccatcaactaaggaataagccaaggaagaaggagcttcaccaccaagaattgccctggataagaagcttgaagaggatgctntaatggaggaaaagaaagagagaaggggggagcacgattatgaaggaataaaagagggaaagaagtggaactttgaagtgtatctcataagactntcattcatcaaagttacaacatagtgtacacatgcttctatttatagactagatagcttccttgagaagctntcttaagaaaacttccttaagaagctttcttaagagaacttccttgagaagcttc

SEQ ID NO: 132103 - DNA, 378 bp, Glycine max
  unsure (1)..(378): unsure at all n locations
cactagcataacnttgaagaatgtgaatcttgcgagacacacttcataattctagttctccctaattgtcttctgttcccacgcccatctctctgtctgattcacttcctctctaagcttattatccaagacactctcgtggtggagatagttctccttccatggcttatgctgtaaaggatggcgcctcctctcatctcttcccctatatcttctgctgcaactccatggtggaatatcatcattgaaggaccttattgaatctcaaagatccagcctccatagaatcttcttaagcaagctatcatcaaagtatctcccaaccattgacaactcagcatgcgatatgatgtgattagttgattgactggaatgaac

SEQ ID NO: 132104 - DNA, 434 bp, Glycine max
  unsure (1)..(434): unsure at all n locations
ttcttcaccctcctcttgcattaacccttcactttcttttgatctcctttgnctcttccggattactcctatatgcagccctattatgaagtgaagctcctgaaaaatgatctatttgatgctcaattcctcttaaaggaggcaagccataaggaatgtcttgtgggaagacatcctcaaactcctttaatagtgtatcaaatcttaaggcaactcaggggcactagaaggcaaacacttgttatttggaatgagtaaatacattggttggctagctagcatcacttttttacctccttatgtttgatgaacaaactctctattattactaagttgtttcactcttttggtttcttttctttgtgggtttctctctcaaggactttttctactttgatntcttttcttntctctttcaatctcattttatttga

SEQ ID NO: 132105 - DNA, 264 bp, Glycine max
  unsure (1)..(264): unsure at all n locations
ggtggacctctcagaataagatggagtcagcaccacttttaacatttctgattaactcctttngctagaggagctgatattgaggaagaggaactaacaaatttgatgtcaaatccctctcaaggagaaagggatgatgccatcctccctaggaagggaccaatcactagaaccatgaacaagatgctccaagaagaatgggctatagctgctgaacaatgccctagggttctcatgaaccttatggtatatttctgagcccat

SEQ ID NO: 132106 - DNA, 429 bp, Glycine max
  unsure (1)..(429): unsure at all n locations
ntacactgagtgcattggcatctcaacacacactcttacattgtatatgtatgtggtcatcataatattatatcatttaaaactaaatcaagctgttacagataaaagaatgcagatgttttatcataaattgcatttgaacaaattaataaatagagaaattaagtggttcattagatttgtttcataatatacaacttcacaaccactccaatgaaagtaatttatccagccgatgtttcctcaaaaccatgtcatgaataaataacatcctctttacacgcaatacattgtaacatttaatcaaaaacccaaaccagtttccatggtcataaagcattccactgtatccagtactgagacaagattcatcttgattagtgcttatgncatatggccatctaacataccctttgcatattatcttca

SEQ ID NO: 132107 - DNA, 318 bp, Glycine max
  unsure (1)..(318): unsure at all n locations
tgctaatctaactaaagtgagttttgaattctatctatgatgtctgattattcttcttttgtttctccaaagaaatctattttttcatcggatgatacaatttgtatcaaaatcctctctatattggtttagagaattatatttcttagacgattaatgttttttccagtcctaaataaaatttgtaagtctctaatacacaatgcaccccctcttcgttagttatntgctcctacatgactaacttttaatttatggattctcttaatataatataattttatgacaatacttattagaatgaacaatttaactatt

SEQ ID NO: 132108 - DNA, 434 bp, Glycine max
  unsure (1)..(434): unsure at all n locations
cggacctatgatactcaagctaagaatatggcctcgtcaactactagtttccctgttttttattctataaatagacctcccatctttaatggagtgggttaccactattggaacacccgcatgcaaatctttatagaggcaatatatttaaatatttgggaagccattgaacaaggaccttatgttccctctatagtggccggatatgcaacaatagaaaaacctatagcacattggactgaggaagaaagaataatagtacaatataatctaaaggccaaaaatattattacatctgccctaggaatagatgaaatacttatggtttcaaattggtaaagtgctaaggatatgtgggataccctactagtaacacatgaatggcacacagatgtaaaagatctangataacacattaactcgtgaatatgaac

SEQ ID NO: 132109 - DNA, 419 bp, Glycine max
ttactaccttctcgtaatcaatgacacagttgtttctgagacgatgatgatttattctaattcgctgctttaatcgattaccatgtgagataatcgattacttctctttctattagttgagtagatgtgagcgagaacacttttattgattaatttgagtatctaatcgattacattattcgtgagctattccctagtgggaggaacaacacttccatcatataaaaggataatctagtggattacttaatgatatatgggcggttataactatgttctctataaataaccagctggcgttatcttaaatatgatatcgacaataacacactaagcctctaaatgagctaagatcacatggtgttattagtaaagaaagagagaggaatagacttagagatggaaccttcccttctatc

SEQ ID NO: 132110 - DNA, 455 bp, Glycine max
gcatgcaagcattccataatacaatagaggatagaggtttctatcaacagccacaatgacattatgcaatgaataacaacgatagtgcataataaaacaaagctatatatactgtgttcctaaacttaaccgttagttgcactaaaataacgaaaaatatagtaaagttatcactgaaccgaactcgaggaaaaatacctcactttactggccaataggaacaaaaagcaagaggtagtggaatattaaaataaagaaataattcaagcgcgctaagtcattaatgcactagtatgatattgtgaacaagagggccttataatgatgccttgccacaatgtgccccgcagaggctgcaagaagatgctatttattatcacaacttaaaggaatacactgcacaggatcaaatttactaagaggagcctcagttgaggagcaaatagaaacatcac

SEQ ID NO: 132111 - DNA, 411 bp, Glycine max
  unsure (1)..(411): unsure at all n locations
acctgctgcatgcaagctacgatgtgtctctatattaacactttttgacacttgttgtacaaaccaaacgtcgngggactatgactacagaactctaataatccatacgatgtgggactaagaccacagaactctaacatatctcccacttgtggtctaatatccaaactctagcacccccttgtgagcgagtagttcatctactctttacctattgtatcgccttcatcttcaattatccttgagagccaactgaggcaaagcatatcctcagctcgtcaatatgtacagctgtatgcaacatatctgctatattgtctgatcctaacatcatcaacaaagattagtctccatcttttatcaactccttgataacatggtatcttaaatgaggatgcttgtatctataat

SEQ ID NO: 132112 - DNA, 287 bp, Glycine max
tgcaagcttctatagatgggtcgttcctaacttctcttctgtagcctcacctctcaaatgaggggagaagaagattgcggcatttacctgtggagaataacaagagctagcctttgctttgctcaaagaaaagcttactagggcacctgctctatcttttcgtaactttactaatacctatgagctagattgtgatgactctgtggtgcgaggtgtactttattgcacaaggaggactccctattgcttattctaagtgaaatattcgtggtgcccccttaacaccc

SEQ ID NO: 132113 - DNA, 244 bp, Glycine max
aaaaccggcctcaccgtgataataaatgggaaggaggagttgactcctacctatgggcagaacaggagatgaggctgctacgactataggaggctgaaccaggctaccaaagaggaccatgttccactgtcattcattgaccagaagctggaacgcccggcggtgaacacacactactggttccatgagggtatttctaattatattgtaaccactattgctcctgatgatcaggagaagacca

SEQ ID NO: 132114 - DNA, 244 bp, Glycine max
  unsure (1)..(244): unsure at all n locations
cgattatcatacttggattaatgccaaatgactatggcttgtgaagaggatgagaataatggagaaacctatgttgggactgccattcttatacgaccatagttcccaccaacccaacaatgctattactcagccaataacanaccttctccttacccaccggccagatatacacacagcccatccctaacatagccacagagcctacctaccgcactgtcgatgacaaaaccacctttagcgt

SEQ ID NO: 132115 - DNA, 260 bp, Glycine max
tccaagagcaagtcccttatgctagcgcacttgtaatgggaaactgcatcattgtagccgatgccctctctcggagactagcagaccatctgtgcttgaaacaaaaatgattggtctagattgtttgaaacgcgtgtatcataacgacgtatctgtaggagaattccatcagaaaatggcttctgtggacacgaaggcttgactaattcaaagaaagctacgtagtttgtgcctaaatgtcctactacatatctggatgt

SEQ ID NO: 132116 - DNA, 465 bp, Glycine max
tcatcgtttatgcgagactgtttatttcttgctagctatcatcgccaaggaccaagaatagttggactagccaccgcccacgatcatatgatcgaggacgagtatgctctagtatacgcggaataagaggcttgaggaaggatgatctactctttacaccaagaggctaccatgtggagggagcgggttgctcttacctagaacggtagtcaagaacttccccggttgttagcctaagccagggtgatggcagacacctatctcgcccgcgaggagattcagggtctgctctgctattgtcagcatatgatagacttaatggcccacattactacaaatcagtaggaaacttggatggtctctcagaccttgatttgatacgactttcttttagaaagataatgagttggtcccatgtttctactctcataaacacttgtgcacatcatatctctcctacattta

SEQ ID NO: 132117 - DNA, 417 bp, Glycine max
  unsure (1)..(417): unsure at all n locations
cttcccacacttatactgaccggtcctttcaccaacaaataacacaaaagaagttcttcctcttctaacaatatgggtgctagaccttcgtaagattgcaacaaattcgtttcaagggcaaccgatcgacccacaacaaaacatcatctctggtaccaaagacctacacacaaccctgacatattaattttatacaaaacatacattcaaccagatgactcaacctatatgaacatcattacctgagaagtattaaaagcttccgaacaatcaagatgtggtggttcattcacaccatattcttggtcattntcataatccatatcaacttcttgagacatcgtattggcatacgtccattgatcttncgccatcttaatggacgaataataaataccactacatacgaagtacata

SEQ ID NO: 132118 - DNA, 408 bp, Glycine max
  unsure (1)..(408): unsure at all n locations
tcgatcctacanaggccacctgcagcatgcaagcttctatagatgggtcatacctaatttttcttcagtcgctcacctctaaatgagctgatgaagaagaatatggcatttacttgtggtgaaagacaagagcatgcctttgctttgctcaaagaatagctcaccgaagcaccctattacttttgagctagaatgtgacgcctctgtagtggtaggtggagctgtactgctacatggtgggcaccctattgcttattgtagagaataacttcatggggtctccctcaactaccccacctatgataaagagctttatgccttaataagagacctcttaacttgggaacattaccttggttccgaggaatttgtctttcatagtgatcaggaatcactttagtacattag

SEQ ID NO: 132119 - DNA, 357 bp, Glycine max
  unsure (1)..(357): unsure at all n locations
gaggatgaattctccagatttacctgggtcaactttatcagagaaaaatcagacacccttgtagtattcaaggagttgagtctaagacttcaaagagaaaaagactgtgtcatcaagagaatcaggagtgaccatggcagatagtttgaaaacatcaagtttactgaattctgcacatctgaaggcatcactcatgagttctctgcagccattacaccacaacataatggcatatgtgagaggaaaaatatgactttgcaagaggctgctatggtcatgcttcatgccaaagaaactccctantttctctgggctgaagccatgaacacagcatgctacattcatcacatagtcaca

SEQ ID NO: 132120 - DNA, 159 bp, Glycine max
ctattcttccccacccacccaaaagactccatccttccttttccttatttcatatagatattctcccttacctttatctttttcctctcttcacaataaaattgtgatttttgttgtggataagttgccaacactacataatcatgattgtatataaca

SEQ ID NO: 132121 - DNA, 253 bp, Glycine max
  unsure (1)..(253): unsure at all n locations
tttcatttggntcttgaacggtcatcaaaggcctatatatatgtgacttgagacacgaaattgctaagagttttcagaacaaaaagggcttatcctcttaagaagcaaaatcggtttatcctctttaaaattcttggccatcacttggactcaaaaggaattattgtgtgctaaattgttattcttctgtttcggagagatcattctcttctcttctaatcacttgcggataagaaccgggactctcttgcaa

SEQ ID NO: 132122 - DNA, 335 bp, Glycine max
  unsure (1)..(335): unsure at all n locations
tataattttccaaatagtgtagcaagagatatgttaaataaatcttgtgattcagtaatggttgttaccttaggttgccattctctgcttaaacatctcaatactttatttatgagatcttcatttggaaaaaaattccctaaagatgcaagatgatttattatatgtgtaaacctttcttgcatgtcttgtatactttcatttgaattcattctaaataattcatactcatgaagtaatgtatatatcctagacccttttacatttgttgtgccctcatgtgttacttgtagggtattccacatttcttttgcacttttacaanttgataccct

SEQ ID NO: 132123 - DNA, 392 bp, Glycine max
  unsure (1)..(392): unsure at all n locations
tgacactatgatactcagctgtgcctctcacgtctggatatgaattatcatatatttctcaaagaccttaggggcgttgctgatggcttcttcccgttccaagcttcaattggagtcttgtcttttacagacttagttggacatctgttgagtattgaaacaacaatgtagactgcttcagcccagaatgtgttacgtagtcccttctccttgagcatcgatctagccatctccataactgtgcgattctttctctcggacactccattttgatgaggagaatatgcgactgtaagttgtcgctcaatgccttcatcctcacaaaatcnttcaaactcgcgagaggtgtactcttttgtcgaatcactttctagtacttntataccgtttcc

SEQ ID NO: 132124 - DNA, 420 bp, Glycine max
  unsure (1)..(420): unsure at all n locations
ctcaagcttagtggattatggngcaacctcgtcataatgtggtacagtgggttatcgggcgatggcacaaattaactctccctcttccacaagtcaaacataaacacaccatccccagttgcccacctttaaattgagctcacgcactcctacgtagcccttatcctcgttcctctcaacaccgggtccccatcaacccctccaagcttccacaatatccaaacaattcgatttaatttatcatgaaactaccctaaaccaagaaaacagagtagaggcagaaaactttgcccaaagctcattcaaattccacaattttccctactcacataccccagtaatattctcttcgttctgattncgtaaccattggatcacctttgaaaatttactggaggttcctagtacataaatctacat

SEQ ID NO: 132125 - DNA, 242 bp, Glycine max
atattctcaacaaccacatcttttcatttggttctcgaatggccatcagaggcctatatatatgtgacttgagacacgaatttgctaatagttttcaaaacaaagatgtcttatccttcttaaaagcaaaatcgttttatcctcttaaaattccttggccaacacttgtgattcaataagggaatatttgagtgctcaaattgttcaatctatctctttcagagagagtcattcttcttctc

SEQ ID NO: 132126 - DNA, 343 bp, Glycine max
gaggcagaggaagtattagttaacatgttaaattatgcaagtggggtcattctgccctctaaattttcctttttccacttcattcaagacattctcactacagattttttttttatcggcattctcactacagttgacccagggatcatacaagtaggatgtaaagcacgctatgttcattctcttggccctgaataattaaggcataccctcatggttatacagaatctaggtttatctcactaaaaggaatgtatattgcctagcaatgacaggctcattgacagtagagctgtgtgagttcttgtaaaatagtaacatttatgctcatcactactgatat

SEQ ID NO: 132127 - DNA, 379 bp, Glycine max
  unsure (1)..(379): unsure at all n locations
gtggcatttgntgtgcaatacaccaattctgtcaccacaacaaaatggtgtattagaaaagcgtaacagaactatgatggatatggttaggagtatgttaatcaattagactttactcgtatctttggggatgtatgccttgaaaactgccatgtatttgttgaacatggttcctagtgaggtagttcgaaagacaccttttgaactgtggacaaataggatacctagtataaggcacctgcatgtttggggttgccaggcagaaataatgatttataatccgcaagaaagaaaattggatgtaagaacaatccgtggatatttcatttgttatcagaaaagcaaaggggtatatgcttattggtctaatatagtatga

SEQ ID NO: 132128 - DNA, 342 bp, Glycine max
  unsure (1)..(342): unsure at all n locations
attggcattgntggcggtaaatgataacccattattgcaatataaaaagaactgttgtcacagaaaacaaaatctcaattaatcactagatggcaacaagggcaatggatacaatgatgcatttctctatactagtagggagcaaatcaattggcaatgcttgacagcaagtcaatgccgacattgccaaccaataaataaagaaagaatcaaaaaacatgatgcacaagtaagcaacttatcacccaaatgaccatgaaagtttaggctgcaagactcacacacatgcctntagcacctctctaaagtaacatgtgaaaggagtgcactacaaagaaatac

SEQ ID NO: 132129 - DNA, 288 bp, Glycine max
  unsure (1)..(288): unsure at all n locations
gatacaaaatatgcttattagtgcctatctgaaattgagtgtctaggggagctaagcaagagaattatgaccccaacatgaaagtcatgtgagtgttgaacctttgaattctatgaaaagaaaatntccttggattgatctcttctctatatgtagagcttcatttgacgccatagtctgatagctcatagtcttgaaagttcacactttcttcatgttcttccaactgaatctcctatgnttgaaaagtctctatggacttggtgcgatcccaaggaagaacaacac

SEQ ID NO: 132130 - DNA, 317 bp, Glycine max
  unsure (1)..(317): unsure at all n locations
acttttgtcttcanaaaggncctgtgtcanagctggaggaataggtcacatgctctctttgtcttctaggctttctacttcagaattctgggctgtattttttccttctcttactgccaatataagcttttgggccactgtggctattaacattcctgatttcactagatatgctaagagccagaaggatcaagatattggtcaaattggacttcccatctttatgggggcattcacatttggtggtctagctgttacttcatccacaaaagagatatttggtcaagttatttctgacccaattctgcttcttggtc

SEQ ID NO: 132131 - DNA, 288 bp, Glycine max
  unsure (1)..(288): unsure at all n locations
caacgacaaacggtagaaaaaaccgangangnctgcatatattaacatcggctgtggtaaaaacagatgttgatatgcagatatattacctctttctattattattatataacactggatatttaaataactgatgttataattttatattaatatcggttttggaaaaccgatgttaatggtattactttctacatcggttaataaccgatgtggaaagtccttaataaccgatgttgaaaccctcatttttagtagtattcaaatcttgtgggccacctactattt

SEQ ID NO: 132132 - DNA, 270 bp, Glycine max
  unsure (1)..(270): unsure at all n locations
tcttttttacacgccctaactaaaggatgtatattaacctgcagaatttctcttacttcttagatagaatgtgatgattgcaagcttggataaagagtcatcctaaanaaaagaaaaattaatctgacagaagagatttgtagatatgccttaaagaaaatatcacataaaactataggtatattctatatttacggattatgaaatcaataccgtgataaacgctctagaagttaattgtaatttatgaaaaacaaattcttaaaaata

SEQ ID NO: 132133 - DNA, 127 bp, Glycine max
ttgctgagagcttcaacaatcaatttcgagcggctcgatttattaccggactcaatcagacatccgagctaaaagtttttctcttttgaaatttggtcagagcctcaacattcaatttagagcgtct

SEQ ID NO: 132134 - DNA, 311 bp, Glycine max
acttacccgttgtaagatcgaagaacttgtattaacattgaagaacgtcgaagaacggttgaaatctttgcgaaattcctcacggaaaacgttacggaaacgtttcggaagcgcctcggcttagattttcttcacggaaacgatttttccaagcaaattcgaaagagagagaagtgcctaaggggctgaaccccttccttcttgccttcctcccctatttatagcaaaataggggaggtggttgccgcccagctcgcccaggcgagcagggttgcttcctccagaagcaaccgccttctggagggaatatc

SEQ ID NO: 132135 - DNA, 326 bp, Glycine max
  unsure (1)..(326): unsure at all n locations
tcttgacgatgccatggtccacgaaaatctatanaagctgattctgacagtaaaaatgaataacacccagtaggtgagaggaacaaacaagcaagtaagtgcttaaatctgagcaacaatctcccacttatacctgcacgtcatccaacaatccagtcccagattcaccgcccaccactatcatcttattcccaatgacagctgctgcatgctactcatacataattcacaatgaataacaacaattcagttattttaccttgaaagacacaagtaataatagctgcagttgcagaanaaaagacagagagagagacattcgatct

SEQ ID NO: 132136 - DNA, 413 bp, Glycine max
  unsure (1)..(413): unsure at all n locations
actctcgtatgcaaacaatgagtatataatggatttngtttaaatttaatcttagatttgtaaaatatcaatagttttaatttgaaacaagctggtatgggaacagagtaataattaacgtttagttggacaatctgatgactctaggagaaccttaattgttttctttttagcattttacagtgatatgataattgcaccgttgtactctttatgctataatctcatcaagtttagtccagcatattcatcttcatctatgagaaaatgatcatcagtgtcctagtcacattagttaaaaaatttaaagtaaaaatatttttattgatacataaaanatcatgttatntatgggttaattttgtgacatcttctttatatttacgtaatanatattnttttcatttaatttt

SEQ ID NO: 132137 - DNA, 320 bp, Glycine max
gtacccatcacatgtggtactggtggttgtcggagcgatggtgcacaacaagttttccacatccacaatgtgcgcataaacccaccatcccctgttgcccacctccatctgagctcacgtactcccacgtagcccatatcctcgtttctctcaacaccgggtccccatcaatcctcccaagcttccacaacatccaagcaaaacaacattcaaacagcacaagctatcacagccaagcaaaacggtgcaaaggcagaaaactctgctcaacacaccaaccaaaatcacagcttttctcacttaaagaccccagtaacaat

SEQ ID NO: 132138 - DNA, 285 bp, Glycine max
  unsure (1)..(285): unsure at all n locations
ctgacccaagtggatattagtccaaaatgaatttttttatttttaactanaaaaaaatcacacgtgaatattcctccccaactatgtattttatatttaataatcaattaagagtcaaatcttanactactttattgagagacacaaatgttccacttatgtcaatcgttattaaattcccaagtgctgcatatcaatccacataaacctacatggactacgtggtatgtgaactgcaggagtataccaacttaatggagtaggacctaaccaaaatctattaat

SEQ ID NO: 132139 - DNA, 285 bp, Glycine max
  unsure (1)..(285): unsure at all n locations
acactactagtaatgtttcttttatcggaggggcacgaatttcaacatcgattnttaaccgatggtgaaaccaccgacgttaacattatcaatgctaacattggttttcaaaaaaccgatggtaatatacactacacgacatcggtttttaagaanaaacccgaggtcgtattgtacaaaatggttaaaaaacaaaaactacaaaaacaacatcggttttaggcaaaatcgatgatgaattgcgtattctgaggcgcttactacatcggttatgaacaaaccgat

SEQ ID NO: 132140 - DNA, 222 bp, Glycine max
gaggggagaagcaaaaagaaagaaaatcccgatcgatgatcggaagaaaacaaaagaaatatgcagaatattctctggaccagacaatatcttgacaatacagaattgtcaccatgttaacaagaaaagaaaggaaaccacgaactaaagtggtcctctccctttgagtgccaaccaaaatcctgtgcgtcagagactttgtcgcctcacactaaacaaaaa

SEQ ID NO: 132141 - DNA, 320 bp, Glycine max
  unsure (1)..(320): unsure at all n locations
tactaagctgggcctcctaccttatagctggtttgtgtgntttttttgnaccctaagccaaattctaagatagaaagcagtatggccagttaaaactggtgattacaaatctaagtgcatggngaaaagggattactaaagttaagaacaaatatggtaatagtccttaattacctaangtgtcacataaagacccaaacttgccagtccgagcatgtctaaagcttgaaatatatttcctgtaatgaaaaaataaaanaatagtatggcgagcaggaaaaacctctaattttaatatatntactatagaaagatattga

SEQ ID NO: 132142 - DNA, 225 bp, Glycine max
gtcctcatgagtctgatgagcttgtgcacactctttctggagaccataccttacttctagaaggtgatcttgaagttcattgagttactttaactatttttttgtttgatgtagaacttccatattgcctccacgaatatggaagtccgtcatcaaagtattttggtctttgagagcttctctcatttctagacaaagctcctttgtcaagaattcataagcatc

SEQ ID NO: 132143 - DNA, 287 bp, Glycine max
catggatagtaatgatcgagctttgggcaaatggtccccaaattgggaaggaccgtttagaataattcagatttattcgaatggtgcttatgaagtggaggagcttacccctcaaaaacgtactttgagtataaatggtaaatatttgaaaaaatataaaccaacattgctcgtagttaaaataagcatagaataagagaaatactggaaacataaaaatggcgataacagtaaattgccacgaaaaggcatgtgtctatattacatccaatagtagaatccaaata

SEQ ID NO: 132144 - DNA, 339 bp, Glycine max
ctgagatgaggaagtgttgaatggtgaaacttcctgttttattgttgaccacagtagtggacttggagatatgtcgcggtggtcaagagaccttgaggacgtcaggtggggtgctattgcccaaaaccaagcttgaccaatcccgacccaacccgggcatagtcggtcagtgagaacctgtgatgtacctaagcaggcgagctcctggcagtcaacagataaaaggaacaaagaccacaaagcaaggaggcttgtggtggctggccagctgtgaaacttgattgatatgtgagatatggtctctggtaatcgattaccaagggtgggtaatcgattaca

SEQ ID NO: 132145 - DNA, 359 bp, Glycine max
  unsure (1)..(359): unsure at all n locations
tactccgcttctattgacatttaaacacaaaggggtatttagtattatgttgcgaaatatgaaaaagaggtgcacttatcatttaggtggggagtgcatatagcaaattttgacaatgtaatgttttataagaaggttaatgtaagcatgattatcaaaatcatgatttaactcataaattcgtacgaatttacgattccacaatgcctccactagttaaatcgtgagtagaatcacaaatcgagtagaatcgatactaaactcggtagaatcggaataaactctgtagaatcaaagcaaactctgtagaatcaaaccanacttggagttaagtatgaacttagtttttatgttattat

SEQ ID NO: 132146 - DNA, 238 bp, Glycine max
  unsure (1)..(238): unsure at all n locations
aagnaccaaggagaagaggcatgtgccgtctaggatcgactgctgaacgaatctctcccaaatgaggggaccctaaatcatggataactacatactctgagatggtattgttatgcataggaaatatatcgaccagagggctgttcagtacatatgtgaggaaatgactctggaggaatctgaaaatgtgctggatgagagaaggaatgccttacaagcactcaggactgatgagaga

SEQ ID NO: 132147 - DNA, 84 bp, Glycine max
tatgttgttgaacacagagttgctctgtccataggtggagaagatcaaatgcaaacaaggtgagaactaaagattctaatggtt

SEQ ID NO: 132148 - DNA, 261 bp, Glycine max
  unsure (1)..(261): unsure at all n locations
accttcaatcctataacgcaacgtggcagaacaaagtgagcagttaacttgaatggtcattatcgtcaatgcggaaagtattctgcgcttcactatccatgttcacacattattgcagcttgtggntacgtgagcatgaactactaccaatatattgatgtgtttacacaaatgagcacatcttanaagcttactctacacaatggtggcctcttgggaatgaagcggcaattctctctctgatgatgcatggacacttat

SEQ ID NO: 132149 - DNA, 347 bp, Glycine max
  unsure (1)..(347): unsure at all n locations
cggaccttgaatctcagcttcgggggaagagagagacctgtcacgagcacatatgcattttcttgaagangagntagctggttgctcgaggtccaagagaaacttgtctcagcatttatgcgagacaaagaccaacatgttagccatcgtcagctagtaccaagaagaattaaatctagccacggtccatgagcacaaagtggcgggcgagtatgccctagtgtacgcggaaaaggaggctagaggaagatggtgagatgaatgagaaacccatgctgcgattgtcgttcctacatggaaacttcccaccagccaaacaatgtcattactcatccaataacaaccct

SEQ ID NO: 132150 - DNA, 452 bp, Glycine max
acactatgaatctcagcttgagaatatcaacgactaataattttaactcgtaggtgctgattgaaccccgaatatatcgagacgctccttattgataactgaagctcttagcaaaattaaaggacaataaattttcactcggatgtcctattgtgtcccgtaggatatcgagacgctcgttattgataacggtagctctgagaacaatctaatgacaataacctttaacttgggatgccaattgaggccgtgaatatttcgagacgcctgtaattgaaaactggagctctatgaaagtcaaacgacaataacctttaatcggatgtccgatcgagtcccgaaactttcgagacctcccaattaaatattaagctctgacaaaatctacgacattactttgatcggaggcgactggccctgaatattcacaacctcgaaattaaaccgaatct

SEQ ID NO: 132151 - DNA, 214 bp, Glycine max
aatttgcgttgaacccaaaattcacgctgaccgtattcctctgtggtggattgcactaaaatgcctctcacttctaacgagatgccaaaagtgtatttggaatccaaatcaaccgtgggacagggtacaacctcgccaattgaaacaccacgatacagctggactgatttacaaacagtgagaactgaactatattcaccagcataactcctac

SEQ ID NO: 132152 - DNA, 84 bp, Glycine max
cacgtagatgctgcggatgacatacgataagaggtgagaggaggcgccatccactagggaataatcctgtaagatggacttccc

SEQ ID NO: 132153 - DNA, 372 bp, Glycine max
  unsure (1)..(372): unsure at all n locations
tcgtacactataatactacgctgtagcttgatatctaaacttgtaagaagaagagttttctttttatatttcaaaatacagcgagagttctattaatatcaagtgtgttagagaagtttggctctaatcttatagtgttttggttgagaaatacttgtatctaaatttgcattgttttctataaatatctcaatttgtaatgatcttaccctttcttttttatttcccttccttatataatcaccatcaagtaatgtcccttttataggccttgacgtatccatttatgactattagaataagntcatattcactcaagctatgtgtgagttgtcttttctcacaaaactagagatgatggactaactctct

SEQ ID NO: 132154 - DNA, 279 bp, Glycine max
caaccgacaattgttgttctccacagcagaaacagcggatagaagcctcataagaaggagctgatcttgtagctaacaaaccaaaatctcagacgaaacaacacccgcatgacgaacacaaatggcgagatatagacgcggaatctgcggttcaacgagaagacgaaaaggacaatgccctatgagaacaggatcaacctgacgacaccaaaggagaaaacaggaattggcaagcctatgagaaaaacagtgcagaaacacatctgcagagataccgga

SEQ ID NO: 132155 - DNA, 405 bp, Glycine max
  unsure (1)..(405): unsure at all n locations
ctggagaaatgaattcggaaacgaagaagcagaatgtttcttattctcttgagacgccattgatgatcgtcaccaagctctagataccataaaagagttcttaacagaagtgaagaagaagaagatgagattaagagaaaaaaagagaaagaacttacagaatcagaaaatgttattatgattgggcaactgatctctgttacaaagagaagtatatatagagttctagaacagttagttnttactaactaaccttctaacaaagtcttaactaacattgacacttaactaatgtagtaactgtcataactaactaagaactaacatggtaacagtcatagntaagtgagtgtgcagctgaatactggcacctcctttctactactctaatactacacgaactct

SEQ ID NO: 132156 - DNA, 366 bp, Glycine max
tagctatttcgttcccagctctgcttccttctccttggccttcgctgctacttgcttccccatgggtgcttcggccacgttaaaggaggagcacaacctcacaatatgcccatacaaaccacacttctttcatattctacgaggaaccaatgattgcgaaaccagaccttccctaccaccagatgattcaggtcgatctcgacacacaccctcgcaaacctcccccgtgcaacatcaatggttcaaaagtccatcctcaccagttgaccaaccgctgctgctaacgccaacaaaatactctcatcataatactccaaccctagtgaggaaaagtgaatccacaccattgtactatcaatcttcact

SEQ ID NO: 132157 - DNA, 296 bp, Glycine max
tatgtggtggagcacatgaatctggctgctgcattcccacaaaagatacaacacatgataggaactacatggggaaccagccaagaccaaactttaatgcatggtggataattttggatttcaacatggccagcaatataatcagcaacagggacaatggagaactcaccctggtaatcaattcaataaagaccatagtgggccatctaacataccacaacaacaagggcctattctctatgacagaacgatgaatctggaggagactcttgctcaattcatgcaagtcttcattg

SEQ ID NO: 132158 - DNA, 227 bp, Glycine max
gacagcacgagtttcatgataccaggtactacaaggaggcctataaccgaaatatgcttgaccatatttttcgggcgatcatataaacagcatgttgaacaacatatgtactaaccctcaacacatgtgagcttcatgatggttccggtgccaccatctcctttcacgaatgcaacactcgtggaggcctcaactgcctttgggacgaaggtatcagcattcttcac

SEQ ID NO: 132159 - DNA, 353 bp, Glycine max
ccccctgaggttcgcacttgcacatttgagaagaaaactcattggaccaaaagctcatgggaaaagcccgaagacaattgcgatagtagggtgcatttgatgatagtcgctcatgcagactccttatgatttcttttgaatccaaggatggcctttgttatataaattctttcatgatcagcccatgtcatatagtttcagcgggatcgatagaccaatggcatcactctatgaccttaaatcaagaaagtttcacttggtcatataccaaagtgtaacaatccattgtcatccttcaacggtgcatgcgatcggtcccaaagccatatatcttcttgctatgcagaataatc

SEQ ID NO: 132160 - DNA, 280 bp, Glycine max
acgggcaggaaagaatgatgagctgaaagaaatcaacatgaccacgactgaagcgctagagcgagaaacgaaagaggctcgaaaagaagagtggagtacgaacaagttatgaggggctttgtggggcaccacgaaggagctcaaacttaaaaaggttgagaggggaaaatcaaggatggaaagcatggcgttagaggataaattgaaaatttggcagaggtcgaagagaaagttgacagagcagttgaaccaaacgaaagaaatatgttggcaatcatcg

SEQ ID NO: 132161 - DNA, 237 bp, Glycine max
  unsure (1)..(237): unsure at all n locations
cgacctgttgagagaggcgacgangatttttatttaatgacgaacgcccaacaacgggggaattttttgcgaaattcctcacggaaaacgacacagaaacgtttcggaagcgcctcggtatagatattcttcacggaaacaatttttcacagcaaactccaaagagagagaagtgcctacagggctgggatccctatctatctcattttcttccatacttatagcaatacatgggag

SEQ ID NO: 132162 - DNA, 380 bp, Glycine max
tgagatgaggaagtgtagaatgggtgtaaacttcctgctttatctgttgaccacagagtggtacctggagatatgtcgcggtggtcaggagaccttgaggacgtcaggtgcggtgctattgcccaaaaccaagcttgaccaatcccgacccaacccgggcatagtcagtcagtgagaacctgtgatgtacctaaacaggcgagctcctagcagtcaacagataaaaggaacaaagaccacaaagcaaggaggcttgtgtggtggctggccagctatgaattatgattgatatatgggatatggcctctggtaatcgattaccaatggtgggtaatcgataacaaggcttaaaaatgaagataggatgctaagatggtctc

SEQ ID NO: 132163 - DNA, 423 bp, Glycine max
ttaatataacaaagcctgtaataaatataataaattcattattgtttatgacactcattaacaaagcctgtaaaatgaggaaagtatttaatagaaaacgttattaatacacaacatcgtaattttcaatatattttcaatgtgatttttaataaaaaaaaatatatactactatatccgttcctttttatttattatttaagattattttatagaaatcaatagaatcactatttttttattctattaaaatagttgtgtgattttctatttatttcctttttctcacttttcaataaatacatgtataaattaattaaagattaacaggtaaaataaaagtataattggtataataataattaatggtgatttaaatttcgtaaatgatacatacataaaattatattgagaaatctgaca

SEQ ID NO: 132164 - DNA, 398 bp, Glycine max
ctcagcttgagccactcaacgacaataacgtttttctcggtgctgatgagtcccgtaacatatcgagacgctcgacattgaacgttgaagctctgagccaatacaaacgaccataacttttttctcagatgtctgattgagtcccgtaacatatcgagacgctcgaaattgaatgttgaatctctgagacaattcaaacgacaataaatttttactcggatgtctgattgagccccgtaacatatcgagacactcgaaattgaatgttgaacctctgagcaaattcaaacgacaataacttttttctcggatgtctgatttgagcccgtaacatatcgagacgctcgaaattgaacgttgaagctctgagccaatacaaacgaccataactttttact

SEQ ID NO: 132165 - DNA, 297 bp, Glycine max
ggtttcgaggtacttacccgttgatagatcgaagaattatattaacgaatgaagaacgtcgaagaacggatgaaatctttgcgaaattcctcacggaaaacgttacagaaacgtttcggaagcgcctcggcttagattttcttcacggaaacaatttttccaagcaaactccaaagagagagaagtgcctaaggggctgggatccttttcttcttcattttctcccctatttatagcaaaataggggagatgcttgccgcccagctcgcccaggcgagctcagctcgcccaggcgag

SEQ ID NO: 132166 - DNA, 332 bp, Glycine max
  unsure (1)..(332): unsure at all n locations
ccatggngcctcaacaacctncaaatcatctatccaaccattgaactctttgatgttgntattccttgagtccctttggcatatgccaaatctttcaactgggtacctgatgcttgtgaaatcacccaatatgcagcaaagatccccagacagtgagtgtttcagctactttacatgatcccacaatgtcctcttattttgaatgtcacatggggagtagattgaactatattgatttgctgtgccgccctaatccattcccctaccaggacaataaagccattttcaatgactttcctttgtagcttgaatgtgttntcactccacaaaca

SEQ ID NO: 132167 - DNA, 65 bp, Glycine max
acacacagcaacaaagccggtaaaaagaggaaagcacccaacagaaaacgacacaagacacaaca

SEQ ID NO: 132168 - DNA, 427 bp, Glycine max
  unsure (1)..(427): unsure at all n locations
actaagcttatctcattaatacagtgcatgcatcaactattgtctctatctctattacatnggaacnagggaattatctattggtgaatctggaatgacaatcttcgtgacaagctgatgtatctgcttaccaacgtaaagattcactaacccagtacacacactcataactgaagataatgtgtgtctatctggcctctctccctcaaattgcatgcgagaaaatagctgaatagcccccttatagtcttcatttttctcgtcgccagctattatcgagttccatgagatcatgtttttgagtggcatcctctcaaagaaatctttngcaagaatcaagtcacccttctgtgccacccagatactatcaaatccatgaaagtcatcaggagatggcattttcctgagagctttgaacctcttcatg

SEQ ID NO: 132169 - DNA, 479 bp, Glycine max
  unsure (1)..(479): unsure at all n locations
ctatcaaactcagctgaggctcaagaagagacttatgatttctataagttttttccagcgngggacatgatatgcaaagaccctttgcttgttaaggctgaaatccatggctggagtgatggaaaatagatggagcaagttttgttgcacttaatcaacaaaatttcaatggaggaaaatgctcagttcatttcatctgattgcaagctacagactctgtccgtctctgctttggagggtttgcctaaagccctcccagttcgaccatatattcttagttgattaaccttcaagaaatgtatcataactcacaagggtttttcttttttcgatgattaaccttcaagaaagcttcactataatcgcttatgttggaatggtctatnatgggcaactataatntctatcaaatcaaatacttggttgctctatatcattgcggagtggntattatcatgtgtttacaatattttactggg

SEQ ID NO: 132170 - DNA, 390 bp, Glycine max
  unsure (1)..(390): unsure at all n locations
acttgaactccgctctcctatttgctataaatagggggagaagtgataatatttggttcagcccctntggcacttctctctctctcgaaattgctcaggaaaattatttccgtgaagaaaatccaagccgaggcgctttcgtaacgtttccatgagtaattacgtgaagattctcgaccgttcttcaagattcatcgntcgttcttcgttttcttcagtcttcaacgggtaagtacctcaaaccaaacttttcaatttattctatgtacccgtggttggccacattttgtntcgggtattattattcttggtttcatttgctttgtatacacccttttgacgtgcttaagccatttatttaattcatttctcgcttaatctaaaaataaa

SEQ ID NO: 132171 - DNA, 138 bp, Glycine max
  unsure (1)..(138): unsure at all n locations
tgagcctatttcccctntctttgttttgaagctcattacaagccttaagtgaaaaaccatgatatcaccttacccttaaggaaatttggagctttggaattgctttgggaataaactgggaataagtgtggggggggg

SEQ ID NO: 132172 - DNA, 293 bp, Glycine max
cggaattgaagggaaaaaagagggagagaagtggaactttgaagtgtgtctcataagactttcattcatgaaagttacaacaagtgttacacatgcttctatttatagactaggtagcttccttgagaagctttcttgagaaaacttccttgagaagcttctttgagaaaacttccttgggaagctagagcttagctacacacacccctttcataactaagctcacctccttgagaagcttccttgagaggattcctaaagaagctagagcttagctacacacacctttctaa

SEQ ID NO: 132173 - DNA, 351 bp, Glycine max
tgtactataatctgctagagctgtttaatattatggaaatgtcttatgatcaggaaccagttgaccctgcacttccacacccaaaacagtaaggagcaacatatatttacaaaaagaatattcagaacagatttttaaactttgctacgtaaccatttattcacacagaagatggttgctgtttgattaaacaaatatacatgtggcagtacaaggctggaagcacaaggaatgtataactttatatctttacacaacagtaactttagccaagacataacagatgccaattgatagtccagatagataacattaaaaagccaacaagtatatgcaataatagatgatgac

SEQ ID NO: 132174 - DNA, 368 bp, Glycine max
ctcacgctggcttaaacttcctcataatgaggctgccatacaagctgctcttataatacacccctactggaattccaagataagaaaatggaaagtccggttggctgcaattgaggaattgagctgcatccctacaccatccttctgttttgcccaggcagccgaaatggcttttagaataatttatcttagtcagcagaatcaagttatccagcagatgggatctcacaaagatacaggatgggaatgggctgacatctgcaatccgaagattgatggggaattgggaatcaaagacctgtccaaattcaatgcagctttaaggggaagatggatctggggactatcttctaatcacaaccagcttt

SEQ ID NO: 132175 - DNA, 357 bp, Glycine max
  unsure (1)..(357): unsure at all n locations
ctacgcttaacatcagaccacttccgatggtgcatggaactactatattacttgatggggcctatgcaagatgaaagccttggaggaaaaaggtatgcctatgttgttgtggatgatttctccagatttacctgngtcaactttatcagagagaaatcagacacatttgaagtattcaaagagttgagtctaagacttcaaaaagaaaaagactgtgtcatcaagagaatcaggagtgaccatggcagatagtttgaaaacagcaagtttactgaattctgcacatctgaaggcatcactcatgagttctctgcagccattacaccacaacaaaatggcatagttgaaagggaaaac

SEQ ID NO: 132176 - DNA, 191 bp, Glycine max
gtcgctcttgagttgaaaccaaacagacctactagtggtccttatacgaccaaagaagtgtcaaatcaattgacctcctccaaatgacgatccaattatcctatcagtagctggctaaaagcacagggatcgaggaagacggaagaggggggtggagacatttaaatggggtaaaatggtaatttcaccta

SEQ ID NO: 132177 - DNA, 296 bp, Glycine max
  unsure (1)..(296): unsure at all n locations
ctcacatcatattaaatgtttctctcttgaatttgtagttttcaataaattttaacaaaccaattataaatggttgtgttgaaggactgtatttcaaacatttctcattatcaaaacacccaccaataagcaaatgccaacaggaaccatgtgaagactaacagcagaaaaatcatatttcaacaatgggaactattgtcatgatcgcatgtgaaataagagaacaaanacaactagaatactgaggaatgttattagtcaaaatttctcagaaaaagcatgacaaaagaaaaaca

SEQ ID NO: 132178 - DNA, 291 bp, Glycine max
ctacactttagactaaattcattttcgacacttcaagccaaaacatctattttgtcaactctagcaactagtaaataaaacaagaaaaacacaaacaaattattttgtcatctaagttgttggaaattgaaaatgagtgctgtgttgaatgaacaaattattgaatgttttgatatcatctaaataatcatcaccaaatttcagataagtcaaacattttctctctctcactattatatacatatgggataaatatgtcttgaaacagtgtatcagtatcgagcaaagtat

SEQ ID NO: 132179 - DNA, 117 bp, Glycine max
ctctgtccacatgccgcgactcaggaagcccaacagggtgagacttctctaatgatgctgaaaacaattcccaggctatctcctgcgatgtaccccttaacaatagatgcctcagga

SEQ ID NO: 132180 - DNA, 144 bp, Glycine max
gaataatgatgcaacctgcagaggctcaagaagaatactaagaacgtctaaagaggctcaaggagaaaaaacataccgtataccatgctcgcgacagaggaaaacccacagttgcggggacgggatgaaacacagccgcccaag

SEQ ID NO: 132181 - DNA, 322 bp, Glycine max
actcagctttctgagaaaacttccttgagaagcatagcttagcttttctcacccctctcacaactaaagctaccttcttgagaagctttcctaagaagaatacttaagaagttagagcttatctacacatacctctctaatagctaagctcaccttcttgagatgagaagctagagcttagctacacaccccttataataggtaagctcacccccatgataaaatacatgaaaatacaaaaaaaaaatccctactacaaagactactcaaaatgcctcgaaatacaaggctaaaccgtatattactagagtgggcaaaatac

SEQ ID NO: 132182 - DNA, 354 bp, Glycine max
  unsure (1)..(354): unsure at all n locations
tacactatgatactcacgctgacgcacatcgntcgctgtgtatgatatccactcatgnngttgaagtagaggagagcttcaccctataacgcaacgtggcaaacaaaagtgggcaagaaacttgaatggtcgtcattgtcaatgcagaatgtattctgcgcttcactatccatgttcacacattattgcagcttgtggttatgtgagcatgaactactaccaatatatagatgttgtttatacaaacgagcacatcttaaaagcttactccgcacaatggtggcctcttaggaatgaagcagctattcctccttctgatgacgcatggacacttatccctgacccaactacaat

SEQ ID NO: 132183 - DNA, 372 bp, Glycine max
  unsure (1)..(372): unsure at all n locations
ggtagaggcttagagaatagtagggaaaagcccagattgctatgagaatattgagtgaaatctacataggtttataataatgatgcaacctgcagaggcttaagaagaatactaagaaagtctaaagaggcttaaggagaaaaaatatattgtattttatgcttgtgttagtggaaatcctacagttgtagggactggatgtaacattgttgcccaagatttatgggtgaaccaatatagttttgtgtgtgttgtcttccttttgtttatgcttcttatacatgtgtacgctttatattcattantattacattgaaatttagttaacagttttacacttcaacaatagtttttaaanaacattttaacttc

SEQ ID NO: 132184 - DNA, 338 bp, Glycine max
  unsure (1)..(338): unsure at all n locations
ataatttttttttttcaccttctttggcctccctaatttgaaatatttttaaaagattaaagacccaaataaaattttaaaaaaattaagaatccaagttaatagaaaaaaataagaacccaaaaggtcatttggccttttttgggtaactntcataattaaaaagtagcttttagaagacaaaaatatgtaattttaacaaaatagtaacttttggtcattgaacantaattaattatattctataactatctaggtggaatattggttacacnntaacattgatatgataaaaacctatcatanntctatatatcaaatttttatcttcttctcat

SEQ ID NO: 132185 - DNA, 319 bp, Glycine max
  unsure (1)..(319): unsure at all n locations
acacttgatactaccctaacataatgcccataaaataaattacaccactattgctttaatacatatntgataataataaataaaatatatgtgacaatagataaaccaactcatacaacactntacaaaggttgcaactccctggtgtcaattgntacttgcagaacttagcctacccaatgcacatctttcattaggagtgggagcactnattaaaaaagaggcactcgattggcaactccacatgtataatgtgtagaaccatgaatttagtcaattattgtatacaatgcacgttccgcatgggttgaaaatttta

SEQ ID NO: 132186 - DNA, 279 bp, Glycine max
tattatgaatagcttatgaagaaaaggaatcaatataaaggttgagtaaacaatgaaacagatgtagtcaattataggccaaggaaagcgtaaaaaacaagttatacaaccagaattgatatcgaaaatcacaacaaacaatcaacaaaaagggtagttgaagagccatgaatgtatgacaactacaatataggaggcaactacacaaagaatataaacatatgtcatcaactagatatacggttaagatttggtttagtcaatggtgtccaagaaaac

SEQ ID NO: 132187 - DNA, 306 bp, Glycine max
acagccttctggaggaatcttctgggcccaagtgggcctggttgctatttgcacccccatttttactaagtacacccccttgccttttttttggtgattcttttctcgtaaagttatggaaacttacgaatttcgtaacgatacttgttttctttccgtaatgttacggaaccttgtggattacataatcatcccctttatgacttacggaatgttacggaacctcactacttgtgcaacgatgcttccatatgatttcccgtgtgtcaccgaaccttacggattgtgcatcaatattttcttttg

SEQ ID NO: 132188 - DNA, 418 bp, Glycine max
  unsure (1)..(418): unsure at all n locations
tgatagtctntcgggaaatctactgctattgggaattgaatattttttatttttttattttatatatcgttaagttagctaaatgaggtggctaaaagatcgacatagttggctcaacatattttttctctctatctttttatgttatattttatatttgaggttagcatgatattgatttgtggtggagagtatctctntattaataaataatatttatcgaaaaatttatctaatcattgttggatgaatctcttatttcaatcattttttttatttacaaaaactcatgttgaagaccctgctcactttcattgtgactaatgatatgctcggcttttaaatctcttattagcaatctatctaaggtttccaatggcctaatttgctatggttattatgcaatattatattattt

SEQ ID NO: 132189 - DNA, 365 bp, Glycine max
  unsure (1)..(365): unsure at all n locations
tactccgcttggtgaatttattttgttgattgaattctaattcttgttcatgtattcttgtcattcttagcctatcttttgaattttgagtctaattcatgcatgttatttagttcataacatgttctaaatcaattcctagaagtagtcttgttcttgaactttttttttgctttctaagtttcctacatgatgcctatgatgaagatgaattgtggtgctgagttgtggctggatttgtgaatcaaaataagtcttaagctctctntaattgtgttattcaagataattgagcataagcaaacacaaactgtaactatccaagccttaagcaacataaacactactcttgatttctatgttga

SEQ ID NO: 132190 - DNA, 281 bp, Glycine max
ctattatcaagcaagtcgaattctatcatgaccatattatccacctccactccttagatttccatgaacccgggtatagggccgtttttttactcaaacctgtgggtgcttagaatgcagtgtaaaaatgtggaaaagacaacatttattatttttacacaattcaagaaaaaacacacacaccaaggttcataattccacactttcctataatagggctaactcacaaaaacagtccccagtggagtcgccaatggtcacaacctacccttttgcgggtg

SEQ ID NO: 132191 - DNA, 372 bp, Glycine max
  unsure (1)..(372): unsure at all n locations
ctcctccttctgtttatcccgagtaagtgagtgtaagcaacctacatggaaattatataaaaggtaacagtgaataagtaatacaaagtccaaaggtgaaaagaaaataaaagaaatttacttttgacaagtttatttcatataaagcactgcagatgtcaataacagagnaacagattaccttttatatatctcagtatcagttgtgctggtagtgcacaagacaacagctgttatattgtctttctgcttctcaagaaaccgccgcacagttcctgaataaaatgaccttagaagaatatatagaacagangaacattacaaagtgttgaaacctaataatatatattatccatcatacatcagaaaaca

SEQ ID NO: 132192 - DNA, 373 bp, Glycine max
  unsure (1)..(373): unsure at all n locations
cttgttgggaggaaacaattcacttatgacggctagcagatttctcggatgagaataaaaattttgtgaccaaccaaggatactcctctgcaatcatatgagccaaaaagaaaaaagaaaaaagaaaaaacccttcacttattgatttcaatgttctagtcacatataaccattgtccatgctaccccactttagttttcatgaccagcaaatgctgcacccttttaatggatcatgtagtgtcaatgacatgagaagcatccatgcatagtactttcttgcanatcatattaaagatatttacccttctagtataactccaccacatacttagtcaagatcggaacgntcattttttatttaataatatcta

SEQ ID NO: 132193 - DNA, 263 bp, Glycine max
ggtagtcgattgtttttacatctgctactttccgaatataccattgtgaatgagaactagtgtatgtgataaaatgagtatgtattgacttgtagtatatatgtgccatgagtggtgagctatgaaatgtacaatcacatgactataagaccctttaagggcgactagttaatgcatgacgagtattgtgatgggaaccaccgtggggacccgacgagtttaatcactatcgcaatgagagtaaaatattttgagaacaattg

SEQ ID NO: 132194 - DNA, 229 bp, Glycine max
  unsure (1)..(229): unsure at all n locations
aactaactatctacactaattatataggataggaaataactaactaactaacttaactaattacacaaaacataagtccaaactcacaacccaattctttaagtgcagatgttctgactttcaaacccatattgatcatggagatggcagaattttccaaagcttanttgtaacaaatataagtatctntttcttatctttccagggactactcacatgttccattaaa

SEQ ID NO: 132195 - DNA, 325 bp, Glycine max
  unsure (1)..(325): unsure at all n locations
gcttacatggagntacattaatatagtgtttctactattaatataataaaaaatagtgtgtagtcaatacatctaataaaagtaatgttgtagtgctcaactaataaaaaacaccaatatattttttttatttgtatttcttgcaaaaaaacattacaacaaaatcatgattttgatgttatnntttttttacttgaatgaaatcatgatttcattgtgttgtgaaaaaaaacaaaatattattctatcgctatggttttctcccatccaatgagatcaagatttccttatgttaagggagtgtgaaaaaaaaaaattataaaat

SEQ ID NO: 132196 - DNA, 198 bp, Glycine max
ctcccctataaaccctatccactccaccgggactcaaagaaactctccggcctcgtcgcgaccctaacaccggccgactgccgtagcagcatcgccatggctgaccacgggaccagaaagacaaccactgatcgccttgaagaaagcattggccggctcaccaatagccaagtctctatcacagacctttctggcaaa

SEQ ID NO: 132197 - DNA, 269 bp, Glycine max
  unsure (1)..(269): unsure at all n locations
ggatgaaggcaagagggatttcgaaaatctgccctattatgcagaaaattgttgttgaattgtgcagtaaaaatttttgttcttgtgcagaaaatgcttgtgcattgctgggtatggngaaaggagtacatattaggttctggacattttctagcaaatcccaacggtcaaaatgtagacttatgtactaggaacctccagtaaaattttcgagtcgatccaacgtgtagcaaatcgaaacgaagagaatgttactggggtatttgagt

SEQ ID NO: 132198 - DNA, 282 bp, Glycine max
cacttaaccactggaacatataataaacacaaggtaaccctataaaataatgaaaaatgttataattaaaaaacgtcacagtgaaattagcataaagataaatacaagcttatgacattctataattaaaaggctaataattggaaggttttaaagaaaatagtgcgttgtattccattcattctttaaaccccccatgactatggtccacaatcaatgcatgacataatgaccacaattcaacctcaggtttcaatatgactaaattcaattataaaaaaa

SEQ ID NO: 132199 - DNA, 185 bp, Glycine max
gctacctagtctataaatagaaacatgtgaacacttggtggaactttgatgaatgaaaatcttgggagacaccactcaaaggtcaacctttcttcctttttcttccttcaatttcgcgcgtcccccctctctttttctctccctttttcttttcctccattgaagcatcctcttcaagcttctta

SEQ ID NO: 132200 - DNA, 85 bp, Glycine max
  unsure (1)..(85): unsure at all n locations
cactcccaacaagtaagnacgtcattctttggttctctagcttcgcattgattcatttttgtgctctaaatgcttatatttggca

SEQ ID NO: 132201 - DNA, 337 bp, Glycine max
  unsure (1)..(337): unsure at all n locations
agctntgagggtgcgtagcccaccatcttttcatattatagtatcgataatgggtctaccatcacgatcatcgtctccctttcatcattgggggtaccacctgggccgtcagatccctccaccttttgggcgtagtctttgaaagatccgtccccctttttgcaaatgttctgtagttgcatcctattcggaaccatatcaaaattatactgataatgcctaacaaaggcaaccattaggtccttccaagaatggactcgggaagaatcccagntagtgtaccatgtaacagctaccccaaatagacttcgtggaaggaatgtattaataattcctc

SEQ ID NO: 132202 - DNA, 263 bp, Glycine max
  unsure (1)..(263): unsure at all n locations
tatgataaaatgcacccacattgtgttaaaagtgatcgaaatggataaataaaatcctcacacaaacactcaataatttttattcactctttttggcattttccctctaatagccccaccactattgtcttttactactcaacttcttattatgagctcttaagtaagaacctctggagttgattatatacgacangacacaacaatggattaatgagaccttagtgaataaaaacaatagaggacaaggaaacaagggattt

SEQ ID NO: 132203 - DNA, 120 bp, Glycine max
gctgaccttccccgttatttaccacaccccagcgaaggcaagagaaaccacacgcgagaaaaaaacatacccggggaggcgcaccccacggacggcgccgccagccccccgccacccgcc

SEQ ID NO: 132204 - DNA, 429 bp, Glycine max
  unsure (1)..(429): unsure at all n locations
tgcaagccttgcttgtggagcacnacggttgctgtatctttttgcttcaangaggcccttcaatggtgatttttcaacatggagatgcaccggaaggccaaggagaagaggagaggggaggcaccactcactanggaataagccatggaagaaagagcttcaccacaaaacatgtgccttggataagaaccttgaagaggatgcttttatggaggaaaacaaagagagaaggtgggagcacgaaatcgaaggaataaaagacggagagaagtggaactttaagggtgtctataagactctattcatcaaagtacaacaattgttcacatgcttctattatagatacgtagcttccttgagaactactcgagaaaacttcttggaagttcttgagaacttcctggaacagagctactcaacccctctata

SEQ ID NO: 132205 - DNA, 327 bp, Glycine max
  unsure (1)..(327): unsure at all n locations
cttagcattatcagcatcaacttattcctacactcgaatttgtaccctttccttttactcgtaaccttttttatggaaacaaaaaaacaacggagaataaaggggaaggtgaactatcccttttcttccataaaaagggtaggtgtaanaaggggaaagtgtagacaaacaaaagagtaaagagtaacatttgtgttaacattatagtcattcccaattaaccagagaagtggaggcctaccatataagtatgaacttccacaatctcgctcgtggttggcttcttcatttacagacatggcagtatcacaagcttccataaaacta

SEQ ID NO: 132206 - DNA, 413 bp, Glycine max
  unsure (1)..(413): unsure at all n locations
agctgtactggagctgacccataacttgttctactctntcagactggngattcctaggcttttgaccctgacttgatagaacctctttataaacgaaggcgcttgactcgatcccatgctttactaaagtgaaacaaaacccagtgcgaaacaaaactccgacatctatcatgggtggaatggatgaatgcatgaagaaatgcacatggcatagatgcaatttatgaatacgggagcccgggaaattgtccccttcttagatacacacattgggcagcatggcgcctgacgtatgtatttaagaaggcgacacggaccctccgtcggttgacatagtgagaggctcaagacgcaatctgtgcatgatgcatatgcgacaggcacaacacagggatgtacatagtacgacaata

SEQ ID NO: 132207 - DNA, 193 bp, Glycine max
gaaaaacagggtacactaggcaatcgctttttctaaaacctcatcacccttacagacgaatgaaaaaagctcttaatggaggtcaagagcacaaaactgcgccgatatcattgattgttgagcaggtcttcaagcaagtcgaacacttgaatactgtatttggcaagacccataagaaggataaacgtaagac

SEQ ID NO: 132208 - DNA, 341 bp, Glycine max
catgcaagcttgcttgagaagctactatggaggagtatatcttttagtttcattatggccctccaacggggatcttagccatggagtacaacgaaagataaaagagaagaggtgaaaggaggcaccatccactagaaaataagccatgtgaggagaagcttcaccaccaagagagtgcctaggataagaagcttagagaagaagcttcaatataggaagagaataagagagagtggcgtggaaattgaaggagaatagggagagaagatcaactttgaagtgtgtctcacacgattttcattcataatagtattgacacgatgtacacatcgttttatata

SEQ ID NO: 132209 - DNA, 260 bp, Glycine max
  unsure (1)..(260): unsure at all n locations
agcttgtacatgaagaaccaaggctcgccgttgcaagttgagctcgcctggccgagcatgttacttcaggcttaagccacccaactcgccttngccgaggtgggaggcaagcttctcttctattttggccataaaagggcatgggaggcttccagaatggttcaacaccttgggaaaacatattccacttaaaacagcgataagaagtataaagtatataaaatctatgccgggcacttgcgtaacgcatccgaacgttc

SEQ ID NO: 132210 - DNA, 234 bp, Glycine max
  unsure (1)..(234): unsure at all n locations
agctttgaangctctattcaatggagttgttcataatatnctcagactgatcaacacatgtacagtggccaaggatgcatgggagatcctgaaaaccactcatgaaagaactctccaagtgaagatggtcagattgcaacttttgggcacaaaatttgaaaatctgaagatgaagggaggagagtgtctttatgacttccacatgaacattcttgaaattgccaatgcttgcac

SEQ ID NO: 132211 - DNA, 217 bp, Glycine max
agaaacactcttggaattccccgcgcttgacatgcacacgatcttgaaatataaagtccgacggtaataaatgcctgcgctgattagtcaaaacattgggacatagctttcctgttgagcttatggctcgagaattgagacatagctggaagaagatgtccaagttaatcatataatgttgtcgtaacgtgcagagggcgcagctcccacctcgtgc

SEQ ID NO: 132212 - DNA, 216 bp, Glycine max
cacgatgcttcttttcatgtccgcctgaaggggcttatagcctaaaccatacttcccacgatttccttgggtaattatcaagctaggtatgccggcgttgtctctgcctaaacccatcccgggatcataaccgttccccaacaaaactcgggccatcattatcgctgcatcggacagacacggttgcccaagaaggagtccacaaaggaaatgctt

SEQ ID NO: 132213 - DNA, 173 bp, Glycine max
cagtgagaacctgtgatgtacctaaacaggcgagctcctggcagtcaacaagataaaggaacaaagaccacaaaagcaggaggctttgggtggctggccagctgtgaattttgtgggatatgtggattatggcccctggtaatcgattaccaagggtaaggaatttaatacca

SEQ ID NO: 132214 - DNA, 254 bp, Glycine max
tccgatcattctttcctttaaatggaggaatgttgagtttaataccatcaattccgttttgtctaagaacaccatcattcccttttctccttctttcttcttcattatgatctctattctccatttgatccaacctctcatggagcgcatcatctcgttggttcattaacctctccatatgttgcatcaaagcttgcatttggaattgcgaaagctccactccatcattaggattagcacctgacatcttcaac

SEQ ID NO: 132215 - DNA, 285 bp, Glycine max
gacttaaatgacttaagctttcttttcaggatatagaaccctgatatgtaaaacatcataattttttaaacaataaggtattttattcatattaaacttatgctacaaactgagaactgtgagcgctagaaccttgaagatatatgaatagatacactctagggacatgcttattttctgcattcagaaaaactttataaaagaggtcaggatttacccagccctgtgaacctgcagttactacagaagttaccgatttattttctgacaagaaatcgaatatcg

SEQ ID NO: 132216 - DNA, 352 bp, Glycine max
ataaaaggggcccactactattaaaaccacattatctctttttccccccctaagggttcatacccagatccacaataattctaagaagctatacttttctaaagaatcacccatcaaccctttgaatctgggattggattagttagggtgcataatgtacccgtgcttcttttttttctgatgcaaggattaattagacggccataattaatataaacaatattgtgttctaaactttttaaagaatcatgaagcataaatagtcggaacaatattcttgcaaacttactataagtattaagtcttcttatataattgctacaatgcgagatatattttgagaaattaatat

SEQ ID NO: 132217 - DNA, 268 bp, Glycine max
acgaactagacctaacatgctacaatttctacgcaacacacatgaaattaaagaaactagcatccccgaaatctttaggaagaaattcttgcaatggaagatgagaggcgattgattagttcgtgttgaaattatgacgtgagctacagtcaagatttcattaattcattaaatgtatgtacttgtctcatagaaaagttgaaatgaactattaatttttagggttaataaccattttatctcctgcaaaatacatggtcttttctta

SEQ ID NO: 132218 - DNA, 126 bp, Glycine max
  unsure (1)..(126): unsure at all n locations
catgcaagcttcacctctaatcgctcctcacggagctaaacatggncntcacagnggntcctatgagagtgaataaggaaaaatcatttggagatccaatgatcataccagcaactggccctaact

SEQ ID NO: 132219 - DNA, 421 bp, Glycine max
  unsure (1)..(421): unsure at all n locations
atcatattcaaacttggccaaataaataataaaggcatctcgacttcaagaaaaacatataagtctcataccattaatatagaacctatattctaatgtcacattctaatagaacgnggntgttcccgtgtctctaacatgagggttttcataagcattcaactattcatctgctcccccgacacaaagttcaagatcatcacaggaatcaaacacaaacaacanaccgggagtgagttatcacattgctactactagagagaaacaacacaacatatagttgccaaatacaatttacttaacatatctcacattatttcatcacttttgcattcatcaatcacacctttcaatatcaatcatatcacaggatcaccactctgacaagacatatacacataatttatataacaatagcagc

SEQ ID NO: 132220 - DNA, 299 bp, Glycine max
  unsure (1)..(299): unsure at all n locations
catcacgattatcgtcttccttttcatcattgggggtaccacctgggccgccagaatccttcaacttttgggcgtgttctttgaaagatccgtccccctttttgcacatgttctgtagttgcaatctatccgaaaccatatcaaaattgtactgatactggctaacaaaggcaaccattaggtccttccaagaatggactcgggaaggttccaagttagtgtaccaggtaacagctaccncagtaagaccttcttggaaggaatgtatcagcactttctcatcttttgcgtattcccca

SEQ ID NO: 132221 - DNA, 238 bp, Glycine max
ataatattctcttaaataaaacaattttttattagttgatagtggaaaataaaatggagtattattattaataataaaaattataggctttcaaactagaaaatatatatactacgcaacaaaaatggaaatggtatcaatcctattaaattgtatgccccaccaaggcaccaacctaacattcagttgactttcgttcaaattaatatctacctatagacttccaaaatcatatatt

SEQ ID NO: 132222 - DNA, 371 bp, Glycine max
  unsure (1)..(371): unsure at all n locations
cttctgaacaacctagaagctntgggtcaaacctataccaaagcccagataaacctgaaagggttggacaactttcccaaagagtggaaacctatgacaacaaccatccaagaggatagagacacgaaaaatcttgcttgggatgaactattagggattcttagtgtaacaccctgaaatttccttcaccatntatttttctacacatgtaaaaatttcactgttaaagactagatagtagatattctgcactgtgtagtttaattatatgaccatgtgatttaatttattctctgcatgatattaattggactaagttaaaagtctaaagttaaatttatttatttttagtgtaataatttatttagtag

SEQ ID NO: 132223 - DNA, 298 bp, Glycine max
  unsure (1)..(298): unsure at all n locations
tggagcaaactcttatcttacacaagtctattacattaatctaaacttgctcaaactggttttacgacgaaaactctaccgaatcaaaatttgactcctcaacacccacattaccctaaaaatggctcttgccttcactttggtcactcattntcctcctttgcacagcccaagctttccacagtcctaatgacatttaaactaggattacctcctctaacctcattacactgaatcatatttgcgtttaaatcccaagcattacactttccactatacacacatttacttgaaccta

SEQ ID NO: 132224 - DNA, 365 bp, Glycine max
atacacgacaataggtcacaataatgggaattcatttcctttttcaacttctcttggagcaactgcagcaatcagaagcgcaagcccttcacaagcaacacatgtgcttagtgggcctctctacctttctcaaatggttcatccacagcaacaccctcagtcacaagcactggttcaaccaagttattttaatgcaagcacatcaagtagttcgtcatctcataaacagtcaccaggtgcacaagttaatggcagtaatattttgacctctacaactatggaactgcagtcaccaaagcgacagacttcactggttcatcttcgcaagcatgagactgagatgggtggagggaatgcaccttcag

SEQ ID NO: 132225 - DNA, 106 bp, Glycine max
atttcttcgttgggtttagatgaaagccccatggatcaatgcatataccacaagggcaatgggaggaaaatatggttccttattttatatggagatgatattttac

SEQ ID NO: 132226 - DNA, 152 bp, Glycine max
tatgaactacctctttcgacttataaaaataagaagttgaaaaaaacatcttaatcacaatatttctaggggttgatggaataataagataaattcatattcatatgagggtgagctgtgccggaaccaaaattatttacaacagctccatc

SEQ ID NO: 132227 - DNA, 261 bp, Glycine max
  unsure (1)..(261): unsure at all n locations
attcacaaacactcattntatatcacgcaaatcacttaatatcataactggaatttaaatgactgaacattaaatgactgaaacataaagcaactaaataactaataactaaattgntcatgaattgtagaaattaaaacaaaacccaaattaaacatcctgctcatcctgtggctgatcttcattaaattcagcactagagcagctggtgcatcctgaagaatgggctgctctggctccatggctggtgctgaatgcatg

SEQ ID NO: 132228 - DNA, 289 bp, Glycine max
agaatgtcaatgcttggccacggaagaaagcctaaaaagaaagaaaaattccccattggagagtgagagaaagcgaaaaaaagaaagaaaattccggtcagggatcgaagaaaacaaaagaaatatgcagaagggtcttgggcccgacaatatctgaacaaaccagaattgtcccaggtaaacgaaaaaaggaaaccacgacctaaagtggtcctctccctttgattgctgtcgcaacctacccttcggcgggagggcgacggcggactcactggatgcgtgttccacg

SEQ ID NO: 132229 - DNA, 332 bp, Glycine max
  unsure (1)..(332): unsure at all n locations
agtcgacctgaggcattgcaagctggattgaatctgtatgtataacgaattcttatatatggatnntcaatttaggtaaggtctataagggtaccatgacaaagaatctgaatgtcgcaatgaagcacataatcaatgatgatggaaatgtggacacttttgtcaaactaattacaagcttatctcatgttagacaccctaatatcagcagttgcnagcaatcacagttacttggtgccaacttaaagtggaattaaacaaggaatatactgaaagcgcataaaaaaagttaatattgcttaatataggctatcctagcttaaatcttaccc

SEQ ID NO: 132230 - DNA, 196 bp, Glycine max
cagctgcaagctcctcttcttagttgcggggttgtcttcatgtacaaactatggctgggcggatgtgggtgagcaacgtgtgggtgccggccttcgggatcggggatagaactcgacatcccttcagcatagtcttgagggcttcgggacctcgtgggctgtaaggaggctcttttcaagacgggagaaccatgtg

SEQ ID NO: 132231 - DNA, 193 bp, Glycine max
atacctacggaacggtaccggagcgccctaacttcgaatttcttcacgaagacaattttctcagcaaattaaagatacgaaggccaagaaggctgaccccttcctctcactccttccctattatagaaatggggggagctgcaccactcgccggaagaaggtgctcctcagaagcacaaccttctggaggaag

SEQ ID NO: 132232 - DNA, 336 bp, Glycine max
  unsure (1)..(336): unsure at all n locations
atttagagaagaaggaaaaatagctatccttatgtactcccttgtgatgttgggttggttgattgtgtcacacaacctcaagtgcaccatggggtccttacaagtaactcagttgatatcaaaaccaaaggactaatcaagttcccaaaataatttatattgtaacaaagcaattgaaggaagaattcgaaataagatgtgattgtcgagtcaatatctaatgcantaaattgatctaaacaggcaagataatgtgaaagataagataagatgatatttacggatatgatttacactaccaattccctaatcaatgctacaagaatttacattgta

SEQ ID NO: 132233 - DNA, 387 bp, Glycine max
  unsure (1)..(387): unsure at all n locations
cgcttatgctataatatgggtgaatcaccaaccaaaaaatgaatcaacattttcacatctagctttctattctggaccccttcaacttatcatgagggttgccaaaattntaagctcttttgtccttctggtcattcggtatactttagtgaatggacccacaccaaaggtaaggagcatattcacttgaacttgatgcattctgtctacgtgagttgcatgcatctacaacccgtgagctacattactagcagctcctaactactacttatatagaacaaaactagcaagctcttgttaatctcaagcgcacaacccattccaccaaatatgtgactacgcggttagcacacaattcatttgtatagcaagaacttagtataatgt

SEQ ID NO: 132234 - DNA, 334 bp, Glycine max
  unsure (1)..(334): unsure at all n locations
agcttgtctcagcgcttatgcattatggatatcatacatgctagctatcatcgccaagaccagaagagtaggtctagctgccggccatgagcatagggatgcggacgagtatgctcaagtatacgcggaaaaagagctagaggagggtgatcgactctttacaccaagaggcaaccatgtggatggatcggnttgctcttaccttgaacgggagtcaagaacttccccgatttgtagccaaggccaaagcgatggcagacacctactccgcccccgaagagattcacgggcttctcggctattgtcagcatatgatagacttaatggcccacat

SEQ ID NO: 132235 - DNA, 204 bp, Glycine max
ccctaaggctgcccactcgcaaatccccggggtatggcttttgaaaggggggaaaaagaagttttgaatgcaaaaacctccccccttttggcattcctatattttggtgccagggtggctcgcccaagcgagctaaccttgcattttttttttgaggggaacattaaccatgttccctcttttcaaggaatagcatattcctaa

SEQ ID NO: 132236 - DNA, 106 bp, Glycine max
aaaatgcaaaaagatgacctaggctgaaactcgcaatccggggtatggtttgaagggggaaagaagttttgatgtaaaccccccctttcgcattttaaatttgggc

SEQ ID NO: 132237 - DNA, 342 bp, Glycine max
  unsure (1)..(342): unsure at all n locations
tcttccatggcttattccctagtggatgtgcgcctctctcacctcttctnctttggtttccgctgcatctccatggtgtaaaatcaccattaaaggacctcattgaagctcaaagatctagccttcatggaagctccagaagcaagcttccatcaagtggtaatcagagcacaagagcttcaagtaggtgctccttaaacctccattaattnttttgctttaccttttcttccattggtgggttcttcattttttctccatgcatctcctcacatgtcttgtgccaaattttgttaacatgantctttagagtttccaccgattaaacttgctatagaagct

SEQ ID NO: 132238 - DNA, 257 bp, Glycine max
  unsure (1)..(257): unsure at all n locations
acattgagaatttgatcaccggcatcaccaagggataccgatacaaaatgagattcgtgtacgctcattttccgatcaaaggtagcattggcaacaacaagtccatcaagatcaagaaattcctcggcgagaagaaggtactcaacactcttcatctctattntttntttcaatttatttaattaatttcttaattatttgctactagaanaataaattggtattaggtgtagcgacttattattttggtattatgt

SEQ ID NO: 132239 - DNA, 386 bp, Glycine max
  unsure (1)..(386): unsure at all n locations
tgtatccttgacaattgatgtcttggtaaaagaaaggtccttttgtccactttataactcattcaagaactgttttgcaggggctatcaccgtgggctttattggttgggttgatcttatttttcattcggttgacaaaattggagagttctatccacttggctgtaattaacttattttcgcagcctattctttttacagaaaataaaaatttggaagatctcgctcttttatggtcactatagacgcatgctctccattgtcaaatattggaaatatatgccccacacacacatatatggattttgcttttaatatgatggaaaatatggactnttggtgctaacatgatacaggtcatctatttgtagaagctatttaaaatt

SEQ ID NO: 132240 - DNA, 412 bp, Glycine max
tcgctcggcggcgaccttgtgggacttggataggagcaatatgtttatggtgtcgcgatcgacccgattagcgagggatgagaggaggttctggcagtagatctcgcggtgcttgttgactgcgatgaggatttcgacgggtgatagggagaagaggcgctcatggccttgctcagctcgagttctttaaagatagggtaatgacatgtgacattgacatggctacggcggagaagaccaaagccttggtgttgaacgagagcgtgagccctgaggctcataagtcacctgtttaatctgaaaccaatgtgaagcatgatcctcaaatatgagccccatttaaacttaagatgctcatatataaatttgtgaatattatacatatcttgcataggaagatttaaattcaaga

SEQ ID NO: 132241 - DNA, 275 bp, Glycine max
gcttcaaccctataacgcaacgaggcggacaaaactgggcacttaacttgaatgggcatcattgtcaatgcagaacgtatctagcgcttcactatccatgctcacacaatatggcagcatatggctacgtgagcacgaactaccaccaatatatagatggcggtacacaaatgagtacattctaaaagcatacttcacagaggaggccgcttgggaatgaaacggaaatccctccttctgaagaggcatggacacgtatccctgatccaactaca

SEQ ID NO: 132242 - DNA, 251 bp, Glycine max
gacaaaaagctccaagacaaacaaagaacaacacaagagaatcaaagagcaatcaaagaacaactcaagtgaatcaagaaaaagccaagactcacgaagaaagatcacagtcaagaataaagattcaaggcgcaagatctcaagaatcaagaacaagatccacgaatcaagagaaggcccaatcaagataagcatgaaaagttcgtctcaaaaattgaatagcacatgattatccgtaaaacaacggaacc

SEQ ID NO: 132243 - DNA, 468 bp, Glycine max
agctttgatggtgtcgagaagaaatccatgtttgttatcatcaagaagggggagaatgtgaatgtatgtatacatgattttgatgatgtcaaagaagaatctaacaaggctgcttcaaatgataagcattttcttcaagaataattcaagattgcttcaacaaacaaagccttgtttcaagattcactaaagaccaagccttgccttaaaacacagtgctttcaagacatacaaggccctggtaatagattaccaggaagtgtaatcgattaccagaagacagggttgagaaatagctgttgaaaaatgttctgaatttgtaatttcaacatgtaatcgattaccatatgtctgtaatcgattaccagcaacggaactttggagattcacattcataaatcataaccctttacattataattgtgtaatcgattacacaaacattgtaatctattaccagtggaaagt

SEQ ID NO: 132244 - DNA, 336 bp, Glycine max
caatattggccaacaccgaccgcactttgaaggcaattatatgctcttcttacaaccataacaagctgatcacaggctgaaccaaaacgggttattggctgacgaaaaaggatataaccgagggaataatgaaacttattattaacaaagaactatcgagacactcattaataacaaataactatcgacagtttgaaaggaagtgtgcatatgaaattattattcaatgggttaaggggtgacattgacaaagttctacatgcaaataataaactggttatgccggacatatactatagtatgaatttgaatatggacccttgtttctatggcact

SEQ ID NO: 132245 - DNA, 404 bp, Glycine max
caagacatacaagtgagcttgaacaaatcttctagacttggagtgatcacatgcaatcctcttgaacccttaccacccactttgtcatcatgccgagactcacgaaggccaacatgtttagccttctcaatgtattctgaacaaaattcaatggcttcttctgcaatgtacctctcaataaaagatgcttctagatgatatagattctttgtatacccttttaagatctttatgtatcgctcaactaggtacatccaccgcaaattaacaggaccacaacatttgatttctctgaccaaatgcacaatcaagtgaatcatgatgtcatagaaagcagggagaaaatacatctcgcactatcacagtataattgccgcctcattttgcaggtcattacacttgac

SEQ ID NO: 132246 - DNA, 445 bp, Glycine max
  unsure (1)..(445): unsure at all n locations
ggaccacaaatctaagcttagcttgttgcacgtaagttgaactcttcactatggatgatggtgtatatatacaagccatgttcggacgctctcgaactatttttaacgaattatgtcatcttaacaaaacttttgataactataataacattgacaaaattctaagaagtttatctagaaagtggaggtcacaggtgatagctntgagaaccgtgaagaacttggactccatgtccattgaagagctgattggaaccttaaaggttcatgagcaagaacttaaacaagatgaaggattgaaaaaagagaagtccttggctctaacaacacacaaaataaacaaaaaaatccttaattttcaaggaatcctcatccatacctatgtctagaagctcattcaaagttgtcaagattgatacaccttatgatgatgagtgcaatgatg

SEQ ID NO: 132247 - DNA, 448 bp, Glycine max
  unsure (1)..(448): unsure at all n locations
agcttcttatccaaggctcatcttggtggtgaagctccttcttccatggcttattccctaatggatggcgcctcctctcacctcttctcctttgtcttccgctgcatctccatggtggaaaaccaccattagaggacctcattgaagctcaaagatccagcctccatagaagctccacaagcaagcttagggccttcccttggatctctagcccaatctacttggagttttctacccaatgcccttgcggggtaggattgcatcactatggccaggaagatcctaagagcaggttattactggcttaccatggaaagtgattgttgtgtccatgtaaggaaatgccacanatgtcaagcgttcgcagacaatgtcaatgctccaccgcatcctctgaatgtcatgtccgccccttggcctttctccatgtggnggatagatgtcatcg

SEQ ID NO: 132248 - DNA, 434 bp, Glycine max
gacaagaggaagtgtagaagggtgaaactttctgcttttattcgttgaccacagagtggtacctggagatatgtcgtgggggtcaagagaccttggggacgtcaagtggggtgctattgcccaaaaccaagcttgaccaatcccgacccaacccgggcatagtcagtcagtgagaacctgtgatgtacctaagcaggcgagcttctggcagtcaacagataaaaggaacaaagaccacaaagcaaggaggcttgtgtagtggctggccagctgtgaactttgattgatatgtgggttatggcctctggtaatcaattaccaagggtgggtaatcgattacaaggcttaaaaatgaagacaagaggctaagatggtctctggtaatcgattaccaacgggtgtaatcgattaccaggcttgaaaacgaggtcagg

SEQ ID NO: 132249 - DNA, 455 bp, Glycine max
agcttattccaagaaaaccctctttttattgttctggtggtggtactagcagcatgcccccttctagatcctttggtcattctggaggctcattcaagtctatggaggaccttgttcatgatgatgctggtgatcatgtagtatatgatgtaactagtgttttgagcgaacttgtgagcaagagaagaaacacagtcattgttggggagagtcttgctagtcctgagggaatagttaggggactgatagagaatttatagagagggagtgttcaaggagagttgaggtttgtacaatttgtgagtctccctcttgtctccttcaggaacattggcaagaaagaggttgaaaggaagcttgtggagcttataaaccttgtaaaaagtcatgtgggaagagggttattctatacttgggtgatctgaagtggttggttgagctctggtcaagttact

SEQ ID NO: 132250 - DNA, 224 bp, Glycine max
tgtaatatgtctagtcaactatatgttcagtttctggttgtctgtggaagatgattgggttttttactgcattgtataatgaatgatcgaggccgtacccgaatcaaataaacattaaaaatacagtatttaggaagtgatcctaggtcgtctcccaacgagcaatggtcaaccaaatgttcataacagatagtaataaaacagtaacgaattggggggggggg

SEQ ID NO: 132251 - DNA, 408 bp, Glycine max
  unsure (1)..(408): unsure at all n locations
tcttgacagaaaaacgaaaatagcaggaagtgcttctttctgaggaggaggcgctttntataattttttgttaaagggcaaaatggcccattcataaaaattgctgggtgcacctagcatttcccctgtaaaggctaaaccataagcggtgagagtacataaagcgcctctttctatcttgtgacaaaatcttccatattttcctaccagaaaaattttattcagaaacaaggcctcaattttgaagttgttccttttacatcataaatctgtaacacacttcaagtaaatatcaaaaactccgctgtttagctttctcttgggtctagagagttcttcctttggtttagaatgcgcttccttgngttcagaaagcacttcctttgccattgaattactctttctctt

SEQ ID NO: 132252 - DNA, 402 bp, Glycine max
  unsure (1)..(402): unsure at all n locations
ttctcaagaaagcttctcaaggaatcttttctagnctataaataaaagcatgtgtaacacttggtgtaactttgatgaatgaaagtcttgtgagacatacttcaaaggtccacttctctccctcttttattccttcaatttcgtgctcccccctctctctttctctccctctttcttttcctccattgaagcattcttccaagcttcttatccaaggctcatcttggtggtgaagctccttcttccatggcttattcccaagtggatggcgccttctctcacctcttctcctttgtcttccgctgcatctccatggtggaaaatcaccattaaagaacctcattgaagctcaaagatccagcctgcatagaagccccacaagcaacttctgtcaccagctcg

SEQ ID NO: 132253 - DNA, 379 bp, Glycine max
gtgcatttaaaaacaaatgtcaggttttacattgcaacttcccattttttggacagaaattaaaaatgactttatttaacaatcaatagagttctacgaaaacaatgaagtgtttctagttgaatcaataacaggaactagttttatttattaaaataatggttttaaggtaaataaaataaatatatgttcttaagaaataaaatggagattttatttgttcatttgataaggtgtaaaatacagattctttttataaaatactcaaacttaatgaaataaatagtgaatagtacactgagaatatcttatttataaataaagacatattagctcagcattatatttactataagattctacgctctctattcctctc

SEQ ID NO: 132254 - DNA, 470 bp, Glycine max
  unsure (1)..(470): unsure at all n locations
agctngaggagacgctaactcattttatgctgatatccatgtccaactacaggagcacagagtcattcatcaagaacccgaagatacaagtgggacaattagccaaacagatggctgaaagacccactaatagctttggagctaacatagagaagaacccaaaggaggaatgcaaggcggtattgactagaagccaaaagagagcacaaggagaagaagagaaaggtcaaggagaccagtctgaggaaggaagggcaggcaaagaaggagtgaagaaggaagaagagaagaaggaagaagagaaagaagaagagaataaggtcttaacctctaagaccaaaagccagctagcttgagaggctaggaaagaagagccaccagtccctctaaaggagtccctatatcctttagtgccatctaagaagagtanagagcactattntaagcgcttcttggagatatttcagggg

SEQ ID NO: 132255 - DNA, 436 bp, Glycine max
tgagtatgatgcctatgtttgtacttctatggtggatatgtatattaagaacgattgcttagataaagctgaagtagtgttccatcatacaaagaacaaaattatttgtgcctagaattcattgatatctggttacacctacaagtggttgtttgacaatgctgaaaacctactcaaccagatgaaggaggaaggaataaaagctgatttggtgacatggaatagtttaggtttaggttattcaatgacctgctacagtgaggaagcattggctgtgataaatcggatcgagagtgtgggattaactcctaatgtggtgtcctggactgctatgatatcaggctattgtgaaaatgagaactacatggatgccctacagttcttcagtcaaatgcaagaagaaaatgtaaaacctaactctactaccatgttcaac

SEQ ID NO: 132256 - DNA, 314 bp, Glycine max
gatgagaatctgtgactgtcctattctagcgagctcctggcagactacagattatagaacaacaacgcaccatacactgatgctaagagtggcggctaggcatctatacatcttgtgtggtatctgaaaagtaccctatggtaaactattaccattcgcggctaatcgattacagggtttaaaacaggagacaagatgttgaacagcttctggtgactaattaccaaccgagtctaatctagtgaccacgttgatacggcactggcaatcgattacgcgcggctacctgctacttggaatcggttaccatttat

SEQ ID NO: 132257 - DNA, 325 bp, Glycine max
  unsure (1)..(325): unsure at all n locations
tgtngaacggcaacacatgatacatggtctggttttgtttggtgcacagatgaatagggagccccacagtattctcatgacacaaatgcagttatgatgattatgaaattttatgcggaagtgggcatgcatgcacctatgcggacactctagagtcatgattttatggtcatgtgaggctacggctcatgagtaagattctctatgtcagatcaacccagtgggaccgagatatggtcaattatcaatttgtgcatttatacgactacatatggggtactctggaaaattatgacatcattgacacttttggtgttcacacata

SEQ ID NO: 132258 - DNA, 431 bp, Glycine max
agcttaccaacatagagagacatatactaatatcagcagagtacatcacactctatgcatttcctttctctctacattggatggcacgagaatggttacgtgcattgctagacaatagtttcaccacatggaaacaatgtacaagtagcttcttaaagaagtatttatctcccatatagatggaccaatactacattatggacattgtaatattgtgtaaagaaagctagagagtctacctaaagcatgagagagattgctcgagatgattacaagctttccgcatctaggtatctccccatagaggctagtccacattttctatggtgaagtgttgtcacacaacaagacaagattacatgctgcttatggaggccaccttcatgttaaaccccctagcgacgccatcaagatcattatagatatgtgct

SEQ ID NO: 132259 - DNA, 413 bp, Glycine max
tattcacatactccgactgtgcttgaacttttttatgctttataacagaaacattacgcataggctaaagatcaagaggagctagtgggttaaaaccatacacaacttcaaaatcatcaaaagtgttagtggtcaaaatctgatttttgcaaaacaagatatatagtgactgtttatcacgaaacaacctcttgacctcactttttgcggctaaatagctctacctcacttcaagtgttgcactcttcttttgatcactctatctgctctcaagtgattccctctatctctcactctcaagtgtcttgctcactttatcattttctttctctttcatctctagaagaagaagttctctcattttcttttgatcctcacacacttcttgtggactcaatggcatgaacacaatc

SEQ ID NO: 132260 - DNA, 405 bp, Glycine max
  unsure (1)..(405): unsure at all n locations
ttttttgagaaaagcctaaagttgattcagatcagagagagattcagatcagagaagaatcagagacttccaggtagttttgaaagatttttcaaaaacaaacatagcacacatttgtttttcaaaagaagttttctcanaattntctaagttaccaaaagttttactctctggtaatcgattaccaattacctgtaatcgattaccaggggcaaagtttgatttaaaagcttttaactgaattngccacattctaattgattttttaaatggtgtaatcgattacaatatattagtaatcgattacatggtgttggtaatcgattaccagtgacacagtttgaataaaaatcaagagatgtaactcttccaatgggttttanggttttctcaaggtataactct

SEQ ID NO: 132261 - DNA, 446 bp, Glycine max
  unsure (1)..(446): unsure at all n locations
tcgtcctcagagggaacaacaccagaaatttagccttttattattttagcgaanaacaaaaaatgcaattgaaactaaagacagaaacataaatggaacctgaaatagaaacgagaatgaaacgaatgcagaaacgtaaatgaaattaaatgcagaagaagaaataaaaacgaaattgctattagaagtagagaatggaaaagtgcattatgtgaacagtaacaataagctccaaaacgtaaaaaccctaaaccttatgctctgaataatagcctaacagaatagcccccctttacacgtatcccaaggctgctatttataagggttactcagagtcactgggccctattacattattctggcccaaaatgaaataaacattgaacaacataaaataaaattgcaatctcctaattaaaaattaactaagggtaatggtgctttat

SEQ ID NO: 132262 - DNA, 474 bp, Glycine max
  unsure (1)..(474): unsure at all n locations
ctgcagcttaaggatatatgaaatttgaacgtgttacttttngattaaaggagagagaaagggttagaaaagtttctagtggcattgttcactatccaatcaggcagaggccaacagttccacgttgccacttctttctacaataacgtctttataaatttaaaacgaaaatgacatatgctgacccttataacaactttaaatgattcatttttttagtgagattaatgaaataaaatatcacttggagattgtatatatctgcatcttcggtttcaagcatttgttatcaatggcgttacatttttttttaattactcataataagtacatgctgaaacttaaagaataatttttttaagtattaacatatatttaaggattgatatctctcaacaacaaatgcacaaatntaataattgaaaccatgtntaaagtaaaggttatgtattaataatatcattaatttactta

SEQ ID NO: 132263 - DNA, 425 bp, Glycine max
  unsure (1)..(425): unsure at all n locations
gagaactgtggttagttggttctgttgtttatgatagcgngnttttcatggaatttagcttgcggtggagtgcattttttgctcaacgtgtatccgctttgtagagtgttgtccgcaagaggggcttactggtttgtacattgtttgtagctatgttattgtgtttgtttttaatatattatgtgcatttattgtcccatgagtatttatttttactcataacctttgcacgctttcgttacagagaagctgtggtctgggcttgaaaattttgttttcgactggttaataaatgctgacaggtaatgctgtggtagatggtagtaagaccactgtagcgtgctcatagttaatataaatatattttataataaaactatagtcactgccaaagcaattgggccagtcactgaattatgtaatat

SEQ ID NO: 132264 - DNA, 417 bp, Glycine max
  unsure (1)..(417): unsure at all n locations
ggagaatgggaatggatgtatacatgattntgatgatgtcaaaagaagaatcaaacaaggctcattttgcttcaagattaatacaagattgtttcaacaaacaaagccttgattcaagatttcttcaagatcaagccttgcctcacaatgaaaggtttcaagtcattcaaggcacatgtaatcgattatcaatacatgtaatcgattaccaatggtttgaaagtgtgtaatcaattacacatcatatgtaatcgattactagagactntgaacgttggaaattcaaatnttaaatgaagggtcacaactgttgaaaaacaactgtgtaatcgattacactaattctgtaatcgattaccagagaggatgttcaaggaatatcgccaacagtcacatcttatcatttggattttgaat

SEQ ID NO: 132265 - DNA, 441 bp, Glycine max
tttgaaatcaaactttgccactggtaatcgattacatgttacttgttatcgattaccagagagtaaaaactctggtaacttagaaaattttgagaaaaactcttttgaaaaacaaaattgtgctatgtttgttttttgaaaaatcttttcaatacttcccttgtgaagtcttcttgatttcttctcttgaatcttgaattcatcttctcttgaatcttgaaatcaaacttctcttgattcttgaatcttcttgatttcttctcatgaaacttgaaattaatcttgatcttgaacttgttgactcaatcttgaaatcattctttggactttttgtcatcatcaaaactacttgaatcaacttgattcatcatcatgtagcttgcttctacaagtgtcatcttggttaaattttagctgaccagaattcaatctacataaatg

SEQ ID NO: 132266 - DNA, 408 bp, Glycine max
  unsure (1)..(408): unsure at all n locations
agagcangnngggcccacaacccattggccaagggctatatccaactgaaaaatttcagttaatggagaagccctgaaccccacatttaggacattatgcgtgtgtcttaacaaatatttctaacttaatataatagtattactttatactttaataatatttctatatattttttataattgcgcgtctaaaattaagtgattattatcaacatatgtaaaaaaaatgacttttactaaatcaatttatttgcttttaatcaaactgaattctacaatattaaactatccaaaattaaggttggacaaaaatgttaatttgtggtaacttcagtaacttgttttcgtaggttgaggcattgtcctttacctttccataccaagtcaaaggaaaaagatgaacaaaca

SEQ ID NO: 132267 - DNA, 433 bp, Glycine max
tctaaactttatacaagaatgaagctctgataccacttgttttatctgggcctcagatatcttaagaaggggggttgaattaagatattgcaaactatttccccaattaaaaattctatttcaatttcaatgcaagttgcaagttcccttaaaaatgaacttttaaataatgattcaaatagaacaatctgaatataaatataaatcaataacaaataaacaagtttaagggaagagaaaatgcaaactcagatttatactggttcggccacacccttgtccctacattcagtccccaagcaactcatttgagagttccactatcttataaaatccttttacaagttctgaacacacaaggacaatccttcctttgtgttcagatttctgtacaacaagagacccttgatctctcaatccctttgagatttat

SEQ ID NO: 132268 - DNA, 467 bp, Glycine max
  unsure (1)..(467): unsure at all n locations
agctnggtacagcananagcttgagaatgtttaatagaagatcactaaactgaaggtaagtacatgatgagcttgctagttgctaatctcatcgatcagtagcaatttatatggatattaactgtttgagtttttctgggcatttttaggagagggtacaagaactggagacattaactgaagcaaaagagaacgaatatctgaggtctctgaaactttctaaaataacgaagacttcaaagaatctcgaagaaggcatcaaatctgattctgatacatttgacagcttgcaaactttcatcaaaagaacaagcaaccgaatttcgacacccaaatctggaattgagctgactgcaaacgacagcagtaaatattttcaatctttgaagatagagaactccaatgttactaagaataaggctgtgaatgttagtaatggaagtaaaactaccttnttctcttgatat

SEQ ID NO: 132269 - DNA, 438 bp, Glycine max
  unsure (1)..(438): unsure at all n locations
taaggtataattcaaggatgtagtaacgntgatgtgattatgttaagaaaataacctttaaaatagagagttagtctagagtccttaaaacactcatgaagacattatgggatcgatcacaaaattaatttttttgttccattattgtggacaacacaaactccattctttcaacttgattttcttgtactataactacatctcttctcgaaataaataaataaaagatgtatttgggacaaatttatcattctagagactaaagtaaccgattacaaggtcttgtaaccaattaattctagtcacagtagttgtttagttgatactgggtttatcgtatcgantacatatagatttgtagtttgttaattcaaacctaggggctgcttctttgatctgacctctgttttaatcgatttcaatggctaaaactcagtt

SEQ ID NO: 132270 - DNA, 461 bp, Glycine max
  unsure (1)..(461): unsure at all n locations
agctntagtcatatttgttggatttttttatgtagtcaactgnaccttctatgatctttagggtctgcagcgacatgattatgatatattagtaagctcttaggcatatttgtatgtgattaattaaattacctgcataatttagtactagaataatttactatttggagagacttggtagttactctttgatcatgttggttatgaagctctcatgaatatgtagcacttgactactcatatttgagctactgagcaatgtgtaactgagcgtcaaatttgaaaagagtttgagaactattggcatgtcatgtgctggttcgttcactagacatcctatttgagattggttataagaagtagagatgggttaggctatataaaactaatgaaagttaaagcttacttagaagattagaaaataattaaatcaagcctagttttgttctaagtatattaat

SEQ ID NO: 132271 - DNA, 433 bp, Glycine max
tcttaaacgagatcagtatatttattggcatttattattgttgaagatattgtacgtgatatcttctggtgtcatcttgatgtagtgaagttatgcaatgcttgtaatttggtatttttgatagataatacctacaaaacaaacaggtacaagctcccgttactggactttgttggtgtgacaccaatagagatgatattctctgttggttttgcttatttggagggagaacgtctaaataatgtggtatggactctagaatagtttcgagatatttttctaagacgtgatgccctccctagagttattgttactgacagagacctaacattgatgaatgcagtgaaaactgtatttcttgggtgtaccaacttattgtgtaggtttcacatcgacaagaatgtcaaggcaaaatgtaaatccctaattggta

SEQ ID NO: 132272 - DNA, 463 bp, Glycine max
agcttgaaactacagcaacacattttctatgtgttataacccctcaattcaatggcttttctaggtttgaaaggtggaatttagaatgaggtaacattggagcaaattctcacctcacacaagtctataacatcaatctaaacttgctcaaactggatatacacctaaatttccaccgaatcaaaacttgactcctcaacacccaattttgccctagaaatggctcttggatcactttggtcatttgtttatctctctagctcagcctaacctttctcacatgtcctaaatgacatttcaagctagtattaactcactttaacctccatgtaccacagaattcagacttagtcttccaactctcaaggtctcactcattttccactcataacatcacattctcactgtctaaccctaggttatgtctacccttcatctctaacagttatccatcagcaatttc

SEQ ID NO: 132273 - DNA, 444 bp, Glycine max
  unsure (1)..(444): unsure at all n locations
gcttatgcgcatattaccttacgaacgttctcttgtttattatatttattaaccgaaaaaaaggcacccatattcaatcaaggcagctttcttacctacattatttacacgtacttccaaggcgtatttgttacttacatcacacacatctccttggctaaattcacatacatgcatactcaaagcattttggggtaccaaaaattgcacatgtgcacatcttggtatttctaatacctatacatacacaaacttcatgatgaatcttgactatctacacaataaggtgctacatttcatgctcttttcaagattttgctacctaaagccgcatgcaaattcaagtatattttcctttgctgactaanattgtatttcaaatataaggtatacatttgtttggcaatgaatacttctttacatacatgcaacatatttatgtat

SEQ ID NO: 132274 - DNA, 435 bp, Glycine max
acctataaaactcagcttgggtatccgtaaaggtatcctctacttttattttacaaacatcgactagaaaggatcttatatatgacttttaccttggcgctatgaaagaaatcaatgacttcaagttctttttttttataaaaaaaaaacatggtgactatcatgaaactttgagcttagaacatttttcaatctatttccatgagattttgaatgttataatacgataatctcttttcttatctattactcttactaaatggaatactttcatcaccaaaatcatttaaaattagaagtacattctaacattaatgatctgtcgtgtactaactcaggtgtctttccttttatgcttgtaagggcctcccaataccaattgctcgacctgtaaaatcaacttcgccaataccaattctaaatttcactctatat

SEQ ID NO: 132275 - DNA, 463 bp, Glycine max
  unsure (1)..(463): unsure at all n locations
agcttgcttggggagcttctatggttgctggatctttgagcttcaatgaagtcctttaatggtgattttccaccatggagatgcagnggaagacaaaggagaagaggtaagatgcggcgccatccactatggaataagccatggaagaaggagcttcaccaccaagatgagccttggataagaagcttggagaggatgcttcaatggaggaaaaganagagggagagaaagagagaggggggagcacgaaattgaaggaagaaaaagggagagaagttgaactttgagttgtgtctcacaagattctcattcatcaaagatataacaagtgttacacatgcttctatatatagactangtagcttccttgagaagctntcttgagaaaacttccttgagaagcttctttgagaaaagcttcttgagaagctagagcttagctacacacactcctctcataact

SEQ ID NO: 132276 - DNA, 430 bp, Glycine max
  unsure (1)..(430): unsure at all n locations
actaagcgtgaacaaaaatgatcccacaatgctgcaattatttgaaaaaaaagggaaaggtnaaattggcattttgacaaaatactgggtgcacctagcaacagaagatgctgctgtaattacacaatttcaggggatgctgctgtaatttgtggaaggtgaaccaaatggcaaaatcacgtgattgtggaaggagaaccaaaccaaatgcttctttaaattttattatttattgggcatcgcaccacccatatctgacagtatcgngaccttgttgctagcctgttcctgtcctagtcgatgcggataagtatcctatcatacactcttccacatcaccttgattcttcctttttcctttcaatagtcatcgagataagaacaaaaaattacgatattacattcaccaatttgtcttcagatcacagaa

SEQ ID NO: 132277 - DNA, 421 bp, Glycine max
agcttgtcaaggattaatttactatctttattattcaaatcaatgtacatgaaagactagaaagtcatttggttgtaaatgcaattattatattatctttaaaatagtaataacaaattgcaaaagaaaacattatcaaaagaataaaataaatgatattatgatattttatttaaaacgaggaaaaatataattatcttctcagtagctatgaaaaaggaaataaaatatttcatcaaaattaagaaaaatataaatagcactgaaatattatttattatctctaaaaatcaaaccttatcaataaaataaaagcaattactatagtattataaaatataattttatactaaaaaaatatttgaaaaaaccaggggtaaccttcgtctccgtccctggtaaaaagtccattcacggactt

SEQ ID NO: 132278 - DNA, 419 bp, Glycine max
  unsure (1)..(419): unsure at all n locations
ngcttcttctggtgcatagaatgcgggtatattttatttattgtcatgaatctctgacataagctttaaccaattaacattgtttgaatgacaactgttgtagttggactgcaatcacatagtttgtccaccatggtatgatttatgttcctattggttatagttttggtatgctttatgttcctattggttatagctttggtgctagaatgttcaatttggagtccacaagaggaggatctccatatggtgctggagtttttgctggagatggtacaagacaagcaagtgaaatggagatggagcttgcagagtatcatggcaagtatatatgaaattagcccataaaagctagattggattctgtgattaaaatttcattaagcccttctagctaggtcagcattctagtctgtccc

SEQ ID NO: 132279 - DNA, 476 bp, Glycine max
  unsure (1)..(476): unsure at all n locations
gtcacctgcggcatgcaagctataagaacaacattgccttaatcatttccaaatatgcatgngaattaagacgcatcaacaagaatcaagccaaggctattgtgcaagcaatcaatggggcaaaacacaccaaatgattataatgatggatggctcaaattctcacaaaggtaaaatcatcacttttaaattgagctttcaaaactatcatgacatgtagagaagaatcaaggatttcaagtcacaaaatgtcaagaacttttattttcaaaacaattacccatttcttgaacatatcctgtaattcaaagaaaaacatgcaaagtcgtacgtgcacatganattgacccaaaatattaaactgaaaatccgacgaaactaacaacattaacaaattaacacaactaacaaattaacaaaaccaacaaaactagaanaaccaaagaacacttccccccatacttaaacaacacatt

SEQ ID NO: 132280 - DNA, 425 bp, Glycine max
  unsure (1)..(425): unsure at all n locations
tccagaatggtataccatgctacagctgctccggccattctgtcttgaaagaaatggaccaacaatttctcgtccgcagaatacgcccccatctttcggcaatacatccgaagatgccccttcggacatgtcgctcctttgtacttatcaaagtccggtactttgaacttgagagggatgacgatgttgggcacgagacataaatccgctaaatccgagaatgggtaattgccgaggccctcgactgctctcaacctctcttcaagcgcctcaatctttcccttatctttcgcaaagggaacagattcttttacgggtgtgggtgaggccggcgtatgacggactatgttcgggttgggtagttcatgcggagacggatctttgatgtggagcangggggcaagatgggtatctcctttcccatc

SEQ ID NO: 132281 - DNA, 349 bp, Glycine max
ctagcctgataaatgccaaaggaaatcgtgggaagtatggtttatgctataagcccactcaggcagatgttaagagaagcatcccgagaaggaagggcggtggtcaaagctcgcggttgaggcaagaaagtgaaggaagcccgccctgccacataagtagaagctttataagcgcgggtctgggagacgaaggtcaagtggtcgcaatatacgaagatgatgttccgagtacattggatttggtacgaccttgccctcctgatttccagcacgggaattggcgagtggaggaacgccccgacatttacgcagcgagcataatgtaaacctttacgggtttaaaactcta

SEQ ID NO: 132282 - DNA, 442 bp, Glycine max
  unsure (1)..(442): unsure at all n locations
tcttatccaaggctcatcttggtggtgaagctccttcttccattgtttttccctaatggatggcgcctcctctcacctcttctcctttgtcttccgctgcatctccatggtggaaaaccaccattagaggacctcattgaagctcaaagatccagcctccaaagaagctccacaagcaagcttccatcaagtggtaatcagagcacaagagcttcaagtaggtgctccttaaacctccattaatttttttttctttaccttctcttccattgttgtttcttcatttttctccacgtatctcctcacatgtcttgttctaaatgttgttaacatgattctttatagtttccaccgattaaacttgctatagaaactagagttgattntctatggttcatatatctttgtcttgttcttgaaccatgaattgtgttgagtttat

SEQ ID NO: 132283 - DNA, 471 bp, Glycine max
  unsure (1)..(471): unsure at all n locations
gcttancaagctatctcgggcgagnattttctacattcttatatnganncccgcactctttccagaatgttttttgttttttaaccttctgtaatggttatttcggaagctgaaaaggaagtgcattccacaagtaattttaaattccggaaggaaaaatgaagtggagaaagcaatagccacgatctcgctccagtgttgtggactagtctaatttcttaaatgttgaatgagggaactaaacttgtcgcaaaattcttattatatgctattgtgaactaaacttgtcacagcgttttaaaaataaaaataaaaacttatcacacatccatctgaaataaacttatcatgttaatatactagagcaaaatatattaatattaggctaatggctgttccgcttcccctgttgctactagcactcctttagatttgtnttccctaacatacccaataaaatacacttccctt

SEQ ID NO: 132284 - DNA, 432 bp, Glycine max
acgagaacgatcttggaagagggccatagaagtagttctttttctatccgggagcgactaaaatgtaccaggaccttatgcagatgttttggtggccgaatatgaagaaagaagtttatgagtttgtccttgcatgcctagtgtgtcagaaagctaaaatagaacatcagaagccttcagggaagttgcaacctttagagatacctgagtggaagtgggatagcatctccatggatttcgtggtggggttacctagaacccccaaaggtttagattccatttgggttattgtagacaggttgaccaaatctgctcacttcatcccaataaacatcagatattctttatagaggttgactagcttgtacgtcagtgagatagttagactacacggtgttccttctagcataatttctgatagagatcccagat

SEQ ID NO: 132285 - DNA, 420 bp, Glycine max
  unsure (1)..(420): unsure at all n locations
aatangacgcatcaacaagaatcaagccaaggctattgtgcaagcaatcaatggggcaaaacacaccaaatgattataatgatggatggctcaaattctcacaaaggtaaaatcatcactttcaaattgagctttcaaaactatcatgacatgtagagaagaatcaaggatttcaagtcacaaaatgtcaagaacttttattttcaaaacaattacccatttcttgaacatatcctataattcaaagaaaaacatgcaaagtcgtacgtgcacacaaaattgacccaaaatattaaactgaaaatccgacgaaactaacaacattaacaaattaacacaactaacaaattaacaaaaccaacaaaactagcataaccaaagaacactccccccccncccccccatacttaaacaacacat

SEQ ID NO: 132286 - DNA, 452 bp, Glycine max
  unsure (1)..(452): unsure at all n locations
ctacgaaactcagcttttatccaggctcatcttggaggagaagctccatcttccatggcttattccctagngganggcgcctcctctcccctcttctcctttgtcttccgctgcatctccatggtggaaaaccaccattaaaggacctcattgaagctcaaagatccagcctccatagaagccccacaagcaagcttccatcaagtggtaatcagagcacaagagcttcaagtaggtgctccttanacctccattaattttttttctttaccttctcttccattgttgattcttcattgttctccatgtatctcctcacatgtcttgttctaaatgttgttaacatgattctttagagtttccaccgattaaacttgctatagaaactagacttgattgtctatggttcaaatatcttgttcttgttcttgaaccatgaatcgtgttgagtt

SEQ ID NO: 132287 - DNA, 466 bp, Glycine max
  unsure (1)..(466): unsure at all n locations
agcttagtttaagttagtctgaacctatgttttctgtctaaattatgcctaatcaaacaagagagatctgaggacgaagcttggattgattcaatctaactagggatcgaggtttagtaatttaggctacaacatagaacacaaaagcatgattgattagataagcatctttatatacatcagctggtttgttagaaagacccaacatctttacccactgctgtcaatcttacttacatgcatttttactgtttttaacctagacttagtttagttttgttctaaatcatcaattatcaatgttctttcaacaatgccttatttctgaatttaaccctgtctaagactaattccctgangtcgatactcggattcatccattttaattntaaatacttgacgatccagtgcactttctggcanaccggattttcctttgaacatattgtataaagaanaagtggac

SEQ ID NO: 132288 - DNA, 459 bp, Glycine max
  unsure (1)..(459): unsure at all n locations
agcttattgtttatggattgccaaattcttcattatttgacattattcttaaacaaactagtttattagaacataaaagaaagataaaatgtatgggctggttctatctatttatagaacattttgagtgaaattaggagattttaaagtttatgaaagcaatagtctgacttgtcttgctctgtttggttcatcattaggaaattgagatacttctttctaatgacggtgccaaagtcattttggtcatcgctgaatcaacagcctgcacaaaaaagataaataattggcaaataacataataagtacgagtctccaagcttcattagaatttgaaaattgtgctatgatcctaagattatattgataaatctgttcatttcttaagtagtctccaagcttcatggtttatcacacattcaatcttactatagcagaaaactctanataaaaattcta

SEQ ID NO: 132289 - DNA, 300 bp, Glycine max
  unsure (1)..(300): unsure at all n locations
ctaagctgcttcgcatngatntacccttagttgcactgtatttatttctcttttgaattaacaaagagaaagtccaatgagacacctcccattgattgtcttttcggtttattttactacaagatattttctgattattatattattattttacctatctttggtttccaacgtggttaccgtatgcccgaacgatcggatttcatcttaacagatcccatcggatcttacctctcaaatgtacgatgtgcctccattttatttcctgagtagcgctccaaaatgacttaagtaaatgac

SEQ ID NO: 132290 - DNA, 421 bp, Glycine max
  unsure (1)..(421): unsure at all n locations
ctcgnctctgctgatctttgcaaacttcagtctccgtctacgactcagcgcgtcgaatagttccagagcgaactccttagagtccttcatcccttaaaaaaaataaaaataaaacatacaaaactcttcaaacaaggagtaaaaatgacgacgacaaatcaaaccgattaaatgcacatgcaaaacgcacgaatgtgaactgatatttgaaaaggaatcgtacctatgcattgcgcaaaatcagtgcgatacagataaccgtccttggctagactatagaaattgctttgcacttcgttccaggcgtcaacgccattgggattactgctaataaatttcagtgcacggagcgctntcttcgtatccgaacgggtgcgttcaagctgagcgcgctgcttcctgagatctcgagctaccaacg

SEQ ID NO: 132291 - DNA, 395 bp, Glycine max
attgcggcggaggccaatccaccgatgggaatatcatgtcattgcgttatattaaaatcagacgctcgccaataaaacttgattcaaatattaaacatgaaagcaaaatagcgaagaagaggacccaatctgctatcaaaagtgatagtgtcagacgcaagagatgaaggaaaaaacatacttattgatctgaggataaaatgatggccacattttgtgatatttttgttggattctctgcatcatactctgaggataaaaagatgaagatacatcaacaactgtgaattcccacgacaataggataactgtcgcgtgttaaagcttagttaatgctgaaagccaaagaagttgaatatataaagaagctgtggtacatcacctattaaacaaat

SEQ ID NO: 132292 - DNA, 488 bp, Glycine max
  unsure (1)..(488): unsure at all n locations
gatacttaactcacctgcggcatgcaagcttctagcacactccagacagctggcttttatattccaacggccaaatcatgcacaattgtcttgtgaagttgcaaaccaaatttggagaagatccaacggttaacgaaggctgggcagcgtttttaccgaggcagcttcatgtagatttctctagaagcttcattaagaggcttcctccagaagcttcattaagaggcttctagcacactacagacatattctctaagatctcaacggtcagatcatggacaagtgtcctgtaaagttgcaaaccatatttcgagaagatccaacggttaacgaagactgcgaagcatttttaccaaggcagcttcatgtagctttctctagaagctacattaagaggcttcctncagaagcttcctcgtggcttctttgagaagctttctcaagaggcttatttgaaagctagatcattatctatccacaccctctat

SEQ ID NO: 132293 - DNA, 443 bp, Glycine max
acctatagaaactcagcttgactggccctgcgacagtgagactaacatagttttctatataactagatttgcgaagactccattaaaggtaagacctctgcccgccaaatattgttttccttccatgatcgcacaatgcttaacctagcgtttagtaatgcatatgctaccgctgaccacctatttgtgtgcctttgtgattgccttgtagaacgtacttagcatattaactccaacgataatagtttgacgaacacacctagattacgtatgtctagtcttttagatagtatgaagacaaactagtttcgtgtttatggcagaccttacggacaagaatagttcctctttatagtcacacctgacaagtgaaataacctgtaggtggaacacaatatataatccacttttgctctgttgccctaggtcacaaacaactactc

SEQ ID NO: 132294 - DNA, 136 bp, Glycine max
agcttgcattgcgcagagcgaagttacctttcctttattacgaagcagacccgacattctagagcaccctatcgcgcgtatcccgaccaacatactcggggggcaaccagaggaacagctcttgcatacaacacca

SEQ ID NO: 132295 - DNA, 489 bp, Glycine max
  unsure (1)..(489): unsure at all n locations
acccggatccttaagtcacctgcggcatgcaagcttcgaagttctcctcgttgattatttttaacatggagagccaatctaaccctcgtgtatgaactcttaaccattcatgataacaatcgatgatgccattacggatgcccctaagttctttatctttccttaacgggctttcccacgccttgtggactctttgtacaatcttgagactttgcgcaccgaaatctctcacaaggaaaggcgagaggctctcttccgtcggtgctcccctcatggggtaccctaactgtcttatggcaagtgtgggattatagttaatacaacccctcgtccctatcaacgggacgttngggtagtccccacatgagaagagaactccctcctttccttccttccatcgaggaaaccagttgattgtgctgccttctatcccagccaagtattggtcccaatctactcttctctnttcgacgcatgagcgataacttt

SEQ ID NO: 132296 - DNA, 435 bp, Glycine max
  unsure (1)..(435): unsure at all n locations
tcttatccaggcactctcttggtggtgaagcttatttttccatgggttattccctagtggatggcccctcctttcacctcttctcctttatcttctgctacatctccatggtggaaaatcaccattgaaactcaaagatctagcctctatagaagcttctcaagcaagcttccatcaagagcctttgggaactttgtttgatgttgcttcccatagatgcaatgctcacaaaatgaagaggttccaccttgtgatttccaaggaagcctcgattgctcagaatatctagacctttttcactcatgtggcccagatgcaaataccatagagaattatcagatgagctattggatgcatggcttttagaacttcgtcttccatcttgacatcaatgtcacgtagctccatcagaacagagnttaactcatcaagatg

SEQ ID NO: 132297 - DNA, 412 bp, Glycine max
  unsure (1)..(412): unsure at all n locations
agcttgncttctttggatgctgttttgtggcaagaagccattaataatgagatcgattctttagaatctaacaagacctgacatttagtagacttgcctcctggctgcaaacctattagatgtgaaatcattgttgtgtaacaactntgatatgaaagacctcggagaagcaagtgtaatccttggtattaagattactaggtcataagagggaatttctctggatcaatctcactacattgagaagatcttaaataaacctgctagtacaccatatgatccaagtgtaaaattgtttaagaacactggtgaaggtatacgacaaactgagtatgcaagtatcattggtagccttaggtatgccactgattgtactagacccgacatagcctatgttgtgggattattatgc

SEQ ID NO: 132298 - DNA, 421 bp, Glycine max
  unsure (1)..(421): unsure at all n locations
tcttaatangnggagctataacggatgttatattttgtatttgacgataacaacaaagcagtcgggtgaggctatacagattaaataaaaaagagaagattcaattatcaatctgatgcagctactattaatggtatcgctgcgtctgtgtgatctgcttagctctacaaatatagttataggttttaagagaattataattattgctagttaaaatttaaattatgacttaatatacataaaattaaaaataaatttactttttacttgttcactttaaaaataaaatttgcattctttttgtgccaaaatcaatctctaacaattttcaaaggggatttgcggatcaaacataaaaaaaaaattagcatattatatacctaacaaattgacaacgattaagtaatgcgcaatcctatcc

SEQ ID NO: 132299 - DNA, 458 bp, Glycine max
agcttaattaaacgaaggtccagtttgttttatctcctttgctttgagatatattgagaagtaaaagaaggtaataggaaaattagatgacggataaactatttctaatatacgaatgaggaagaaggaaacccagatgaccgaagttgaagtatcttaggcatgtgtcggtttcgtgataaaagcccacatcgagcagcttactaagttaaattaaactctgacgctataaaataagagagctattcttctttacaggcacggagtcgtgtggtaaatacaaagcgaactattctttcgccttttactaaagaataccgtgtatttgccactttaagcggcatacgcgcaatttttagcaagggtcttcttacgaggaccctgtcatttagtttaaaatatttaacttttaattctgtcaaaccaatttcgatgcgtatttattatgggtttgataa

SEQ ID NO: 132300 - DNA, 413 bp, Glycine max
tgcacataattaaataccaactcattcggccttttcttatctctttccccccttcactggaatgtatgaaaaatgagaatataagtaatatatatcatttcttatacatacaccaaaaagaaagttttatagttatggattgataaaaattaaacattttttcatgtaattttatacttatattcactttattcagtgactgttgttacgtagacttaaatttaaagtggactgcacaagcgattgatttttgtctcctctatatccttttttaccagctttcaattttttcttcttcatcatttgctttttattaccattttccaatagaaatatggaataaatatatggacaaattaaaatctcatgcaatttgacccgaatcaaatttacaatatttactgctcatgact

SEQ ID NO: 132301 - DNA, 460 bp, Glycine max
  unsure (1)..(460): unsure at all n locations
agctntacatggagctacatcatgtggtattatatttttctttctctaggngangntctgntgcttcctctatcattntattaggtcaattcactttaattccttgtttggtcaggttcatgtagctggaactggtgtcacaatcagtcaatactttggacaggccttacgtggttcgaacacttcatctgcatcaatcaccccaaaagaattgaaagaaatcataggaaatctaaaggaagggtggaggagagaagtagaagaggaaaacaaatgcagtttggagataatgaaaaaagagttgaaggaggcgataaaaattgagttatcccaaatggcctcgcaacactcacccccatttgagacaccggatacacacgtattagctacacgtgtcaccactaagggaagttgtgctgaagctattacaaatcctttagttgaagatccttctactatt

SEQ ID NO: 132302 - DNA, 436 bp, Glycine max
  unsure (1)..(436): unsure at all n locations
ngagggtccaantgctggaacacagagctaccactctcctcatgatatatgatgtagaatttataaccaaagactcaaaaaaagggggtcattccgaaacatctcctgtggttcttcaagaaggtgaaaaattagaagattccagtgcaaatgagtctcatttggctgttgaacctgatcctccacagctcaattctggaatcaatcagagactaaaaaaggtcactgaacctcccgaaagatacggatttaaagacatggatgcctatgcattacatgcagctgaagaaacagattcaaatgaaccagccacctaccaagaagctatcaatcatcctgaagctgaaattggttgttagctatgaaagaggaaatggaatctttacataagaatcaaacctggaaacttgttgaactacctaaaggaagacatgtg

SEQ ID NO: 132303 - DNA, 458 bp, Glycine max
  unsure (1)..(458): unsure at all n locations
agctntcccgctctggatctttttggctttctttttgactcccatacgaggtcgccaggttgaaaggctcatgattgaacctttatattgtatcttttggttggcaacttcttctctaatccttgtcatttcttggactttatcaatgatttcaagttccaccctcatattttcttcattttgttgttgctgaaataatagtctctttgtcgatgattccccaccttctatggggatcatggtgtctgtgccatatgtaagttggtaatgagtttcattggtggttgtttagggtgtacaatggtacgcctagagtatgttgtagagttcttctttccatatgcctttatacttgtcaagtctagtacgcggcgccctgagaatgactcgattagttgcctctgcatgtccgttagtctaaggatgttcaacagaggtgacaaggtgcttgatcccta

SEQ ID NO: 132304 - DNA, 440 bp, Glycine max
  unsure (1)..(440): unsure at all n locations
tctcagcttaccacttncgactaaacttncagctggagctcatatttctttttgtgctcggcctggtacgtataatttttcaaaaaattgctgtctggctttttgtttgcatatcctgtttttaactggcatgttcttttcttctgtaactgcaaaaaaatatttacttgttgagtggcttctaactttaataatctttaacaatttttaattaaagaatgatgcccattgctgattgcatgaacaaatgaattggaatccttccaatcctttgaataacttctcatgctatcatgcatgaggaatatagtgcaattttattcatatgccgacatatataaattcttgacccaatcaagtatgttattaacttattatctattggtatgaagttctgggttgaatgttacatttcatgtagaagagggtggatctgagta

SEQ ID NO: 132305 - DNA, 449 bp, Glycine max
  unsure (1)..(449): unsure at all n locations
agcttgtgaaggctgcatttatggcaagttgcacaagttaccatttccaaaaacatcttggagagctaaagcttcacttcaattggtgcatgctgatatctagggaccatcaagtacccccagctttggtggaagaagatattttctcctcttcgttgatgactacactcgaatgacgtgggtgtacttcatccaacaaaaattcaatgcattatcttgcttcaaggagttcaagaccctagtggaaaagcaaagtgggcattccctcaaaatcttgagaatagatcgcgggggagaattcaatgggcacatattcatcaatttttgcaatgatcatggcatcaagaaggagttgattgtttgtcacactccacaacagaatggtgtcgctaaaagaanaatagaaccattgtggaaatggctcgatcgatgctacaacacaagaacct

SEQ ID NO: 132306 - DNA, 444 bp, Glycine max
  unsure (1)..(444): unsure at all n locations
tctggttatcaattggagcatttcgatatattacgagactctngtggacatccgagtaaaaagttattgtcgtttgaaattgctcaaagcttgtgttctcaattttgagcgttacgatatataaaggtacctaattggacatccgagtaacaattattgtcatttgaatttggtacgaacatccattttcaatttgtagcatctcaatatattacgggactcaatcggatatacgagtaaaaagttattgtcgtttgaatttggtacgagctttcgttatcaatttggaatatctcgatatactacgggactcaattggacatccgtgtataaagttattgtcgcttcaatntactacgagcttcagttgtcaatgtgtagcggctcgatatactatgagactcagtcagacatccttgtataaagttatagttgcttgaaatg

SEQ ID NO: 132307 - DNA, 434 bp, Glycine max
  unsure (1)..(434): unsure at all n locations
agcttgcactagtcatatgtatgttacattatattcaaagcaaaaattgaatcgattattgcaaatataggaatacttaaacaaacctgccaattaggggttntgtggctttttgcaaattccgcccatgtttttggatcaaggccatacttgatcgtaggatcaaatatttgttgaccttcattgtcaacaaagacaaattttgaagtcaatgaagacttaaattgcctctatcttgctgcaactattgacatcaccttttttttttgcattctcacaacaaaaggtgttatgtaacagtaggtatatgaatcctttaaaagtaacataacaacaaaatcatgaatggaagtgtatttagaatgacttaccaaaatatatttccatattaaggtctttagatcgtcggggacaacattccaattcgcgtgtac

SEQ ID NO: 132308 - DNA, 460 bp, Glycine max
  unsure (1)..(460): unsure at all n locations
agcttagagtatgatatcaatgttcttgtgttgatggntgntcttttctgcactgtacaagcagatggagaagggaaaactgagatgcaaggcagtccaatttccaaagagactgcagcttctaataagatgttggcagttgtcactgctggtgttgcaggaacaatagttggacctgtagtttcttcaggtatgaccaccacgctggagctgagaaatccttccagtgttcattctaaagcaagtgccccacaaccttgtccagtattgcctgcagaaacttggttacaggtatgatctgcatataattcatcttagctgttcaaatcatatacacagtacattagaatattagatacatgtgtaaaacatgttgtaataataatgcagtatcctcatctttagttgacactaaagtaattctcttgtgggtatgtttggattcctcacaatgagcgtg

SEQ ID NO: 132309 - DNA, 436 bp, Glycine max
tattataaatatctataatgggttattatcgcattttatttgttatgaacgcaccccatgagttggaggcagagtaggttaggtctgaactgacggagcattctaaattgataattgagtatcacctttttttacattataatttagttttgacgagccatgattgaaatttttatagtgcttgtaattagagagaaaaaatatttcactaactattacagaagtcttttttttaaaaaaaaaactgtataatttaaaatttcagttatgttacattctttcaaatactcccccgttctaagaacatgactttgtaaggttaattgtatatagaattatagactaacaaacatttaataattataaaatgctaatgtaattagtttttaaatagattgtaagtgcaatatttatcgtaaaaatgaaacctaattat

SEQ ID NO: 132310 - DNA, 465 bp, Glycine max
  unsure (1)..(465): unsure at all n locations
agcttattcagaggacaacttattatcattcacagcctgcgagagtnggctcacaacaggctaatcatacctatggagcattttcttgagcaagtagcctggcctgaagctcaacttccattggtgagacccaatgaggctgctactcttgagcccgcaccggcatgagttgaaccaatgccagctgagccacgatctccagcggtgaatccacctccttctcctgagcttgaagtggttcccccatctccacctctgattatcatctccgatgaattatcgaatgaaacttctgcccttcctgattcatcagctggagaaataattgatccccttgattccccagttggaggaattaccgatctttctgattcgtcatctggagaagttactgctctcactgattccctagtttagacactattgacattgntgattcctaatgatgctnnttgcttttggatt

SEQ ID NO: 132311 - DNA, 435 bp, Glycine max
  unsure (1)..(435): unsure at all n locations
aactcagcttgtaccaatcggattctcctatccttccaagtttctattgtttcttacacaaatcacaagatttgttggtttgattgcacaatgactaacattcttttgtcttattgacagatacacaaattcaacacttagtcttttttcttaagatgaataaagtattttgaaagcttttttaaactttacaagaatttacacaaagagctttttataaaaaagaaattgaattatgcgcactttagttctatttcatgtcttcaaagcttttggtatttataggccttcttcaatcaagtatcagttgtctctaaatggatatattttctctcttaagcttgcgtatgaagaatgtgcccattggggcattaaatgcatgtactttntcatgctggaaaaccactctctgttgccagcgtattgaacactact

SEQ ID NO: 132312 - DNA, 451 bp, Glycine max
  unsure (1)..(451): unsure at all n locations
agcttgatggtgttgagaagatatcacttgtttgtcatcatcaaaaagggggagaatgtgaatgtatgtatacatgattntgatgatgtcaaaagaagaatcaaacaaggctcattttgcttcaagattaatacaagattgtttcaacaaacaaagccttgattcaagatttcttcaagatcaagccttgcctcacaatgaaaggtttcaagtcattcaaggcacatgtaatcgattatcaatacatgtaatcgattaccaatggtttgaaagtgtgtaatcaattacacatcatatgtaatcgattactagagactntgaacgttggaaattcaaattttaaatgaagggtcacaactgttgaaaaacaactgtgtaatcgattacactaattctgtaatcgattaccagagagggatttcaaggaatatcgccaacagtcacatcttat

SEQ ID NO: 132313 - DNA, 445 bp, Glycine max
gacctatgaaactcaagcttgaatcaacttgccctggtatcattacattatttggtaatcgattaccagagagtaaaaactctggtaacttaaaaaattttgagaaaaactcttttgaaaaacaaaattgtgctatgtttgttttttgaaaaatcttttcaatacttcccttgtgaagtcttcttgatttcttctcttgaatcttgaattcatcttctcttgaatcttgaaatcaaacttctcttgattcttgaatcttcttgatttcttctcatgaaacttgaaattaatcttgatcttgaacttgttgactcaatcttgaaatcattctttggactttttgtcatcatcaaaactacttgaatcaacttgattcatcatcatgtagcttgcttctacaagtgtcatcttggttaaattttagctgaccagaattcaatctaca

SEQ ID NO: 132314 - DNA, 452 bp, Glycine max
  unsure (1)..(452): unsure at all n locations
agcttattgaaagtgtggatcatctcctattatatattgctactataaagattatttaccttgttacctatttctaatttgccatatatggtaattagtctgttatttttgtattaggatattttttatagcaaatgaaattaatatatttactttttattttttcaattggctttttttgggttaatttttcaattgtaggatttaaagtgcaataaaataaaaaaacaataaaacatctgttaatagaaaaaaccgtcttagatttggataccttcaaagacggttattaaaacaaagaatctaagacgattttgtcctaataatcatttntgaaaatgcccaaatctaaagacggtttcgaggtccaactgatttatatgacattacattctatgacgatcgtgaaaccataattataaatagagacattntacacaacatttaacacg

SEQ ID NO: 132315 - DNA, 148 bp, Glycine max
tgaagtgagaaagcgagcaagagacagacatgctacttttgtttgctgaccacacaggttagacctggagatatgaccccgggggtaagataccttggggacataacgcggggtgccattcgtcataaccaatcttgaccaatcctga

SEQ ID NO: 132316 - DNA, 312 bp, Glycine max
attccacccaaacacacccttcttcaaacattcagacataggacctgctataatgctaacattctggattaagcgctcataaaatgatgcaagaccaaggaaagatctcacctccgaaactgttgcaaggctcggccaagtcatgatagcatccacgtttgtttgatcaacggatactccatctttatacaccacatatccagaagacaccacactttcaaccaagagatcacacttttccctcttcccatacagttgttgtgctcttacggtctcacatatttgtttcatatgagcgacatgctcctctat

SEQ ID NO: 132317 - DNA, 431 bp, Glycine max
tctatataagctgaaccatcttatcaataaagacaagtttagtactattcagaaaattggagtgtatctcttttatcttagtgagagtgattctcctaaattcttgagtgattcaagaacaccctggctgtatcaaacgactttcacaacctttgtgtgttgccctcgctggaaagagtgattcttttcttactttcatcttcacccttgttctttcaaaccacaattccagaaaattcacctctgcccagaattatctcgtggccataactcccattttacgcactcaaattaagtgattcttgagcctaaattgaatttcaaaacgagacctttcacctcgctttggaatcacctcatttggagtcctgtagcttcagctattgccatttctatatttctgtccagccatcacttaacctacgttttac

SEQ ID NO: 132318 - DNA, 454 bp, Glycine max
agcttgttgtgagaggtccaaatctatctataaggagtggacaatgatggataagacaaatccttggcctgactgctccaccttttatccaagatataagaacaaaatgaaagtcatctaaaatgatgagaatctttatcttagattgcaaccaaccccaaatcctctcagcaaaattgcaagaaagaaaaaaattccttttgtcttcatcattttgaccatagagaaagcaaattgaaaccaatgtgcatcctctatgccttaaattatcatcatttggaattttctcatggaggatcctccaaagaataaaggattttgagggaggaacctcttatgaccaaataagcttgaacagatgggtaactgggttggactgacaaaagtgcaagaaagctcacttaaaagaaaggacaccatcaacaaaggggcccctaattgagacatcaacaac

SEQ ID NO: 132319 - DNA, 404 bp, Glycine max
  unsure (1)..(404): unsure at all n locations
tgcaagcaccaacaagaccggacacctcttgacnatcntctttgaaacactccaagcaccaacaatagatattaactaggtcatggctggggttgaaaacgaaccaaactggatgaagaaagggtattactacattatccttgacggggaactctcttatagaggtttgacaacacccttactcaagtgtttggacagctatttagcagactatgtcatgcgagagttgcatgaggggatctatgaccttaacatatgggggcactccctagccacctaggtaagacaaagctggctactattggctgacacttaatgcttacaccctcaattttatgtaaaagtgcacaaagttgttacaattctctgacattgttcacgtaccctttgacgaccttcacaac

SEQ ID NO: 132320 - DNA, 424 bp, Glycine max
  unsure (1)..(424): unsure at all n locations
tatatcgagatgcctgaaaataaacatgggagcccattggaaaatcaaacgggcctaacttttgactcggatattccgattcaaggccaataaatatattcacgtcgcctcgaaatttgaacccaacgaaaagtctgggagaaaatccacaatgggtgatannacttttcacctccagatgtcccgattcaaagtgcatgggtatatcaaagatgctaaaaattaatcatcaaagcgcaaggcaaattcaaacggctataacttttgactcggatgtccgattcaagacaataatatattgagacactcgaaattgaacaacanagctctcggctaactcatatggcataacttttctctcagatgtccgattcaggcgcaaaatatatcgagatgctcgacattaaacatggaagcacatgga

SEQ ID NO: 132321 - DNA, 433 bp, Glycine max
  unsure (1)..(433): unsure at all n locations
tgtagaatggctagacatgatacatgtcagggtttggtttgcttaatgataaaagggatgccccacattatttccatgacacaaatgcaaaaatgatgatttggaaactntatgcaaaactggtcatgcatgtacctatgcggacactcaagtgtcaaatttttatggtcatgtgatgctagggctcangattcatttcctctattttaaatcaacccaatgtttccaaaatatgttcttttatcaatttgtgcgttcatccgagtccatttcgggcgtccggaaaaatttcacagcattcacctttcaggtgtagacacattttccaaaaattggttatgatcaagtgaatttttcaaagaaaaagttggaaatcatctcttttcataagcatgtcggtttttcagctagacaacttatttttctttttcca

SEQ ID NO: 132322 - DNA, 482 bp, Glycine max
gtcacctgcggcatgcaagcttgtagtccacgattgacgatgggtgcagaattctatgtttgtctctgcgtcctatcaggcttttcgtcttataaacagcaaaataaagtttatacggataaccactcgggtatttccgcctgttaggatgactcaaatgtctgtatgacagatcttgtgagcgcggaagatgacgtaaatctccgcatgtcaacgggcttgtccgccacgattgacgaaggtcgcagaagacgacgttagtctctgcatgctatcatgcttttcttcttacagacagcaaaaaggaatggttatacggataaccactcgggtatttccgcccgtcagcgtgactcaaatgtcagtatgacagatcttgtgagcgcggaagatgatgtaaatctccgcgtgtcaacgggcttgtcggccgcgatggacgaatggcgcagaagaggacgttagtctctgcgtgctatcaagct

SEQ ID NO: 132323 - DNA, 451 bp, Glycine max
  unsure (1)..(451): unsure at all n locations
tgacctataaatactaagcttgagaatggctagacataatacatggcagggtttggtttggtttattgataaaaaggatgccccacattatttccatgacacaaatgcaaagatgatgatttggaaattttatgcaaaactggtcatgcatgcacctatgcggacactcaaatgtcaaatatttatggtcatgtgatgctagggctcangattcatctcctctattttaaatcaacccaatgtttccaaaatatgttcttttatcaatttgtgcattcatccgagtccattttgggtactcgggaaaatttcacagcattcacccttcaggtgtacacacattttttttccaaaaactagctatgatcacgcaaattttctttaaagaatagtcggaagtcatctcttttcacaagcatgttggtttttcagctagacaacttatttttct

SEQ ID NO: 132324 - DNA, 424 bp, Glycine max
  unsure (1)..(424): unsure at all n locations
tcccatgtgctatgctataaatagaaacatgtgtaccacttgtcataactttgatgaatgagaaacttgtaagacacacttcaaagttcaacttatctctctattctccttcaatgtccatgccactatctctttctctcattcttttcctccattgaagcttcctctctaagcttcttatccaaggcactctcttggtggtgaagcttctccttccatggcttattctctagtggatggtgcctcctctcacctcttctcctttatcttccgctacaactccatggctaaaaataatcattgaaccttatggaagctcaaagatctagtttccacagaagcttctcaagcaagcttccttttgtggtgttcctgaattnttttaaaacatttttgaggtagttctccacttttgtatcatttc

SEQ ID NO: 132325 - DNA, 464 bp, Glycine max
agcttctagccaaatagacttaccttgaattaatttctttgatagcccttttgagccttgtttccctttccttgttttgaagctcactacaagccttaagtgaaaaaccatgatatcaccatatccttaaggaattttggagctttggaattgttttgggaataagtatggggggtttttgtttcattggacaacttgttttgttggctatgcttcatgatgtattttgggccatacttgatgtacattgtatattggttaaattttggacatgctgaatgaaatgttgtttctcaaaggctatagagtaaaaaaaatatatatattcgaaaaaaaaaatcgaaaaaagaaaaagaaaagcaataaagttgagtgaataagatcttaaatggcacaagaatgatgaaactcttggttctactcttcatgtttaaattttatctttaccttcttttaatttctta

SEQ ID NO: 132326 - DNA, 427 bp, Glycine max
  unsure (1)..(427): unsure at all n locations
gtgcggatntggtctttgtcagtgaaaggatcaatgtgggtctgaaaaaagggaaatttactcatcctgcttggacgaatgagaaaactggggcaaatgaagagggtgaggatgaaggagaagcctgtgctgtgactgccattccaatacagccaagtttcccaccaacccaacaatgtcattactcagccaataacaaaccttctccttacccaccgcccaattatccacaaaggccatccctaaaatcaaccacaaagcctacctaccgcactttcaatgacaaataccacctttagcgtaaaccaaaacaccaaccaagaaatgaattttgcagcgagaaagccttagaattcaccccaattacagtgtcctatgctgacttgctcccatatctactggataattcaatggtagccataaccct

SEQ ID NO: 132327 - DNA, 454 bp, Glycine max
agcttgtaatcgattacacaaatcttgttctcgattaccagaggagaatttcagaaaataatttccaagagtcacatctgttgccatcaaaggtctatttatatgtgacatagaacacgaatttgcgaagagtttttgagaacaaaaaggtcttatcctctcaaaaaaagaaaaattatcttatcctcttaaaaattccttggccaatacacttgcaattcaataaggaattattttgagtgctccattgttcaatctatctctttcaagagagatttcttcttctcttcatcttatttctaaaaagggattaagagaccgagggtctcttgttgtaaagcaatctgtacacaaaggaagggttgtccttgtgtggttcagaacttgatgcaatactaccccgcaagggcattggatagaagactccaagaagattgagccagagatgcaagag

SEQ ID NO: 132328 - DNA, 454 bp, Glycine max
ggacacttaaatctaagctgacttgcgagggatttagccttagtttactttatttttattcaattcaattaagaaagagaaatcccaaagagaaacgtccgattgcttttttttttggtttattttactaaaagatactttttgattattttacctttttttggtttccaacgtggttacggcatgaccgaacggtcggatttcattttaacaaaaattaacggatattacaaatcaaatgatcggtggaaatttattttattttttgattaggcgagaaaatgacttaagtaaatgactaaagcatgtcaaaagcgggtacggaaagttaatgaaatgaaaataaaagcacacgaaacaagtggggaccaccaatggtacatagaatgaattgaaaagttcgaattctggaacttaccggttgaagaccgaagaacgacgaagaacgaacgac

SEQ ID NO: 132329 - DNA, 465 bp, Glycine max
  unsure (1)..(465): unsure at all n locations
agctntgaggtaagtatttccttgacatttttaagccatcggaaaatgctaaactagagtttgtaatagttgctagcaacatgctcatcatagtataaagaagactcatttctctgaagtatttatttgtctttaggggaactttctttctagaaaattgttataattttagtttgtacacaaaaatagtttagctaaataataaaaattgttaatacgaaagctctaccttcatatctcatatcaacggtctcatgagtgaataataagatgtgttccaaggagcctaacatctaaaatgttttagtagtctatgcttgctaacttttttggtgtctctctatgtttgctatattctaacgtaaaatttaataactccttatttgctgcctgcagaggcttctctggtacatatgtaaaagagtatattgaagcatcaaatcctgtatttgcccttggagaata

SEQ ID NO: 132330 - DNA, 428 bp, Glycine max
atgctgcatttcggtatcagctcctcttattgaagaacgatatgcacttcttgcattgtaaaattgctttatcgtggtgcaactgtcggcattgtgttccttcaacgttagcaagatgtttttcggtttcaccatcgactttgtcatatcagcaataattttcttttcttccttagtcaatcgcccgacgtatggatgtccaactaaggacttcaccaattcatgattatgaatcccacatatcaacttcaccatccaaccttcccctccatgcactggtttcccacgaatcctgaagggacaaccacatttcctactcccggtgtcttttctaacgaattctttatttctacacttgtacgtaccactccttttacacccaattaagataaataaacttcttcctctgctaccggtctctgtgtcag

SEQ ID NO: 132331 - DNA, 465 bp, Glycine max
  unsure (1)..(465): unsure at all n locations
agctngtntgatcaaatcaagaagtttcttatgtaagattattttgataatagctcatagcttagaagttattatattatatatataacttataaacttgcaacgtttttctttttcttccatttttacattagtagtgtgataaactttattttttaataattttttgcattatcctttctaactgttttaatacacatccctactattttgaatttttcataaaatatttgatctttaaaaatataaagagtttaaggttaatacaaaatctaaaactatagttgcctaaaagtatttttttttatctactaaaaaatagaatttatacaaaaatttatataatgggcgaagcatatgctttgagtccatgtaattatatttatattattaattcttcatattaacannattttanactgtgaaaaatatctatataatcacttagtggtgttgtgacttaca

SEQ ID NO: 132332 - DNA, 434 bp, Glycine max
  unsure (1)..(434): unsure at all n locations
ttgatgcannaattggagaggttaatgaaacaatgagttgatgcgctccatgagaggttggatcaaatggagaatagagatcataatgaagaagaaaggaggagaagagggaataatggtgttcctagacaaaactgaattgatggtattaaactcaacattcctccctttaaaggaaagaatgattcagaggcctacttggagtgggagatgaaaatatagcatgttttctcctgcaacaactatgaggaggaccaaaaggtgaagcttgccgccacagagttttctgactatgctcttgtgtggtggaacaagctacaaaaggagagagcaagaaatgaagagccaatggttgatacatgggcggagatgaaaaggatcatgaggaagcggtatgtgccagctagttactcaagggacttgaaattcaagct

SEQ ID NO: 132333 - DNA, 459 bp, Glycine max
  unsure (1)..(459): unsure at all n locations
agctntttatgaaaggatgtgactcttctcttattgaattgaattccaacgttcagatgcactggtaatcgattaccaatatcttgtaatcgattacaccattttgaaatcaattggaacgttgcaaattcagttgaaaacttttgaaatcaaaactttgccactggtaatcgattacaggcaactggtaatcgattaccagagagtaaaaactctggtaacttagaaaattttgagaaaactcttttgaaaaacaaaattgtgctatgtttgttttttgaaaaatattttcaatacttcccttgtgaagtcttcttgatttcttctcttgaaacttgaattcatcttttcttgaatcttgaaatcaaatttctctttgattcttgaatggttcttgactcaatcttgaaatcattctcttgggattnttgtcatcatctttggtatcatcaaaacaac

SEQ ID NO: 132334 - DNA, 436 bp, Glycine max
tgtccactcaatatttcttcaaatatagtaagtcatattcatgttcaggaatttcaagaagctcatatttttttacaatagctccttttgtaaagaacaacctgtatggatgcttgcaatatttttttttgtcaaaatctctttagtgtttccacacatggatcattttaacacaaataggaaggaagaggaaaaagtattaacacctataggaaggcaatgtaattttcctaaaataaattagttgtatgaaccatagtatatttacctgtgggtccttcatatgaatgaccatctttggattaacatgacgttcttgctttatgtcaacaaactgatcaatcacatttgcttaaaaaaagaagataataaatctaaaattgtcccccaaaagcatacaccatattttattctataatgattaatatgcaaatta

SEQ ID NO: 132335 - DNA, 461 bp, Glycine max
  unsure (1)..(461): unsure at all n locations
agcttccgtgttagcacttcaactcaccctcttctctaaccaaggcgtttcgattggaatcacaacccaccacgctgcacttgatggaaagtcttcgactttgttcatcaaatcgtgggcgcatttttgttctcagcttaatacctccccagaagaaccgttatcactaccaaagcatctaataccctcgtttgatagatctgttataagagacactttggggatcggtgagatttacgcgaactcatggatgaacttcggtggagccaccaatgaccgaagcttgaatgtgtgggattccctcggtggaagtcaaaccgatttggttaaaggtaatctattctaaacatcacatcgatatctcttaatttttttttctatatttcttcatggtacagaanaaattgttgcacagaacttgctatatagcacattaaaatttgatcgagtatttaatcatc

SEQ ID NO: 132336 - DNA, 435 bp, Glycine max
  unsure (1)..(435): unsure at all n locations
ntaagattactntttatatggtttgcaacaatttggtatatttggctcgcacaaaatgcattgatcattgttgaaaaaaaattgaatattgatgagttagttgaatccatttaaaattatatgaaaattgattgcaacaagctttgtttaagtcatatctttttatataatgctttactaagagtgttatttagtagaagtcttcactgccgctaaggcccctgtaaccaaatgggaataaatcatctttgcatgtgcacttccaccctccataattaatgtataaatagaatgaaacaacaatttgtataatcaggtaagcaaatgtacaaaaattaatgtataaacataaaagaaaactggggaagaataatgggtagttcaaaaatgtactatgaattacctttttcgtagttaatgtataaatgtataatt

SEQ ID NO: 132337 - DNA, 466 bp, Glycine max
  unsure (1)..(466): unsure at all n locations
agcttgtctcagcgtttatgcgatacggataccaacatgctagctatcatcgccaagtaccaagaagagttaggtctagccacggcccacgagcatagaatcgcggacgagtatgctcaagtatacgcggaaaaagaggctagaggaagggtgatcgactctttacaccaagaggcaaccatgtggatggatcggtttgctcttaccttgaacgggagtcaagaacttccccgcttgttagccaaggccaaggcgatggcagacacctactccgcccccgaagagattcatgggcttctcggctattgtcagcatatgatagacttaatggcccacataattagaaatcgttaggaaaacttgatggtctctcagaccttgactagatacgactntctttttgaaataaaatgagttggtcctatgtttctactccaanaagcttgtgcacatcaaatcactccta

SEQ ID NO: 132338 - DNA, 393 bp, Glycine max
tgaagtgagaaagtgtggaagagtcagtcttcctacttttattcgttgaccacagagtggtacctggagatatgtcacgggggtcaggagaccttggggacgtcaggtggggtgctattgcccaaaaccaagcttgaccaatcccgacccaactcgagcatagtcagtcagtgagaacctgtgacgtacctaaacaggcaagcacctggcagtcaaccgataaaagaacaaagaccacaaagcaaggaggcttgtgtggtggctggccagctatggatcttgagtgataattggaatatggcctctggtaatcgattacaaaagggtgtgtaatcgattacaaggcttaaaaatggggtcaggaagttgagatggcctctggtaaatcgatac

SEQ ID NO: 132339 - DNA, 456 bp, Glycine max
agcttttcaaatgggtaatatgctcacattcactttcttctacatcatattcaaacttgtccaaataaataataaagtcatctcgactcaaagaaagtcatataagtctcatacaattaatatagaacctatatcctaatgtcacatcctatcagagcatggtgttcccgcgtcctctagcatgaggttcttcatagtcatccacctattcatctgctcccccgaacacaaagttcaagatcatcacaggatccaaacacaaacagcaaaccgggagtgagttatcacattgctaactactagagagaaacaacacaacatatagtagccaaatacaatttacttagcatatctcacattatttcatcactttgtcattcatcaatcacactgttcatccatcaatcacatctgtcaatcatcaatcattatacagcgggaatcacacactccgat

SEQ ID NO: 132340 - DNA, 427 bp, Glycine max
  unsure (1)..(427): unsure at all n locations
tagaggttgccagtttgcgagaattgggctatttattggtcagctccaatgtcaagtcttccacaagacatatgggaagatttgggacctagctacaatagaagtctccgtggaagcaattgcctcccttactcaatattatgaccagcccctaaggtgcttcacgtttggggacttccagctagtaccaactgtggaagaatttgaagaaatcctgngatgtccgctcggaggaagaaagccatatctcttatcaaggttctatctctctatggcaagagtagcaagggtagttaaaatcttggtacaagagttggaccatgtgaagcaaaataggaatggngtagttggaataccaaggaagcatttggagggaaaggaaaaggcattggcaaatcaagatgaataggccgtcattattgcgtct

SEQ ID NO: 132341 - DNA, 299 bp, Glycine max
  unsure (1)..(299): unsure at all n locations
agcttggnaaagagattttgtttgtttatactgagaacaataacaaggacctaggaacttctcaccaatggagcgagacacatagcgaaattccacactgataacctcatagaaactgttaacgattccccttgccttacaaatattaaaggggccaatggatccaatcgaatcaatcctatacaaagctgactatggtgctcaggcctttcattcaccacgacctacactgatgataacagaatgcgtgatgtggccgccccccacctccttcaatcaaaccacattgttctcatcat

SEQ ID NO: 132342 - DNA, 324 bp, Glycine max
  unsure (1)..(324): unsure at all n locations
ntggagaatgctggcgatatataccgagatgtattattttttacctcatgcatcacctgtgtaacatgctgacatggtattaggaacctagtcatcactctctatgtgtgactgtgggctcacccaaacgagaagaggatgcctcctacgctggatgcagaatgtacttgactgtgcgcgaccatgaacccacatgctgtagtctgctgcgctaattgctgcatatattgcatatacagagacgatgtccttatccaacacctttttgcatggcgttcccaacgaaaaatgactgagacgtgcctataacaaatgcaccaaaat

SEQ ID NO: 132343 - DNA, 378 bp, Glycine max
  unsure (1)..(378): unsure at all n locations
ttttttgcattgaaaatacagttctagatgaaataaggattgatgaataaatgatatctcatttgttaatcaaataaatttgtttttttgttaaaactatatatacacnttactgttcattcttattagtgactctttgatagatcttatgttntaaaaatcctttctaaggttatctaacggaaccattctgcatttcaatgagagatatcatggtgtcaagaattgttcantttttatcatggnttgagcaaggaaagaatgacttgaagatattgtgatatgcacantttggtgtattcaatcatgtntcgatttctttctaagtttttaccttgattaaaggtatcaaagaatttatgtgagttctgatctttc

SEQ ID NO: 132344 - DNA, 425 bp, Glycine max
gctgatgtaaactggaagacccaacttactacatatttttatgaaccaaccatggattttgatttaaggaagcaaatgcaattgcggaagaataatagccaacatttttcagatctttcgttaatggccgggacttgttacgcatcctcattaatatagtagcatcgaaatttgcatatagcattgattctcggattcttaataagtataaagaccgtctcttgccagaaaacgtagaagcaattatttttacttccaattgaaagcatggcttttgtgattgtaattcatttaatctaaaaaatattaatattaaaattaaatctcattggacaaaaatatttaataaaaaggtttaccgcggtgaatttaatgtaattatcgtacttgtttttacccaaaaaaaatttgattggacaaaaatg

SEQ ID NO: 132345 - DNA, 448 bp, Glycine max
  unsure (1)..(448): unsure at all n locations
agcttggaggggttgatggngacccggttctgatattatactaggataagggctacgtaggagtgcgtgagcttagttgaaaggtgggcaactggggatggtgtgtttatgtttgatttgtggaagtgggagagttgatttgcaccattgcccgatcgccacctagtaccacatatgacgggtgccccataatccaataagcttgatgtgagaaagcgtggaagagtcagtcttcctacttttgtttgttgaccatagagtggtacctggagatatgtcgcgggggtcaggagaccttggggacgtcaggtggggtgctattgcccaaaaccaagcttgaccaatcccgacccaacccgggcataatcagtcagtgagaacctgtgacgtacctaaacaggcgagctcctggcagtcaaccaataaaagaacaaagtccacaaagaaa

SEQ ID NO: 132346 - DNA, 430 bp, Glycine max
tccacacattgcaaatgacttataatgatattctatccaaaaaatcagcatattagatttaggaaagcaatgtaaaattaaaagaacaaagtagaggctacctcgggtgataccttaaccactggcgatctctgttggatgatagtgagagcattagaaagggaatcataagctacaaagaagtgataagaaagagtagagaatttgagattaaaaagaaacaaataaaaagtcacaaaacaaaggagcaccttcatgaggaagggcaaggtctccttgaggaaaaggaaaagatccataagcatcattgccaacacaaggcaaaatgttaggatcatccaaatacccaactctctctgaacccattgatgaaatgaaaagatcttcaactagctgccttacattgccaattgacagagcaggctgaaaa

SEQ ID NO: 132347 - DNA, 440 bp, Glycine max
tcccatgtgctatgctataaatagaaacatgtgtaccacttgtcattactttgatgaatgagaaacttgtaagacacacttcaaagttcaacttatctctctattctccttcaatgtccatgccactatctctttctctcattcttttcctccattgaagcttcctctctaagcttcttatccaaggcactctcttggtggtgaagcttctccttccatggcttattctctagtggatggtgcctcctctcacctcttctcctttatcttccgctacaactccatggctaaaaataatcattgaaccttatggaagctcaaagatctagtttccacagaagcttctcaagcaagcttccttttgtggtgttcctgaatttttttaaaacatttttgaggtagttttccatttttgtatcatttcagcaaatattgtgaat

SEQ ID NO: 132348 - DNA, 463 bp, Glycine max
  unsure (1)..(463): unsure at all n locations
agcttgttagtgggaatatttgaaacataattcatttcttctcttaagttattgaggccacttgtccaacaagtggtatcagaacaggattcttgtttaaagtttaaaaaattcaagaattattatggcctcatctaactttccatttcctaagggaaattctattaataggcctattgttttcaatggtgagggttatcactattagaaagcccgaatgcagatctttatagaagccatagatttaaatacatgggaagccattgaaattggtcccttcattccgaaaatggtagtgggaaatgcaactatagaaaaacctatagaagaatgggatgatgacgaaagaagaagggttcaatacaacttaatgaccaaaaatataatcacttctgcattgggcatggatgagtatnttagagtctcaaattgtaaaaatgtataagacatgtggaatacatta

SEQ ID NO: 132349 - DNA, 437 bp, Glycine max
ttggaagcaatcttttattggtgcttacctcatcattcctgtttttccttcaacaaccaagtcaaacaatagagggccaaaggatccctttgtctcaaacctctttgaggcttaaattcagaggttgagcttccattcactaaaatagatatagaggctgatgtgaggcaccccttaatccatccaatccatctgtcatggaacctcattcttctcatcatatgaaaaaggaattgccaagacactaaatcataggctttttcgaaatccactttaaacaccaagcaggacctcttagacctcctagcctcctcaagtacctcattagcaaccaaaacaccatggagcaactgtctatccttcacaaaggttgtctgcctttcatcaatgagatgattcatgaccttgctaagccagttagccagttagctagtaag

SEQ ID NO: 132350 - DNA, 368 bp, Glycine max
  unsure (1)..(368): unsure at all n locations
agcttaatctactatatgaatgttccatttgaatgcttatagaggaagngagctatattgacacatggaggggtgttccattatctctaacattctcaacgaataacatatcgctgatttcttatcttcagaaactcgctgaaagaatgcttctgcatgactgtacctactaccatcatgatcaagcatgtggaacatttgcatgcactccatcgatatcatactgacgcgagacagacaaaacaaaatacagtaatctcaccctgcccatgattctatttcatgctcccaccactatatcactgtccctctactttgctcttcattgaaacctccttccgagctatttattcatggctcctgttgga

SEQ ID NO: 132351 - DNA, 393 bp, Glycine max
gacacactcactattttatgttagacagactacatgtatgaactcgcaattgtgttattcggtggctgattggaggctactgacttactacatatgtactgcctgttggcaacaaactactgaaagcatatccaagtgtactcttactaattacggatactaagggctgagttgcggacgatattctctctatggagagccactcattgtgcagactatgatatacaataggacttatggtgagtcgggactatgttcatgccgctgagaatatcagggaagactccaatactggctgacaatatactatatggcaactctcttaccaggtagctttactactagctggaccccacgaccgtcctactagatatgaaatgaaaaccactatag

SEQ ID NO: 132352 - DNA, 436 bp, Glycine max
  unsure (1)..(436): unsure at all n locations
agcttcctttcaacaatgagattatatttttttagatagaaaaatataagtagtagggatgtctcctccacctctagaaacctcacaatctctcaaaatctcatccaaagttctgcaagatggcttcctcttcaagttcagctttctctcagttgcttcacagccaaaaactctcaaaaaactcaactccccccctcagaaatcgtgatttcagcttaaataggcaatcctgtcggtggactcacgcttagcggaagatgaactcgcttagcgcgtataagtgacttctagcttagcgccagtcacactcgcccagcctgaaggtgaagacagtgcgcttagcgagttggccttcgctcagcgcctctatacagctcatctttcttccagaattgtccatgcgctnggccatcagatggggtgcttagcggataat

SEQ ID NO: 132353 - DNA, 454 bp, Glycine max
  unsure (1)..(454): unsure at all n locations
ggacctataaaactaagcttgtaaagaacttangaaatatcaagaacaagcttgttcttacatcgttcgcgtgtatgatatccactcgacaaggtttgaagtagaggagaccttcaatcctataacgcaacatggcggacaaaagtgggcagttaacttgaatggccattattgtcaatgcggaaggtattctacgcttcactatccatgttcacacattattgcagcttgtggttacgtgagcatgaactactaccaatatatagatgttgtttacacaaatgagcacatcttaaaagcatactctgcacagtggtggcctcttgggaatgaagcggcaattcctccttctgatgatgcatggacacttatccttgacgcaactataattcgtgcgaaaggtcggccaaaatcaacaaggataangaatgagatggattggctggaaccatct

SEQ ID NO: 132354 - DNA, 454 bp, Glycine max
  unsure (1)..(454): unsure at all n locations
agcttcatccgcaaaacccccttgtaagtctatgtttaacttaaacagcattatcatcacaacatattcagaaaaccaaaaccccacaatccatccctggtaatgtgtttatttagtcctggttctatcaagttctaaggcaacaatacattttccaatgctaaagtcacctaacagtacacacaaatgggtgatcaggccaagagcatgcagtaattaagcattgaaagaagcattgaacacacaaaacacaattaattagttatgaaaagtaattacatcaactattcattaaaaatcccaaactagggtttctagccagtcatacaaggaaaccctaacacanatgagatagagagtacaaaataattgttgcttacacaaggaggggatccctccttctcttcttggcacttcacaatcactcaaacactctctaatctctcaaagtgat

SEQ ID NO: 132355 - DNA, 430 bp, Glycine max
  unsure (1)..(430): unsure at all n locations
tgaaccataattngatgttgtaagaatatatttggtttatcatcctcttgctccatttggttcttcccatttagacattcgagtgccatcaaatgctgatgttatatgaaatttaataaaacagggacaactttatggatgctataaggcatacgtatggtaaacacataaaatagccagctataaacaaactcacaattcaaaaggcaactcctttgaacttgcaattgctgaaccaaaatgtattctatttaactttaaaagtggcaactgaaacatatatttcccatagatttcacacttgttaagattgcaaatcatgtcatccagagcatctaacgcaacaagcaatgctaaagaagttactacagggtcaccaaccaaacaaatgtcaactgtcccatctgtattcacctttatctctagcgaa

SEQ ID NO: 132356 - DNA, 475 bp, Glycine max
  unsure (1)..(475): unsure at all n locations
acctctaagtcacctgcggcatgcagctgagtatcatnntatttatcttattctaaatnnngaangnncatctcgtttatacatccggttgtaaacaccttccaaatgttattctaagtgtaaaacaactaactaatagttggaaacaactttcaagtgatattctaagtgtaaatcaacgtaaaacaactaattgcaaattaataaggaaccgaataaaaaaattattgtactacgaaagaccaactacatatatataaagctgattttcgcatcaagaaaggttagctatttgattattttacaacaatatttcttcttctctacaactgtatatctccagattaaccctatntattattaatacaaataaataatttgatacccctcttcgtaatttatcacataaaaccttatttttatttgcaccaaacgaatttattctgatataatcactctcacagactataaaaat

SEQ ID NO: 132357 - DNA, 428 bp, Glycine max
  unsure (1)..(428): unsure at all n locations
tctccccctatttgctataaataggggaagaagtgaatttttaaaagggttcagccccttaggcacttctctctctttcgaatttgctgaggaaaattatttccgtgaagaaaatccaagccgaggcgcttccgtaacgtttctgtgagtaattacgcgaagattctcgaccgttcttcaaagattcatcgttcgttcttcgttttcttcagtcttcaacgggtaagtacctcaaaccaagcttttcaattcactctatgtacccgtggtggtccacattttgtttcatgtatttttattctcgttttcatttactttttatacccccttttgacgtgcttaagccatttacttaagtcatttctcgcttaatctaaaaataaaataaatntccaccgatcgtttgaattgtatcatccgggaatttt

SEQ ID NO: 132358 - DNA, 458 bp, Glycine max
  unsure (1)..(458): unsure at all n locations
agcttgagctgaccgctaaacgaggcgtcttgctttacttgtcttgcacgctaagcgagatgcaatttccctccaaatttttgcatcaatttttgcatcaatttacctccaaaacacttgcaatttcccttcttttgaatcctgttggtcaagaattaaaatgatatcaaaatcctcattattctcttaaaaataaatagtaaagtagaggaaatctagtcattcttgtttgatttgactatcaattaaacctaaatttcacagttatcatgatgaagttagagattctaatgagttagatactcgagatggaagtgacgatgaaagtaatccaaaagtcaaatttcctcgatttaaggtgtctganaatgatgaagatgtaaagtttgaggtagggttgcaattcatcaataagataccaaatctagaggttatcaaaaccttnggtataatgtcta

SEQ ID NO: 132359 - DNA, 439 bp, Glycine max
  unsure (1)..(439): unsure at all n locations
tcagtcgaacaccacanatcaactaaacttggcactttgcttgttatatgtcactcatgacgttntagctccaatcttaattttctcatctcatagaatctatcgcccccgccatctatcttcatagaaaaaaccaataaataaaagctgcgtgcgattggttctttaagtcatatctctctcaccttgctaaaattctctttctaattcacaattttcttgtagtaattaaacatagcgagcaagcatattcatttcagcatggtcctcaaaactgattcagttaaaatgttttttttccccttcgtaggaggaggccatcagattccaatgatagacgcagcaagagtgtttgcatctcacggagcaaaatcaaccatcctagcaacaccctccaacgctctccacttncaaaactcgatcacgcgcgaccaacaaa

SEQ ID NO: 132360 - DNA, 457 bp, Glycine max
  unsure (1)..(457): unsure at all n locations
agctntacatcaatgctaagggtgtgattgtttattctacaanacaacacattacctgaaagttactatgaggcgaagatattatgtttgatgggtatgaagtatccaaaaaatcatgtgtgccctaatgattgcatactgtacagagatgagtttgaagaaatgcataaatgccccaagtgtggggtattacggtacatagtgaacgatgactagcgtagtattgatgaacggctccccagcaaaggtgttatggtatcttcctattattccaaaggttaagagattgtttgttgattaaggtgacacaatataccttacatgacatgcagatgggagaaactgtaatggaatgctctgtcattcgattgattcttccccaacaaagaaaattaatcatttgtatccagactttgtgaaagaagcaagaaatcttatgcttagaattgtcactaat

SEQ ID NO: 132361 - DNA, 446 bp, Glycine max
  unsure (1)..(446): unsure at all n locations
cgctggaggatcatggggtatccatcacatgaggctaattgttttgncnggcgatggcgcaaaacaattctgcacattcacaaatcacgtataaacccagnannnnnnnggtgcccacctcaactaagctcacgtactcccacgtagcccttatcctcggtcctctcaatgccgggtgcccatcaatcctcccaagcttccaaaaaatccaagtaatgtaacatccaagcatcaggaactatcacagccaagaaaacagggcagaggcagaaaactctgcccaaaacacaaaccaacatgacagcttttcacactctaataccccagtaatatactcttcggtccaattcgttaaccgatggattgactcgaaaattttactggaaggctctaacacataaatatacattatgaccgctgggatctgctagaaaacgtccataacc

SEQ ID NO: 132362 - DNA, 416 bp, Glycine max
  unsure (1)..(416): unsure at all n locations
agcttngaatgcactatttattgtagtttttcttaacatcttcagactgatcaacacttgcacagtggccaaagatgcatgggagatcctgaaaatcactcatgaaggaacctcctaagtgaagatttccagattgcaactcttggctacaaaattcgaaaatctgaagatgaaggaggaagagtgtattcatgacttccacatgaacattcttgaaattgccaatgcttgcactgccttgggagagaggataacagatgaaaagctggtgagaaagatcctcacatccttgcctaagagatttgacatgatagtcactgcaatagaggaggcccaagacatttgcaacatgagagtagatgaactcattggttctcttcaaacctgtgagctaggacctctcgatagggctgaaa

SEQ ID NO: 132363 - DNA, 429 bp, Glycine max
  unsure (1)..(429): unsure at all n locations
tggttcgaggtacttacccgttgaagatcgaagaacgatgaagaacgaatgaagaacgtcgaagaacggttgaaacctttgcgagattcctcacggaaaacgttacggaaacgtttcggaagcgcctcggcttagattttcttcgcggaaacaatttttccaagccaattcgaaagagagagaagtgcctaaggggctggcccctttcttcttcatttcctcccctatttatagcaaaataggggaggtggttgccgcccagctcgcccaggcgagcagggttgcttcctccagaagcaaccgccttctggaggaatcttctggagggcccaaatgggcctgggtgctatttgcacccccatttttactaagtacaccccnctctgctgttttctggtgattctttattcgtaaagttacggaaactta

SEQ ID NO: 132364 - DNA, 365 bp, Glycine max
  unsure (1)..(365): unsure at all n locations
agcttgacttcatnccattatcgtactgttgttgcaaatcanggctttgcaattgaatcaccaagtactattctttggcatactaaaaataaaattgttttgcaaaattactaacattttgagttgtataattgggtgcatcagattacatccgtggatttataaaccttctctacttggctcttgcaagaataataaaatatggcacaaaagagaaagagggtcttaatgggatgaagcaggaaaaagatgcttcatactattgtgtaatctgtggactatttgatgtactatcaagtttgttcatattcctgcttattgtatgtttccttgaatgggatgatcacaagcttttacacgaacat

SEQ ID NO: 132365 - DNA, 422 bp, Glycine max
  unsure (1)..(422): unsure at all n locations
tatngatgataatgaactaggaacacattctctgtcttatattatacaatagacagaattccttttgtaatctcaacatctcaaagataacaaacatttgtcaacacgatagaggtaaccaagatttatcaaacgaagtcccatcattcaaatatcataattgccatgagttctcaaaatgaagagatccaactataacattttaagcctaatgaattgtatgtaacgggaaaaaaattacttttttccttattggtgcattatgcgaaagttgaatattcatttaagataattcttaattntttatttaacggttcataagcaagttatttttaataattgctagtattttttaaatgttacttcaagtaacattcttaaaaagctaatttttagattgtatctttatatatgntcttcca

SEQ ID NO: 132366 - DNA, 345 bp, Glycine max
  unsure (1)..(345): unsure at all n locations
aaccaaatccaaggattaaagcctaattcttatgtgtaatcaaaacatgactggnaaaatctgcgtctgaagttttaaatgatagtcagataaaaccataatctgatttgacattaaagatgacaattaagaattacttaatatgtgtctgcgatttgttttgcagaaacatttcctaggatgtgttgaatctatgaagaatanataagtcaagatctaaaattctcaatcaccatcaaaagaagagctctactacatagacctgctctaacanaaagaaagtggattacttgtacagtgttcaacacgccagtgacaaagagtggactcactccatgaagaaag

SEQ ID NO: 132367 - DNA, 386 bp, Glycine max
  unsure (1)..(386): unsure at all n locations
caatgggccatttccaccatgaaaatgcaggggagataaaggaaagaaatgaaaggaggtgccctccactanggaataagccatggaaaaaaggagcttcaccaccaaaaaagtgccttggataataagcttatagaggaagctttaatggaggaaaagaatgagagagagaaagagaaaggggggagcacgaaattgaaggaagaaaagagggagagaagttgaactttgaagtgtgtctcacaaaactctcattcatcaaagttacaaaaagtgttacacatgcttctatttatagcctaggtagcttccttaagaaacttccttgagaagcttctttgagaagttccttgagaagctagagcttagctacacacacccctcta

SEQ ID NO: 132368 - DNA, 483 bp, Glycine max
  unsure (1)..(483): unsure at all n locations
ttaagcaccgcggctgcaagctttgctgattgtctaggtcacccatatcttttataattgaagataatggtcgcaagtcttagcaagttacagatattaaattgtgaatcttgtcaattaggcaaacatgttagatcatcatttccaaagcaagttgaaaaaagacataactcgattttttctaccattcattcaaatatttggggaccaagccgtgtaacatcttacagtttcaaatgttttgatacctttattgatgaatattctcgatgtacttgggtttatttaatgaaagatagatctgaacttttgtctattttcgtgtcttttttccatgagattaagaatcaatttgtgaagatcattaaaattcttgaagtgacaacgcanaggaatatttctcttcagaactttcttctttnttgtcctcacatggaatccaatttcattccacatgcccacacaccacaacaaaatggaata

SEQ ID NO: 132369 - DNA, 360 bp, Glycine max
aatactagaagctttgaagacatgaacaactaattgaagcgctcatattcaattttttttgtaaaacctctttgtcaattcttggtaagtttagaatagctctcaaaactctttgattatcttgagagaaaacactacctgctaagattgtatattcgtttgtaagatgattgtaagttagtcaatgtgcaaacaaacaaacaaatgttctgatttgtattagagccaacaatggcttggtaggacaaagaatactagttgtagaaggcttggtgtaaacctagagttgtagagccagatgtaacacccttaaatataatctttcaaataacccattaattctacttaaccaaaaagtaa

SEQ ID NO: 132370 - DNA, 467 bp, Glycine max
  unsure (1)..(467): unsure at all n locations
agcttgagatgaggaagtgttgaagggtgtaacttcctgcttttattgntgaccacagagtggtacctagagatatgtcgcgggggtcaggagaccttggggacgtcaggtggggtgctattgcccaaaaccaagcttgaccaatcccgaccaaacccgggcatagtcggtcagtgagaacctgtgatgtacctaancangcgagctcctggcagtcaacagataaaaggaacaaagaccacaaagcaaggaggcttgtggtggctggccagctgtgaaacttgactgatatgtgagatatggtctctggtaatcgattaccaagggtgggtaatcgattacaaggcttaaaaatgaagacaggaggctaagatggtctctggtaatcgaataccaggcttgaaacaaagtcaggaagcttagggagcctctggtaatcgattaccagcctgtgtaatcgattacac

SEQ ID NO: 132371 - DNA, 347 bp, Glycine max
ttctcaagaaagcttctcagggagctacctaatctataaatagaagcatgtgtaacacttgttgtaactttgatgaatgagagtcttgtgagacacaactcaaagttcaacttctctccctttttcttccttcaatttcgtgctcccccctctctctttctctccctctttcttttcctccattgaagcatcctctccaagcttcttatccaaggctcatcttggtggtgaagctccttcttccatggcttattccctagtggatggcgccgcctcttacctcttctcctttgtcttccgctgcatctccatggtggaaaatcaccattaaaggacctcattgaaaa

SEQ ID NO: 132372 - DNA, 439 bp, Glycine max
  unsure (1)..(439): unsure at all n locations
cctgaggcatgcaagcttcgaaatgaacaacgaagcncnttanattttttatggacacaaccnanaacgcgggtatccgatntaggctcatcacatatagagacgctcaaaattgaacaacggaagctcttgagaaattcaaatggtcataactttatactcggaggtccgattcaggcgcataatatatcgagacgctcgaaaatgacaacggaagctctcgagaaattcaaatggacataacttctaactcggatgttcgatatgggcgcatcacatatagagacgctcgaaatttaacaacgaaagatctcaagaaattcanatggagataactcttaactcggatgtccgattcacgcgcataatatatcgagacacttcaaattgaacaacggaagctctcgagcattcaaatggacatcactcttactccgat

SEQ ID NO: 132373 - DNA, 359 bp, Glycine max
gttttgaactcattgtaacacttcctttgatatgctctttatatatgtgtcactaaaacacttagcatatatgttagtcatcataacatccttcatcatccttacaattttcattgctaatgggttgtcataattaaaaccctgcgatgtggattcaacatatagtaaggagttatgttggtccaatgatagtttttattgagggtgtgaagccgaaagaagttattctctttctaatgaatacttggatagagcttgcaaagacttagagaatatttaaggtgttttgtttgcatatgcaacgaaagaatactgagcatgacctatagagggttagaatatcgctagaggtgtagtct

SEQ ID NO: 132374 - DNA, 450 bp, Glycine max
  unsure (1)..(450): unsure at all n locations
agctntgaatcctagtccaaactccctttattattctgatttcaggcttaaataggtggccttgttcgtgctcgtgcccttagcgcacttatggactgcttagtgcacattagtgaattctggcttagcacgtgcctttctcgcttagtggatgaactgaagcggtgcgcttagtgagatgaagcggtgcgcttagcgaactgtacaactcatcttcttccagagtcttcctcatgcttagcccaggagtgttgcgcttagcagacactcactaagccagcagattggcttagcgagaaggtgaaaaacaacactttccaaagcatgcctaattaacctgaaattgagagcaaatgattattaaacacacaaaatgaaaatactaagtatttattacctgtacttaatagaanatacttataacactactaaataaccataaattgggag

SEQ ID NO: 132375 - DNA, 451 bp, Glycine max
  unsure (1)..(451): unsure at all n locations
ttgagccaaaatcctgactcaccataaaccttgacctttgttataatgccaatccttaccctcggaagcaaaaaaagaatagaggggaaatttccgatcaaagaaaaagagaaggaaaatttccaatgaaagcaaaaaagaaatgaaggaaaattccccaatcaaagagtgggagaaagcaaaaaaaggaaaagaaggaaaattccccaatcaaagagtgggagaaagcaaaaagaaaagaaaggaaaattcccaatcaaagaatgggagaaagtaaaaaaggaagaagaagaaggaaagaaagctcctgatcaaggatcgaaagaaaccagaagaaatgtgcagagaggtctttggaccagacaatatctgaacagtacagaattgtcaccaaatgaacgaanaaagaaggaaagggaaccacgacctataatagtcttctccctttgat

SEQ ID NO: 132376 - DNA, 456 bp, Glycine max
  unsure (1)..(456): unsure at all n locations
agcttgtacacatgctgagggttttctttatcttcatatcctagnggctgctacgcatacaccttttcatttatgaatccatttagaaaggaacccttaacatccatctggtatagtttaatgtttttgtgtgttgcataagctaaaagtattatgatggcttcaagtcttgctactggtgcaaaggtttcttcatagtcaattccatccttttgattgtatccttaagtaaccagtctagccttgtttatgactacttcaataatgcccttgactgttaacttgttggtagctcacactctatgacacttcacacggtgacacttcactcaacttctcgttagtcagaatcctttaccagtcagaatacttcgtaagtagtctttttcgagacctagacaatcttctttgactgctttaagacaatgactattcgcacaaacaacacgagacttt

SEQ ID NO: 132377 - DNA, 455 bp, Glycine max
  unsure (1)..(455): unsure at all n locations
ggacctataaaactaagctnnttgcaaggaagaagaaaaagaagaagaagattatttgtttattattaagaagaagagattcaaaggttgtaaaagaatatgtggaaaagttgtttgtaaaggttgtaagtattgtaagttctcttcaaatgcaaatcaaggtattgcttttatagactcttcaagtctggtcaagaaaatcattggaagagttataacctttagaaaaacctgaaaatcattggaagagttacatcttttgatttttgttcaaaacttgtcactggtaatcgattaccaaatccttgtaatcgattacacaaggctttttatgaaaggatgtgactcttcacaattgaatttgaattccaacgttcagatgcactggtaatcgatcaccaatatcttgtaatcgattacaccattttgaaatcaattggaacgttgcaaattca

SEQ ID NO: 132378 - DNA, 436 bp, Glycine max
  unsure (1)..(436): unsure at all n locations
agcttgcctcanagaggtccagattgactttgctgccgaagggactagttccgctcctaagtatgacagtcaccgctttaggagcgctgtacaccagcagcgcttcgaggccatcaagggatggtcgtttctccgagagcgacgcgtccagctcagggacgacgagtatactgatttccaggaggaaatagggcgccggcggtggacatcactggttactcccatggccaagttcgatccagaaatagtccttgagttttatgccaatgcttggccaacagaggagggcgtgcgtgacatgagatcctgngtaaggggttagtggatcccgtttgatgccgacgctatcggccagctcctgggatatccgttggtgttggaagagggccaggaatgtgagtatggccagaggaggaactggtctgatgggttcgat

SEQ ID NO: 132379 - DNA, 440 bp, Glycine max
tgcaacttggcttagcaaaagagtgaaaaacattactttgccaaagttgcctatttaacctgaaattgtgagaaattgattattaaacgcccaaaacaaaattataaattatttattacctatatttaacaaaaagtacttatagtattacaaaacaaccataaattgggaaagtttgatacaatatacacaggttttatacacaaaagttagtcgtattcatcgactaacaaagtgttagactacaaaaagtcgagggccccttctagttttcaagctatgagggaagttgtcgagttgatgcctggtttgggtctcccctcgggtttgcaaggtctgccttcggctccgtcggctgtccaggttatcacttctattgttgctattgttgctgctcctgctcctttgcttcttcctactgcatctgtttagaagatttt

SEQ ID NO: 132380 - DNA, 309 bp, Glycine max
  unsure (1)..(309): unsure at all n locations
agcttatgatgcaaagatgaactttgacttacttctcttcanccacggattatgccactagggaatgagtattgacctctcctactctccgttcgattgcgggtggatgccttgtgccaaccatacacatgcaaagacctcattgtagcttcaacatccacccaccctttatgcctcacaatgntgctggcctgagctgatgattactttctacgcgccgacgctaatagaaccagggtctgcttgtggcgcattgacaggcgacgagagatgttcctccacattcttaccttgaagagcttgatgagg

SEQ ID NO: 132381 - DNA, 395 bp, Glycine max
  unsure (1)..(395): unsure at all n locations
tgcanagagggtcaccaagcatcaccagcggttgacttactttcttgacagaccaggactagccaaacttcgtcatcataaacccgcccattttttgcgatacagaagcataaaggtgcattgtgacatgtaacacccatgcacttatcaatactcggctctcttaatcagtgaagagcggatattatgcgcccaacacaaattctacgttacatccttagacggttaatgtccaagggccactactgctactacctcacgtaagagccacatgccttgcattaataactcaaatggaacaatgcttaacggatgacgagatgccggtattggcatcatgacagatggacacatatgatggacagaactatagggaacagcagagcacaagatac

SEQ ID NO: 132382 - DNA, 378 bp, Glycine max
agcttagcagatggacctgtgtgttgttctttttcatcatatatgccgtaatactcatcacctctatcatatttaataattgtcacatctatgcataattgcccttttacttcattgtagtaaatttctaagacattcattgcctaagaaatctcgggctgctagtagacataaccgtaacatgaataatcatcaatgatggtgataaagtatcattcctttccgaaagaactaacatcaaaagggccacaaatatcagtatgtgttggatcgagtgacctcccaataactaagaaggggagggtgaattaattattcctataactttaccaattaaacatttactcttataacgcttttacttacttgtgaagagaa

SEQ ID NO: 132383 - DNA, 410 bp, Glycine max
agcttattatctgttgtttattcatttttctatctcaccagtgagatatacagccagattctcaatcatgtgaaaaatgaaagttgtagacaaaattcaaatcacaaccttgtaaatatagtaaatatttaggcagcaactggaccaaggtccaagaaacatgtcacattaaagacccaatatcttttcaaaaaaaatttaaaaactgttcaaaaaactacatacccaatatatattttaagggtgaatttggatagagaaagtcccttgtttgggagtgtttggagaaaagaggaagaaagtgaaggattatcatgttattatccaagacttctgctttatgcgtttccacggatacttattgaacatcaacttggaagattgttagtaatcacaaacaatttaacaca

SEQ ID NO: 132384 - DNA, 433 bp, Glycine max
  unsure (1)..(433): unsure at all n locations
tgggatggtggggaagggttttggaagaaagaaggagtttgtttggccggncttcaaggctacatgaaaaataagacttgaaacactcaagtggttctcacacaccggaagacatatcgcaaatcgcaatggtcagatcgtgcacatctgtcctatgaacctccaaaccaactttcgagaagattcaacggttaacgaatacatgagagtgcttttaccgagacagctctaggcaacatccttgagaagctatctcgtgaggcttctttgtgaagcttccttgagaggattctttgagaagctaaagtcttaactacccacacccctctaataactaaactaacatccttgaaaataaaacaaggataaaacaacacantacataaaattaaacatcgactataattactaataatattttagggtgttacac

SEQ ID NO: 132385 - DNA, 448 bp, Glycine max
  unsure (1)..(448): unsure at all n locations
agcttctaaactntgtacaagaatgaatctctgataccacttgttagacaagtggcctcagatatcttaagaagggggggggttgaattaagatattccaaactttttcccctaattaaaaatctatcttactttttacttaagttatgaattcccttaatgacaatcttcttaaatattaattcaaatgaagcaacttgaatatgaatataaagcaataataaataaaggagattaagggaagagaaaatgcaaactcagttttatactggttcggccacacccttgtgcctacgtccagtccccaagcaacccgcttgagagttccactaacttgtaaattccttttacaagttctaaacacacaaggacaacccttcctttgtgtttagagatcttttacaacaagagactcacagtctcttaatcccttagagaatgagaagaa

SEQ ID NO: 132386 - DNA, 440 bp, Glycine max
  unsure (1)..(440): unsure at all n locations
ggacctataaaactcagcttttatccaggctcatcttnggggngaagcttcttcttccatggcttattccttaatggatggcgcctcctctcacctattttcctttgtctttcgctgcatctccatggtggaaaatcaccattaaaggacctcattgaagctcaaagatccagcctccatagaagccccacaagcaagcttccatcaagtggtatcagagcacaagagcttcaagtaggtgctccttaaacctccattattttttttctttaccttctcttccattgttgtttcttcatttttctccatgtatctcctcacatgtcttgttctaaatgttgttaacatgattctttagagtttccaccgattaaacttgctatagaagttagatttgattntctatggttcaaatttcttgttcttgttcttgaaccatg

SEQ ID NO: 132387 - DNA, 470 bp, Glycine max
  unsure (1)..(470): unsure at all n locations
agcttgctngtggggattctatggagggctttatcttttatcttcaatgaggtcctttaatggtgactttcaccctcgagatgcagcggaagacaaaggagaagaggtaagaggcggcgccatccactagggaataagccatggaagagggagcttcaccaccaaaataaaccttggataaaaagcttggagaggatgcttcaatggaggaaaagaaagagggagagaaatagagatgggggagcacgaaattgaaggaagaaaaagggagagaagttgaactttgagttgtgtctcacaagactctcattcatcaaagttaaaacaagtattacacatgcttctatttatagacttggtagctttcttgagaaaactctcttgagaagcttctttgagaaaacttccttgagaagctagagcttagttacacatacccctctcataactaagctcacctccttgagaag

SEQ ID NO: 132388 - DNA, 409 bp, Glycine max
  unsure (1)..(409): unsure at all n locations
aaataaaggtagctcaaaatcttcttgttggcttttattgttctttccttcgatcccggtgatgatctctgttttgacccaaacaatatgaataagcaaaattatatttcaacccatactaagaaagtcggctttcgggtgttattaatttgaaagttatagtttgtattctattcttaattgagagccttttattgaaaattatgttagtcatttgggagaaggggaaaatggcaatattttccatataaaatatatatgaagagtacgattgcacgatttcctttgatttcaaaatggatggacacggcaattgtgctgagtctttntgtggccattctgaatatattcatcagctcttccatggaaatactaaggaaatccttttgaaaagacaatgttattgggc

SEQ ID NO: 132389 - DNA, 440 bp, Glycine max
ttatatttgtttctttgagcaattaaggcccaaactcttattatattattataaattgccttcattatatcaaactaattgttgaaggtttacctaacctttctttggtgtcatctcttcttatttgatgtttttatagaagaaacaatgattaaaactcactaattcagtagtagtaaatttccactaacatggcacatatataccatttgagatggaaatttggaaggacacatgaaaaaggtctactccaaaaactagcccaaccttgattttccatgctttaggctaattggtttgcaattcttcaatgtggaggatgtgagaaattgttgacttgggttggtccaaactagtccatgtacaccctacctataattggttgataactattgtgctaatatgcaggggcatctttgtatggttaaaaaaaatggatc

SEQ ID NO: 132390 - DNA, 410 bp, Glycine max
  unsure (1)..(410): unsure at all n locations
agcttctacattcaatttcgagctctctttatattttggactcaancggacatccgagtaaaaagttattgtactttgaatatgctcacggcttcagtattccatttcgagcgtctcgatatattacgggactcaatcggacatccgagtaaaaagttattgttgcttgaatatgctcagagcttcggtattccatttcgagcatctcgatatattacgggactcaatcagacatccgagtaaaaaggtattgcagtttgaatttgctcatagcttcagtattccatttcgagcgtctcgatgtattacgggactcaatcagacatccgagtaagaagttattgtctgttgaatctgctcagagcttctacattcaatttcgagcgtttcgatatattacgggactcaat

SEQ ID NO: 132391 - DNA, 417 bp, Glycine max
  unsure (1)..(417): unsure at all n locations
atactaagcttcgganaatcaacgacaaagcttttgctcggtttcttantgtgtcccgcaatatatcgagacgctcgaaattgaataccgaagcgctgagcaaattcaaacgacaataactttttactcggatgtctgattgagtgccgtaatatatcgaaacgctcgaaattgaatgttgaagctctgagcaaattcaaacgacaaaaactttttactctgatgtctgattgagacccgtaatatatcgaaaagctcgaatgtgaatgtcgaagctctgagcaaattcaaacaacaataactgtatactcagatgtctgattgagtcccgtaatatatccagacgctctaaatggaataccgaagctctgagcaaattaaaccacaattacattttacctcgatgtctgtttgagt

SEQ ID NO: 132392 - DNA, 437 bp, Glycine max
  unsure (1)..(437): unsure at all n locations
agctntctcaccccaatatcatcttcatcttcctcgttcctccctagtggtcatcatcccgactcacaactcataggctttctcactccctcgttttatctcattaggttgttactagcgcatgagagtgtcactgtcacaaggaagcctttctcatagtctatcggtgccactgattcatcttcttctaacaactatttcactagttcacatgtttaacacaagtttttctggtttctatccagttctttaacaaggtggttttatggttcatttggaccggccatcaaggtgattcacagttgaaccggctagtccgatccgattntgataaccttgaaaattatgctcaattgtatgagcttctctgaatgtttcattattttgagatttttttgtatgagttttctttgaaattcaacatantaaattattac

SEQ ID NO: 132393 - DNA, 300 bp, Glycine max
  unsure (1)..(300): unsure at all n locations
tggaggggttgatggggacccggtgcttatttttctatgataanggctacgtacgagtacgtgagctcatttgaaggtgggcaactggggatggtgggttcatgttctatttgtggaagtgggagagttgatatgcgccattgatcgatcgccacctagttccacatatgactggtaccccataatccaacaagcttgatgtgataaagcgtggaagagtcagtcttcctacttttgtttgttgaccacagagtggttccttgagatatgtctcgggggttaggagaccttggggacgtc

SEQ ID NO: 132394 - DNA, 418 bp, Glycine max
  unsure (1)..(418): unsure at all n locations
attcccggnacaccacaacaaaatgatgtatcataaaggcgtaataaaactttaatggatatgattaagaatatgttaatcaattagactttacccatatctttgtggatgtatgccttgaaaactgacatgtatttgatgaatagggttcctagtaaggcagttccaaaaacaccttntgaactgtggacaaataggatacctagtataaggcacttgcatgtttggggttgtcaggcagaaataacgatttataatccgcaaggaagaaaattggatgtaaaaacaatcagtggatatttcattggttatctacaaaagttaaaagggtatatgttttattagtctaatcatagtatgagaattgcaaaactggaaatgcatggttcattggaaatgatgaaatcagtgggagtac

SEQ ID NO: 132395 - DNA, 454 bp, Glycine max
  unsure (1)..(454): unsure at all n locations
ggacctaagaaactaagcttatgaggaagtggtcccgtntagtgacctcataaacttcttgaacaacaaccaaagaagttctcggaacaatagcataaagtatagcagaatgttcaacccataagttcaggaaaccaaaataatattcctgaataaagaaattagcctaactgtaattggctatgtacaattccaattgaaagcgtttggcagaatggtcctgattgaaaatgtgtttgagatagtcccacatgtctttggcagtagaaaatgatcgcaggttattgaccattaaaggctcaatggaccccaaaagccaagaaataatctgggcatcttgcgtctcccaagcagccaactcagccatggttgtgggtttagaggaggacctattgacatttccccacatgcctttccctttcatgaacatcttgaacttaaactcccaagcagc

SEQ ID NO: 132396 - DNA, 425 bp, Glycine max
  unsure (1)..(425): unsure at all n locations
aatattngaatntttattcctttattaatatatatgtgaggggtagagggtgtcacacacaccgccctctactgcttcaactactgtttatagtgctcctcttgaactagtcttcactgattttatggggagcaccattgagtcatctagtggctactattattttttcacatgcaaatttatcttttgaaaacacaaatctgacacactccaactaatttcttagtttaaatctacagttgaattgtagtttaacactaaactcgggccattcaaacagattgnggtggggagttttgtcccattccgttcaattttggaaattgtacagactcaattgtccctacactcatcttcaaaatgagtcagtaaaaaggaaacacataattatagtagaaacaggtatcctactcctggctcatgct

SEQ ID NO: 132397 - DNA, 436 bp, Glycine max
  unsure (1)..(436): unsure at all n locations
ctgatttcctttgttccggaaacctttcttttctcatgtgtctcccaacccaatctccgggttcgaagacaaccttctttctccctttgttggcttgtttagcatagcttttatttttcctctcaatttgatctttgaccctctcatgaagcttcttcacatagtccacctttgcttgaccttctttatgcttaaaaacagaaacattangcataggcaaaagatcaagaagagttagtgggttaaaaccataaacaacttcaaaaggagaacaattagtggtgctatgaacagctctattgtaagcaaattcaacatgggataaacaagcttcccaagtttttaagttcttcctcaaaactgtcctaagcaaagttcccaaagtcatattaacaacttccgtttgcccatcggtttgtgggtgacaagtggttga

SEQ ID NO: 132398 - DNA, 450 bp, Glycine max
  unsure (1)..(450): unsure at all n locations
agcttgctcgctagccagngctttnagtatatttgtccactaagcccgccttgccacgcttatcgcaaatcgttctttgttatgaaaatttgtggaattgggcttaacgagcctgcttgctaagccaattctgcagaaaaaattggatctgtgttcactcgctaagcgtgtggctatcgcgcttatcgcatgagtcattttttctaaggcgcgctaagcgccgagtctaatttttagttatattttctgctttttattttgaataaattactgtctaatcttgtgttttgattcttttgtattgaagatgccttcccgaagagaaaagccataactttagtgtctccgaccggatatgatagatcaatatntgtatcacagataggctgggaccgctactcaaataatgtgctagccaggaatattctgtcagagagaaatgtccaacta

SEQ ID NO: 132399 - DNA, 415 bp, Glycine max
  unsure (1)..(415): unsure at all n locations
agcttccattgcagggttgctgcttcctcttttgtattttgattcgctccctacaggtaagngcacttcccctttattctttggctctccattgatgtattttagtggcttagttgctcaatttttgccaatttcatgagacaatgtatgcttggattcacgcttgtttgtttgaattagagggttgtgggggatggccttaggcctaatgtgggttctgaaattgttgggcacatcacattgcccccattcttttttttcccccatacttaaggtgcgcccaccaagtgctcggtgaaatacctcaatggaatttgggcatggttttgtgaattttatagtgtagaactgacttgtgggtatagggacagcttgtagaggttagaataagtgccaaaattaatgacttagacct

SEQ ID NO: 132400 - DNA, 455 bp, Glycine max
  unsure (1)..(455): unsure at all n locations
ggacctatgatactcagctttatganatctcttctctggtaatcggntacagaattctggtaatcgattacatagatcaaaattcaaataagtttgtgccgtgatgtcaccagttcaaaatttcaaaatgccatcttcatggtctctctagtaaccgattataggacctggtaatcgattaccagttcaaaaatatcttactttcgaattgattaaactttgattaaggcattttgataaaagactttgcggccaaatgttggatttcccctgcggttactttttgttccactttttcttcgtataaataaattcaagggaaatctgatttgtcggaaagtgcactggatcgtcaagtatttaaaaattaaaacggatgaatctgtgtaatgaacatagggaactaatgttagcctgagttaagttcagaaatgaagcattgttgagagaacatg

SEQ ID NO: 132401 - DNA, 378 bp, Glycine max
  unsure (1)..(378): unsure at all n locations
agctntaggaacaaactctcttctctattattctctcaactattcttcattcttcatcctcttttcactttcgttcttcctttttcttgcacaaaattcttggctcttcaattggagatgatcatggaaggcttgtgacaccctctacccttacaattataactaactaattaaataaatcatacaaaacttatttctaagattataaacacttaataatacaagaaggaaaaaaatatgcacaattaattaataattgttatttttaaacacatttaatttaaatcaattcacaaggataaaggtccacatccacttagtgaaaacataatagaatttgtttataaataaaaaggaagactatccttgctcaaaaca

SEQ ID NO: 132402 - DNA, 441 bp, Glycine max
  unsure (1)..(441): unsure at all n locations
agcttttacctgaatagctctgngttctctgtgagaagcaagacaggtagagcacatgtcttcattcatacagtccaagcaatacatgttgcattcacttttgtgggaatctgcatggactttgcattgaacaaagaagcttgtttggagaagtggcccaagccatggtggccacttgttttcttcttcattctttccaacatcatcatcatcatcttcatcgaggcctctcaccccaattgcacctcctccacccccctaattccatataataatattataatcaataacaaagaacaattaataagaaaaatttgaagaaaaaaaagtagaaagagaaatgcacacgtgtgaaatatgtgaggggttacattgattgttggtctaataatactaaccatgactctggttgatttacttttgggtttgattctcttatgg

SEQ ID NO: 132403 - DNA, 427 bp, Glycine max
  unsure (1)..(427): unsure at all n locations
tgcataatgggttgaattactctgtgttccatattattttgaatgnaaccgggtgggtctccctgccatcctttgtttctcaagagctccttaagtatatgaataaactctcttcttgtaggttcctttagtttgtctcccttagatatggttggacctcccaagtgttttttttttttaatctttctatttggatggatatattttaaggtgagttttaggtgtaacaaggatcagatgccaacatagttgagatgtctatttaatttaaatttgaaagactaaaagaaacctaaccccagattgaaagactaaataagtaaataaagcattttatcacgtttcatatgcttgagttgctatgaattaattgttgtgcattgttgtgatgctccttgctcaatttatgtgttttaaagtgtcattg

SEQ ID NO: 132404 - DNA, 415 bp, Glycine max
  unsure (1)..(415): unsure at all n locations
agcttgctccatcagcttcatgtgaagattttatctttcacttcaaaccctgccttagaataactgccaaaaacaaaccaataaataaacaacacaaacttaagaatttcaacgaaaaaaaaaaaagaagcaaaatccatcaccaaagtaagagatcttcaaacacaaccaaacagtgcaactgaatcttcacattcacgaatattattgtatggtccaagaccaacagtatcaacttccatgtgacacttagtcaaattgtattattatttttttcgtaaattgaaaaataaactcggatcaatttccatataacacataatcgagtcttatgaaatcttttttagtaaattgaanagttggttacatgtaacgtggagaatgaccatataatattttctctgcatccacaatc

SEQ ID NO: 132405 - DNA, 221 bp, Glycine max
  unsure (1)..(221): unsure at all n locations
tagaacaataaacgtggcgcgggggaagtgtcnttggtcttggcgaccacaaacaacaaaggacgtttggtacccactatatgtcgacttgaccaacgctgagattggaatgctgcgacaatctttcaacaccgtatatacacaattgtgattagaagggtaacatgtgaccatatcagtttccaaatgaatgggatgccaatgcacgcatttgctttaag

SEQ ID NO: 132406 - DNA, 305 bp, Glycine max
caacttaccctctggttatgcaaggacacattctcttctctctacttggaccattgtgttagtaggtggagggacaccaagcctaccctcaatcgtgtccctagaccacctgtgtgagagacactggtgatgtgatctgtcaggaagcgacggtcacaaagaaataaacatattgggatggggcggataagggactactacaaacgaagtgtctatgtcaatgacgatggagattcagtttctttttatgatgggaaaaagccaaatcaaatgtaaataattgttttgtgaggggatgtatctag

SEQ ID NO: 132407 - DNA, 322 bp, Glycine max
  unsure (1)..(322): unsure at all n locations
ctgcaactttactgccttagtaggccattcgttattattattaggaagatgaggtgactctttgaaggtcacataccctaagactatgactaggccctattgagttgcactatatcagaggtgagttagcctattggcaattaccccctttgtccatagtgattattanttgtgttcgtggtgatgaagctcctttgctataggtttacgagttgtagttgctatttctttcatccatagaagacacattgatggagaattattttttcttctgtaacattcactaacatatggagatatatatgggttgtttgactccaat

SEQ ID NO: 132408 - DNA, 452 bp, Glycine max
  unsure (1)..(452): unsure at all n locations
tgagtcggaccttganactcagctgctacgcttgggtgcaacattataataaaccccctctgtagtatttatctcaacagcagaataattatgatctttcaaacaacaaatacaatccatgttggaggaatcatccacatctgagatggagaagtcctccacaacaacaacaactaatccctccttttcagaatgttgttggcccaagcaagccatatgttcctcccccaatgcagcagcagcaacaacaacaaagacaacaagcaactagggctcctcctcaacattccttagaatagttagtgaggcaaatgaccatccagaatatgcatattcagcaagagacaagagcctccattcatagtctgacaaatcagatggngcagatggctacacagttgaaccaagctcagtcccaaaattctgacaaatggcctttcataactatgcag

SEQ ID NO: 132409 - DNA, 263 bp, Glycine max
gccaaaaagaaaagaaggaaaatttccaatccaagagatatgctaaagaagagaaaggaaatttccaatcaaagagtgggagaaagccaaaagaaaagaaaggaatattccaatccaagaatgggagaaagtaaaaaaagaagaagaagaaggaaagaaagcttctgatcaaggatcgaaagaaaacagaagaaatgtgcagaaaggtctttggactggacaatatttgagcaatacgggatttgcaccaaatgaacaaaaag

SEQ ID NO: 132410 - DNA, 300 bp, Glycine max
actgacttattcaatagtctctacctttatcgattaccaagaggatgaatcgattacttctttctcgggtagtcgttcagaggtgaacaagactacttcaatcgagtactgcggctgccctaaatttatgactgttttacttgaattattcttttgaccacaaccatgggaaatccttccttcttcttatactcttcatatcattctcttacaccatactagggtagaaggaaaacctcactatttgtcctgaatggcctgtcacaactctttacgtactttttctttctagccctcata

SEQ ID NO: 132411 - DNA, 413 bp, Glycine max
acaggtacagtgatgtgtggtgttaaacacgtacagtgttaagggtggaaagtgctttgtgtttccttcattacaggtccatcagctctaattgatcacacaatatattacaaccaacaccagctaaagaaaaaccaatctcaaaataataactgttatataggcaaataatcttcagctgtagctcaaagaacttgtttctgaattgaaagtcaaggcctaatgaagaataaccctgaactaaattcagacacagaattgcaagttcatgggctaatgaagaatatccctgaaccatccattgatttcatgtttaattgtgcctaaatcaacacatttgcaccaaaacagcatgtattttataacagcagcatttggtgataaaatacacatggtaattgttttgaaattgc

SEQ ID NO: 132412 - DNA, 343 bp, Glycine max
  unsure (1)..(343): unsure at all n locations
actcgctattagctgaccttatcataaccagattttttatcagaaaatactctttatcccagagagagtgattctcctaagtctgagtgatcaagacacccttgttatatcaaaggactttcacaacctttgtgtgttgccctcgccggaaagattgattttttccttcctttcatnctcaacccttgttctttcaaatcacaaatctagatnatccacttatgcccagaattatcttgtggcccataactccattntacatgcctcaaattagtgattcttgagcctaaattgaatttcaaaatgagatctttcacctcgtttggaatcacctcatttggag

SEQ ID NO: 132413 - DNA, 347 bp, Glycine max
  unsure (1)..(347): unsure at all n locations
acatctctgctaacataaccttattactttgaagcaagaatattctatatgcttttgatgttgagctatagcccacaaagattcccgcttncgcctttntatcaagttggtctctcttaaccttgggaatataagagaaacacaagcagccaaagactttcaagttcatcaattgtgggttgaaaccataccaagcttcaaatggggtcgatttgaaagagcctttgttggcaatctgtntacaaaaaaacagaagtgcttgcagcctctgcccagaatnnttttggaagatctttgtcatgaagtaaacatctttgccatttcaagatcgttctggtttttgcgct

SEQ ID NO: 132414 - DNA, 293 bp, Glycine max
  unsure (1)..(293): unsure at all n locations
gtcattattgtgcctaatacaggaaatatgacatacatancccaaataaatatgtcttcttcttaatctccatgaccattcaaacttattaggaggcagnttccattcatagtttcttatgctatgactataaacaagtctcagggacaatcattacaacacataggactgtattttccacacccagtttttagcaatgaccaactatatgttgcactttcaagagttaanagcaaacacagacttcatattctcatacatgacaatgatggtaatccaaaaaatataccaca

SEQ ID NO: 132415 - DNA, 283 bp, Glycine max
  unsure (1)..(283): unsure at all n locations
ctattaccagtgtttgtttctgaataaatcaaaagatgtaactcttcaaaaggtttttaactttttcaaattggttttaagtttttctaacagttataactcttctaaatggttgtcttgaccagacatgaagattctataaaagctaggctgtgatttgcttttaaatacacttattcattcattcattcaatcttgaacacttattcatacaatcctttacaagccttgaatctctttgaacttcttcttcttctttgtgccaaaagttntccaaagtttt

SEQ ID NO: 132416 - DNA, 206 bp, Glycine max
cccagcccttaaaaattgtacattgatgtaccctgtagtgaacctcgtgtgagtgaatctatcacactccttctgatacatagtcggcaatctcacttattacagctgttattttaactgactatgcttgagaatctaatatctgactcctaaagaaatctcctgaaaatgactttctaatgcgaataggaactcctacttttgcc

SEQ ID NO: 132417 - DNA, 149 bp, Glycine max
ggacgtgtcactaactaaatagacattggtttatatgatgacgcccactggacatgtatgaatatatttcatatctgtggttaaaatcgagaatatataataagacgttttacaaattacacactaggatatgctcttttttctgaaat

SEQ ID NO: 132418 - DNA, 266 bp, Glycine max
  unsure (1)..(266): unsure at all n locations
tttttaagatctcttgactttgcaattgcagctacctatagtggccattccctatttaaacatcntagaactgtgttattgagatcctcattaggaaatatcttttctagtgatgcaagatgactttctatatgtgtgaatctcttttgcatatcctgtatagtctcaatttgatacattctaaaaagttcatattcatgagtgagggtgtgtattctagatgtctgttcatcacgtgttccttcataggttactcgaaatgtatc

SEQ ID NO: 132419 - DNA, 396 bp, Glycine max
  unsure (1)..(396): unsure at all n locations
acatacaatatggaatcataccgtgttctaatgtgaatcaacaatggagagcacattttataaaagcttgtgtatcgataccaggacaagtttgacaaaaatcaaatgatgtaactcttccaatggtttcaggtttntctcaaggtcataactctcccaatagttttcttgaccagacatgaatagtctataaaagcaagaccatgatttgcattatgatatctgatcacaaaacttctaccatctttacacacatgctttggacatcctgtggaatatcttcttcttcctcctttgcanaagcttttcttgagtttctgggtttccaaaccttgttctttcacagataacataagtgcgctatatcctttcattcttttctccctttggccaaaa

SEQ ID NO: 132420 - DNA, 476 bp, Glycine max
  unsure (1)..(476): unsure at all n locations
cttaagtcacctgaggcatgcaagctntataatgagtaatagtgccaatgcttccttaatatacatcttatcatccctctcacacctctaattatttccaccgcacaaaatctgcactataaagtccatcacctcctcttggattcaccaaatagactattagacccagaggtcccagactgaccctaatcacactntataattaaatttttttcgtgttggcatattntccttttctaaactttttgttctctttntggttgtggtagatcaatgagccagaaaacaaaatcacattcatgggccttctttgcagatctacctggtggaattcattgatcgtgtctatatttctttgcctctctttatgctttggttaccctttgcggaaccatggccaataacatttcaacgacatgattcatgattattaaataggaaaagtctatttttcgtatttaatgagtattaaagca

SEQ ID NO: 132421 - DNA, 466 bp, Glycine max
  unsure (1)..(466): unsure at all n locations
cggacctatcatactcagctctatagctacctaanaagctacctgtctcatcttcaggntcatctaactcanaagcatcaaactcaaatctttctggtttagtaacaggcatacacaacgtttccacacatactaagccttccttgttgatgaaaaatttgttgattttgacgagaacctcaatacaatcttcaagcacatattcaacctttntatagaatgttctgatagtgccaaaaagaagttagccaagcactctgtaggatacagcatcaatttcttgcaaaatcttgtctgcagaaggtaaaaatgaaatgaaaataatggcaaaacaatagcatatatcacaaatcttaaaatgatttcacagaagaataaactcttaaaataacatcattttgttggcggctaattggctattcgcaatgactgtaagacttctcaacaataattggtggtgtgcata

SEQ ID NO: 132422 - DNA, 465 bp, Glycine max
  unsure (1)..(465): unsure at all n locations
gcagcttacatgcactgttggtaacttacatgccntnatgccacatatatgttaactctgacagccaagacaatgaatcaatccatgggaaccattattcttttgaaggcaatgcactacccatccatgttttattaattcattacacatgcctcctcctctgcttttaaattaaggcaaatacaaactgatgccccggggcatgtttaggagaaaatgattagtgaggataaatccacatgttttgcaaggactagtggatttagtcccctctttatttgatgtactattgttaagggactaaattcacctgttntgtaagccaggataagtgtatctattaaaacataanaaaaaaaagaacaataanattatcatatcaaagataccgaanatcatatntgctagttcctattatnaataaatatgttactgctcttattatataaaataaatgataaaaac

SEQ ID NO: 132423 - DNA, 155 bp, Glycine max
tgaatgttaagggagcgtcccaatcacattgtcacaaacatttttctccacatgcataacatcaatacaatgtctaacgtcatgatcacaccaagtcagaagaccaaggaaatagaccttcttttccatatgcaactctgacttttatccctctt

SEQ ID NO: 132424 - DNA, 365 bp, Glycine max
  unsure (1)..(365): unsure at all n locations
agcttcatataagctgaaccattttatctataaacacaagttgagttttattcagaaaatntagagttatctcttttatcttagtgagagtgattctcctaaattctcgagtgattcaagaacaccctggctgtatcaaaggactttcacaacctttgtgtgttgccctcgctggaaagagtgattctttccttcctttcatcttcacccttgctctttcaaaccacaattccagaagatccacctctgcccagaattatctcgtggccataacttccactttacgcactcaaattaagtgattcttgagcctaaattgaatttcaaaacgagacctttcacctctgtttggaatacctcatttg

SEQ ID NO: 132425 - DNA, 185 bp, Glycine max
  unsure (1)..(185): unsure at all n locations
tctcgatatattatgcactttattcggactacaggntgttatgntatgaccatatgaattctcgagagctttcgagttcaatccaagctctggaatactaccgccggaacggacttcgggacaagtataccataaatcccgaacttcgtgtcaccagctctaaataagccccaacgactccggga

SEQ ID NO: 132426 - DNA, 321 bp, Glycine max
tataagtttcaagctattaatctatataaatcactcatattgtttctttgatattaacagtttagagaaaatgtacagtgtatcacaatttgaggtggagcatacatattaatgttgcgatttccctccgcatgtgaggaaactgcttacatcaaacaactaaccttcagcgagcaccctacctatctagagatcacggctgagtcgggcggattcagcaagtgtccacagaaatcttcttatcctcggcgacggctccagaacaacatcgttccgggaatacaatattcaaaaattggtcaggagaataagtttataagc

SEQ ID NO: 132427 - DNA, 366 bp, Glycine max
  unsure (1)..(366): unsure at all n locations
gcactgacctgcagctggcgagctcggaaaggaaattcatacccactacactttcagagaaggagaaaagtgcagtaaccatctggttaaaattggagaacctgtacatgaccaagtccttggccaatcgtctattctggaagtataaactctacattttcaagatgatgcctacaanaactcttgaagattacattgatgatttcaataagatcattcttgatctagagaacattgaaatcaagatggatgacnaggaccaagcattgcttttgctacgatcattaccaagntagtttgaacacttgtcagatacgctaatttatggcaaggattcaatcactttggaggaggtacaatcaactc

SEQ ID NO: 132428 - DNA, 363 bp, Glycine max
  unsure (1)..(363): unsure at all n locations
actctntggatctcttcttgttagatgttacccactcctttcaatccttgatgtgcattgagaaatattgaaatgattgtgattgtcttgcttgatattcttggatttcgttctttatttcattctgcccactagtgcaaagagctaagtttgggtggttatgatgtgccattattatcttctatttcgtaacgcctttcgcccattttaaggactggtagtcgtaattgcaaattaattcagcaatttatatttgcgcccatcactaattgatgttttaactaattcagaatatgacatgggctgatcaaattgcgtggctgatcaaatggctgcataaagcaacaatttttcaaatattgc

SEQ ID NO: 132429 - DNA, 348 bp, Glycine max
gtctgaaattatgggactaagatggtcattgacctgtccctattctatgaattaacctaattgccaagcgaaagtgtaccatttgaaggtgcactgattgacgattggaagtttgatttctctgtacatgatgcccgccgattggtttgtaccaatcaagcggatatgacaggaaggcttcttgccggttcattggcttttgaaagccgcattctccattaccttattgttcgcatcttgcttcctagatcttcaaaccttgccaaggtttctaaagaagatctcattgtcatgtgggcctttcataaaaattacaaattgattgggcacaccttcgtagatattaca

SEQ ID NO: 132430 - DNA, 211 bp, Glycine max
gacactgtgacttagaagaagctggaacatactcaagtcccttctcctttatcctcattcggccccctttcttctatcctttctttcctcattaaagcatctctcaagctctatcaggcaatcttgggggagctcttcttcctggcttaatcctaagggatgtggcctccctctttcttctccttggcttcccgtgcatctcatggggaaa

SEQ ID NO: 132431 - DNA, 263 bp, Glycine max
  unsure (1)..(263): unsure at all n locations
cataacatattatcatgcgaactgaataatatcaggtgaaatatgtttaaacatctctatactacaattgtggattgtgtacagtaantttcatatctcatatgtctcgctttcatatatgacataagttaagttctttttattgttctaatctgattaacaatttacattaaaactattcacaattggtttatggatgactggcagacaagttgggccatactttggagtatggattctctgagcctcaatccatgcacaat

SEQ ID NO: 132432 - DNA, 133 bp, Glycine max
tcacttaagtatagtttcttcagtacagagggcctaccttttctcgtatctggaaacctagccatactaaacactcaaaccacattttatgaaaaccaactaaggccaacccaatttttctctcaggatattt

SEQ ID NO: 132433 - DNA, 434 bp, Glycine max
cttagtacccgacgatgttatccctccgaactcagagtgccgaacttcgactagtattcagggaccacttgtcccaacaaccatctcaggatgtactgtcgcataatgggcgcacactctaaggatgagaagctattaatacacttctttcataatagcttggccggagccgtcgtagtgtggtacactaatatggaagcttcccgtatgcgtacctggaatgatctgaatactgccttcctaaagcaatatcagtacaattccgatatggctcccgaccgcactcaactgcagaatattgtcaagaaagagggcgaaacctttaaagaatatgcgcagcggaggagagatttggcggcacaagtagctccttccattggtgagagagagatgatcaccatgatggtagacactctaccaagggtctactatga

SEQ ID NO: 132434 - DNA, 339 bp, Glycine max
  unsure (1)..(339): unsure at all n locations
gagcatcaacaaaaaattcattgcttctgccctcaatgatgtgcatacatgtacancacactgagatttgaagaaatgtcctgatgccctatgtgtggtgcgtcactgtacaatgtgaatgatgatgaggagtgcagttctgatgataactcacagaagggccctccagcgaaggtgttgtggtatcttcccatcattccaaggattagacgtctttttgctaataaagatgacgcataagaccttacctggcatgcnnnngggaaaaactctaatggaatgatctgccatccggctgactgcacctagtggaagaagattgatggtttgtatctggat

SEQ ID NO: 132435 - DNA, 432 bp, Glycine max
  unsure (1)..(432): unsure at all n locations
ccttctggttgggtcatatagatgtctttctctaaatccccatgtaagaatgcagntttaacatctaactgctccatgtgaagattctctgcaactactatactcagaataactggcccccaaacatctgtgtgcactaattctagcttttcaactttaagagtcttccctgcccttgagaagctgacctttntctgctgtccaaggatacaatgttcacaagcaccaacatcaacatgcttaaggcttgatagcttaccctttgctgccataagtttcattcctttttcactcatgtgtacaagtctttgatgccacatggttgaattattgacagctcagtacttgtaccatatcctcatctgcaatcatgtaagagaccttgctctttcacgaccacacagattgctttgtaccttcagatcatctcaa

SEQ ID NO: 132436 - DNA, 391 bp, Glycine max
atcagttacgaccactggtaatcgattacatgctctgggaatctattacaagagagtaaattgcttgtataagactttttaacataattgtcttggccaaaccttgagctacttcaataggaattcccttgctatttaatatacgcttactaagactctatagactgtcatgaacatccatcttgaatatctttaattgctttgtcttgaataaagctttgagacgcatgtgatcttttggcatcatacaaaacatcgggttgatcctttgtctacagtagcatatctaaaaacacagtaattttgtttctaatcaacaaagcaaatatctccatgctggaatattatcatcgaagaatatatcatatgaacgacccaatatcattaacta

SEQ ID NO: 132437 - DNA, 400 bp, Glycine max
  unsure (1)..(400): unsure at all n locations
agcttaaccgagactcgcgctcccggtnattgntgccagagtttccttttatcagtttctgggccacccncctgatattggagggcgaccaactgtgcaagcacaaccagagagggaggctatcacgcagctactatgcataccggngcaagatttcacccatgccgctgcaaagagacgagtgtggatcatgtgtaccaacatgaccccttttacatagatataaatgacgttgctacttagcaacattctgcccagcgaccacaatgccgatctccccctgcggaattatcagttggtctgtgccgtcccgacataggtaggtatgcattatttccaactaatttctaatgccatctactatntgcagggatcgcgcccgtaagacacccagtggacc

SEQ ID NO: 132438 - DNA, 408 bp, Glycine max
  unsure (1)..(408): unsure at all n locations
tttattatgtttagtgaatgtattatgacattatgnnatttatttanncngcgaacattagntatggtttaagtattgtggtacttaattaattatgactgatcttggcngtcttattttgcactaagatgcttattgtttatactaagactttggttttttgtgatatatgacatagtggttgcatctcaatttggtttattaaaataatgcttatgtatgctnctagatcctttatggtcgtttacaaattatgctttggtatgataaattattcatgtttacgcactttggcctttttgatgttggccaaggaggagagaaaatgggtattttagaaatcaagatcatatattttcaaagctttataaataagcttaaattctaaaagaaagggggagaaagaga

SEQ ID NO: 132439 - DNA, 340 bp, Glycine max
agcttccatcatcatgactaagtgtttgtttatatgaagacatgatgttgactgaagagcatatctgattgattgacctcttccctaggactgaaaaaagaaaaatgaggccttatgaacaacaagaaatagactggatcttaccttcaagattatctattcagacgcaactagacatcattgttcatcccaatctttataccaaaatgtatcatggctttaaaggatacagagttctgaagtggtagacctacaacagagtctggaaggagaaaggtgaagttggttttcatattcttcatccagagatgcacgatgtagagcttgacaagcctagtct

SEQ ID NO: 132440 - DNA, 470 bp, Glycine max
  unsure (1)..(470): unsure at all n locations
tgttttctctttacatgcctaactctgntgattgtcntttgtattgggtgggatataggatgttgtatctgggtccatatcatatctttggtgcatcatgcatcatcatgagttagtgagaagaaaaatttctaagttagaaaattttcttcatatggtaagactctctantttaatcaattacaaccttatcgtaatcgaatacaactttctcgtaatcaattacacgactgtttttgagacaatgactgatttgtttaagagtctctgctttaatcgattaccatgtgatataatcgattacttctctttctataagtagttcagaagtgaacaagaacactntaatcgattaccttgagtatctaatgtgtacattgttcttgagttggttctatggtttgggaagaacacattaatcgattaaaaagataatctaatcaattacttcattgaataaatcgattatt

SEQ ID NO: 132441 - DNA, 448 bp, Glycine max
  unsure (1)..(448): unsure at all n locations
actctttctctcaacattttcatgttgctttccctttccgctgnanctcttccttgtccttgcaaatatgtcgtggctcttaactgttgatgatcatggaaggctaaacactcaatcaatccaagaatccactccaagcagtgatgaatatgtagtctaggttagtatttctaatctttgagaatgttcatctttttcttcaatcctatntttgattttcatgattatgattatgcttagtattgaaaatggattaagctacggattcatttcctaatttcaaaatttaataacagattgtttggatgattttcctacctaatttgggatttcaaacaatttagggattcattattagaaaatacactcttaacatcggttaattacgacatttacattgatttaaaaccgatgttggaagtccgatgtgaatggataattgtaacat

SEQ ID NO: 132442 - DNA, 331 bp, Glycine max
  unsure (1)..(331): unsure at all n locations
ttatttaagaagtctgatcaagcttcatcaccctctcttattctgcattatgagaacagtanactactttttcttttaggtatcgcttcatagatcaaacgcctttctgcactgctctgagacttatacttatagccccgaattggcctctataaaaatgaacgaaaataaattatctattgcaacactaattaatcttctcctttgtctaggaaacacaacttcaaagtgtcgtactcattgaagacaaagtcctattctaagccatgggtggaagaagacatagaagcaccatgtgttcacacatgcactaaagaagatataaaccatg

SEQ ID NO: 132443 - DNA, 335 bp, Glycine max
  unsure (1)..(335): unsure at all n locations
tcttttatctcngtcttctctttgttgaaaggagacttcctggtatggaaagctgatatctctgtttgatcctccctatangtactngatgtgatggtgatatggagaggcatatattccataaacgcctcaccaatntagtcgatgggagcatagacctagctgtggtgaaagaattctatgcaaatttatacgggtctaatgatcatccaccaaagcagtccatagtcaaaggtcatttcgtgaagaatgatgctgacagtctcaacacattcttggagacacctatggtattagctgagggggagaccttacccgcttactccaaatactat

SEQ ID NO: 132444 - DNA, 317 bp, Glycine max
  unsure (1)..(317): unsure at all n locations
attgtttcttaaataaattgtaacaagtgataattatctaaaccaattttgaaccatttttctggcattgatttgtttgaaccgactcgaccttgtccacatcaatttcttttttttttttctgggtttctgacatgccaggcaattatggtttcccaaaataaaatatgtttcatagtttcattgattgacaaatattnttattcttcctaatataaacaaacatgtaaccttaaaattatatttatataaatgtacttttattgtcaagtctttgtcttatataaaaatggagatttgtactatatatataatat

SEQ ID NO: 132445 - DNA, 325 bp, Glycine max
  unsure (1)..(325): unsure at all n locations
caaactgttttaaaggaagttctccgatgaaatagtgagatactacaagtatgtaaaccttggtgttgagtagactaatatagatacactatagtatttgatgatacactgcaagtgaaatggtcatccatttattgttctattaatgcactcacaatgtctttacatgattagctgaagatttttctatatgatttgntcttctagaactcgccttgtcactggtatatccttcaagatatctatggatcctctttcaatccacttttaagacttgatgatcactctttctcttcagaaggtaatgatgaggatgaacaccatg

SEQ ID NO: 132446 - DNA, 399 bp, Glycine max
  unsure (1)..(399): unsure at all n locations
tctgagtcacctgcggcatgcaagcttctcccncaattntctataaataggtggagaagtgaagtanaaaagggttcagccccttatgcacttctctctctttggaatttgctgaggaaaattagttccgtgaagaatatccaagccgaggcgctttcgtaacgtttccatgagtgatttcgcgaaggttntcgaccgttcttcgacgttcttcattcgttcttcatcgttcttcaatcttcaacgggtaagtacctcaaaccaagctttttaattcattctatgtacccgtggtagtccaccttttgtttatggtattttattctcattttcatttactntttatacccnctttngacgtgcttaagccatntatttaagtcatttctcgcttaatct

SEQ ID NO: 132447 - DNA, 248 bp, Glycine max
ataggtggcatatcaaagtgaagctactaataaaaaatcagatcacctaatctagaatagctccatcactcaattctaacctatgactataaatcttcaaattttgcttcttgtgtacttacaaaatcaaatggttccaccgaacattttttgaagtataatcccaagatcagttgcacagtagtagtagacagtgtatgttccttcacctaatcaccctattgttaacaacacaatctattgtaccc

SEQ ID NO: 132448 - DNA, 219 bp, Glycine max
  unsure (1)..(219): unsure at all n locations
tatgatcacagganacagaggccatagttagcagagggtgncaactaaactcaagtcggtgttcaaagctatttaagaatatccaggcattattgcatgaagtagtagttaatatggagtaaatgctcctgcataacatcaactaacccgcatactccttcacctgctaatatttactccactctgagaacctttttatatttcttccaggtcactctt

SEQ ID NO: 132449 - DNA, 469 bp, Glycine max
cagcaatagtcatgataacttgattctctctctcatatagatctacaactaacccaaccacatttcttttgcggttagtaccccttcgaataattaaaccactaggatttgtttgaccatcttgtggactagcatcctcaaaggtggggggtggaaaatggtttttatccaacataccatcatgtggcaccaaccattctgtatcttagaatagatattcaagtcatattctccttctccatcgatccctctttccttagctgtatgcgcaacatttccttttgccctatcaggtgcaaataacttagtcaagatgtcataatgcttaattagcatatttctccatcttgcagcatgatgccttccttcataataagtaaaatgacaagcgacaatttgttcttatattaacttaaagcaaggatcaataaggatagaatgttatactttatcatctttccagacgttg

SEQ ID NO: 132450 - DNA, 424 bp, Glycine max
tgcattgtatggcggtctcgaccttcgtcactgggagcctgactgaccatatcaccttcttgagtggacacatggggcactgcgcccccaatgcgcagcaagaatagataatcttatgtgcctctcaggtccctagaatgcattcatatcatgctactgcatcatcatctcttcataacggtataatggacatatcctgcattcgtccgatatcatgttcccgccgtacattttgcatgagtcatggcattttcatgcatatgcgctcaaccatactttacgcctggtaaactggcatccacttgtatttatagtcgctcaccacgcagttactaaaaatacaaaacacaacggggagacggaaactccactctttctaatcatgtctacccccgaccccttccggatgaaacaaacatgaaac

SEQ ID NO: 132451 - DNA, 406 bp, Glycine max
  unsure (1)..(406): unsure at all n locations
actctctctaatgactatggcatcattttggcgctaaactgctggtagttggaggccatcttctcaattaaatttctggctttagcaggagtcatgtctccaagggctccaccactggcagcatctatcatacttctctccatattactgagtccttcataaaaatattggagaagaagctgttctgaaatctgatggtgggggcaactggcacatagtttcttaaatctctcccagtactcatacaagctctctccactgagttgtctaatacctgagatatccttcctgatggctgtggtcctggaaacagggaaaantttttctaagaatactctcttaatgtcatcccagctcgtgatggaccttggagcatgtaatacagccagtcctttgccactccctc

SEQ ID NO: 132452 - DNA, 438 bp, Glycine max
ccacaactttattgtctttaatcaatttagaagaaacatcgtagaacagaatagagaaactagtatatgtaagcctagaaacagaaaccaagtttctagaataggacaaaacataaaaaagtgttttctaataacatacaaaaaccagaattcatgagagagttaacaggtccaatagcctccatgtatgaactcatatgatttccaccatagatgctttgttcacttcccattggatatcgcaaggttagaaaatcctgcacattattagcaatgtgaaatgtaaacctgaatcaatccatcagtattggaggaactcagtaaatctattcaagcaggcaaaataccttttttcaagccattttgtattgaacaaccctctcattgtccaattctacaaaaagcattatcttttctattcgctcattgacatctatg

SEQ ID NO: 132453 - DNA, 325 bp, Glycine max
aagagagttatgatcattaacagtctcctcatccccctgatttgatttagatccttcaaagactatctgtcatcagacatatgttggcttcttcttcattaaatgaggtgtcatctagaactttacaagggcccatgagacctttcttttccttagtcttatagtatatcttcctgacttgagacttgtcttgttctgggcattcaaatatgaagtgtccaaagttcttgcattcatagcatactatacagctatagtcttatccttcctaacattgagccggcgttttgaagaggtttccatctgataacctttgtttttcaca

SEQ ID NO: 132454 - DNA, 410 bp, Glycine max
  unsure (1)..(410): unsure at all n locations
tttattcctttattaatatatatgtgaggggtagagggtgtcacaacaatgacntagatggactagtgaatcacccaaattagcttctaaatggctttagagaaactctcattgactacaacctttatgaccttccaatggaaggctaccaatacatgtggaccaggagatgaagaaaacatgatgttacagaggagaaactagattgtggattgacaaccctagactggatttttggttccaaattccaaactctcaaatggattaacatcaaaatatgatcattcctttattgggcgtcatgtagaagctataagaaagaaattttcatangccttnttggttgaaaactctgggcttttaccttgactacagaaattgtcacantgtgggcaatgatcacaacgtga

SEQ ID NO: 132455 - DNA, 477 bp, Glycine max
gctgctctctactatatgtaatcctgtcatcctttgttatcatcaatatggacagaaaataccttcctccacctagtgaatgtactcttgtaggcccccaacagtcaacatgaatgtaatcaagagttcctttggtggtgtgaatagctttcggaaatataatcctatcgtgcttgccgaaaacatagtgctcacaaagttcatccagtttatgatttctcaacagctgttgtttctgaagtatcatcatacctctctcactcatatgaccaagcctcatgtgccacaatttagttaagacaagtatgttcttattggattatgatgcaacatctactagaccatcctcaacacatgttgtaccttgaagcatatagagattacccctttttatactcttcatcaccattgtagagccttctgaatttcatgacccattttagtgtgcatttgaccccttccttcatatacctataa

SEQ ID NO: 132456 - DNA, 218 bp, Glycine max
actacggctaatacttcatctaccgatctctatattctgggtatgttgtctcccaaatccaaagagtactcactctctcttctatttttcattcaaacaatctgtggaggggtttttctaatccgggtctattctttttattctacttgggctctgatgaaaatgctgggggcgaaactcatgggttttcagtttttccaagttcttggaatgaaaat

SEQ ID NO: 132457 - DNA, 428 bp, Glycine max
  unsure (1)..(428): unsure at all n locations
aatcatattctcatgtgtggtgcaaatattacctgtagtatttgactcagaggaatgtataatactcataattattttgctgcttattcccatggagaatggtatattggattcccatgggaatgaatattattttctacaataactaccacgccccacctcattctctcacatgtatttatttaacttgtatttatgattaaataaatattattttttcctcaatttactggtatcaaacaagcatgttcatgggaatgatgttcccaaaaataatattcccgagcatgtgaatcatgagaaaaattntcttaacttaaacaaacgccccctgtgatacatttagaagacatgtattcttaagcccaaaccaaaactttacatgatttaccaagtaatttatgccatagggaatcatgcaatgaaaa

SEQ ID NO: 132458 - DNA, 377 bp, Glycine max
  unsure (1)..(377): unsure at all n locations
gttcatcaagtcaatttgtattatggaagtaactatcttgcagaaattgtggcaaaagatgaatcgagttacatcactgcttcatttactgccaaacacatttaggactgttgatgtccttgttactttcagtttcaccttgaccaagatgtcatgaaccatgttgaaaaatctaaattgattcaaccccatgtcctgcgtaaaaatatgcaatacttcatctgtgtatcattcacatacatccatgctnttcattggtgcattgctcattgcattctttccttgagaagagaaatatatattattaaattacattaatataatacaattaacttaatcgctttatcaaaagagaacacgcttacgacgccctatcg

SEQ ID NO: 132459 - DNA, 345 bp, Glycine max
  unsure (1)..(345): unsure at all n locations
tcatcaancatctttgaatcatctatcttttacatcatcttctttcaacatccttgaatcaatctttcaacatctctcaatatcttctttcatctctttcaacactttcaacaaaactttctaattcatttctcttcatcgttctaaatagttttgctcaacactctctcttccaagaaaagttatttgttcaaaaacttgtgctattcatctttntcattctcttctccctttgcccaaagaacgaaagactaaccgcctgaattgttgtgtgtctctcttctcccttacaaaatagtcaaaggactaaccgcctgagaattcttttgattcttcccttcccct

SEQ ID NO: 132460 - DNA, 369 bp, Glycine max
  unsure (1)..(369): unsure at all n locations
ttcatcaattattatattcacacatttaaccttaggcttaaataaaaatttcaatctcttgttatattatntatcccactctgatcgttcaagntttaaatattttatttntgtctcttaaaataatatccaatttgattactatcatatatgtcatgacatatttcacaattggtctggtgtgataaactaacaaaagatttttttttatacatgagaaagctaccaantaaaaaacacaaaacacaaaactatctaaacttaactatacccatagcatcactcaaacaaacaagactaagaggatgagggctngatgaccacatctaaggagcacattnatgctgattggttgaagctccattttta

SEQ ID NO: 132461 - DNA, 292 bp, Glycine max
  unsure (1)..(292): unsure at all n locations
ttctacgctccactggaatgagaaaaattatggtttctgcatttttaaataattattatatatgataataatattactgtgataagttataattggataatagtataaaaatcctttatacaattagtgctcgcactatttattatatgcattggtggtaaaaaaagtggtaattgttgtgtaatttttgccctccagctattaccgttttatgggcactggcagcatcccttgtaccatcaatgcanagaggaaatgaaacagccagaaatcttcacatcgcgcttaatgc

SEQ ID NO: 132462 - DNA, 309 bp, Glycine max
  unsure (1)..(309): unsure at all n locations
atctattgtgtctaaaacccctcaatttagtggattttcaagggttgagaagtgaaaatgagaatggtgtaattttggagcaaactctcagagcatcattatanaccctaaaacagaatgggtatatttagctcacatcaaacatgacaaagttagcatgctttcaacaaattccttcacaaataactaccagaaggcataaacctagtagaactacccgttatatctcccacaacccagtacccacgaaaatcatgtgagaaagaagtctacccaaacctgaaaattgaagtcccacaatgtagaggt

SEQ ID NO: 132463 - DNA, 258 bp, Glycine max
tcggtgcatgtatcccgacgacaatgatacggaaggtattacctacaccgtgaataattgacgatatcttaggatgaagccaaccatccatggtcttcttcatgatactaagaaatttctctctcaaaacttagagtcgaatatatgtgtgaggatagctatgtgatgaggatagaatcattccataatatatcacaacgattagtaggcttatctcacaaagcatatatcgatgaagtactagatatatcaagatgg

SEQ ID NO: 132464 - DNA, 226 bp, Glycine max
taatcgattacctctctcttaacaatgtgcttcacgaggtgatcactaactttaatagaaatagaataacgtggtgtaatgagcgcaagctatgttattgattacatcaagaatctaatcgagtacgttgctcttgaaatgtgtccagttgtctggaagaacactctaattgattgatatgataatataatcgactacttcttcctcataatcgattacattgtat

SEQ ID NO: 132465 - DNA, 322 bp, Glycine max
  unsure (1)..(322): unsure at all n locations
tttcttcctctattgcccttangtgaataccacctttgtgtggnntctctatttgtggtcttaacccctctcatgcaacnnttcttacaactctgacctagattccccttcttattgataaaagatngtgcaagtgggaggggaatgangtctaatgtgtgtaaaggatngaacccatagacaacctcaaaaggggatggcttggtggttctatgaacccccctattgtangcaaattctacatgaggaggatactcatcccaagacttatgtgttgcctttagaagagcccttanaagagaggataaagacctattcacta

SEQ ID NO: 132466 - DNA, 397 bp, Glycine max
  unsure (1)..(397): unsure at all n locations
atcttaagcaccgcggctgcagcttctgagaaagtacatgattctgtttggaaaaaccctgtcaggccttngttagccgttggatcttctcgacatttggtttgcaactttacaagacacttgtccatgatctgaccgttgggatctttgagaagatgtttggagtgtgctagaagcatccgtttccgagagcatctcttanttaagcatttcatcctttgctttngtgtagctgaggaaaaacatcatttcttcttctttctttcttccaaagccatttctaaagttccaagaactgtctccatcacacacagccaccattagccaccacanatcatcattggtctccattgaaaactcacaccgagaggaacccttcaaccgaagcgggaatctt

SEQ ID NO: 132467 - DNA, 262 bp, Glycine max
  unsure (1)..(262): unsure at all n locations
gctgacaggttgttttcaaagcagctgtgcactccttattactgaatgcaggagaccccgcttaccacagctatgaaccttacatttaaaactctatagtggcctatgtntagagtttttcttttgtaacgtttgtgtcttttgtttgcgaatttataatacaaggatctttcttcatctgttcctacgtctctacccattctcattcatttgcatgcttacctctttatttctgaaacggatgatccgatgactagtcccc

SEQ ID NO: 132468 - DNA, 270 bp, Glycine max
ctgagctatatttcctctccaactggtccgagtaacagtctgttgatctggacccaaaattctgtgttgctacagatcatctaacataacttccaaaacaccaacttctcgcagaactttcttgttctgctggtcaaaggacaaaagtcttacaaagaaagaaagaattgtccgcttcaacgctgatgttatcggttgctgcaacaaacaacaaagcgaaatgagttcttgctcaggaacacatattacaacagtcacggcctactcaag

SEQ ID NO: 132469 - DNA, 427 bp, Glycine max
cacccacaactccgaatcatctatgcaatgatagcacttacctttgaataaacagctacattaacatcattgattacaccagcagcttcaactctaaaatagatatcctttacatatgttgatatcacttctagaacaggagatccatgttgctctgtctgaaagatataatatcatctcgagttaacgtttttggagaatttgcggcataattgaacagggaaaaaattagtttcatttgatacctcaattatgtatctcccatcaagctgattaatgatggaaagcctcatgatctttgagctaccactaccatattccattatccactcaaagtccattctacgcttagcttgatgatggattctgaatgtggagaagataccttatgggagcaagctgctgcctctgaacatcttatgttata

SEQ ID NO: 132470 - DNA, 377 bp, Glycine max
  unsure (1)..(377): unsure at all n locations
agctngccacccagcttgttcatgctagtctacatcgcctaggggagctaggctgcttcctccataagcaaccgccttctgaaggaatattctagaatgcccaagntggcctggttgctatttgcacccctattttaactaaatacacccctattcttttttggtgatgctttttttcctaatgtaacgaaactttacgaagttcggaacgatgcttgttgtctttccgtaatggtacgaaaccttacagattacgtgatcatccttgtatttcctccggaacgctacgaaactatacggattgacactaacacttctttaattccggatgtacagacatacggattggcacaatgtttctttgacttcagatgtac

SEQ ID NO: 132471 - DNA, 387 bp, Glycine max
  unsure (1)..(387): unsure at all n locations
ccgacccggatcttaagtcaccgcggctgcagctcataaagctgtctctttattttaaacacaagctgagttttattcagaagaatatgagtctatctctcttatcttagtgagagtgatnctcctaaattcttgagtgattcaagaacaccctggctgtatcaaaggactctcacaacctttgtgtgttgccctcgctggaaagagtgattctatccttcctttcatcttcaccctagttctttcaaaccacaattccagagaatccacctctgcccagagatatctcgtggccataactcccattttacgcactcaaattaagtgattcttgagcctaaattgaatttcaaaacgagaccttgcaccttcgtttggaatcacctc

SEQ ID NO: 132472 - DNA, 365 bp, Glycine max
gaccttgattctcgagagcttctagtaatccagctctggaatacatccgcggaacgactttggtgaaagtatgaccataaattctcagagctttcgtgtcaattcatgctgctcaatatattatgcgcccgaatcggactgtcggttgagaagtattgaccatttgaatttttcgagagcttccgttgttcaatatcgagcgtctcgttatattatgcgcctgaatcgtagttatgtgtgaaaagttatgactatttgatattcttgacagctctcgttggtcaattatgtagttctcgatatactatccgccggatacggcctttctggtgatatgtattaccattttgattcttgagagcttc

SEQ ID NO: 132473 - DNA, 355 bp, Glycine max
  unsure (1)..(355): unsure at all n locations
ccccaaaatgaccaaaaataaggtgctgaaatggtataacttggccaggatatgatatcaacaagtatttcttctacacgaaatcacaagacaacaggagtacaatgcaaaacaatggggttagtcaaaggggtgaatctcaacangttgttactctacatgattacaatcctcgtctatcttccatgtcttacnttggagtcactaaagaattctcgaagcttaattatgccaaattcatttgctgtgttntcaagtgtaagtgggtagataaaaatatcagtgtgtgaaccgatgattntggaatactttagttgatttgaagagctcgcatatcagaatgatcctttatcat

SEQ ID NO: 132474 - DNA, 331 bp, Glycine max
attatattattattttacctctctgtttttatttccaacgtggttactgcatgaccgaacggtcggaattcattttaaccgaatataactgatgatacaattcatacgagcggaggatatctttttattcttagattaggcgagaaatgacataaattaatgacttaagcacgtcaaaagggggtgtagtaagttgatgaatacgagaattaaaatacatgaaacataatgtggaccaccaccggtacatagaatgaattgaaaatctcggtttgaagtactcaccccgtgaagactgaagaaaactaataacgaacgatgaatgtcttat

SEQ ID NO: 132475 - DNA, 447 bp, Glycine max
  unsure (1)..(447): unsure at all n locations
aacacacaaaatagaagtactaagtatttattacctatacttaacagaaaatacttatagcactacaaaataaccataaagtggaggaagttgatacaatttacacaagttttatacacaaaagttagtcatattcactgactaacaacttccacaaatntatagttntgctcgtactcaagcaaaaagagaacagcttacttgtcctcaagtgataataacatgcagtgatcatgtacaaaggtgtatgcagcataaattactggactcatgatcagagaatgaagtaaatgccctcatcacttgtcttcacaggtatgcagtatctaaagagagaataaatggaactgaacattagatggactaggaataaataatatcagggaagagctcaaccacagctacgtactatcactcagccaaggttaagtatcataatacactaca

SEQ ID NO: 132476 - DNA, 237 bp, Glycine max
  unsure (1)..(237): unsure at all n locations
cacctttgctgtgtattttcttgacctcgtataaatgtgagaccatcaatnttggtttaattgtatgtatggtgtngagaagagcatggacatgatgaacaatattgacaaacctcattcacaaattgattcaacaatatgtactagagcatcttatttctcattctagtagcaagttcatcccaattctaagcatagttgtacttcacaacatggctctcacaaacataatggatg

SEQ ID NO: 132477 - DNA, 380 bp, Glycine max
  unsure (1)..(380): unsure at all n locations
ccactacctctccctgagaaatgatccttttacaacctaatntacacccacccagccaacacctactctcattaaaacttgtgaaaccaccatgtcaacaatatatttatccctccattggtttactcatctttgcagaaaaaatgattaaatataaaaccccttcataaaatgaacagtgcgtattccataaagaactcagttagccatgtttaaaattattaaatgtatttaaggagcttcttagatcatattaccagcctgaagcatcatattacttcttacaagtgcaccttaaataggttgttcctttgatactctagaagatttatgcatgctgcttagtagatgatctcattatcttcaataatcacagaatt

SEQ ID NO: 132478 - DNA, 321 bp, Glycine max
gcggccgacaagcccgttgacacgccgagatttacgtcatcttccacgctcacaagagctgtcatactgactttagagtcccgttgacgggcggaactacccgagtggttatccgaataaacctatttgctgtctgtaagacgaaaagcctgataacacgccaagactaacgtcgttttctgcgcccttcgttaatcgcggctgacaatccctgtgacacgcggtgattaacgctaactccgcgctacaagatctgtctactgactttgagtactctgacggttgaataccaagtggtttcttgtaacttttgtgtaggat

SEQ ID NO: 132479 - DNA, 392 bp, Glycine max
  unsure (1)..(392): unsure at all n locations
gcctgatcctctgcagggngtaaaggatgtgaagattacatagatgggccacctcacatgaactgcgaaatatctgcagatggtctaatgaatcaacttgtttccatttctttgtagtcctttggaggccagttgacatttatttgaattttgttgtgctttcattcctttgcaagtttggcattgtctatggctgtgtttcctatacttctgagctgaatagattcttttgaggtcaatgattatagactntaatatgctnttttttcttcttttttattattatgtggnacctattatcactgnctatgtctatgatgttcattgacttttacggtgaatagattctttcatgatcaattattacagaccttaatatgcttctatttttc

SEQ ID NO: 132480 - DNA, 475 bp, Glycine max
  unsure (1)..(475): unsure at all n locations
agctngtatataatcaacagacatttttatgttagaatcacttaattgtgaaaaagtatatcaagttatttaaacagtacattacctatacccagtctggcgtcaaactcaacccttctatcctaactgcaacaattagaagaagaaanattagcaaacaacacagcgtgaagataaagttatgcagagacaaatatggcatgttaataaataataatattaagcagtagacaatctatgaaagcatctcaatcttgccatccaagtatagtaaacactaaatttgaaattctaagactaagagagaacttatattagacacatcaatgtcatttctctggggctagttgagaaggaactgggcttggagcagtctacagacaatgttttagaaattgtgaagaaacattgaagaacctataatgtgaataggagataaaactaatcacttagttctatctgttttttattatcg

SEQ ID NO: 132481 - DNA, 506 bp, Glycine max
  unsure (1)..(506): unsure at all n locations
tgacacttagatactcacgctgtactctcctatgcttgatggagcttatgcattggttccccattccccacctgctagaaagaattcagtatttcactagtctctctcaatccaaccactatataggagcatcttattgtgtntttctgtgtaatgtactcttgtttgcttgtgatcatctagtgggacatgtcctcttgctgtccctcagtggtgtggtcgtgctacaacgatgtgtgtcccttgntggagaatatgatcttgtaccactttttgcatctattaatgaatatgtatgttggttttgctgattctgagcgctcagcttttacttggtccatcgctccatcgnacatactacaaatagtatctcttcacttgtcacgactctttctgngagattatattatagntanatctctttacataaccagntatgacttatgagaccatcattttaatttctctttaaaaaacataatgagaccatcttttcattttcttgt

SEQ ID NO: 132482 - DNA, 475 bp, Glycine max
  unsure (1)..(475): unsure at all n locations
taccagggctataaattatctcttggtgttatattacacaagngatatgnggaggcaagaaccataatataatggtttaatagctaggtggagtggaaaattggtggtggcaaaaaaatcaaaattgttggtcaagagcctcttgcaaatacatacatatcctatgcttttattatattctacacaaaaaagaagagactgttggaagtatggcggcttggataggtgaaatttgctatgtcgtcgtgatcggtttgagtgggaggaaattatggtaaatttgctaggattgctacaaaatgttaatattaaaaaggatgttagtgattagtggttttggaaggagggaagtctgaactgtacacagttaaatcggcatacactacagtgtgtgaaaatatgatgggaagtcagcatatggaatagttttataacatggaaaatacaagttccaccgagaaattaataccttttg

SEQ ID NO: 132483 - DNA, 369 bp, Glycine max
agcttcatgatgaatcaagaatgattcaattaattctttatgataacaaaggtgatgacggaaagctcaaagatcaagaacaattcatgataacaaagatgatgatctcaagaatctaagaatgagttcaagatgttcaagattgaattaagaacacttcaaggttcaagagggaaattgatttcaagaatcaagaatcaagattcaaggttcaagcttccaagaatcaagatcaagattcaaggctcaagattcatgaatcaagagaagaattaatcaagataagtatgagaaatgtttttcataaactgagtagcacatggattcttctcataacatgtttaccaaagagtttttactctctggaat

SEQ ID NO: 132484 - DNA, 353 bp, Glycine max
  unsure (1)..(353): unsure at all n locations
tctcctacgagtgaaacactatnnnnnngttgngnngtttttngnnncctccatggatcccctggcctacttgagaacttatccattgaagaaaacattctagagacactaattccagaagatgccattgcggatgatggtcccaatctatctctttatctcggaggaccgtttttatgaaaagaaccatcagagttccctattatgaaggagaggatggttgaagtcaccacccaccatagagaggagaacagggattttctcttgaatcttcacattttgaaatgaggcagagactcaattctgagccaactgagacagcttctgaatatggttcctaaagacacaaatcg

SEQ ID NO: 132485 - DNA, 486 bp, Glycine max
  unsure (1)..(486): unsure at all n locations
agtcacctgcggcatgcaagctntgagaagtgatgatgctggtgaattttataatgataaatttgaaactctttgtgaataaaatggtatgaatcataatttttcaactccaagaactcctcaacaaaatggagctgtggagaggaaaaatagtattcttaaggaactagcaagaactntgttaaatgaaaaccatctaccgaaatatctttgagtggatgcggtaagtacaacttgctttggtctcaatagagtgattataagatcaattttgaaattgacaccttataagatctacaatgttagcaagtcaaatatatcacatctcaaggtctttgggtataagtgctttgtgttaacaacgataaagaatacttggcagttgatgtaaagcgatgaatttattttagatctatctctacagacttagagtttcatagatcataagatgagattaccatgtagttgagattatcccatgtggga

SEQ ID NO: 132486 - DNA, 380 bp, Glycine max
  unsure (1)..(380): unsure at all n locations
ctatagtgcagaatttcttctcccataagggtattccgtcctgccaatactcttacgagattgaanaacaagacattcaagatattgactatataaggtaaattggaaggggcactgtaatgaataataaaatcatcatatcatcatagtaattactttctagaaatggctaaagcctcttgtggtgatagatcaatactcaacaaccacaaaagctatgcagattacttatatgaaaaaatacaaaaacttctgaaatcttgtataaatttctatcgaccaggaacctacagaaccaaaccaatgacaaaaggttgccaccagaggacgttctaaagactataacaaccaatatatatgaattatattgaatatataaa

SEQ ID NO: 132487 - DNA, 337 bp, Glycine max
  unsure (1)..(337): unsure at all n locations
ctaagcacctgangctgcaacttgcacctaaacctttntgatctatccactaccctgtctatgctggatatagggtatgcatctttgtggcatgccctgttcacgtcaatgtactcaatgcacatgcgccatctgccgttggcacttattattatgacgacaatggcgagctaggtacataacctaacctctatgatgaagtatgcgtggagtaccttgtccaccttctctttgacagctatatgaccactttctctcgtcgttctttccttgtaagatacttgataggcctgaggccatataacaagttggtggaagattatgtcatggtggattc

SEQ ID NO: 132488 - DNA, 260 bp, Glycine max
  unsure (1)..(260): unsure at all n locations
acgatgttctcatataccatcgtatagtttacaacantaccaacatgatntccgctctctcgtcgtcactatctatgaaggctcacttcttaatgattttatatctaactttatatctatgtctacctacttatatatgtttatggctacagatatatgtatctatctttatatattttcagagaggacacagtttgtgtgagctgctgagaggtcatatctgcaatagccacatgattaatgagaagcatcacatgact

SEQ ID NO: 132489 - DNA, 347 bp, Glycine max
  unsure (1)..(347): unsure at all n locations
catcatatgntctagttatattatgtttatatatattcttagtttcaagatagcaatgcctacttctaattctagtttcgttgctagaaacacgatggaaaataaattatatgaacttccacttaataaatgaaataacgctatgcacaaaccaaataacttaacatgcctaaactagagttgagtatcgcctatgaagaggccagctggtttgtgacacctaataagccagaattcaagaaatttctgcatacataacttaagaaatctcgcgtgagcagcgtatgttgtgtgaatatagcttcaaataacgtaatgaggctcacaatcaagcttcatatggttct

SEQ ID NO: 132490 - DNA, 322 bp, Glycine max
  unsure (1)..(322): unsure at all n locations
cgaagccatcttctcaattacaatgctggtattttgaagccctcctctcaattaatttctggcttcaacagtggtcatgtctccaagggctccaccactggcagcatctatcatacttctctacatgttactgactccttcataattatagtggagaagaagctgctaacaaatctggtggtgagggcaactggcacataattctctaaatctctcccagtcttcatataggctctctccactgagttcgctaatgcctaataaattacttctgatgcgtcgggacctggagcanggaaattctttctaaaatactctctcg

SEQ ID NO: 132491 - DNA, 443 bp, Glycine max
  unsure (1)..(443): unsure at all n locations
attatgggatataaatatattttatcctgaatttagagccatgttccaagcagaggctatgagtgtggctntctcatgcattggatgtggaatatagtaagttggggtttgaagaatgaatagagaccatggtatatntaccttaacaaggttcaattatttggttactatcaatgtttaaacattttacatgtacatgactaatgtctgtattttatattttgtagtgctttggtgatgaaacacctgtagacattgacaccataacaataatttgcatgaaatgggcgcatatttttacaaagttataacaattgattagaaagattagatgaatagaacgaccactatgggatttcatattattgacacattataacaagtcgtaaataatgacatatctgacataaaatatatattgttattacatttgtttcaccaag

SEQ ID NO: 132492 - DNA, 263 bp, Glycine max
atatatatacacttatatatatatatatgggtgtggcgcggtcgagcgtctaaaagtgactcaaataatattctaccaaaacctgaacggtattattagagagttatcagtgtcgtaataactctcattaatcagaaatcataaccgaattttctacatctaatatcaagacctgttttcatttaggacagaaaaatggatcaactgtacaattttctgtgatcttccatctcatgacagaattgggatgatgcgttacaatg

SEQ ID NO: 132493 - DNA, 287 bp, Glycine max
  unsure (1)..(287): unsure at all n locations
ttagactattgaagaaaatctacgaagaaaactcaaatacctgaatatcctcccatatcacatccttctgagcaggaaggacttccttccatgtgtcatatgtcacgacgaccttatcacgagcgacaatccgcaaattatgtcttaatttcttcttgggggaccgncggccttgccggtagcatgatcgacgatgaccacaggtctttctgccccaggtggtctagtggccaatgatcgtagccgtgtcgccttgcatgtccacttcaacgtagatggagacgctg

SEQ ID NO: 132494 - DNA, 252 bp, Glycine max
  unsure (1)..(252): unsure at all n locations
atcccttcgcttgccttgatgtaaggagcgaccaatccactgcacaacattttctcacatcatgacttcattcaatgtctaacgtcaagatcagaccattatggaagatcaaagataatggacctcntctatcacatgcaactttactttatatctttttaagtcttccaatacatattcagtgttgaaccgctatttcctgtctccagtcaacgtatcgtgaattcatgcctgacttcataaaacttctta

SEQ ID NO: 132495 - DNA, 301 bp, Glycine max
tgcatgaaagacctacgcatcctccaagaatactcctatacaagaaaacagagacctccacagtgcacttgacatactacaatagtctaatcacaacaaactcctaatttttcccctctcaaataagtctctctcactgtatctcaccctctaatctgacccctctccacttaaagtactgagacatacgagccttctcatttgtgtctttactcgacacaggaagggaagtcaacaaaatcaacatttattctgagaaactattcaataaagctactcccctgcacccaaggaaccaccc

SEQ ID NO: 132496 - DNA, 160 bp, Glycine max
atgatgtactgtatacacgagttctctgttggcgcccgcggataatgaattaccaaatttcgtagccaaatgtctctggtgggctagctaggggctatatataggctaacattaaaatgctgtcggtgcataatgctggctcactatcctggacacctga

SEQ ID NO: 132497 - DNA, 448 bp, Glycine max
catcatttctggcgctaaactactggtatgtggaggccatcttctcaattaaatttctggcttcagcaatagacatgtctccaagggctccaccactggcagcatctatcatacttctttccatattactgagtccttcataaaaatattggagaagaagctgttctgaaatctgatggtgggggcaactggcacatatgttcttaaatctctcccagtactcatacaggctctctccactgagttgtctaatacctgagatatccttcctgatggctgtggtcctggaagcaaggaaagttttttctaagaatactctcttaagtcatcccaactcgtgatggaccttggagcaaggtaatacaaccagtcctttgccactccctctaatgaatgaggaaaaccttcagaaatatgtgatcctcttggacatctggtggtttcatgg

SEQ ID NO: 132498 - DNA, 319 bp, Glycine max
  unsure (1)..(319): unsure at all n locations
aacttcatacaataaatccgacacattcttgaataatcatcaatgaatgcaatataatatttattgccattcaatgatggtgttttcatgggtcctcccacatctgtgtgtactaactgcagctcttgtgaagcactctgagtcttgttttgttgaaaaggaaagttggtttgttttcataatggtaagcagcacattttggaggtaaatcttctaattctagcatgtctttcactatgtttctctttttcatgaaaagtagtgcatcatgatgaaagtgccccaatctcttgtgccaaagcatngtattatcatcctt

SEQ ID NO: 132499 - DNA, 316 bp, Glycine max
  unsure (1)..(316): unsure at all n locations
cagatatgtatactatctggatcatnttangaatacaaaccctacttgtattatggggagagactattgcattcaataaaattgtgaaacccgcacatttctatgtgatggtcgtaaagttctttctttcatatgaatataagacctctgcatttgatttacgtagctatacacagattatattcgtgtcgcatgtgcctacacattattctatctacgataaagggtctacgtattcggccatggttttcttgaacaataagaaatatttcgcgaccacgataggactttatcgttatacatataaggtttcaaa

SEQ ID NO: 132500 - DNA, 361 bp, Glycine max
atatacatatatggaggggtcctgtcatcattaattcagcgagaaactatgcctggagtgagttgggctgaatgagagagatttattggatagaatgaatagaaagaaacgaaagacaataatgtgatatacgtcatggatgatatgtgagagaacaagaatatataaattggattggattgagaatgactctgctatcttcacatttatatatgatctagcctgcgcttgacgtatgaatgcatttaacatatattactatataaataatcatatcgatatatataaaattgctaaagccatacatacgcatgatatggtttgatattctacatattaaaaagtaacttcattcataagt

SEQ ID NO: 132501 - DNA, 179 bp, Glycine max
  unsure (1)..(179): unsure at all n locations
atgtctaacagaaccctgatgtaccactttgaccatactactgatatctgttctttgctccttgataaagctattgatttgtcatgaattgaaccctaaactttaaatgattatctcctaataccgttggttgagatactaaggagagcnatatgtgttcagggctaatatttacctct

SEQ ID NO: 132502 - DNA, 307 bp, Glycine max
tttaactaaggttttatatatccactgcttacttatcttctacctcactggatcttactagacggtatactctggtcaatggaaaagccgccattatactgcccttgtctgataagtgctgacttcactgctaatgagtcagtctacctaaggacctattgtttaacctcaagaaacttcgtgcctgagtgaaaacccttacctactagatatggctttttgacacaatccaatgatgtcttggttactgagggggtgtgcactgatgctatatgtttataagcgctcgcctgcctagagcttattt

SEQ ID NO: 132503 - DNA, 305 bp, Glycine max
  unsure (1)..(305): unsure at all n locations
aatccttagatgatcaaattggtggctattttggaatgtttatgactataagcctgcctttatgattataatcccgatattggtatgtttgatggaccaatttgacttcctaatgcaaattgtgtgataaaattgagtgctcttggtgttgttgtgntttttaacttatgaatatgtgaaattgtttgagaggttttactctccatgttctgagaaacatnnttatataatttattcgtgttttgaataatatttaatagattattgtgatagattggtatactgtgatcatgaaaatgtgaatg

SEQ ID NO: 132504 - DNA, 428 bp, Glycine max
  unsure (1)..(428): unsure at all n locations
ctcagcttgattccttgctcggaacctctcattctcatgtatacccaacccaatccccggggtggaaaacaacctttttgcgntgcttgtttgcgttgttagcataactctcattccttttcaattgcgccttgactatttcgagatcttttcacatagtccgctatggcttgtccttccttatgcctaaaaacttatatattaagcgttggcaacaaatcaagaggagttagaggattgaaaccataaacaacctcataaggagaacaactagtggtgttatgcacagtcctattataagctaattcaatgtgagataagcaaacttcccaatttttaagattctttttcaaaatggtccttagcaaggtacccaaagtcctattcatgacctccattttatcatctgtttggaggtgacaagcagt

SEQ ID NO: 132505 - DNA, 339 bp, Glycine max
  unsure (1)..(339): unsure at all n locations
agccctgtagaactagcatcacatgatgctttatnggcacaaaataagatgttgtctaagcaaccttcaaagtttaacaaaagcactcggtaagttgccaactacactgtcaatttgtcaacctacacattcttctgttttgcaagtgataggttgtatcatctgtggtgaggctcatgaaacaggccaatgtaatcccattgaagaaaacacttaagaaattcattatatgggaaatcaacagcagcaagggtattgtcataccctaatttcatccggggaccatccgttggtgggatgcgaccctcgtttgccacttcgaggtatttggccccatcg

SEQ ID NO: 132506 - DNA, 333 bp, Glycine max
  unsure (1)..(333): unsure at all n locations
tctgaaaattaatttaattccattgaatttgaagccccgacaaccggctgtagggtcatactctattgtttctgcatgagaaattttttccataatatacaaaaaacaattactaaaatatacaactctctctattatttaccaaaatatacaactttattatttatagtataaattcggggtggggggcccgaatttacactgggtttttcaaaaaaaaatttgcaatctggtgttgagaattntggtcccccaaacccgaattctctacatgggtttcgttttntaaattctttttaaaatatttatagaataaggaaattaataaaattt

SEQ ID NO: 132507 - DNA, 352 bp, Glycine max
ggatccttaagtcacctgcggcatgcaagcttgcaatgccacactattcttatatctatcaggattaatctcaatccaacctagttgacgatcctgataaccctatgaacgacttgtccgaataggaattttatataacgtcgtaaaaacaacaattatgctagctattcaaacattctcaaagatggaaatgtattccaatattctactttctagtataataacatcctataataactagggtcgaatttagcagtcctctgcatttttcttgtactctcttaacatccatgaatggacggagacgagacggaactacaaatgcattaaagccaggaaatcatttgcacga

SEQ ID NO: 132508 - DNA, 286 bp, Glycine max
catgttggaacccacatgccttcatcgtgctgagtatcccgtgtaacgtcatatgcgactccagatgaacaagcatatccatcccattctttgagccgagcagcattgattaccagtggcagtccgatatttgtccttgatgcattcacaattctgatagtgctgtattcggcgacagcacacccgacgcttacttgtcctccagcccatgagtgaaagccgtactcttttgtaccttctgacctcactgcattaaacataacgtgtctctgcctaaactttatgc

SEQ ID NO: 132509 - DNA, 63 bp, Glycine max
tgcttgtggtggctggccctcggtgaaacttggatgatatgtgagatatggcctctggtaatc

SEQ ID NO: 132510 - DNA, 384 bp, Glycine max
aatggctattgaattctggggtaagatgtggtgaaatctgattccacccctccccttttattattcgacagcctttgttcgcccaggcgagctggcctctctcctaggcgagctaacaattttgttgtttgcaagttgttttcgcaaagctcttgagctatcattacatattcccctttaagccttataatatgacaaactttcgttaactactagataattcatgaattgaacagctgagactaaattacgacaaaggtgagatactaggacctctttacgtcttgtggcacgtgctgagtgagttcaatctatctcctacccttctgatggactattgactggccactcctgggactttttttactttattgtctagataca

SEQ ID NO: 132511 - DNA, 365 bp, Glycine max
  unsure (1)..(365): unsure at all n locations
aacgccttanaaggaccaccttccaagtaaaaagaatcgcttgattcgcccttttaaaagaactacgtangtctgatttcctcttccatggatggtatgtaggagcaagagctctctcttttgtcgacctcataaataaaaaagaatagatgttatgtacacaatttcacacaattctaatttaaggttgttgtccttttgggacacacgtgagaggtgctaataccttcctcaaacgtaaatacaactcccaaatctggaatattcttcatgaccgtgttcctactggttttccgacgctttccacaaataaacattggtggcgactctgcgcattctcctcctttggaaaacacacctgtgag

SEQ ID NO: 132512 - DNA, 323 bp, Glycine max
actgagctgcactttactattgcaggcggtttctatttttggtcacgcagcttgacatgtcttcttccgcagctttttaatcgctaagggctaacctaacatcttccacattccttggtttataggctgttatccgcattgctttgctaaacccatcccgggttcatacccgttccccaacataactcgggccatcattaccgccgcatcggacagacaaagttgcccaaagagggagtccaccgatgaaatgctgaccacctcataagactggaaagcggtttctacgattcttctgtgcgttcacattaggcatggaggat

SEQ ID NO: 132513 - DNA, 313 bp, Glycine max
  unsure (1)..(313): unsure at all n locations
tgctgtatgttctgtacgctgtgcatctgtaggcttattcgtcttgtcttgtcttgcacatttttgtcttggtcttggttctggtgtctatcaaaacttttgtgcanaananaaaaatctgtttgagttttggttgggcctggcgtattgtattctgtcttctgtcataccttattttccgcctatacgaatgctgtgtgggccaaagttgcctaantgccgatatgctaaattgtcatatttccctaatgatgattgcctattgaacgaattctaatcgctggacgtcttgaaaaaatatgaaaatatgaga

SEQ ID NO: 132514 - DNA, 387 bp, Glycine max
  unsure (1)..(387): unsure at all n locations
aaccagtgcccctttggcgcgcccaataaacctttctttctgccnaataagcggaaaggacatctatatattatatgtgatatatatacagcccgaccaactttttatagggaaaaagagtacctaccttaaggggggaatttctcgaaaggaaatataaaattttaggacccttttccttaaaatggggggataatattgggaaaaatggccaaaaaaatttcctttatggtttaataggaaaaaatattagtgcaaaaaaaaattactaatttattttacgacaccgtgttttaaaaaaaatgggaaacccatattttttaggatatttattcctccctcgaacacatagtaagaaaaaaggggagcttcattgtcgataattta

SEQ ID NO: 132515 - DNA, 318 bp, Glycine max
agtctcacgattatctcatgttgatgcaacaatggttagtcatggctattcgagacatcttgccaaacaaagtcaggttatccataacatacctgtgctttttctttcatgccatatgtatcaaagttgtagatcctgtcaaagttgatgagctggataatgaggccgcaattatattgtgccagctggagatgtattttccccctgctttctttgacatcatgattcactttattgtgcatctagtaagagaaaacaaatgttgtggccctgtttatttgtggtggatgaaccctggtgacaatacatgaagatttt

SEQ ID NO: 132516 - DNA, 365 bp, Glycine max
gctttatgtgttcatccgctcaaagtattctgatggcttcaattctttctactcctgcagaggtttcttcgtggtcaatcccttcttattgattgtaccctctgagcaccaatctagccttgattatgactacttctccttcttcattgaacttgtttatgaacactcacttggtttcaataactaaatgattcttaagagcgagaacaagcatctagaaattgctcttaaagaaatgactcagctcctcttccatagcagtcacccagaaatcttcacatattgcttcatcagcagttttaagctcaatggtggataaaagaaccatccttactttctcttttgttacaagaggtcttgcatga

SEQ ID NO: 132517 - DNA, 496 bp, Glycine max
ttaagtcaccgcagcatgcagcttatcatatagatgtagattatatttatatttaaggagtcatcagtttatagctgatatacctgaatgcactctgcaagatgtgatacgcttctagttaaaatatgacaatccttcttcttaaatcttaatcaaatcttcccatctctctctctctttgatgtggctagggatcagttaaatagtaacttaacaaacttgcttctgagcttcactttatatgattatctcatcattgatcatttgtatccgacaaaacggtatttcctctcactggtttctatttcttttcttaagtttaggtcgtaaatcttttagttatctaactgcagctacaccaatgatatagttgaaatactcgcatatgtattgcactatcaatcattctcttacctcagttagaaaccatactctttcccagagcccatattgaatgcgagagcatctctacactacacagcagttgtattatgac

SEQ ID NO: 132518 - DNA, 121 bp, Glycine max
acatcaaccaactcttactcatctaataaaataaaataaagatataggaggaataccataccaactgaaatctcagcatttgaaaatgaaaatgataatgaaccaccacacccctgaatgt

SEQ ID NO: 132519 - DNA, 245 bp, Glycine max
  unsure (1)..(245): unsure at all n locations
gttggaggcacttgaatatggttgccacacctcaatgtgatgacactcacatctttcaaattctccacagattgtgaaggccatttagccaaaatttgggactgagcttgattcatctgagtagccatctgtcccatctgattntgtagactttgaatggagcgtcttgtctcttgctgacattgcatatcttggatgggcatttgcctcactaactctactacggaaggctgaggaggagcctc

SEQ ID NO: 132520 - DNA, 435 bp, Glycine max
  unsure (1)..(435): unsure at all n locations
ctcagcttcatactttctgaaaataacaaagattgggtggtanactatcttaaggtggngcaaatagcaattntcatattttcgactcgcttggacgagctgggcggcaacctcctccccatttttcctataaataggtaaaaggtggctattccaaatatccctaatcccccttgctatgcatttcagctattttgggtgaaaaaaattgtttccgtgaataaaatccaagacgaggttcttccataacgcttctgagacatttccgtgagcaaatatgtgaaggttttccattggtcttcaccgttctttgttcttcaacgggtaagttttcgaatccgagactttcaattcatntcttgtgtttttagctttcatcntcatttccntcaatttcgggtttcgtttcttctggttttaacgtgctttaaccga

SEQ ID NO: 132521 - DNA, 303 bp, Glycine max
  unsure (1)..(303): unsure at all n locations
cagcgcccactcctctgtactcaagacacatgatttctgctaagcagcctagagtccactaagcgaagttgaggtgtttaatctgcagaattcgctaagcgatagaatccatgcgctaacctaagccctctctctttcttcaaaaaaacaactttttgaaattgaaatggcacgtcagcgcacagattcgctcagcaacaggttttgaaaaaccacactgttctctcgctgtgcgagacatttcgctaagcgcgagcgtacnaaatatgctgggtaagtgtaacatacagatattgacaagct

SEQ ID NO: 132522 - DNA, 268 bp, Glycine max
  unsure (1)..(268): unsure at all n locations
tttgcctattacaaacaccctctgtcttttgggatcttcatacgtacaaacttactaattcgaatatgcttgttttttttctaatgttacgacaccttacagactacgtagtcatccacttttgtgcctcaggaacgnttcagaactttacggattgcgcactaacacttccttataattttcggcatgtcccagaacttcacggattgcgctacaatgctctcatcttgaagtcccgcattgtcacggaactttagctaatctgcct

SEQ ID NO: 132523 - DNA, 473 bp, Glycine max
  unsure (1)..(473): unsure at all n locations
atactcagctttgctgacgcgcgacgattggancacatcatgggctcatctatactatnnccggctgagtcagattcatttctaatatctccaaatttattaaacccacaaagatctttactcccagtgctgatgtatttcttatctgcccaagtaacagtgcgactaagtttcttttcacctgcagatttaaaggaagatttgtgtttagtctttaatgatccacctgctttttccacttggaatttctcttcaacattggcatgatctataatggaagtggaagcatcatcattagcagtaactctactcattttccctttgacttgtacagatntcttagcagaatcattctgttccgcatcacattgtctttctgatatggagaccgaataaacatctttctttttaatagcacaatcgggagatgatttgagcgcagcttcacatgagtgggcttatttctcctcttt

SEQ ID NO: 132524 - DNA, 397 bp, Glycine max
  unsure (1)..(397): unsure at all n locations
acaaatggcacaatgatggatgccatgatgagcatgaagagataatggaagccaatgcgggtgcagttgccgccaccagtgctattgctaatgtgaacccaatgcccncatctgatctcatccaaatgaatcatccaacctcagatatggtgggcaaatatttgggaagtacggacgaccccatgatgtgcaaattcaaaatgagcatgccttcccgctatatggcttgcctcccaactatacgccacctaatgtggcgtacactcccaatgagaatgtcaataactccactcctatacccattgagagccaacaaccccaaactgatcatgcacatgtctcttanaccgtgggagagacacatgaaattccccaccacaatctagccgatttcgag

SEQ ID NO: 132525 - DNA, 265 bp, Glycine max
  unsure (1)..(265): unsure at all n locations
ctcattcatatggatgcccaagctcttatgtctggagcatatcagttggaattctgaaaaagtgagcgctctaaatgtgaactngatgctctgtctgtaaatgcaagtgcatctagtatttgtgcatgtcatgtcctaacaaatggaggaaggggagtggaaatgacatagtttgtgtccaagaaacaaattctcttcttgtaccgtttttttgcagggaattttttattatttacctggaacacataatgagttatataattgt

SEQ ID NO: 132526 - DNA, 124 bp, Glycine max
ctgaatgatctacagacattgggccattcatcacctcaggaatgccacagtatttattcttcataacgatactctagaatgctacttgttcctatcatgaaaagcacatctctggagtgtcaaa

SEQ ID NO: 132527 - DNA, 445 bp, Glycine max
  unsure (1)..(445): unsure at all n locations
ctcaccttctggcctccttatagtgtttcatgaganattatgctctanngncatctcccactccaaggtngccttctgatcattctttcctttaaaaggaggaatgtttagtntaataccatcaattcggttttgtctaggaacaccatcattccctcttctcctcctttcttcttcattatgatctctattctccatgtgatccaacctctcatggagcgcatcatctcgttgtttcattaacctctccatatgttgcatcaaagcttgcatttggaattgcgaaagccccactccatcattatgattagtacctgacatctcanacaaacaaatctaacgtgacaagacaattattagtgcttgttgaatacctcacccactcatgtgtatcacacaattatggcttttctctaatgaaacactcttggcctttaccactcta

SEQ ID NO: 132528 - DNA, 337 bp, Glycine max
cccttgatatatatgaaggtcttatggtcactatgaatgactaaattcctgggataaacgtagtgtgccatttttcaacccacataagcataaactcttatataagtgaatattaagggtaggaccactttacttttcactaaaataagcaattggatggccttcttgcaacaacacaccccaatcccaaccgttgaaacatcacactcaacttcaaaagatctttgagaggttggcaacgcaggtatgggggcattagttagcttttgcttagaacattgaagcttcttcttgttctctcccatttgaaaccacatttttcttgagcactttttta

SEQ ID NO: 132529 - DNA, 401 bp, Glycine max
ccattgtttggaggcatgcaaccttcgcttgaccgcctcgaggtacttaacatccatcggtaggtaatccacaaagttccgcgacattccggaagtcaataagaagcatcgttgcgcaagccgtaaagctccacaacatttcagatgtcaagaagagccttgttgcgtaatccgtaaagtttcacgacattccggaaagaaaataggtgtcgttacgtaatcctgtaagttcctgaacgcttcaggaagacaccggttaaaacacatgaaacggaagtgtattaacaaaatggggagcgcgtaaataaacatgagtgcattttgcaaaaggggtgggaacttataaaaacctccatgttttgtaggaaatgggtgagctatgtgcaccaacaataatgcta

SEQ ID NO: 132530 - DNA, 435 bp, Glycine max
  unsure (1)..(435): unsure at all n locations
ttcatattcctactcattccaacaagatagtattcaatcctagtagtttttgctttccattggtgtattttgatcatcttttggagctctaaattgtaagaatgtgctcatatttgtggngcagttgtggnggtttttatgcttaatttgntatagatgaggtgttgtagaggatggcctcacgcctatgtggtactctgaaacaatggggcatgccacattgcccccattctcttgcaatttatgcctaaacacgcgcccaccaagtgctcggtgaaatgccccaatgacatatggatgtgattttgtaagatcggtgttgtgggacagtnttacatacatagggacaacattgaggattcgtaagtatgtcccaaattcaattctaaagcttaagaacccaagcttattttcaatccaggaatcatgcttatg

SEQ ID NO: 132531 - DNA, 380 bp, Glycine max
  unsure (1)..(380): unsure at all n locations
tcttaagcactgcggctgcagctaattagaagagtcaactcttaatatatattgcacccacatcatttctgtagagcataattccttactagaatccagttcacataatctacgacctaattattaagtcatatgaaaagagcgagtttttaatttttattaaataaatattaattaatcttaaggctccgtatcgaatttataattcaagagtacaactttcaataggagcagtttgatgagaattatgtgggtcttttttttcactaatcaaacanagttttcacattccaggttctggagccaaattttgtaaaatcaaagtagctttttccaagatcaaaacccatcaacttgaatgattttgaactggacttaaa

SEQ ID NO: 132532 - DNA, 417 bp, Glycine max
  unsure (1)..(417): unsure at all n locations
atgcttatgagttcacgtacgagagctaaatacaaatgtggtaatgttctaattccggtgatagagttcaacgtcatgggtctaatttgtggaaaggcatttgtgatggctgacaaaatgttgctaattagaggaacttaactatcgatgaccagtgtatgaaatgcaatgatgttgttgagtgtgagatgctaactaaagtgtgaaatgcaatgaacttaataataataataaaattaaatgacttatanttatactttaaatattaaaatcacattgttacgggagaaatactaaccatagtgaatgtgatgctctcttttcacacagattcctgattgacttatatttagattaaatacttcagcctatatagtttgaaatgtattccatttactttctataggtaataaggaa

SEQ ID NO: 132533 - DNA, 329 bp, Glycine max
  unsure (1)..(329): unsure at all n locations
cttcctcttccatacactgtttaatttccgctgagactgtactgttatgctttacttttgtgttagggtacataacttagtagtaaagcctaattgaatctagtaacattaagaaggatcagtcttatatagtcgaggttacttaataattaattcaacccacctattcttcaatactccgaggccacttgatccaacacattgtaccctgagcaactgccagntagngcttcttacttgtcttttcttttcttaagagatgaatgtaatccatgtacccttatgggtnctctctgatattatgtatgtatgcatcttctcacctttat

SEQ ID NO: 132534 - DNA, 369 bp, Glycine max
  unsure (1)..(369): unsure at all n locations
gctgtttatactgctaagatgatatataaagaatgataagttatttttgatatattataagtcaaatggcaataataatgacaacatataacaatgatgaccatggttatagggtgacaattatgtttgtgatgaacatgagttaataaaaattgatgcaatgattaaaattttctatacaatgaattgttattttgtgaattttttaaatatttgatgattaaattaaatttatgaatgtactaatcttaatttaaaggatggtttctatatgataatatgatgttcttacatatcacaaaatattctcatagattcatactcatccttacaaanacaagtaatataaggggaaatcattcttaactt

SEQ ID NO: 132535 - DNA, 339 bp, Glycine max
tgcatccggatcttaagtcactgcagctcaagcttacacagatttattatgtacttttacctaaattaaaataacttaatgccattaacctatggaattaaaaataaacttatatggcctgagtgtaactgataattgggcaaccaaaagtcacccccaacagcctacaagtcagccaccatttggtctcccaaaaggctgatgcctatgttgccaattgggcccttattacaacttgaactaaacctaactaaagcccttttaattgattaacccaaaacattattttggtcaaccaactttacaagggatgtgccattatttagacaaactatacac

SEQ ID NO: 132536 - DNA, 353 bp, Glycine max
cacaacattaggaggaggaccagtagcagccaatcacagatgcaccattgccacctctatggcagccaccatctctagagtccatctctgctcacatgcaaaggatggagctccagatgcacgcatatatgcagcatatgaccgaccagtaggcggccaatcatagtggtcatgtgcagctgaatgagagcttttatcgatacaccctgcatcagcagagccaagatcccagccctttcccgtggcctaccctcaagcagttcagggccacagttgcattgtctggagataggctcaatattcagacaggggcaggacccgtagtgatggaagctttgctatggggcttctat

SEQ ID NO: 132537 - DNA, 377 bp, Glycine max
ctgcttgcaccaatgtcaatgtgtgcagcgcttgcacctcacggcgaaaattggtctacaaccctgtatttaagcagcttatgagatattgaggtggtatcccaacaatccggttggctatagcctcaaaatcagaaaggtactaatccatggtgccggtcttttgtaatttgaaaagggagcccgtgggatcgtcttattgcgagggataaaaactggtttgaaaggcttggatgatggcgggccacgacgtgaactgcccattgttagccatccactgaaaccatgcgagggcacgaccattcatgtagaatgcacattggtaagtctatcgtgctcagggtagcgggtattgaaatcttgatgatttaacacct

SEQ ID NO: 132538 - DNA, 243 bp, Glycine max
  unsure (1)..(243): unsure at all n locations
acaagatcttcctcactggtgcacaggctggtgcatattggtctccagaggtggttgaggacccatgaaaaatatgatattgctgagagaaaaaaatgggacacgttgatgaaatgtcgagggaatagaaatagagacccgtagtgantttttatccatttacaccttctctctccataaaattctcaaaatatattactttacattttatatcccaaaatgcctcagttttgagcttctttg

SEQ ID NO: 132539 - DNA, 388 bp, Glycine max
aattcataatacagtgtattgtattatcttaattctatgacaggaatccctaatattgataaattaatagcatttacaggaatttaatggtctgtgacttaaatgaatatcatgacattagagtccaaacataataacaagtgtatatttacatcactcgtgttgcgcgttgattaaaatactactttaaaaggcccctactaggaagatattcatatctttgtacaaagatttgcgttctcttctactatcatattttaatggtaaatgaattaaaaacaatttgtgtaaactctaaatgataaaggatatcatatcttattgtaatgctttttttggaagaagttaaaatatttcaatatttttcgctctctttttcctcgcacat

SEQ ID NO: 132540 - DNA, 406 bp, Glycine max
  unsure (1)..(406): unsure at all n locations
tctctcatggggaacaacagctcgtttcctcttcttatggggcacgtggcctgctctgccgaagtggaaatggccttcacatctgcctcttgaaagaatgctatgaccccttacaagaagcacgatggtgtccctactggattcttctgatgatcctatagcaacgcaagcagctatatcactccatatcgcanatgatgcccatgaagcgagtgatatcttctaatggaatgctgaatgaagtcttgtttgcgtctattctgggcactgatgaagatttaatcttctgttatcttactggaggatgccttctgtatattaatatataatatgcgcttgtcagcttcgctctgcttcagatgtgactgaagaacttggtgtgtgtcccatatctcttctgatttca

SEQ ID NO: 132541 - DNA, 340 bp, Glycine max
gatcttagcaccgcagctgcagcttcttcctttctttttgtaatctagttcctctctattcatatgagacaagttattctgttctcacttactacaatttgaatttcggtgttgtaaataaaatcattgatttgcttagctcaccgtacaaaagggagggacatataagaaagtaagaaactattgatgctggaatcacttgatgtaatctattcatactaatctatacaacaaccaatttattttttgttagagtctgagatacacttttgtactggtgagcagctcagctgcagtccattttacgcttgctcatgtattctaccaataaaattggctg

SEQ ID NO: 132542 - DNA, 313 bp, Glycine max
  unsure (1)..(313): unsure at all n locations
gccctanaagcatatgcatttagaggtgtggtgaccatcttaaatgaaccctcatggcggaagctcatactttctcaccatcatagatgatttctctagaagacgattggcccgtatgtttttgaaaaacacaatcatgaatcttcttcatatttcagagagtggcctactcttatagaaatcaacttggtcaaaattatatgtcttaatgatcgaccatggcctgtgagttcgcttcacagcaaatcaatgagttttgctgaaagtggtatcaaaggccaaacagccctaccaccaagtatggttacataag

SEQ ID NO: 132543 - DNA, 348 bp, Glycine max
  unsure (1)..(348): unsure at all n locations
gaaagaaagataccctcatataaaacatatcctcctaagagagcaccatagttatcacaaaataacctaccatagctgagggaaccaggaaatgattttaccaaccttgggtgatgaatattgatgttaaaagttttgatgacctgaaactcactcaaagaggatntcgtacaacttgaagtaagataaccggcccacaagcaaaatatgagcaaacataatgatcattgcttgctgctatgagacaaaaagaatatgaataggggcttgattatggcaatttaagatcgcccaatccacaaagataaaaccaacaagaacaacatctttagcttacgggcgaacaac

SEQ ID NO: 132544 - DNA, 323 bp, Glycine max
  unsure (1)..(323): unsure at all n locations
atattttgtcaacgtcccattataggtgtggaacaccttcctcacattggttgaaggccttgaagcggcggaggaagcaaataggtgccataagcaactacttggtgttcaaagttgactatgaaagagcacacgactctgtctcgtggaattttctatcatacatgatgaagagataatgcttcttccccacaaggaattgttggatgataggnggtcttatctaaaccatcctcctcttttttgtatatgtgtgccccacaaacgaattcattccacatagaggccttatactaggcaaccacctagcacctctactgttc

SEQ ID NO: 132545 - DNA, 477 bp, Glycine max
  unsure (1)..(477): unsure at all n locations
ctgacgctgcagcttataagttgtacatgttccttcaatttttttttagtctgcnaagggggagtcaatttgctaaagacaactntgttttctttgagtttcatcctcatttgtgtcttgtgaaatctcaggagaccaataaaattctcctacaagaaatggttggtgatgatggcctatgttcttttcacaacctcaagcttcaaggcaatccttctctgctgatgtccacttctgcatttgttccaaatgatgagtttcctacttcagctgctactgtcaataatacttctaatattgtttcaaattataatgttacctctttcagtagtgctaatctttgacatgctatgttaggacatcctaatgagcatgtaatgaaaattgttctcaaacaatgtaatatntctcaattgaataaaaacatcacagaagtttgttcctcttgttgtatangtaaagctcataggttaccct

SEQ ID NO: 132546 - DNA, 455 bp, Glycine max
tgacgcatgcaagcttcgtcctcatatccctcttggtggacttattttaacttaaatagcattatcatcacagcatatttagaaaactaataacccataatccatccctagtaatgcagttatttagccctgcttctatcatgttctaaggcaacagtacatttcccaatgctaaagtcacctaacagtacacacaagtgggtgatcgggccaagagcatgcaataattaagcattgaaagaagcattaaacacacaaaacacaattaattatatatgaaaagtaattacatcaactgttcattagaaatccccaactatagtctttagccagccatacaaggaaccctaatacaaatgagacagaaagtacagagcaattgtttcttacacaggaagggggacccctccttctcttcttggcatctcacaatcactcaaacactctctaatctc

SEQ ID NO: 132547 - DNA, 198 bp, Glycine max
tatctggacctggctgtgcaacattctcactactaatggcccgaacacgactacatgaagtacccccactattgcctaatggataagtagagctgaaaccagattctgtctcatctctggagtatgcatcacatctccgacaatcaaagactttctagaggtaaacttaagttgaacatctccagttccagcatctat

SEQ ID NO: 132548 - DNA, 469 bp, Glycine max
gcaagcttgacaatctctagcaagatgatcgggtctctgacatctatagcataccatcttcttttgagggaaataggtcattaagtgtggaccatcactaagtcattgagttcctagcaaggtcacaactaaactttcctgaggttgttggggtctagaatagggcttcttctaaagtttcccttcttagtgctagaggatccaccaccatgggttctgatcactttgctaccaccttctaggtgttccacagtttttgccttctttaccaatgcaggaaattccctaatagccatagggaccaccatcttcttcaccttaagcctcaaatattcttcaagtttcctacacttccaagctttagtagtagcttgacaatgacaataaacaaaagtgaaggacaatctctcaaaaatattggaatttatctaccaagactagtttcttcacatggtcaactatatattat

SEQ ID NO: 132549 - DNA, 322 bp, Glycine max
  unsure (1)..(322): unsure at all n locations
gggacgtcagggggggagcgatngcccaaaaccaagcttgaccaatcccgacccaacccgggcatagtcagtcagtgagaacctgtgatgtacctaaacatgcgagctcctggcagtcaacagataaaaggaacaaaaaccacaaatcaaggaggcttgtgtggtggctggacanctgtgaactctgattgatatatgggatatgggctctggtaatcgattaccaatggtgggtaatcgattacaaggcttataaatgaagacaggaggctaagatggtctctcgtaatcgattaccatggggtgtaatcgattaccaagc

SEQ ID NO: 132550 - DNA, 241 bp, Glycine max
tgaattctatcaacagtagaattgtaagaatctattagaaaatcttctatgagagagacatcattgggaactctttgatatccgttagctacttgtcatctacagcatatcatgagtagggtatttaaggattcatgacgtctctaggtatgttgaccaatacttgctctacagcgtcttaaaatctcacctagtgatgtatttctgcttaatgatgcactttctactactcccctcttag

SEQ ID NO: 132551 - DNA, 409 bp, Glycine max
caaatgaagatctagtatatattgtcttaaggtgtcttattagagaatggaaaccaaaggtaacagccatcacagaatctcaagatttatctagtatgtctcttgctacattatttggaaaattgcaggagcatgaaatggaattactaagattaaatcagcatgaaaaaactgataagaagaagaagggaatcgctcttaaagcctcatctgcaatccaagaagacagtgataaagaagattcaattgacttggataatgatgaagatattagtctgtttgtaaaaagattcaacaagttcctgagagtcagaggaaatcaaaagcgacccaattttaaacctaaaagaaggacagaaacttcatcctctactctaaaatgctttgagtgcaatcaacctggacatct

SEQ ID NO: 132552 - DNA, 364 bp, Glycine max
  unsure (1)..(364): unsure at all n locations
gtgacacttttgatactctagcttatgctgcatacatttataatagacctccttatcagctaatccaatagcagcagaataattatgacctttcaagaaacagatacaatccaggttggaggaatcatccaaatccgagatggacaagtcctccacaacaacaacagcctatccctcctttccagaatgttgctggtccaagcaagccatatgttcctcctccaatgcagcaacagcaacaacaacaaagacaacaagcaactgatgcccctcctcaaccttccttagaagagttagtgaggcaaatgaccatccagaatatgcaattgtatcaagagacaaaagcctncattcagagtctaac

SEQ ID NO: 132553 - DNA, 449 bp, Glycine max
  unsure (1)..(449): unsure at all n locations
agcttctcactttcctagctccatttttcttttgtaaagaatagcacatctctgctaacaataactntattactttgaggcaagaatattctataggctattgatggtgagctatagcctacaaagattcccgcttccgcctttttatcaagtttgtctctcttaacctgtggaatataagagaaacacaagcagccaaagactttcaagttcatcaattttggtttgaaaccataccaagcttcaaatggggtcgattttgaaagagcttttgttggcaatctgtttagcaaaaaaacagaagtgcttgcagcctctgcccagaatttttttggaagatctttgtcatgaagtaaacatcttgccattgtcaagatcgttctgttttttgcgctccacaaccccattatgctgtgggtatacggtgctgcaattgatgttctatcccg

SEQ ID NO: 132554 - DNA, 375 bp, Glycine max
ctgcatgcagcttgcacaagtatattaacctttattcattagaacttgagcattataccagccagctgattgctggagttaacaaagctggttgtaatttcgctggatagcaccttttctctaacaaagagacagttgatcgttttatgcctttgatcctttcatgagtttgtctctcaattttatctgttggagtctatgcctaagttgcataagctcacatgtggctattgccataaaacaaaatccaactattgcactggatctagtaattatgttttccttattgctcttccatgatattatgttttctcccgcaagaacacagtatccttaagtggatcttgttgctaagggttgacctttccacgtcac

SEQ ID NO: 132555 - DNA, 179 bp, Glycine max
  unsure (1)..(179): unsure at all n locations
cttagctcataatggtttctncaaaggaatagtggacactatatgtctcaacctacccttgttgcggcgaacgaagcgaggctcactggtgcgtcttccaaaggatgaaaatgcgcggagtcgccaccaacgtttatttgtggaaaacgtcggataaaccgaatgataccgatcatgaa

SEQ ID NO: 132556 - DNA, 448 bp, Glycine max
  unsure (1)..(448): unsure at all n locations
agcttgttatattacattatgtaggctattactggtgagagtntatttccttttcttattttcctggagcttgtttccttgccataatgaaatcagccttttcctagcaatagcaaatgagcttctattatcatttgttgcatgtttaactctattgaaagtattgtgaatatgagtaaaatttttaccctacctatgagatgttttttaagcttctgttgtgaatatgaatttctttattattattaggaaaaaggttttgccttcctgccttatcatctcatttctcaatttgtttatttctttgtcagaatttttatgttgttaatccaaatattgcaatattcatccggtcagaggaagatcatatgaatccattatgggaacaaaggctagtgaagcgttattatgacaagctntttaaggattatcctttgcaaacatgttc

SEQ ID NO: 132557 - DNA, 274 bp, Glycine max
gtgaatcgaaaacagttaccctaaacgtgaaccttgaattctacgaaacttcgaaacttcgaaccctcgttaatttttcaggaacattttcagcaatcaaagaagaaatgccaagggctgacctttttttaattctccctatttatagaaatagggagggtgcgccactcgccaggagcatgtgttctcaaacaacgctctgagaatattgaggccaagggctggggctttgccccttttatataccccttgttttgggatcttttcgacgtcg

SEQ ID NO: 132558 - DNA, 302 bp, Glycine max
ggttcaaagaacaagcacagggccacagcataatgtaatgcatttggatcttgttaatgagaagtgggctagggatgtggatcaaatggacttgattgtgctgtctgttgggaatcggtttttggttccttcagtttactatgagggtggtaaggtcttaagttgcctaaagcgtcatggtcttaagtacagtgatgttagtttctatggttcactaagaaaggctttgaggattgctcttaatatcattattgacaggaaggtgggtgaaggaaatggagttgatgtaattttgagaacat

SEQ ID NO: 132559 - DNA, 340 bp, Glycine max
  unsure (1)..(340): unsure at all n locations
agctttatattatatccatttagntacccttatgattangccttaaggatcaaactntattaaaggacgtcacttcgcacccactacttgcaaacaatatatgaagaaaactaaggtagctatgaatatgatggctccctcatctcatgcataatcaattgctacactgtgctgcccaccccaaacctaatttccaatgtaccgaccgacgtgtccgtgaaaatagttcggatcggaccacgcatcaaatggcacaaccacattttcatctgcctctcgctacaatttaaataaaattaaattgtattactttntaatatcaaagtatccttaaatcaat

SEQ ID NO: 132560 - DNA, 325 bp, Glycine max
  unsure (1)..(325): unsure at all n locations
caaatatatattnnctcattttctccagcctatttgtggttctggctttcgggaacaaccaaatccattcaccgtgttgtgttataataataataataataataataataataatttgaaatgagttggtgaggaatatgaataatgtatgtagagagtaaactcaagaataatcatataattgttgttcgtgtgaaataaagctaaccctcaaatgatagatgcttgcaaaatactatttccaatgtgtttgatctatatatagcccagattcccgtttaaatgacaatcaaaatgaaagctcaagtttaatataaaacaatct

SEQ ID NO: 132561 - DNA, 460 bp, Glycine max
  unsure (1)..(460): unsure at all n locations
ctgacgctgcagcttgaaaatagcttgaagaangtttgtctttttcatgcccaactctcttaagtggcatttctatttattggtgtatntaattttttggttgcagctgcgggaacttgctttgactaacattggttcgattcacaagcgtgttaatctgaccaagaaattgtgtgttcactgttggaaaccggcaagtgcatcggatcgcgcaagtagtataaaacgataagaaccaagtatcgaactctcggggaacttgtgttacttggtaaagctatattcaataggtgtttagtatgaaaagagatgtgtcaattatgcacaggtatgtaaactaactattaaagggaaaatcacgtgagtaaaggtgtgtaaagataagtagacaacacgttggtcttcctattangtgcctgatgttaaaggatattctctacttaaacaatgctcatgtgtc

SEQ ID NO: 132562 - DNA, 393 bp, Glycine max
ggagggagataatgccactctaatctatcactcaattgtgatgaacactgaggtaaaggtgaaggaaaatatatgtttcaattttaatgaaagcaccaaattgttgtaaacacagtaaatttccttgtattcgacgtcaaggattcctcaataaagagaacaaacatactgataattctctgcgtccacattcattactatccatggcttatatgataagtgaagaacactactttagggatgtccctatatggaaaagcattacataattgtcatatggccattcacaatatgcaactatgaatattaacaatacaataaatactggtaggggagatatttgttgccccagccatgtatgtcttgcatcaacaagcatggtaacctcctctt

SEQ ID NO: 132563 - DNA, 418 bp, Glycine max
cacctgttctctcgcaagtacagcacctatactcttgtaagtccaacacccccattccccaagcccattgtcaggttctcttatgtgtggagtgaaaatttgttatatttttaagttaatgacataataggacccataaataaagttaattagttgagtgaataactctaatttaattgatagttggagatactttaagtaactctctggcaaaatttatggttcaacaataaattttgtccagtaaccaaaaagaataaatgtagaaaagagtgtacttaaatgtgtgcttgtttttcaggttttaaaaaggattgtgtaaaataaatctcaaaaactagttattaaatagtaaaagtgtggaaagaagatgagattgagcaagtaagatcatgaataccagaataactaatacaac

SEQ ID NO: 132564 - DNA, 405 bp, Glycine max
  unsure (1)..(405): unsure at all n locations
agcttatgcanaagttaaaatcagtttttatatattttatatgatgaaacttttataaattagtttatgcatgagaattttagtttatggagatttttttttcatttctcattattttcttcttttataagtatttctggaaaagtttatccaaataagtccttattgggaccttgttggataacttatttgtcactcaagaaaggtgttaacaatttctttataacgtgtgggggtaattggctgttggataattttttttttaccttatttctggtaaaatgatgtggttgataaaggtaaggatcacatggctttgttggattattcaacaggttgagcagatgcacacctttgggcggatattagtaattgtggtgccattggtgctatcggttatgaact

SEQ ID NO: 132565 - DNA, 376 bp, Glycine max
  unsure (1)..(376): unsure at all n locations
ctacctaaaattctgtttaaacacaaaatgtcgcttaacctttctatgtttctagcatctaatgaatccaancttccaacaccattaatggctacccaaccttccaaagtcacaattaacacacaaacaatcatccttaatgtttcctaactaaaccccaacataaaaactccatatctaagcaaaataactcataatcatcatccaccctaaaccccatgaatagtgtgtcaaaatggaaaaaataaaggatcaagtaaaactatcaatgaaatactcaagggaaaagtaaaaggggaaacactcaccgcgtggaaataagctctaggtctccaaatctctactccttttccctctttctcttcgtccttctctc

SEQ ID NO: 132566 - DNA, 444 bp, Glycine max
  unsure (1)..(444): unsure at all n locations
atcctctgagtcacctgccgcatgcaagcnttgccacagaanaacactctctntgtcattaccatctttaattaccaagtttccagtatccaagagctgcacaattggactcgaactcgaaacttctgatgatgatgcatttgttgtccaaataagagactcgttctggctaagaagaacgaggtttccgtcttggcttatgaccaacttgcttgagttgtttctgattgggttgtcacggttggcgatccaaaccactgttttgaccacaatgtttttgtaccaaattccgacatagcggttatttgaactcccggggttgaagaaacccaactcaaaggttccgtccttggaaagcaaggtgttgccatcatcagggagtggctgacccttggtgatggtgtccgtcgttgcgtatcagaattgagagaagagtgataatag

SEQ ID NO: 132567 - DNA, 341 bp, Glycine max
gtggttcaagctacaaaaggagagagcaagatatgaagagccaatggttgatacatggacggagatgaaaaagatcatgaagaagcggtatgtgccggctatttactcaagggacttgaaattcaagctccaaaaactaacccaaggcaacaagggggttgaggagtatttcaaggaaatggatgtgctcatgattcaagcaaatattgaagaagatgaggaggtaactatggctcgatttcttaatggtttgactaatgatatccgtgatattgttgagctgcaggagtttgttgaaatggatgatttgcttcacaaggcaatccaagtggagcaacaat

SEQ ID NO: 132568 - DNA, 424 bp, Glycine max
  unsure (1)..(424): unsure at all n locations
agctngttgtatggttaagttattatcttgttcgatagntataagttttctattttcttgtatgattagtcatttatgtatggttttatattttttacgcactttggctttttgttgatgccaaagggggagagaaaaatgtatattttagaaatcaatatattatatttttcaagacttcaaattaagcataaattcaaaaacaaagggggagaatatggagaattaagtgagtgatcaactaggaaaaagaatgtgtatgtgtttcttgatttcagggttgtcattataaaaaagggggagattgtagaagcaaacttcattgcttcatgatgatgaatcaagattgaattatggtgatgaatcaagattgattcaaggtgttttggtgataagaaagatgatgaacaaaagcccatgagaa

SEQ ID NO: 132569 - DNA, 200 bp, Glycine max
  unsure (1)..(200): unsure at all n locations
ctgcttctatgtccttttcattgctntaattggtgaataatccttgaaanaatgtcttattaaaactccattggtttagctttcatttcattttttttgtctttggctattgcctgtctctttgtttccttgtttgtgagttgccatatacggaattggaaaggaggatcggtgccatccctttgagaatttgagtcaag

SEQ ID NO: 132570 - DNA, 387 bp, Glycine max
  unsure (1)..(387): unsure at all n locations
gtgatcataactacattttatnatgcttaactggttccttgaacatgaacctataaactaatcatgttgaacacacattcatattgcttagagtggccccttatacatgaacctagaagttatgcacgttgagcatgcatcgacaggctaagtatgagcccatgatctgcaacttgtgagaatcacaaatcctcactccaaaaagtcattcatggctttcaatcaatctcgagcatccaaaatatgcgtaaactcttctattacccgtttaaccaattaatttgctcaataaactccccaatcaaatctaatcatgaagattcgttaaactccttccttcgagttcaaaagggagaaaagggaaaaaatacaaatcataggagtata

SEQ ID NO: 132571 - DNA, 439 bp, Glycine max
  unsure (1)..(439): unsure at all n locations
ggatcttaagcacctgggctcagctgactatgaaatgaatgttctttctcatctaattttaccttagaaaagacacatgttatccttgtattaatgcttctttttttaaatatctaaacttcttttcttaaattagttgtccttactcaataataaatgaaaaatntaagtccatatactaataacctaaaaacgacaaaaggatccaagactttaaatattattttaaaaaaaaaagaaaaaccctaaaaagacatgtgtttgcgtggtttagtatcttaatgatatgaagaataagaggatctaagttggttcattattggtttgtgaatttaggaagcatccactttagtgcccccacacccctaccccaaagacataaaattaatttggcttctcagaaaaagtgacgtttgtttagtacataaacgtttaaaag

SEQ ID NO: 132572 - DNA, 383 bp, Glycine max
gtacaaagctttaattttttccaattcagcagcctcttttgaagctaccatgtataaacattatcacaccgcacgataatcatatatgtgagccatgtgcaagcttcacgaatgctaaatattgtcgtttttttcactctcattgctgcatattgattaaacaacacactacattatttcagcttcatgttaaatgccaaaatgatgcaattttactcatcattttccagcactttaactgcatttgctgcacctaatgttgtcgcattaaacaagaattttgcaatctacaatgaatacacgatacgaaatggttaaacgaatgtatcttgaagtgcatgttgaagtcgagaagattaaatgacttcaagtcattaaatggc

SEQ ID NO: 132573 - DNA, 437 bp, Glycine max
  unsure (1)..(437): unsure at all n locations
agcttgattgaacagtgcatttatattatctaatggttgatacttgattttggattttagtgtttgtgattggtttgaattgatcaattgtatgatgtaagtgaattgaaatgcgtagatcatatgccttgaatgagcatgcagtcattagaaagaaagaacatggaattaggatcatgactgaaaatgttagttggtttgtcaggttgattgtgaaggtactcattatccgcaacccggtgagagtgtgatctttaattgtgagagaacaagtaacattgagtaatgatttttgcatgaatctctgagtatgaaatgaatgcgtgaaattgaagatgatgaacgccatgtcttgattgaagatagccacttatctaaaaagcttaccttgtgcatgattgatttattccttgcacncacttatatataacaaaact

SEQ ID NO: 132574 - DNA, 236 bp, Glycine max
  unsure (1)..(236): unsure at all n locations
caagtgctggctgattatcctataccatctancaaatngttgagttctgattcttctattgaagaccaaaaaattagttaataacatagctgtctataggaaactttcaactgtccttgttatgaatatgagataaaaaaaaaaataagagtgctatgtgtgtgattctctaacttttgactaaattggaaatacgtgaccgactcaaatttaaagtgtgatcatttctcaattct

SEQ ID NO: 132575 - DNA, 450 bp, Glycine max
  unsure (1)..(450): unsure at all n locations
agcttctagccaaatggacttaccttgaattaattcctttgatagcccttttgagccttgtttccctttccttgttttgaagctcactacaagccttaagtgaaaaaccatgatattaccatatccttaaggaattttggagctttggaattgttttgggaataagtgtggggggtttttgtttcattggacaacttgttttgttggctatgcttcatgatgaattttgggccatacttgatgtacattgtatattggttaaatgttggacatgctgaatgaaatgttgtttctcaaaggctatagagtaaaaaaaaaaaatcgaaaaaaaaaatatcgaaaaaaagaaaaagaanagcaataaagttgagtgaataagatcttaaatggcacaagaatgatgaaactctaggttctactcttcatgtttaaaatttatctttacttctt

SEQ ID NO: 132576 - DNA, 393 bp, Glycine max
  unsure (1)..(393): unsure at all n locations
tatgttaagaatcattatttntgtaatgatatcctatcaaatttccttcaaccatttctgtcatgttggacagacacaactacctactggaagccctattttgttgctgactagagggagtaaatttgatgatggcttcaatctcgggacaatgaattgtcttaagcaattatgactgactgttccaacaagagcaatcttgcttatgaagaatgataaaccgatgatcaacaactttggttgttgtttaacaccatgactgatactcatatcacaagtttcacaacattcacaagggatcattgtagattgaggaatatatgatccagatgaaaaccgngacacaagcttaaattctgaagatcccaatctcaacttttgagttgatcatac

SEQ ID NO: 132577 - DNA, 419 bp, Glycine max
  unsure (1)..(419): unsure at all n locations
agcttgttaattaatacttnttncttatataaaatatgcatcactgattgaattatttaagaagtctgatcaagcttcatcaccctctcttattctgcattatgagaacagtaaactacttttccttttaggtattgcttcaaagttcaaatgcctttctgtactgctttgagacttatatttatagcctgatntggcatctataaaaatgaaggaaaaaaaattatctatgcaacactaattaatcttctcctttgtttaggaaacacaacttcaaagtgtctcactcattgaagacaaagtcctattctaagccatgggtggaagaagacaaagaagtcaccatggtttcacacatgcccttcaagaaatattaaaaccatggctgagaggtaaatattgattttcttcatccatca

SEQ ID NO: 132578 - DNA, 327 bp, Glycine max
tgaacttgcggagctctctcgcatacatacctgtgttcgttttgttcactatagaaaccattcgtgggcgtggctgatgcactaatagcagtaaaacttccttccgaagtggtggataatgaacccctcacgacacccttatctattatgggccataagatggttccgacataccatgggcccaaacgcatggctctggtacaattgcaaagcctgcatccggatgaaacatcgtgggaagagaggacgtgcctttacgaacaacatcaccttgaagacaatgtgttatttgaagaccacgggtatgttacgaatatcaactgggaa

SEQ ID NO: 132579 - DNA, 390 bp, Glycine max
  unsure (1)..(390): unsure at all n locations
agcttgtggagccaatgcaagcagaacgcttggacgaagttgcccggtcccncttccctacacaacctcagcctccaccatacttttgatcaattgcaacaaataataaatatatacaagaaaattagtaagtattggaaattttaaatttaaaaaaatatcatttttaagttttatccaaacatgatcatatatcacttagtggttaaagaagaagaaaagaagaaaaagataggagatttaatttctcccgttaacaaataataatgaaattatttattcaaggagcaactggccatggattttgccaaatgaagttttgaaattaattataggaatgggaaggtgcaggaatgagaantggccccccccacctttgggtcatatttc

SEQ ID NO: 132580 - DNA, 279 bp, Glycine max
  unsure (1)..(279): unsure at all n locations
ctaaggaggactatgctgnttggtttcttcanatatattataanatttataatttccttatactgatgacccactgggcgatgggaatgatccccgtacccacgggaaagataaattcttgtctacgagaccccgaacaggacagtntccgtgggaaatgtttgtttaatgtacaaattaactcaacaaccaattaattaaccttttgatttgataattaaaanaaggttgagggcttaatttctgtatttttctatttaattgaagaaaaaaaacact

SEQ ID NO: 132581 - DNA, 434 bp, Glycine max
  unsure (1)..(434): unsure at all n locations
tgaaaatagcataacagtatgctctgcacgaatcccaaggcatctatntaaaaagagtcactcanagtcactgggccctattacaatactctggcccaaaacgaaataaacactgaacaacataaaataaaattgcgaaatttcctaattagaaattaactaaggtaagcgcttctttatttgcccttttcaagtccacaaccaaaatccggattaagcccaatgtttcattaattcctgaaattagattaaaaacatcaaattagctaaatgagcccaaataataaaactgcctaattaattgacaattaagaccaatcaataattaaaatggtgcaaaaagggtttagaanataaaagaaaatgatggcacatcaactacattcatcaccttgtggggaacattctattataaggtgatgttctttgggctc

SEQ ID NO: 132582 - DNA, 170 bp, Glycine max
ctatcctgataaatgccaaaggagatcgtgggaaatatgggttaagctataagcccactcgggcaaatataaacagaatcatcgtgggaacgaagagcggccatcaaatctctccgattatacatgaaggtgaacgaatcacaccctgccacataaatagcatctatata

SEQ ID NO: 132583 - DNA, 244 bp, Glycine max
ggaaactcctggcactaacgcagcataaacgagacgggtaataaaaaaatgaaaccagagaccgtaaactaaattgtgatgaaatatgacccctacatatccacatgtagatgtcgaagcaagtcctaagcaaccctcccaaaatatacacacaaaatagctatggagtatggataacattaacacgcacttattcctatttgccaattagggattcagacaagcgaaatctggttcaactggc

SEQ ID NO: 132584 - DNA, 325 bp, Glycine max
  unsure (1)..(325): unsure at all n locations
ctctacaggctggtgaatcatttccttactgaaaagatgtaagtcaaattgtctgattggaatattatctggaatggtatggcatggagttccgagaacggcttttgggacgatggggaatagttgatgtcaatgactgttgtagttgtgcaacatatttggtatatntttatntttaattattttctaatatttgtggctgatggatgtggtataagagtggttatatgatataatctcttatgtaggtgaacagcggaaaggtagatggggagcgactttgtattacaggtggctctgctggtgggtataccaccttatctgc

SEQ ID NO: 132585 - DNA, 452 bp, Glycine max
  unsure (1)..(452): unsure at all n locations
ctgcacgcatgcaagctngagctntgagacactctctntatttccactacatgcacaagtcaaaattaattatgaagatgaagaagaaaagaaacaaataataaaagtattatttaatgcaattagaattgatttgaacgaaaaaacaatagtaaatcaaaatagaactaaatgtattagaataaacgaaaaatagttcctcgatgatcatacaaatttattgatgaattgggtcaaccagatggaaaaaaaatctttataattgcattaagttttaacttgctgatagcttaaagtcttttaataaggttattatattttaaactttataattaagttcccagaaattaaaattgttatggtttttaggcaaaattatatttttggtttccagtttatctccaccagtttcgaatttagtctcccattaatttaattcacgaattgagtcc

SEQ ID NO: 132586 - DNA, 396 bp, Glycine max
  unsure (1)..(396): unsure at all n locations
agcctatacgaacaaaatcgccncatttattttatatatgcatgagaagttggacgcctcagccttagtcaagccaaggctgttgtgccatcaatccatggggcatagcacaccagatgatcttcatcatcgatggctcaaattctcacagatgataactcatcactttcagatcgagctatgcaatctatcttacatgtaaagaacaatcattgatttcatgtacagaacgtaaacagcttttatttgtaaaacaattaccgctttcttgtacatatgctatatttcatagaaatgcatgcgcattcgtacgtgcacacgatattgacccataatattcaactgataatctcgctagtctaactacctttacgcattaacacaactaaccaatta

SEQ ID NO: 132587 - DNA, 427 bp, Glycine max
  unsure (1)..(427): unsure at all n locations
agctnggcctgaaacattggaaatcaacctatccttcagtagaaggcctatagaagttttccttggtatatgaagtattcagagaagcttacaactattattttttctactatagttcctttgtctgtttatctcttaagggctccctctccttgagctccatctttttgataaagtcatttcttcccagtggctactccgaaatagttgacttatcatctacttcctaaactcataaacacttgacttctgtctccagctgatttattcctttagaaaatcccattcaaagtcattcgtaatcgtgatcttgtctccccttgtgcttctgaaaaagttcctttcagttctaactacgccaggaatcttagtcttgtaagggttccttcgttaccctagagttccanacactttctgattactatta

SEQ ID NO: 132588 - DNA, 325 bp, Glycine max
tgtctggagtgtatgaacttctatgggtgtgaataatgtgcgtgatttcgggcaatgatgttatttatataaacactgctttatgttttatatggttcacatactctaatattctattatatacgaatgtgatgactcactcacggtgtgtgcttgtgtatgggtcgactgccatttcgtttcacgtgagccatcatatgatgagctcatgatcgagactgagagacttaatctatgatagagacatgctctcgaaagtgtgaaactggggcgtatgatattacgtgcgataggtaaatttcccgtaacgaattatcctatatgc

SEQ ID NO: 132589 - DNA, 402 bp, Glycine max
  unsure (1)..(402): unsure at all n locations
catgcaagcttacataaatntaactaanaaacctcttccaacaactntattgtctntaatcaatgtaaaagaaacatcgtagaaaagaaaagagaaactagtatatgtaagcctagaaacagaaaccaagtttctagaaaaggacaaaacataaaaaagtgttttctaataacatacaaaaaccagaattcatgagaagtttaaaagttccaatagcctccatgtatgaactcatatgatttccaccatagatgctttgttcacttcccattggatttcgcaagtttagaaattcttgtacattattagcaatgtgaattgtagaacttgaatcaatccatcaagtattggtaggaacttcagtaaaatcttattcaaagcaaggcaaaaatacctttcttt

SEQ ID NO: 132590 - DNA, 244 bp, Glycine max
  unsure (1)..(244): unsure at all n locations
tcacaataggccaatcatatctatggagaattttcttgagcaagtagcttggcctgaagatcaacttccattggtgagacgaaccagagacccaacgaggcttctccgcctgagctcacacctgtgcatgttaattcagagccagctaacccacaatcttcagtggtgaatccaccctcttcgcctaagattgatcagntcccctatctccctctctgattgcatttttgacgcatcatcaatg

SEQ ID NO: 132591 - DNA, 438 bp, Glycine max
  unsure (1)..(438): unsure at all n locations
agcttggttgggcaaatattccanataatgttcaataaggcaacgaanttgaggcatgaatataaataattcagaaataggtgggattctttgaaaaaggaatgtcaattatgggttaagcttattgggaagcacactggtcttggctgggatggagagaagaaaaccactgttgctagtgatgaatgatgggaaaccaaaatttaggtgtgtactattcaactaaaataaagttagtgctagttgtacaattggtcaatgtgttgcttccaaaaagattatgattagaattttgtctccaatttgagatcagtgttgtttgctcaatgtgtgatttttgtgcaggtcagtctttacccttattaattnttcaatagacaagacataaagaactatcagctctactaaaaacaattctttattaatctttcaatagtc

SEQ ID NO: 132592 - DNA, 391 bp, Glycine max
agtagcaccccacctgacgtccccaaggtctcctgacccctgcgacatatctccaggtaccactctgtggtcaacaaacaaaagtaggaagacccacgctttctcacatcaagcttattggattatggggcacccgtcatatgtggtactaagtggcgatcgggcgatggtgcaaatcaactctcccatttccacaagtcaggcataagcacaccatccccagttgcccacctttaaattgagctcacgcactcctacgtagcccttatcctcgttcctttcagcaacgggtccccatcaacccctcaaagctttcacaatatccaaaaaattcaatttcatttgtcatgaaactaccctaaaccaagaaaacaaagtagaggcagaaaac

SEQ ID NO: 132593 - DNA, 225 bp, Glycine max
tgaataatgcgtgtgatcttcggcaccgatgttattcatataaacacaactttatgtattatacgtttcacatactctaatactctatcatataccaatgtgatgactcactcacggcgtgtgtctgtgtatggtgcgattgccactttgtttcaggtgagccatcatatgatgagtccctgactgacactgagagcactattctgtgatagagacatgctctga

SEQ ID NO: 132594 - DNA, 163 bp, Glycine max
  unsure (1)..(163): unsure at all n locations
ggatcttaagcacctgcggctgcagctatgtcaacgaatatgcaaaatgtcaaagaatgggtgtngaaaaagcataacaagactntntatgattggtttaaagatacaatctttgcaaataaaatgcttcagaaactttaagaaagctagcatatgagcctaa

SEQ ID NO: 132595 - DNA, 396 bp, Glycine max
  unsure (1)..(396): unsure at all n locations
ntcaagataagaaacattatgttgaattctgtaagatntatatgtttattgctttgtgaaccttacaaccttggttttcatataaatgtcattctttgcttctttaataagctagcttttctctcttctaatatatatatcgttggtaaatatttgtgttataatttaaaatttataaatatacattacttatattaattctattttataaaataaaatatttattttagattttcttaagattntgttctaatgagtcaactagtttgttacgtttgttttgacaattgtaggttggttttcaatagtcatattttggtgttgcataaatgtctaaatatatctctctcctcttttctaaaaagtcataagcagacagtctcggttctttctctc

SEQ ID NO: 132596 - DNA, 439 bp, Glycine max
  unsure (1)..(439): unsure at all n locations
agcttgattgtcacctagtattctntatcctacctagtcattggtggctttatacaaattagaatagatttgtggctgaggtatgctcaaagatngaatctgatatcgtcttacaaacggatatacaaatcaatgcttagtctttttatctcaatatattcaagatattttgagagttttttttttctaactctacaatgatttgttgaatgtttttttttttttgcaaaaaaagaataatgaatgtttttcatgcaagattcttgtattcaatcttcaaagcttctattttatataggcaacattttcaagtatccgttatctcataatgtaacatcccattgttttcataaaataaatataaaaagttttttagttaaaataataaaaataaataaatacagnacataatagatcttaaatgtccctagctattaat

SEQ ID NO: 132597 - DNA, 345 bp, Glycine max
tcatacatgtaaaccaataaaagtgttcgtcaaacactgtctaaacccaaaagcaaccaaaaaagtcataatagtaaacacgaaagtgagagccatacatgcatatgcgtgagcaaaaattaaaacctggtcatctcaacaaacactaacaaatgaaaagcaaacatgcatagatatccagacgtgttattgcaaaaacaatatcttactccctgcgtattctgcgacttacacattttcaccaaccactgcgtcactccaacatttattttccagagagcacttcttctatagatattcactcctcattcctttgagaaaaaacactcaaacacctgccagcat

SEQ ID NO: 132598 - DNA, 430 bp, Glycine max
actcgtttttgtgccctgctggtaccatggatatgatccaaaagtctctacctgaatctctaagaaagagttgtaagaagtgtgacctcgcacaatccacgaagagcatagaatggattccacacaactttacttttcgatatctcatacctaaggagcttgtaaaataattgcttggaagcccttttttcttactatgggagacaatctacttcaagttttaaacaacagtacacaacttcaattgtagttgcattagtcgtatttgtctgcaatattccaatcgagacaaaactgctactacaatcgctactgcatgttaaaaccttgatgtgcgttggttgctctatgaggtattattcttgtgtacaaagctgacagggtagcagctacagaaataatctatattgcaatgagtagcattgagtct

SEQ ID NO: 132599 - DNA, 402 bp, Glycine max
cctgaatatggataatataaattatacccatgaagcacatagctgacctcatagagtcaatctcaatccaaacctcctttagattaatcactattcagcccccaaatctctgctgccatattataacaacgacccaattgcctggtgaacccatttattcaattgccattatcatcaccatgaaccccaccacagccaaccttttaatacaaaagtacgtaccaatgtgtgtacttacaccgataattgattaacatactaatcttagtctgaagttagatcctgactagaggtgagtaaacgagctccgatccatggatcggcccacgatacttgtggttcatgcgagccacagatcaaatgtttcaaacaatttatggtcatgtcagatcttggatcata

SEQ ID NO: 132600 - DNA, 99 bp, Glycine max
ttttttaaaaactcaagccttaaaagatatattcctatctttattagttttgcatttatactgcagacaaggcacaaatctccaaaaaaaaattttttt

SEQ ID NO: 132601 - DNA, 290 bp, Glycine max
ccctggtgagagactttctgaactgaaaactgctgatatcttgtcaaagatgcattcaagtgtggtgaagtttccgaactctgggacaattatctttagtaatctgtacatagtattgcaccaattgttgctggctgacattgaccgtatggagtattataaagtgaatccagctgaaagaagtacgacccgaatgatcatgcagtatgccatgatctcatgtaatttctttgttgtgaaattagaaccatatgtcatgccttactgtagaatgttctgcaatcacttat

SEQ ID NO: 132602 - DNA, 486 bp, Glycine max
  unsure (1)..(486): unsure at all n locations
gtcacctgcngcatgcaagcttcgtgagtgtaggctngaggcatgtttatttagtcgctatgatacacgacaaagcccctcaataacgtttagacttggttcgaccatggctacctaattntcaattgggaaactggcaagtcgtggaatgacccgaagtttccatggcgagcacaatgtaatgctttagttttgaccttacagctgggcctaagctttagggttctctccttgttaaggtgtcatttctttttctattaaagaatataataaagatctttccttcatctgttcttgcgccttcacccattctcattcatctgcatgcttatttctattgcatttaaatgatacagattcgatgacgagtcttgtgaaggtactaataccgaggacccttgccgttgatttgaacgagaagcaaatatgcttgaggttgaagaagatgaatgtatggaattccccgccgagctagaaatgatggtt

SEQ ID NO: 132603 - DNA, 439 bp, Glycine max
  unsure (1)..(439): unsure at all n locations
catgtggtactatgtggctgtcgggcgatggtgcacaacatgttttccacatccacaaagcgcacataaacccaccatccnctgttgcccacctccatctgagctcacgtactcccacgtatcccatatcctcgtttctctcaacaccgggtccccatcaatcctcccaagcttccacaacatccaagcaaaacaacattcaaacagcacatgctatcacagccaagtaaaacagggcaaaggcagataactctgcccaaaacaccaaccaaatcacagcttttctcacttaaagaccccagtaacaattccttcattccggttcattaaccggtggatcgactcgaaaattgtactggaagtctctagtacataagcctacattgtgaccgttgggatctactggcaaacatccataactcattctgcactactcttt

SEQ ID NO: 132604 - DNA, 459 bp, Glycine max
  unsure (1)..(459): unsure at all n locations
gcaagcttgaactcccagagcactctcgcatccatcccgtgtttcattgctccctcatatacctttcatgggatcgcccaacacagtggaagttgagaaactaccctcaggggccatggataatcaacctatttccacacccttagctattctgggccagaaaacaattccgacggaccaggggccaaaccagatggatatggtgcagtggcagggcctgcaccccgacgaaacctcttgggaagattgggcaagtcttcaggagcttcatcaccttgaggacaaggtgttgtttgaacatcgtgacaatgttacgagaagcaaccttgaaccgcaagcaaccaagcccaatgaagatggcaacctgagattagctgcacgaaggcccaagagaggaagtaacacccctagctacttaaaagactacatanctcgaagttanagcactcacgaaacatg

SEQ ID NO: 132605 - DNA, 311 bp, Glycine max
gacaagactatacgaggtctcttccttgggtatagcattatctctaagggctaccgtgtccacatcttgcaaactaagaaactcatcatcagtcgagatgttgaagttgatgagtacgcttcttggaattaggatgaagaaaaagtggagaagaacgttcttatacccgctcaactacctcaagaagaagctgaagaagaagacccatgtgaaccaccttcaccttcaccacatctacaagatcatgaactatcttcaccagagtctactccaagacgagtaagatctttggtggacatatatgaaacctg

SEQ ID NO: 132606 - DNA, 406 bp, Glycine max
  unsure (1)..(406): unsure at all n locations
agcttcccaattatagagagctaaatcctctgttggttcttccttgtaggtacttgatgtaaatacttgtatatctatttaatgatgttttatgtgttctctgtgttattagtacatcattntagtgtgcttttgccttgatcatgtagatgcatgctttgttaggatcattcaacagtggaaattggactaattcttagaacttgattggacagggctagtttatcgtataatcacgagggatcggcatacggtaacctagttgtttgtatgtttgtcttaatgcggttctggtcgagtttagtccaacaagaggaatctaaggacgatgcttgatcagaattaggctagactatcatgaggaatgcgggtttagcattttaggagacaccatagaacacatgag

SEQ ID NO: 132607 - DNA, 307 bp, Glycine max
tactaagctgagctcatttttcctccccacaatgctactcggaatttttctcggacatgttcctacttgcgggcccttttggtttattattcaagagctcttgcagtggccgcgttttcctcttgtaactcggtgcactccttccggatgtgtgtagcagctgatttgaacttctccttggcgagtctcgccttccctatctctaactttagagctcggacttcttcatcttcctccggagcttcgaatttctcctcatcgacaactttcaatttggagagccaacctaatccccgcgtgtgaattc

SEQ ID NO: 132608 - DNA, 410 bp, Glycine max
  unsure (1)..(410): unsure at all n locations
gcaagcttanatattcaatttcgagcgtttctttatattacgggactcaatcttacatccgagtaaaaagttattgtcgtatgaattggcttaaagcttaaacattaaactctgagcgtctcgatatattactggactcaatcagacattcgagtaaaaagttattgtcgtttgaattggctcagaggttgaacattcaatttcgagcgtctcgatatattatgggactcaatcagacatccgagtaaaaagttattgtcgtatgaattggcttaaagcataaacattcaactttgagcgtctcgatatattacgggactcaatcaaacatccgagtaaaaagttattgccgtttgaattggctcagaggttaaacattcatttcgagcgtctcgttattttacgggact

SEQ ID NO: 132609 - DNA, 426 bp, Glycine max
  unsure (1)..(426): unsure at all n locations
agctnggtctataattcccganaaattatcntntatgattatatcggaaataatccagcaaaaggagggttatttatagcaggttcaatggacaatggagatggaatagccgtcggttggttaggacatcctgtctttagagataaagaggggcatgaactttttgtacgtcgtatgcctactttttttgaaacatttccggttgttttggtagatggtgatggaattgttagggccgatgttccttttcgaagggcagaatctaaatatagtgtggaacaagtaggtgtaattgttgagttctatggtggcgagcttaatggagtcagttatagcgatcccgctactgtgaaaaaatatgctagacgtgctcaattgtgtgaaattnttgaattagatcgtgctactntgaaatcagatggtgtt

SEQ ID NO: 132610 - DNA, 285 bp, Glycine max
ctgtgcctgttcgagagatcgcataaatgattaaagtgtgacgttcacggtacataaaatatttagccataactgctcctgcttaatgcgcgaagtattgtaatgtaactggagaatccgctgtttcagctactacaatagtgtattccattgctcctctctcttgtaaggtattcaccacttgaaccacagaagatgcttattgaccaatagctacatacacacatattacattttgtccactgtagattgagactaatatctgtggctactgctgttttaccc

SEQ ID NO: 132611 - DNA, 459 bp, Glycine max
agcttcatcagatgttgcatttcattatctcttcctcttatggaagaacggaatgcacttcttgcattgtatatctgtttaatagtcgtacagctattggcattgtgttccttcagagttagcaaaatgtttcttggcttcaccatggacttcgtcatatcagcaataagtgttttttcagctttagtcaattaccccgcatatggatgtccaactaatgacttggtcaattcatgattatgcactccacaaatcaacttcaccatccagccttctcctccagccactggcttgcaacgaagcttgaagggacacccacatttcctagtcccagtgtctcttctgataaattcgtttttcctacacttatactcgccactcctttcacagccagataacacaaacgtactccttcctctactaccgtgtgttgtgctgatcttaaaatcctgccacaat

SEQ ID NO: 132612 - DNA, 436 bp, Glycine max
  unsure (1)..(436): unsure at all n locations
agctnggatgtctcaccctgattacaatcttctggtccatcaaacttggtgtaatactataggtgatgttgtcagaaaattagaagggatcaaagagtcttctattatttntaataaaaatgtgtttggcaatattttcaacaaaaaagaaagaaaaagagatagttggaggcaaggattaggggggctcatcaataacttgactctttagtgacatatgatctcataaggatggaaaaattgcttcggaaggaatatattgatattcttgctcaggaagagtttctttggttccaaaaatcccaagaaaattagataaaatttggtaataaaaatactaaagttcttcatactcaaatnggtatcaggcacaaaaagaatagcattattgatctcttcattgatggagtttggtgtactaagcccaatattcttc

SEQ ID NO: 132613 - DNA, 345 bp, Glycine max
agacagtgcagcagcaccaaatcttggaccaacatttcatgactgttatatatggtcaagactttaaattgtggctcctttaaaataaggaattactttaataaaagagtgcacctacgttgaatgggaccacaccttgtttatacaacttatatactatattaattccgtatatataacataagaatagttcaattagaatctgtcaacattcaatattggcgaatagattataatggtaaataaggacggttactaattcaattttgaaaaaaaaatatatataacattttctcatattataactttagaaaggcgcggctttattcataattctattaatct

SEQ ID NO: 132614 - DNA, 425 bp, Glycine max
agcttgctctgtgccattcctgcgaaggctaactattggaaagttagctatagtggggcattactcttaaagcaaaaatggcatgtaacctcctcccataaatacaaacatcaatgtaaatttagagcaagcttatgcgcatattttcttacaaacgttctcttgcacaagacatttaaccgaaaaaatgcacccatatacaatcaaggcagcttcgttacctagattatttacgcgtacctccaaggtgtatttgttacttacatcacacacatctttttggctaaattcacatacatgcatactcaaagcattttggggtaccaaaaattgcacatgtgcacatcttggcatttctaatacctattcatacgcaaacttcatgaagaatcttgactatcttcacaaaaagggtgtacatttca

SEQ ID NO: 132615 - DNA, 429 bp, Glycine max
  unsure (1)..(429): unsure at all n locations
agcttctatataagctgaaccatnttatctataaacacaagttgagttntattcagaanattagagtttatctcttttatcttagtgagagtgattctcctaaattcttgagtgattcaagaacaccctggctgtatcaaaggactttcacaacctttgtgtgttgccctcgctggaaagagtgattctttccttcctttcatcttcacccttgttctttcaaaccacaattccagaaaatccacctctgcccagaattatctcgtggccataactcccattttacgcactcaaattaagtgattcttgagcctaaattgaatntcaaaacgagacctttcacctcgttttggaatcacctcatttggagccctgtagcttcagttattgccatttctatatttctgtcaagccaccacttaacctacg

SEQ ID NO: 132616 - DNA, 223 bp, Glycine max
tctcgatatattatgcacctgaatcggactacagtttgttatgttatgaccatttgaatgtctcgagagcgttcgatgttcaattccaagcttctggatatactatccgccggaatcggacttctgtgtgacaagttatgaccattataatttctcgagagctttcgttgttcaatttcatgcgtctcaatatattatgcgcccgaatcggacttccgtttga

SEQ ID NO: 132617 - DNA, 479 bp, Glycine max
  unsure (1)..(479): unsure at all n locations
gcaagcttaactccaataaaatgatgagtctttttttgatatttataccagcgcgcatttttattgttntgtggaaccagaaaattttgaagaagcaattaaaaaagatgcttgggggaaggcaatgcaagaggaaatagatgcacttgaaaagaacaagacatgagaaactggttgagaagccaaaagacaaagaagttattggagtgaaatgggtctacaaggtgaagcataatccagatggtttcagtccaaaagaacaaagaaaaacttgttgcaaagggctattctcaacagcccagtgttgattatgaaaaaggttgttgcaaacttgttgtccacatttgtaagagaatgtaatattntataataaatcatcaattaagtccatgctttcataaacttgcctacttcattttataagaaaatattgatcccatgataaaataacatatttaataaatttagtaagtagtctc

SEQ ID NO: 132618 - DNA, 230 bp, Glycine max
gctctgatcattcattaacacattcatgttttggtggcatactcaccactgtttgtttctttatggaactcaccataactaataaagcgcatatgcacccctataacacccgatccataagtaagatggataacgaagaaggagtgcaagaacagatgaaggccgacctatcggccttaaaagatcaaatggcttctatcatggaggccatgctaaagcttaaaaaacta

SEQ ID NO: 132619 - DNA, 423 bp, Glycine max
  unsure (1)..(423): unsure at all n locations
tacatctctgaaaacttttctatagaataattagtcgtaaaacacgactaacaaactcccccaacattatagtttagcttgttctcaagcaataaaagaacagttcacttgtcctctaaagacaaactcacagtggttattcacaaggcgtttgttccaaagaactcaatcacatgatatgaatggcatacaatgttncaatcaacagcttctcacaagacatgcagctcttcaatgatatgaacatgattattaagcatcacagcttgaataagctagcaagaatgacacgtatcatggaaggatcatcaaccaaagcctcatggacactgtttcactcatacacatgtgtttatgctgtccatcaatcataaccagcataaggccaatcttgccttcatcacagccatcagtcaaaaccat

SEQ ID NO: 132620 - DNA, 210 bp, Glycine max
tgcttattccattacctttctctttggcttgtgcacctgtcctggacaaactcttatatgttgttgatagtacgataactggaatcgcatagaccacgtgcaagaaaattgtgaaaccatgttggccccgtgatcgaacgctttgaaaatatgactctaatgtgaatagttcttgcattaattatatcaaatcgtcacatactaagaaat

SEQ ID NO: 132621 - DNA, 480 bp, Glycine max
  unsure (1)..(480): unsure at all n locations
acgcatgcaagcttatatgggtctagtcagatcattggtctatattattcttagtttcaatatagcaatgcctacttcaaattcaagttagggtgctagaaacacgatggaaaaaaaattatatgaacttccacttaataaatgaaataacgctatgcacaaaccaaataacttaacatgccaaaacttgtgttgagtatcgcctatgaagaggccagctggcttgtgacacctaataagccagaattcaagaaatttctgcatacataattcaagaaattntgtgtgagcagtgtatgttgtgtgaataaagcttcaaataaggtaatgaggttcacaatcaagcttcatatggttctagtcagatcattgctcaatattattcttagttacaagatagcaatgcctacttcaaattcaagttaggttgctataaacaggaaggaaaaaaaatatgaacatccatttaatatatcaaac

SEQ ID NO: 132622 - DNA, 366 bp, Glycine max
  unsure (1)..(366): unsure at all n locations
ttcttaaattgctggcagtttgaagccatcttctcaattaaattgctgggagttttaagccatcttctcaattaaatttctggcttcagcaagggtcatgtctccaatggctccaccactggcagcatctatcatacttctctccatgttactgagtccttcataattatattggagaagaagctgctcagaaatctggtggtgagggcaactggcacatagttttctaaatctctcccagtattcatataggctctctccactgagttgtctaatgcctaaaatattctttctgatggtcgtggtcctggaagcaaggaaattnttttctaagaatactctcttgaggtcatcccaactcgtgat

SEQ ID NO: 132623 - DNA, 447 bp, Glycine max
caagcttgttacaatactaactatatcccttaatgtatcatgagccattagacaattcttatcatagatttgcatcaaacgatattgctagttaattgtgctttgtttgttcagtatcattaacaataatcatacgccttggaaacaaatatatatagtgtggcttgctacctggctttatatgaaaacaatgtcaaaatgcttactaggcgacattgccaataatagtccttctattattagcaatggtatgggtggatttgaaattcctattttctatattgtaatccatctttaaaatgacaaaatgatagatttcagttctatattctaatccattcttttatggactttatcttatattttattttatttttagtcttacaaatatatttatttattttagacttaagacctttaacaatactttaacaggaaaaaaatatt

SEQ ID NO: 132624 - DNA, 456 bp, Glycine max
  unsure (1)..(456): unsure at all n locations
tgcaagctttgaatcctagaaaaaccatgatttgttttcagcctaacaccattacaagcctagaaagtcctttggattcattntgtgtgttcattgttgtatgatacgagatgaaatacaaaggttgggacttgtgttagttgtttatgatggaatgagcctaaacacttgagcttgagtgaaacaatgactgtgaggttttggttgatgatccttccttgatttctgctatccttactagcttatttcagttgtggctctaatatgtatgttcctatccttgaaaagatgcatgtttgtgaaaaacaattgattgaagcattccatgacattcatttcatatggttgaatttctctgtgaagcanacaccattttgagtgatcactgtagtttgtcacttgaggacaagtgaactgttccttctttgcttgaggacaagcanaactgtaaatttg

SEQ ID NO: 132625 - DNA, 410 bp, Glycine max
attcccaacagatacatgtttctcgagttccactaaaaaagacaattgttcgaatgacaactcaaggatgttggtgaagttggggaatattgctagaatgagagaggtggaatatatccatcatcctaataatagcaagttccgtctttctgaaaaccatcatttggaagcttctgaccaatgttgtgaacgcaaaaatcggggaatattgctaggaagagagagctggaatacccatcagcttaagtaaatccaaagcaagttctgatcttcttattaccaagatttggaagcatcattcgaaccgtggagacccagaattattcaaactgaagagaagaaatgtcataaatagccagaatagttgagagaagtcaccaagatacacgtcggattagtacagtgacaaa

SEQ ID NO: 132626 - DNA, 483 bp, Glycine max
  unsure (1)..(483): unsure at all n locations
accggatccttaagtcacctgcggcatgcaagcttgagaaggatgatgctggttttttataatgatcaaattgaaactttgtgtgaataaaatggtatgaatcataatttttcaactccaagaactcctcaacacaatggagctgtggagaggaaaaatagatttcttaaggaactagcaagaactttgttaaatgaaaaccatctaccgaaatatttttgagtggatgcggtaagtacaacttgctttgttctcaatagagtgattataagatcaattttgaaattgacaccttataagatctacaatgttagcaagtcaaatatatcacatctcaaggtctttggttataagtgctttgtgtaaacaacgataaagaatcacttggcaagttngatgtaaaagcagatgaaaatttatttntaggatactcatctactagcaagacatatagagttctcaataagaattcattaaagattg

SEQ ID NO: 132627 - DNA, 379 bp, Glycine max
actaagcttcttagcggttgtttattccaatcaaacacattactgttgcttatacaaacatctttgaatcaacaattttctgccacggtaccaatccaactatagtgcagtatttcttctcccataagggtattccgtcctgccaatactcttacgagattgaaaaacaagacattcagtatattgactatataagttaaattggcaaggggcactgtaatgaataataaaatcatcatatcatcatagtaattactttctagaaatggcttaagcctcttgtggtgatagatcaatactcaacaaccacaaaagctatgcagattacttatatgaaaaaatacaaaaacctctgaaatcttttataaatttctatcga

SEQ ID NO: 132628 - DNA, 441 bp, Glycine max
  unsure (1)..(441): unsure at all n locations
agctntaacttggtggtctatctccactggtctatctccaccttcttgcttcttgccactctaccactctccacttcttctacggaaaccaccatctctccttcactcaaatctaccacttccttatgcctctagtagtagtcctttatgttcagctgcaccacgtggcacccctcctcctaacacctgngcaccatcattgttgtgaaccctacaaccttcaccaccgcacaatcatcaccaccgactgaatacctttaccctttcttaaccccaacaccaacctgccaccaaaagtaacaacaacaccaccaccaacactcccactagcatccgtcttcccaagtttcaagtggatgacgttttagtcagctgcacataggatccacccncaccgcacgaatgttgttattggttgtgtcacaanctcacatcatttta

SEQ ID NO: 132629 - DNA, 462 bp, Glycine max
  unsure (1)..(462): unsure at all n locations
ggatcttaagcaccgcngctgcagcttctgctatactccatgtttattctgcgaagcattgtaggatatatgatcatgcatgtcatagcgtgttttgatctttgatttccatttcaaaacaggaaatcatgtgcaagaatctactgtatgcaatcagggaaggccaaggatcctttgatttatcatgagttctggaactacccatcccgggcctgtatggtaatatgatgatgaatcagggtttactcgaaactaaactattttttggtagcatgtacttatctccctgcttcacaaaataatggcctctctgcggtcacgcacatcaaaggtggtgacatggttcacgttgagttaccattgatgtgaaacctcactatgattcttgacattactagaccattgtagcgagctgaccaagagcctcttattattttgacacttacattcgtggacaactaa

SEQ ID NO: 132630 - DNA, 416 bp, Glycine max
tactgaccattgacatatgcgttatcgatctgaaccaatgtcttttctatgactgcttattgctatatgaatgatactatgaccatatcatgctcgaagtgcatgtttaaacagcatttggctgggagtcaatgatagataaagaaaatggagaggagtaaaatcctttctcatctaatctttgttccactccaagattggatattttgaggacaaatggagatctcaaagcatttctagtggatagatcaaaacaactctgcgttatataaaataacatgaccttatgtgaaaaaacaacaagaacaacgtgatgtagctgattcaatataaaaaacactatagggtatctaatatgtacagtatgaatcaatttctattcaatatgagcattaagtaaaataatttgtgatctc

SEQ ID NO: 132631 - DNA, 410 bp, Glycine max
  unsure (1)..(410): unsure at all n locations
agcttgctaacccatggaagctcctaatatctcccacactgtttgnggtgggccattcttggatggccttgattttctcagggtccacttggaccccatttctaccaactatgaaaccgaagaaaactatattatctacacaaaaggtacacttctctatatttgcatagagggtgtttttcctaaggactgaaagaacttgcctgagatgtcctaagtgatcatctaggctcctactatacactaaaatatcatcaaaataaacaactacaaatctacctatgaaatcccttaagacatgatgcataagcctcataaaggtgcttggtgcattagtgagcccaaaaggcatcactagccattcatacaaaccaaacttggtcttgatagcagttntccactcatcaccc

SEQ ID NO: 132632 - DNA, 430 bp, Glycine max
agcttatgccacggaaatgtaattatgaaattgagatgcccgaagaaacaccatttcctagttaaccatgcattaggtaccatgttcaattattttttaaagtgaaacgggtttatgatcccaacatggtgggctcgtggtgtctaacacatgaaactaagaatgtagtgtgaagtttcacgcttcccccttttttgtttttgttttgtagaggaaaacgcaaggatgagcaaacatgaaacaaatggtatgcaattttgcagaccaaaaagtttgttgaacgcatatgcatgatgatgccatgactcatgcaaaatgtgaggctggaatatgataacggacaaatgcaggatatgtccattatgatgttatgaagagatgcttatgcgatgcatgatatgaattgcatttacggacacgagagcccgga

SEQ ID NO: 132633 - DNA, 393 bp, Glycine max
acatttcagacaccattgtctaatttaaggctgtaagataaacatagtttaagcataatctatttaagcaccacctataaaaacaagatgccgattataaaatacttacctagttgtttctagaacctagcataatacttctctgctccttctcaaggtttccaagagaactaaatcacaagtataacaacagtattaaatcacattgttgaaaaattaaggaatgaggcagcttggcaataaaattgcagttacttctcttataaaagtcaaattgtattcacattgtatgactgtcctcactactctgtgtgctacttacaaatggtttgtagcaattaatgtttttattacttgttcactggcattaaagacaactgatatatgatatac

SEQ ID NO: 132634 - DNA, 175 bp, Glycine max
tacagcacgacttaatataccttctactctacaaatcttatttgtctcactcttatcctatgaataccaaggcaggcatcttataggcatgacctctcttgcccaaatatgatgcggggtatacaactgataatctaccccctactgctcttatgcgcatagaatactatctcta

SEQ ID NO: 132635 - DNA, 226 bp, Glycine max
  unsure (1)..(226): unsure at all n locations
ncaagctttcttatgatagttcatgggaggtctattaataangagaaagagatcgaggaggggactcatgataggttgactactaaaatacagaagctgcacctttgataatatgacacataactgtcactcatctcagattcgacaatgtgggcacatgcttcatttaatggacaaagatgatgccttgataattaaaatcgagaaaacttccatgtgatgcttt

SEQ ID NO: 132636 - DNA, 345 bp, Glycine max
catttgacaaggtaaaaccaaatatagcaattcctggattaagtatcaaatccataaacatataaaaactaaacctgaagttgtggcccgaattgctacaccaactctttcttataataaggtggacaattgtgacaggctgacagcaacctaagaaaacttcttttccaccactgacagtaccatccatccttttcccatcattcctcttagccactggttagttatttcttataatttgtagtaacttttaatcaaagtttttaaaaccagaccagaccgaccagttcaaccggtccagagactctaaaaaaccggaacatctctaaaccggtatagaaaact

SEQ ID NO: 132637 - DNA, 355 bp, Glycine max
  unsure (1)..(355): unsure at all n locations
gaactatcaaatgagggacagttcttgactctctctctctatccttttccgccgttcctaaccctacaagcttcgtctcgtaaagaaaattccaaagctcaacagagaaaatgatgacagtgctttcgcgcttgatccattccacgccttccatttccaggctcaagtatgctttctgtcttttcacttttattccctttttactttttaacacgtatgttccgttagcgtgtcgtttttcgttctatgctcaattcgacgcgagcctggtgataaatatattgattntatatgcatatacacacattatgaccgtacatattgatacacatacatatatatatacatacatata

SEQ ID NO: 132638 - DNA, 368 bp, Glycine max
  unsure (1)..(368): unsure at all n locations
tgcggatcatgttgccaagaatttggataatgatgggtatcgcgtgactactctgcacggagggaagtcgcatgagcagagggagatcattcttgaagggtttaggaccaagagatantaatgtcttgttgctactgatgttgctggacgtgggattgacatacctgatgtggctcatgtcatcaactatgatatgcctgngaatattgaaatgtacactcaccggattgggcgtactggtcgtgcatgaaagacaggtgtggctaccacattcttgactcttcacgactctgatgtcttctatgacctcaagcatatgcttattcaaagtaacagtccttgttcacctgaactggcaaggcactaag

SEQ ID NO: 132639 - DNA, 375 bp, Glycine max
ttttgttaaaatttgatgtaatcctcccttattattagtccagcctatctaaagaattaaagtttttgaaaatatctcaacatctcaaaaacaaaagatttaattaaagtgattataaaaaaacagagattacatcacatgataacacgcgacaaacacaataaaatcacattttttaaatcttatcatatctaaattttataaatccaacgatattattcttcttaagaaactcgtgtgatattattacgatggatacaacattttatataatatagtctgtcatataactatggtaattatttatttatattttaaatagcatgtcacctggttaaatcaataaagtacgtaagaaaataatgcataattatg

SEQ ID NO: 132640 - DNA, 472 bp, Glycine max
ctgacgcatgcaatcttctggtgggacatcttgacttgctttttattctgacattcaccacagattctgccttcttctattttcagattgggaatgcctctaacagcacctttgtcaatgattttcttcatgcctcttaagtgcagatgcccaaatctttgatgccatattctgacttcatcttctttggagaatagacatgtggaggagtaactggtttcttgaggtgtccataggtaacagttgtcctttgatctgctgcccttcattagaacttcactctttttatttgtcaccaagcattctgacattgtgaagtttacattgaatccttcatcacacagctgactgatgctgatcaagtttgcagtcagtcccttcaccagcagtactttgtccaaactaagaaagtcatcatggactagctttcccattccagagatcctccctataaatccatctccaaatgtct

SEQ ID NO: 132641 - DNA, 413 bp, Glycine max
ccttttgtaaacactgccgtgtttctgtctctgcccggatttaaagcgggttgcttctccggctctgcttccctaaccgtactggatgcggttgtcgtggctttgtcctctatggttttctggagttttaacatgacctccgagatggaagccatttgatcttttaaggctgatagatcggccttcatctgttcctgcacgccctcttcattatccatttttctggatcgagtgttataggggtgccttggtgttttcttagttatgatgaatttcctaaagaaataaacaaaggtgagtatgccacccaaacatgaatattcaaatgaatgatcggtgcacttggatccacccaaaggtgtgtaggtaacataatgagtccagaacttctcatttataagaaaacaaagctt

SEQ ID NO: 132642 - DNA, 473 bp, Glycine max
ttaagtcacctgcggcatgcaagctttcagcaaattcaaacgacaataacttttttctcggatgtctgattaagtcccgtaatacatcgagacgctcgaaattgaatgttgaagctctcagcaaattcaaacgacaataactttttactctgatgtctgattgagtcccgtaatatatcgagacgctcgaaattgaatgttgaagctctcagtaaattcaaacgacaataactttttactcggatgtctgattaagtcccgtaatacatcgagacgctcgaaattgaatgttgaagctctcagcaaattcaaacgacaataactttttactccgatgtctgattgagtcccgcaatatatcgagacgctcgaaatttaatgttggaactctgatgcaatataaacgacaataacgttttactccaatgtctgattgagtcccggataagtcgagacactccaaatttaatgtt

SEQ ID NO: 132643 - DNA, 242 bp, Glycine max
agcttaagaatcaatttcgatcgtcccggtatattacgggtctcaatcagatatgcgagtaaaaagttattggcgattgaattagctctgaggttcataacctaatgtcgagcgtctgaatagatgacgggacgcaatcatacatccgagcaaaatgttattgtgcgttgaattagctcagagcttcagaattcaatttcgatcggttcgagatattaccggactcaatcagacatgtgagt

SEQ ID NO: 132644 - DNA, 446 bp, Glycine max
  unsure (1)..(446): unsure at all n locations
agctttgacttgagtcatcaaaagattatatttatgtgatcatggcatggattctntaaaaaataacaatcaagaaatctatctttcaatcttctctctcaacatcattcaactctttcaacagattttttctgattcatcttctcttcatctttctaaaagtttttgttcaaaactttctctttcaagaaaagttctttgataaaaaacttgttctattaatctttttcattctcttctccctttgccaaaagaacaaaggactaaccgcctgaattcttttgcgtctctcttctctctttccaagagaattcaaaggacctcgcctgagaattctnttgattcttcccttccccttaaacaaaagatctcaaaggactaaccgcctgagatatcttttgtttcccctttacaaagattcaaaagactaaccgcctgagaattct

SEQ ID NO: 132645 - DNA, 427 bp, Glycine max
  unsure (1)..(427): unsure at all n locations
gctntcaacaagttgcttcgcatattattttccacagcataaaactaacaaaaccacccatcatatctgccaaaaccccatacccacgaaatttaagagagaaagaagtccacccaaacctgaattttcgaagtcccactcgtagccacgcacttcacgaccccgaaaatgctctcctttcgcgatttggagcataaatgatggccaaaggtggaagctttgtgttgagcttcaatggagaatgaagaagaagagaatggcaacgtgagggagagagagggctgtctgaaatttttgttttgctgagtgtggagagagaaaagctctttggtcttaaataaaagggtttcctctntttctattatnttattcaagctctggcacatgtccctatttgattggagcgaaaagggcccactttctcttt

SEQ ID NO: 132646 - DNA, 344 bp, Glycine max
  unsure (1)..(344): unsure at all n locations
tattggaggagatgcttttgatattactcatttctgtgctgctctttattctttaatttaaagcacaactcgttcaaatctttaatgctttattactgcagtatattttatatcttaacattatgaaatgctttgataaaatgttagcaactgttaagtgaaaatgttcctctttgtgtaatacagaattcatggcctcaaatctggaaactgttaagtgaaaatgttccactttataatatggctatatagggccacccaaaaggaggaatatttaacctattntttggagaaggcttatgactttggtgggaccaactttgccatgactgaattcaattggg

SEQ ID NO: 132647 - DNA, 422 bp, Glycine max
  unsure (1)..(422): unsure at all n locations
agctgtaaggcgaatatagatgttctgtgatgtatgangacatgagggatccacatatatgcgcaggggacggggactcatatgttagcgagatactacgctctgatgcgaattgggcggaatgagatatacaggtaagaatggatgagtgcagagaaatgcatgagcagtaggtgatatacggaatggatgacatgtgagagataaggaatttctctatcggattggatcggtcatgacgtgtctatttgcacattgatatctgatctagcatgtgcttgacgtatgattgctatcgaacctatatctactatattgttactggatatagctatatagaatcttgctatagcaagagcttgcgctgacgatgtgctgttattctcccctgtcaaaagttacttagtaatagagttaagtgc

SEQ ID NO: 132648 - DNA, 388 bp, Glycine max
agcttcatgatgatgattgaagtattatttttgtagttttgatgatgacaaaaagcccaaagaatgacttcaagattgagtcaacaagttcaagatcaagattaatttcaagattcattagaagaaatcaagaagattcaagattcaagagaagttgatttctagattcaagagaagatgaattcaagattcaagagaagaaatcaagaagacttctcaaggaaagtattgaaaagcatttttcataaaccaaacatagcacagtttttttttacaaaagagttttttcaaatttttctaagttaccaaagtatttactctctggtaatcgagtagcagtttcctgtaatcgataccaatgttagaatttgatttcaaaaagctttta

SEQ ID NO: 132649 - DNA, 356 bp, Glycine max
  unsure (1)..(356): unsure at all n locations
ctggactcatgagtggtaagttgaggtctaagtggattgtttcttntgttgttaactaaggttttctttatggtacagttgagatcaaaagcgactccacaaacatgagcttcaatgtcaatggacaccgacttaagtcattcctcacaaacccttctttagtggacgtagtggtggaagagacttgcttactccgccctactcttcctctaccatgacttanggagtttttctttcctatctccttctttacttttattacatttgtccgattctatgtgatgggttaattgcttttaatcttttaattgtgccacatngaggacaatgtgttgtttaaatatgggggggggggg

SEQ ID NO: 132650 - DNA, 450 bp, Glycine max
  unsure (1)..(450): unsure at all n locations
agctnttccaaagaggacttcggcattacttttaaacttgatccattgtcgataagtacctttgcgacaatgtggtccatacatctcaccgacacatgtagagctttgttgtgtcctctcccctcaacgggaatctcttcttccgcaaacgcgatataattgttggtggttatatgattaacgatgccttcgaaaccttccactgagatatcatgtgctacatgggcatcgttaaggaccttcatcaacagcgcatgatgaggctcagagtttatgagtagttcaagcaaggagatccttgctggagttttattcagttgctcgactaccttaaactcgctttgttggatgaggcggaggaactcatgggcctcttccanagtcactggttttccttgaagtccctctnntctttcngctcctctcgccacgggaggatctacttctttc

SEQ ID NO: 132651 - DNA, 453 bp, Glycine max
  unsure (1)..(453): unsure at all n locations
agctntacanaaagagttgcaagagacgtgttttgaaatctcttgattttgtgtttgcagttacctttggttgacattccctgcttaaacatctcagaactctgctgatgagatcctcattaggaaacatctttcctaatgatgcaagacgatgtactatatgtgggaatgttttttgcatatgttgtgtggtctcattttgattcattctaaaaatttcatattcatgagttagggcgtttattctagatgtctgtacatcacttgttccttcatgggctacttgtaatgtataccacatttcttttacattcttacaatttgatactctaaagtattcatccatgcctagagcagacggaactatgtttttggcctataaagtatattgtacccttcttctttcttcatcccatatgtacctgaggttttctatagtagcgcttcatacta

SEQ ID NO: 132652 - DNA, 441 bp, Glycine max
  unsure (1)..(441): unsure at all n locations
agcttgttatctattaaactgatacaagatacttctntgcaagctacaaacacttgtgtaatcgattatgatcagtttgtaatcgagtaaaacaaaaaaatttaactacataagaaattttctaactttagaacttttcttcttactcttacaagatgatgcatgatgcgcatacgaaatgatagagactaagatccaacacataatgcaacaatcaatacaaatgcaactcaagaaagttgggcatgtaaaagacaaaacttcttcaaggtcttcttcaagcttcaaggctaagtcttcatgttgctccccttatctctangcaaaatgaagccaacgggtgaagttgctaaatacaaggcatgattagtggccaaagggttactgcagaaatatgtnttggataccatgaagttttgttctagttgaagaattgactaa

SEQ ID NO: 132653 - DNA, 434 bp, Glycine max
  unsure (1)..(434): unsure at all n locations
agcttgaattcatcttctctngaatcttgtattcaaacttctctggattcttgaatcttgttcttgaaatcattntcttggtctttttgtcatcatctttgtcatcatcaaaactacttgaatcaacttgattcatcaccatgaagcttgcttctacaagagagagagagagagagagagagagagagatcagcanaaatggatcaacggacaaacatgaaataggaatgatgcaatatgaaaagtgagggatgcacttttgaaaacaattatcaagggcaaagccgcataggatcggcagaaagggagaaggaaaatgataaaacttgaaatttattgaaattgaaagaagtgcttacaaagttgtcctaagtagagcacctctcttctcagactcctgaanatggctaaatgaaagggtgcctcacaacatg

SEQ ID NO: 132654 - DNA, 295 bp, Glycine max
ctctcacggtgtggaggttgtgccatgttctcagaatgttcataatcagaatgctcataatcagaatgctcaaaattataatgctcaaaattaggacgttcaaaatcacccataacagaatgcacagattcaccacttatggaatgctcacgatgatcaaaaggtataaaatgatgcctaactaatctatgaaatgtcctatctatctcatgatcaaagggtttgaagtcatatggattgactctagtcatacactacattcaacatgcgtaactatttgccttgtcttgtaaat

SEQ ID NO: 132655 - DNA, 421 bp, Glycine max
  unsure (1)..(421): unsure at all n locations
aatagaagcatgtgtaacactttgtgtaactttgatcattngagaattacacttcaaagttcagtacaattctgatatggctccagattgaatgtagctacagaacttgtgcaagaaggatcatgagtcgttcaaagaatacacccagaggtggagggacctggaagctcaagtagtgcccccaatgacggagaaggagatgattaaaatgatagtagacacattaccagtgttctactatgagaagttggtgggttacacgccttcaagctttgccaatttagtttttgtcggtgaaaggatcaaagtgggtctgagaagagtgaaaattgattatcctgctttgatgaatacgaagcctggggaaaatggagagaatgagaaggaaggaggatacccatgtgggactttcgttctacat

SEQ ID NO: 132656 - DNA, 285 bp, Glycine max
tcctttatggacaaagtatcgcatgctgggggcaagtaatatttcttcccatcagaccttggatgcaactgttatcgtatgcccatatcagctagatcttgacatgtattcaagccatccttcgttttgccttgaatgttaaggagcgtcccaatcacactgtcacaaacatttttctccacatgcataacatcaatacaatgtctaacgtcaagatcagactattacggaagatcaaagaatatggacctcttcttccatatgcaactcttacttttatccttc

SEQ ID NO: 132657 - DNA, 466 bp, Glycine max
  unsure (1)..(466): unsure at all n locations
ctgcagctttgtaaagatattgctttgaatatgctcatgcatacgcatacacatgcatatntgntatcttgtgacaggggcagggtcgttttatgaaatagtcagacactgagccaaatccaaagacagagacgaatcgaggtaagcggtaacgcggccacgatgtgctgcgcaatgtcatttcctgcttttaggtacttagggacgggcacgattggaggctaggcccatgatcaacggatcgccgtcccatgtccagctccgggtaagcgaggagcgctactggaaggcagcctagtatcctttaaattcctacttattattgatgnttgttctntaatgtgatggtcggatgctaatttaccctagggggttcgagtaagcgaacgccgacccatagagagcacgtacctttgtgttatttaacaataattgcagggtagctctgctgacgagcacccctgac

SEQ ID NO: 132658 - DNA, 392 bp, Glycine max
  unsure (1)..(392): unsure at all n locations
agttgctcaacgatcatagccancttgtcttttgtttcttcgatgatggtgtctatatattcaaattttagatctaacgatctaagaattttctccataatgtttacatcatcaagcttttcaccacttctcttaagatgattggtgattgctaagactctagagaaatagtcggagatgacttcaccttctctcatatgcaaggtttgaaacttaactcttacactatgaagacgtaccttcttgatcggatctgctcccttatacgatgtttgaagcttctcccacgcttctttcaccgactttgcttctgaaaccttcttgaaaagcatatcatctaatccttgatagattagatagagagccttcttgtctctctttcctgagtctct

SEQ ID NO: 132659 - DNA, 464 bp, Glycine max
  unsure (1)..(464): unsure at all n locations
gcttgctgaaactggcctcgtctatgctgtattgtgcagataggcgaattctatgatctntgaacacctncttctttattatccttttccaacacctacctcttctttctctttctccctctcacacactacgtctaggtttgattttcccttccttctcccaatactcctccattattttattcgaaacaccaaaccaacactctagcttcgttacttgcccttttctctgcccagctacatgcttgtgtaagaactaataagccagctgaagaatgtgggatctgaatgactcccccgatcagagaaaggactactagtctgaaggctgttcttcttctctgtatgatgataaaggcaagaaggtggcatctgtttccaattcaagctcctctgccggggtcgntgaagatggatcggaagaacaagacattgaaagatgtggaagcacaacattggataac

SEQ ID NO: 132660 - DNA, 363 bp, Glycine max
gggctcgcgaaggagaattttgataaacaggggacgtttgattgcatggggacgccgttgtttatgtcgccggaatctgcgaacgacaatgagtacgagtcgccggcggatatttgggctttgggctgcgcagtcgtggagatgctgaccggaaaacccgcgtgggatgttcgcggatcgaatatatggtcgttgttgattcgaattggggtgggagaagaattgcccaagattccagaagagttatcagaagagggaaaagattttcttttgaaatgtttcgttaaggatccaatgaagatgtggagcgctgagatgcttttgcatcacacctttcttaacaatgaaacgggttcttttcac

SEQ ID NO: 132661 - DNA, 469 bp, Glycine max
  unsure (1)..(469): unsure at all n locations
agctntgaactgcanaagaatatattncttttattgtttgtatnttcattctaagcaacttatatttctattctgggctcataatagttatttattctatactagtttcattctaaacaaacattagaaacctttgttttcaaaggaaacacaaaaaagtctttaaaaccccaattcaaccacctttcttgtggtattcttgtcatttcatatagcaaccaatttaaaagcatggtggaagctctagctatagtagttattaggatttgtaacatcccaatttttgtaatctagattaaaaatgattgttatttataaataaatagagttctagaaaaatgatgagaatttataaataaataaataaggagatataattattaattaaaataataatttgagagaaaataaaaagggtatttcatttattctgttgatagaaaataaaatagagtttggttttataaaa

SEQ ID NO: 132662 - DNA, 316 bp, Glycine max
aacacatgagaggccatatgactctaaaggtacccctgatttgcattcataagctctacaccttcccattttcaccctgtgcaagcacattcaaaactagagcaaaattgattgactaatatctatagtgaacaacatgtacaagcactacgtatacaacgaccaatcaatcgaatgaataatcacaaaataatacatgtggtgtcattgatactcactgtcccaactcttgtgtatgcataaacacacatcataggtcatcagaagaactcctccacattgtggaaatcagaacaagatccatagcttaaaaatg

SEQ ID NO: 132663 - DNA, 464 bp, Glycine max
agctttgccctcagatacctcttgttggtctagtcttataccaagcaacattattgtgacggcatacttaaaaccatagcttaattcacagattcctcttgcaagactaagtttcaattatgcttcattcaagttctaaggcgagaatacctttcctaatgttaaaatcacctaactgggcacacaaatgtgtgatcagaccaacagcatacaaaatttaatcattgaagaagcattgaacacaagaaacaaaatcgattacatatgaaaataattacatcaactgttcattagaaatgcctaacaagggtagccagccattacagatgatagagcacacacaaccttggtatctctgcaaatgctgctcctcttgctgctgcagagctctcttcccaagataagcactatggtgtgctatggaattttgtgccctgcgcgctgttaaagtataccttaatttg

SEQ ID NO: 132664 - DNA, 284 bp, Glycine max
cctgatacggaaggaaaaaacaaaggatttatacaagacaaaaatttggcagcccgccaaattttaatccggagaaacgccaatattgcggaagagctaagaagggagcactctacccagagcaacagtgaaggacggcggctacctgaacgagcaagactcaccatgtaccaagcagcgaggaaccctctcgcccaaaatcagggcttccgcatgcagaatgaaactagggcacaaataaatcgtgaatgaggcttaactgaaaagattttttgaaaaagagg

SEQ ID NO: 132665 - DNA, 467 bp, Glycine max
  unsure (1)..(467): unsure at all n locations
agcttatcgatatattatgggcctgtatcttacatccgagtcaaaagttntggctgtttgatattaccttgcgcttccacgtttattttcaagcatctcgatatattttgctcttgaatcggacatccgagtgaaaggttttgaccatctataatttttgagtgcttccgtttttcaattttgagtgtctcgatatattattggcctgaatcagacatccgtgttaaaaaattatgcccgtttgaacttgccttacgcttccatgtctaatttcgagaatcttcatatattatgctcctatatcggacatccgactgaaaagttaggactatnttgaatttctcgagagccttctttattcaatttcaagcgtatcgatatattattggcctgaatcagacatctcagtcacaagttattgactgtttgaatttgccttgcgcttccatttttaatttcttgatata

SEQ ID NO: 132666 - DNA, 318 bp, Glycine max
  unsure (1)..(318): unsure at all n locations
tcatcaaattccttatttcctgtttttaattctatcaatagacctccaatctttaatggagagggttaccactactggaaaacccgaatgcaaatttttatcgaggcaatagatctaaatatctgggaagccatagaaatagggccttatatacccaccacagtagaaagagtttcaatagatggtagttcatcaagtgaaagcataaccatagaanaacctagagatagatggtctgaagaggatagaaaacgagtacaatacaacttaaaagccaaaaacataataacatctgccttatgaatggatgaatatttc

SEQ ID NO: 132667 - DNA, 426 bp, Glycine max
  unsure (1)..(426): unsure at all n locations
agcttcttgcgtagccactcttggtgctcataanatcccanaaacaaatccctcttattactagctantttgaattctttagttcctgaatgtacaactttcaaattgttggtcgttcccctctttgttttatgcaaaaaatgaaatcaatatcaaacaaaacatgcatacaattgtcatcgttattgctacttgaaccataaggaataacatctaaagaagtactttaaaacgtttatttattttttttggtattttttgaattacaattttacttcaatatctaattttttaatgtacttaggtggaggatgttgacgaagagaaggagaaggaagaaaataatttaaagaagattaaggaagtgtcacatttttttttccttatcaaggaagtgtcacatgaatgctcgttggtgaacaaaca

SEQ ID NO: 132668 - DNA, 181 bp, Glycine max
attttcaattaactacactaaattctcatagtacattcacttcccactcctaagatgtgatgcaactaaaatatcgaagattacttttcttgcagttgactacttaccttgaactcctctgtcgtcgctctatacagtgactttcagctttaccattgttgacctctgagcttattatctg

SEQ ID NO: 132669 - DNA, 370 bp, Glycine max
  unsure (1)..(370): unsure at all n locations
agcttgngtgttagccgccatatgctcttctttaatataccancaacgctcagacgcaagctcatggcacacttgacagatgtaattatgctcaggcaccaactataacaactactcgaaagtcgcaagtgatctactctcgttaaccaccatatgagaatgaaatcctgccctgaggtaatccccacctctgttttaagaaaagagacgaatgaagtctcaatgttgatcaccacactaggaccattgatatcggggcttgctataacatatcgtgctctaaatatgtatgaatttatatctgccgtacgcaataaatgtcgtctggtgattcctcgatgttgacgacatcgaagaacaggacaatatt

SEQ ID NO: 132670 - DNA, 409 bp, Glycine max
  unsure (1)..(409): unsure at all n locations
agctntatctctccaacacctcacttgcatgtgcaggggttgcaggtgcagttagctccacatttgcagccatcgttctcagcgggaacacccatttcagcactctcgaattgagccttaactggagccactcccatgaccaaggtctctgtggtggttgactcggtgtagctcaagtctgggtacatcttgcagctgcataacacgtagaataaagaacacacggattagtgaaatttacataacacaattacacaaaagcaaaagaagattcttatgataaaatttcacatgaacatctcatgtgaaaattgagtctctctcttcttaaaagtgtacgaaatgttatatgatttatatccaaacatgatcaagtgaattcatattcaacacacgccagtgctctcag

SEQ ID NO: 132671 - DNA, 328 bp, Glycine max
  unsure (1)..(328): unsure at all n locations
ttcctccctccggcacctctcgtatctacttgcctcaaggtcacagcgaacaggttgctgcttctctcatcaaagatccccactctcaaatgcccgactgtcccaatataccttacgagcttatgtgtctcctccacaatctcactgtgcttgctgatcccatnactgatgaaatctacgctcaaaacactgttgtgacaatcccttctgttacaatccattcttctgttactacctgcctgcctgcattcatcatctttgctgttaatcacattactttccctttcttttcatgttgacaaggatgctctcttgcgatctgatctcg

SEQ ID NO: 132672 - DNA, 387 bp, Glycine max
  unsure (1)..(387): unsure at all n locations
agcttcctctgtgccattcctgcgaaagcttacatttggaaagttagctttagtggggcattactcttaaagcaaaaatggcatgtaacctcctcccataaatacaaacatcaatgtaaatttagagcaagcttatgcgcatattttcttacaaacgttctcttgcacaagacatttaaccgaaaaaatgcacccatatacaatcaaggcagcttcgttacctagattatttacgcgtacctccaaggtgtatttgttacttacatcacacacatctttttggctaaattcacatacatgcatactcaaagcattntgnggtaccaaaaattgcacatgtgcacatcttggcatttctaatacctattcatacgcaaacttcatgat

SEQ ID NO: 132673 - DNA, 444 bp, Glycine max
  unsure (1)..(444): unsure at all n locations
agcttctcattgaaccttgtctataaatagaagcatgtgtaacactnggtttaactntgatgaatgagagtcttgtgagacaaacttcaaagttcaacttctctttctcttttcttccttcaatttcgtgctccccccctctctctttctcgctctctttcttttcctccattgaagcatcctctccaagcttcttatccaaggcacattcttggtggggaagctccttcttccatggcttattccttagtggatgtcggctcgcctcacctcttctcctttgtcttccgctacatctccatggtggaaaatcaccattgaaggacctcattgaagctcaaagatccagccttcatagaagctccacaagcaagcttccataagcatagaacacatgaacatctnttattagaanaacatctttaattgcatctacttactcag

SEQ ID NO: 132674 - DNA, 293 bp, Glycine max
tgtgtgagaagctctgttgagaaacttccttaagaagcttgaacttagctacacactaataactaagctcatctccttgagaagcttcctagagaagctagagcttagctacacacatccctctaatagctaagctcacctccatgagatgagaagcttgagcttagatacacccccctattatagataaactatcccccatggtcaaatacattaaaatacaataaagtgcctactacaaagactactcaaaatgccctaaaatacatgcttaaatcctatactactagaat

SEQ ID NO: 132675 - DNA, 472 bp, Glycine max
ccgctgcagctgcttgtgcgctttatggaggcttttcttatatgctcaatgaggtcctttaatggtgattttcaccatggagatgtagcggaagacaaaggagaagaggtgagaggaggcgccatccactacggaataagccatgggagaaggagcttcaccaccaagatgagccttggataagaagcttggataggatgcttcaatggaggaaaagatagagggagagaaagagagaggggggagcatgaaattgaatgaagacaaataaggagagaagttgaactttgagttgtgtctcacaagaatctcattcatcaaagttacaacaagtgttacgcatgcttctatttatagactaggtagcttccttgagaagctctctaaagaaaacttcctagagaagcttctttgagaaaacttgcttgagaagctagagcttatctcacacactcatttaaaactagctcac

SEQ ID NO: 132676 - DNA, 234 bp, Glycine max
atttgataagctttctcaagcggattctttgtcaagctaggaccttatctatgcacacgacggtattaagtaaattagcctccttaataataagtacggactaaaataacacaacaaagaatcgtgcatgcaacataattaccaatgatatatatatatatatatatagagatgtatatatatatatatatatagatagatatacacctcatggagttacatggagcgggcatt

SEQ ID NO: 132677 - DNA, 411 bp, Glycine max
  unsure (1)..(411): unsure at all n locations
attattattattattatttaaaaaaagtaccttggggttaggctgtgtatcgcatggagcctataaaaaaaaataaaatttgcctctctttttggttggaacttggaattttattttctattaaaaatacaggttttattacttatacattatacttcaaaattaatttttatcaaaatcaattaaacttaacttcaaaacagacggatctcaagaataagtgtgtgtttcaccatccgttacacgcgttccaagacaccaacacactttngtgcttttaaaataacactggttacgtttggaaaaacggtaacccaaatacgcactgtaagaaccccaatgttacgttgggagcattatcctccatctagaaatattggcaaaacttgaccaaaaaagatcaagatggaa

SEQ ID NO: 132678 - DNA, 410 bp, Glycine max
  unsure (1)..(410): unsure at all n locations
gctgcaacttgaagtcttgctaaacacggatttctctccaatcaacagaatttgatggcagaattatttagatatgatttcgacattgtatacaagatgggggctacaaataatgctgccgatgcattatcaatatcgcatgatgagaaagagctgatggttttgtctcggcccttttggcatgatacccactatattgatgttgaggttcaggccgaccccgtattgaaaaagattatagaggagctgcaacaagatcctgactctcacccttcttacactataaaaaatggtaagctgcnctataaagggaagttggtgttcgcctctacctcggtgtggattccacactcttacaagaattccataccacccccattgttggtcattcacgcatcttccaaactcat

SEQ ID NO: 132679 - DNA, 383 bp, Glycine max
tgagggtgccctatagtgtgttgctttctttttcttttggtaaaaatacttagggcttacaagcttataagggtgccctattgtgtgctgctttttttttcttttgataagaatactttgggcttacaagcttctgagggtgcctatcgtgtgctgctttttttttatgcaaattcccttacgattcatccaaattaaggacttatcataactagacaagtgtaccaaatttgtcacaagtagtaagggactctgcttgtacttggattaatgcaaatcatatttaaaagcagtggatcatgaatctataattaagataatgaaatgtctgagatttgatacagatgtaaagatgaatatacaagatgttaattaaaagatga

SEQ ID NO: 132680 - DNA, 398 bp, Glycine max
aatatactgactacataaattagaaaacaagctaagagtaatgagaccactataatgaaaactgaaaagcatagcatggcagggatatctgcttaattttgaatagagataaagtattttttcctaagaaagataatcacagagtgaaaaatgtcaacctcacgtagaagccaaaaagatgatgcttggtttatgtcttgtgcaagaacaccatcggatatcaattcattctccatggagccaagtagaaatgcttcaagcttttgcctggaggtatcaaaataaaatgtgacatcatatgtgaagggacttattacatgctcagaattgataactgacaaaaaggaaaataagtcatatgtgaagggatttagttacatgctcagacatgataacta

SEQ ID NO: 132681 - DNA, 358 bp, Glycine max
tgaaatatgcaatgggatgcccctgtcgggacaacactgaccccattctctttctctatgcatccgtctccaccgtgaatggtaggtggaagtctggttatgcaaggaccggagccgtggacatacgcatgcttaagttgatcaaatgccatttgtgcctgataagaccattggaagggctccattgttgtatccttgaccagggggtcggcgatcatagcataacctgtgataaaacgtctgtagaatccagctaaacctataaagctgtgtagagctcgtggtgactgatggattggccactggaccacgtctgcaactttggacgcgacaggttctaccacccgtgatgaaacta

SEQ ID NO: 132682 - DNA, 447 bp, Glycine max
  unsure (1)..(447): unsure at all n locations
agcttctatttaagctgaaccattntatctattaagacaagttgagntttattcagaannatagagtttatctcttttatcttantgagagtgattctcctaaattcttgagtgattcaagaacaccctggctgtatcaaaggactttcacaacctttgtgtgttgccctcgctggaaagagtgattctttccttcctttcatcttcacccttgttctttcaaaccacaattccataaaatccacctctgcccagaattatctcgtggccataactcccgttttacgcactcaaattaagtgattcttgagcctaaattaaatttcaaaacgagaactttcacctcgttttggaatcacctcatttggagccctgtagcttcagttattgccatttctatatttctgtccagccaccacttaacctacattttaccatcccattcat

SEQ ID NO: 132683 - DNA, 273 bp, Glycine max
tctgatttaaatttacttctctatggaatcgtggctccgctgcatgttatccaatggctatttaatgacatcgccccatgccttggataaggtattctctgacctggcactaactctactgattaacggagaaattcctccacattgaatcatgttaatacatgttgatactacatcgaaagaagggaaaacgctaccatcttggaaccatctagttggcgtgctcaaacagaaaatttatatagctcaattattaaaccaaaattttcctcc

SEQ ID NO: 132684 - DNA, 455 bp, Glycine max
  unsure (1)..(455): unsure at all n locations
agcttgctctgacactcatcttgcatgattatttcattgntcaagaggtcccttacttattaactcactctcctttctgcacttatttttctctactgtctcgctagcttgactntaatttctaataattcatattttgaatcttatcttcattttttatagttttgcaaagtgatgtgaattattgatgagatcaaattaactaaaaaggaaaacagaaaataaattgaacaccatcaatttatattacgaatttgctttgccaacaaccttggtccctatggtaattggtaattgtcttatgacaatggtagtaagggacagggttcaagttcggtagataagagcatacatcaacatcactattgatattactaactttccctctattntgtagttggcaaaatgtgttgaagtagggcttccaacactgattggtatgggtctcatgtcat

SEQ ID NO: 132685 - DNA, 305 bp, Glycine max
  unsure (1)..(305): unsure at all n locations
actgngngaacagtgaaaggattgaatcatgtttcagcggtgtgttttgttngaaatgaatggttgtgtctgaaatgaatgagagttgtatgaattgagtggactggaatgtatagactttgttctgatcaagcttgcatccactaaaagagaaagaacatgtgattagaactttgactgataatgttagtcagtttgtcaaaataattgtgaaggaattcattggccatatcccggtgagagtgtgatccttataatttgagagaaacaactatcatttaatactgattttttgcatgaatcta

SEQ ID NO: 132686 - DNA, 422 bp, Glycine max
  unsure (1)..(422): unsure at all n locations
agcttcaagttctaaggccttccaatccattgaagaccaagaatctctatcaactntattgtttttagcttggtacgtatgcttttcttcaaccattctcttcttaccaagttttcttgtttttcttttgcaaaatattaggttcaagttgttttgggtgattatggcccaaagggaagcttttagagctcaaattcttcatgtcttttctaaaaaagaagttnttgtaattggtacatgttttttttatcactttctttgggagctctaagggagaggaaagcttacccttttaattntctacattttctaccggttattctacagtttaaagtattgtaaggctgttggtcgtttcaaaatatttgcttggtgaattttgttcttatctgttttaagggagagggatgcatgtgttatat

SEQ ID NO: 132687 - DNA, 224 bp, Glycine max
actaaattattttgatgacattgtcttgcaagcaatgatttgtcttaaattcatagaattacacatctattggataatgcctttcaaatacaagacttatgagatttaagtacatgttgggtttcgacgtagcttaaatctcttacagtccaatctttgtcaaagaaagatcactagacattctaatgatgctggctgcttggtctaaccgttgtttccccttc

SEQ ID NO: 132688 - DNA, 378 bp, Glycine max
agcttgactttgagagatgaagctatgccttctgtcagtaccaatgttaaagcgtgcagtgctaacacataactgcaaaagtggggcatacccccgattatgtcgcttctttggactaatagatgtggtatacccacaatactgttggatctcttctagtatccacgtggttcagcctacggccggtggatttattttaacgtaacccatggatcttactaatccgacgaacagaggaaatttattttgtcttgtgattatgagagacactgacttaactgaatgattgaagcacttcacatggggtacgcgaaggcactgacacgcgaataaaaggtcacgatactaatggtgaccacctcgggggcatagaatgaa

SEQ ID NO: 132689 - DNA, 440 bp, Glycine max
  unsure (1)..(440): unsure at all n locations
agcttgtctcaagatcacaacatctcatattctagctgcacttgaaattgaagagaagaagttgatggtagtggaacttgaggatgatattcatgctatacagcagaaactgaaattgcaggaggaaaagtggagcccatcagagcaacttgcattggatactgaagtagaattgggtgcaaaacagttaaaggcaatggagttgaatgatcaaatggagtctaagctaagaaaatcagatgctttgcttcataaactcaagatggagaatagaaatttacttgaaagtgccacgagactgtcatcggaaagggaaagcttgttggcaaatgttcagggattcagtgataaaatctgcgagttctctactgcagacactatactaatggacaagttgagaagcatggtgcagtcttntgagaatggttgtcccgtaatga

SEQ ID NO: 132690 - DNA, 387 bp, Glycine max
  unsure (1)..(387): unsure at all n locations
agcttgcgtgtggttaaagcgtgatggaatatggaagacgactgcgcgctagtaatggaagattctgttcaaatatataagagttacagaagaagtcattgccacctcttcaattttcttgttttctgagatgtgtgatgctattctcaaatcttcgcacttaccgngcgtctcgctgtatgtctcagtggggccgcctatgggtagtgacttccctgagttttatacattttgaacggagtgaaaaacatgatgcggtgatatttgtttaaatcaccggtatttaatcttcttttgggtgatgtgtaaaaacaatttactaagaagaattgatcgtcaaactatttacttgtggaaatttttgtcacatcagatgtgagtgacatg

SEQ ID NO: 132691 - DNA, 380 bp, Glycine max
  unsure (1)..(380): unsure at all n locations
agcntattggaatagaatagcatnangattgtgctctcaagcgacttctcagaggtcgtatactattcatacatggcttataacagatctctgaccatactggtcaaatgaaccccagatactatcggatatgttggttgttatgaacataacagagagacaatcttatctctcccacttttcataaaggtcaacatcatcaagattgctagtttcaacaatacccggtggctcattcctccttatagcatagttattatgcataccacccaaatgaaagagaattatttgcttgcaaaccttataattatcacctatcgatatgggaaggtgacaagatatatacttagagtgtgaagctgcaaacatacacacatgct

SEQ ID NO: 132692 - DNA, 299 bp, Glycine max
ctcactcacctcacactgtatgacattctcatccttgacttgtacaccaaaacgataaatggattggttgaatgcttgagttctttaccatctacttaaaaacaaaatggctaacttttgttgtgtcattctctcaaggttcttatcagttgataccagatgtttccaccgtgtctcagctgcaagcaagtggcacatgtggtgccaacatcatttcagtgttctccccaatctagttaaagggctactgcacacaaccaacccgcatgagcatttgggttgcatagcataatgggatg

SEQ ID NO: 132693 - DNA, 443 bp, Glycine max
agcttattgatattgtggatcaactcctattttagattgctactataaagaatatttaccttggtacctatttctaatttgccatatatggtaattagtctgttattttcgtattaagatatttcttatagcaaatgaaagtaatatatctactttttattttttcaattggctttttttgggttaaattttcaattgtaggatttaaagtgcaataaaataaaaaaacaataaaacatctgttaatagaaaaaaccgtcttagatttggataccttcaaagacggttattaaaacaaagaatctaagacgattttgtcctaataatcatttttgaaaatgcccaaatctaaagacgggttcgaggtccaactgatttatatgacattacattctatgacgatcgtgaaaccataattataaatagagacatcttacacaaca

SEQ ID NO: 132694 - DNA, 379 bp, Glycine max
taaagaaaacatggataataattcttcgttatcattgacctacacccctcgaatgatattatccgatttatttttaaaatttaaaaaaaatcattattggttggccgatgataattctaatttaacaaaaagttcaaaaacctatatggaacatacttgcttcaaattttgaagataaaatatcggtagataacctttccattaattcactaatgaattctctaacatcattgtttaagactgtgagtcaatcgtttaccttggtatataatatataagttccagcaaaaacgtctatatcgtcttgagacacgttctgaaatatatgatagccttcagacaagctataacctaaggattgtgcgcgattaaaatttat

SEQ ID NO: 132695 - DNA, 265 bp, Glycine max
  unsure (1)..(265): unsure at all n locations
tttcaatgtaccgaccgacgtgtccgtgaaaatagttcggatcggaccacgcatcanatggcacaaccacattttcatctgcctcttgctacaatntaaataaaattaattgttattactttttaatatcaaagtatccttaaatcagttgttttcagctgaactgagnattatttattaaagcctcaccccacacaaacttagcttatttacaatgtatacaactacaatttaacctttattcatagcttgaactttgatatat

SEQ ID NO: 132696 - DNA, 301 bp, Glycine max
tatagagatggaaccaaagtttcaccctcacaaatctaagattatctgtaggttttgctcattattggaaattgccgagcatgaatggattctaaattaatcagctgaaaactgtataagagagggatcgtcttaagctattgcaatccagagacaggtaaaaattattgctgatatgagaaatctatctgttgaaagattcacatgtctgtagtcagagaatcaagcgcctatttaacctaataagactaacttctcttcttaaatgcttgaggtctcactgacattgaggtgtcactcc

SEQ ID NO: 132697 - DNA, 97 bp, Glycine max
  unsure (1)..(97): unsure at all n locations
gaatagcacatctctgctaacaataactttattactttgaggcaagaatatcctataggctgttgatgntgagctatagcctacanagatctccgct

SEQ ID NO: 132698 - DNA, 165 bp, Glycine max
  unsure (1)..(165): unsure at all n locations
gatatgatacagcctactagatacattaacatgaactaaaacaaaatttcacataaatgcataatatttaatcatttatcattaatacataattatatcagnggatgantatcataatttatttaaaaaatactcctgatcataacaaaaaccataattacatat

SEQ ID NO: 132699 - DNA, 286 bp, Glycine max
agctatccaaaaggagttgcaagattcagttattaagatctcttgattctgcagatgcagttacctatagttgtcattccctatataaacatcttagaactctgttaatgaaatcctcattaggaaatatccttcctagtgatgcacgatgattttctatatgtgcgaatctcttttgcatatcctgtatagtctcaatccgattaattctaactagccatatccacggtcaggctgcttccttacacccccgacactctccgtggtgttttcttccgtatctcgt

SEQ ID NO: 132700 - DNA, 425 bp, Glycine max
  unsure (1)..(425): unsure at all n locations
agcttgctccagacccatgaggtaatatgtcgtcaagcttaatganncgtaaatgagcgctttcttgggaggaacccaagtctttttctttatttttcattaaacattgcatatagttaggatcaacttgtttgtgattgctgagtaagtcatcagcatgttttgcacagagatataggttgtctaagcttctctgaagctgtggatgaaaaataacttagaaaattattcagtcatccactcgctcaacgcaccctgtgcgctaagagaatcatcatgcatgcgttgaacgagtctcaacttgtgctaagcgcatcaatccctacccattggtgatgagaatcctganactggccaaatataagctaaaggcccaagtggagaaagatgaatgcccaagtggagaatgataaagccccgagtgg

SEQ ID NO: 132701 - DNA, 261 bp, Glycine max
cgctccggagtatgacagtcaccgctttaggagcgctgtacaccaacagcgcttcgaggccatcaaaggatgggcggttcttccggagcgacgtgtccagctcagggacgacgagtatacttgattccaggaggaaatatggcgccggcggtgggcatcacttggtactcccatggccaagtttgatccacaaatagtccttgagttttatgccaatgcttggccaacagaggagggcgtgcgtgacatgagatcctgggt

SEQ ID NO: 132702 - DNA, 365 bp, Glycine max
  unsure (1)..(365): unsure at all n locations
gccttaagtggataccaccttggttgggttcttaattgggttctaaaccttctcatggcaactttcttacaaactatgacctaaatttcnccttctttatgtataaaagaaatgtccaatgggaggggaatgaggtctaactgtgttaggggattgaacccatagacaacctcaaaaggggactgcttagtggttctatgaacccccctgttgtaggcaaattctacatgaggaagatactcatcccaagacttatggttgcatttcagaagagcccataaagggtggataaagacctatcattacctttgtttgccatcagtttgggatgacagtggtagagaaagaagttagtcctagctacc

SEQ ID NO: 132703 - DNA, 149 bp, Glycine max
  unsure (1)..(149): unsure at all n locations
tggaggaaaagaaagagggagagaaagagagaggggggagcacgaaattgaaggaataaaagagggagagaagtggaactntgaagtgtgtctcacaagactctcattcatcanagntacaacaaagtgtacacatgcttctaattata

SEQ ID NO: 132704 - DNA, 441 bp, Glycine max
  unsure (1)..(441): unsure at all n locations
agcttctaaggaagctaccagttatttatagaagcatgtgtacacttggtgaactttgatgaatgagagtcttgtgagacancaactcaagttcaacttctctccctttttcttccttcaaattcgtgctcccccctctctctttctctccctctatcttttcctccattgaagcatcctctccaagctttttatccaaggctcatcttgggggtgaagcttcttcttccatggcttatcccctagtggatggcgccgcctcttacctcttctcctttgtcttccgctgcatctccatggtgaaaaatcaccattaaaggacctcattgagctcaaagatccaccttcaaaaagcttacatgcagcttcatacaagtcacgatttgacaaaccaaccatattgatgggtcagcgattttttatgggttttggggaaaccaa

SEQ ID NO: 132705 - DNA, 228 bp, Glycine max
  unsure (1)..(228): unsure at all n locations
tagaagctcaactctaagcatgttcccatcttctccacacaactaggaattgcaattgcaagaggatngaaagaaaaaaaaaaatgcactagagagangcacctagtagatactgagaataacatggatcttctcgtgttttatatgggtaatatatagagactaatgcagcatccaatagtactcggatatatacacatgaggtgttgacttaagctatgttcctgg

SEQ ID NO: 132706 - DNA, 157 bp, Glycine max
  unsure (1)..(157): unsure at all n locations
agcttctagctcaatgacttaccttgattaanttctttgaagcccttttgagccttggttccctttccttggtntgaagctcactacaagccttaagtgaaaaaccatgatattaccatatccttaaggaattttggagctttggaatttgtttggg

SEQ ID NO: 132707 - DNA, 463 bp, Glycine max
  unsure (1)..(463): unsure at all n locations
agcttgccaagacaatgcacacgccctcttttttatgtcctttgactnttaaatatatatcatntttctaattaatagaatctttggtgctttgtaaattttgtgaactctctacttcaaccattttctttnttagttcatcctacataaatacaccaaataaattattacattgcatcaatatccttaatacttcaatgccactaaacaaaactcatctcctcattagttactccccctcacaccataaccctctattagaaaattgagcaaaacaaagagaaagtattgaaataaaaattaaaattcttacggttacagtagcagcctnttcagtaacaatgcttccatctttttgagttcaagtgcaatataaattatacttagacggttgcactcctagccttgttgctaacatagtataaaatcaacaactattgtctaacaataaatttaaaaactt

SEQ ID NO: 132708 - DNA, 291 bp, Glycine max
  unsure (1)..(291): unsure at all n locations
cttggcctttcaacccccgggggggatgaatttggaccccactaaaaaaataccggttcacgaaccgaaatatttaatccgtaataagggaccgaaaaacgaaccgaggaaattgggcacttattgcccagcatttgcagcccgatttaggtgggaagctaactttgccccagcgaccgtattcgcaaccgaagtgaaacgtcactgaatacctcggtcgctacttcggncgcgatgtatnagataatncaaaagcactttagcgaggtattagcgaccgacctggacttt

SEQ ID NO: 132709 - DNA, 390 bp, Glycine max
gtcccattcttctagcttcatgtcggctggcttaacccctgataagggtttgatatatgcttcgtgtgatacagataaaactctatttacatcttgcaaaagttgaatactctgcctttaacttttcgatcttcaccttcccctcttctaatgccattgctcccactacctcctctaaactgagaagactcccactaattcctctaaactaaggaatatccggggagtaccaacagctcttgataccaattggtagtttagagcactaccgaagaaagaacgggataaggtgaaaagagagaagacacaacgtcttattgtggttagcacacaatgtatgtacctgcatcaccgctacactaagaaactttttatacttgacttataagc

SEQ ID NO: 132710 - DNA, 377 bp, Glycine max
  unsure (1)..(377): unsure at all n locations
gatcttagagcacctgaggctgcagctaaaggataataattatttattttatctatcattaaaaaaaagagngattntataatacaaatatgcntcttcaacacgatcttgcttgtctacctttccaaacacatncaaaagcaatccctcaagatataaattgtcttcacgccccaactggattgactttttatcatgtaaaaacaacatatttcggatacatcaattgagtaaataaaaattttataatcatacccaatcaaacatgtcaaccactaacatctttcaaaggaaagaaaactgcagattgccactgaaacatgccatagtatcattaattcatttatattcagattcaacactctcatttaacatga

SEQ ID NO: 132711 - DNA, 330 bp, Glycine max
  unsure (1)..(330): unsure at all n locations
aagcaccgaggcatgcagctaaatataacaaaaccctctcttacttanngcntaagcaattaaagaaactcgggaaaaaacagagaacttgctatggagcctaaaacagaaccaagtttctgaaaggacaaacataaaaagtgtttctataacatacaaaaccgaatcatgagaagttaaagttccatagcctccatgtatgaactcatatgatttccaccatagatgctttgttcacttcccattggatttcgcaagcttagaaattcttggacattattagcaatgcgaattgtagaactggaatcaatccatcaagtatcggtagga

SEQ ID NO: 132712 - DNA, 298 bp, Glycine max
  unsure (1)..(298): unsure at all n locations
agctnnggtgngcaaatattccatatatatttcattaangcaacgaatttgaggcatgaatataaataattcagaaaaggtgggattctttgaaaaaggaatgtcaattatgggttaagcttattgggaagcacactggtcttggctgggatggagagaagaaaaccactgttgctagtgatgaatgatgggaaaccaacatttaggtgtgtactattcaactaaaataaagttagtgctagttgtacaattggtcaatgtgttgctttcaaaaagattatgattagaattttgtctc

SEQ ID NO: 132713 - DNA, 288 bp, Glycine max
aaaactttaagggtaaacttggagtagggggatcaactagcatggaatgagtcctatatggtctatacaaatctgtattttctgaattctttaattaataaccaaatactttatgtcaacaaaattttacttggttgaatccttaataagaccgctcatatattgtctcaataaactaccgatggcttcttaatgttggcaacaacaaataagctagttacaataatttggcagtcataaattctagtatgatggttcatagcaaaaaatgtgaactccaccaatatg

SEQ ID NO: 132714 - DNA, 359 bp, Glycine max
  unsure (1)..(359): unsure at all n locations
agcttgatcggagctagataatnntgtgtatcctgnaccagcccattggatgacatattatgttcagtggcgcatcaccactaggagtgaggaaaagtatgctgatcccaaatgacctaaaaaaacaacagcattcatggcattaaacaaaagcatagtgcccaacccaataacttataaacattaagaagcatgagtttctagattcatgataatacccgtaacaaaaagaagaaacttccctatttacntaattctagaaaagccatgagttttctattcagaatcccacactctcacgttctgtttataaggacaantaaaataactaacaataatatggctttgcactttctaaa

SEQ ID NO: 132715 - DNA, 280 bp, Glycine max
agcttagcgcgcacctcgctcagtgcacaattctattcttattgcgagaagaatcccgaggagacttagacacccctaatgggaaagttgcgtggaaaataaattacctcaagcctcttaaaggggttgaaagcgcaagggaaacaccccccgagtgttaaaacttttcaatggaaaaattccaaagttggaccttctccttaagaggaaacctttatttttggtcattcctctctttcttgctattagtcattcattccctttttctatttagccccta

SEQ ID NO: 132716 - DNA, 345 bp, Glycine max
  unsure (1)..(345): unsure at all n locations
agcttctaaactntatacaagaatgaagctctgttaccacttgttggacaagtggcctcagatatcttaagaagaaggggggttgaattaagatatcacaaacttttcctaattaaaaaatctattttgattttaacccaaatcccaagatttctttcaaaatgaactcctaaataattatgcaaattaaacttattgaatagaagcaataagcaataaacaacaaaagactttaagggaagaaagattgcaaactaagaattatactagttcggccncntcttngcgcctaggtccagacccaaccaaccacttgagagttccacttcttgcaaagccctttca

SEQ ID NO: 132717 - DNA, 429 bp, Glycine max
  unsure (1)..(429): unsure at all n locations
agcttcatgatgaatcaagattgattcttttatttntgatgacaacaaaggggatgccaaaaagctcaaatatcaagaacaacttcatgataacaaagatgatgatctcaagaatcaaagaatgagttcaagatgttcaagattgaatcaagaacatttcaaggttcaagaggaaattcgatttcaagattcaagaatcaagattcaaggttcaagcttccaagaatcaagatcaagattcaagactcaagagaagaattaattaagataagtatgaaaaagttttttcgaaaactgagtagcacatggatttttctcacaacatgtttacaanagaagttttactctctagtaatcgattaccagattgtagtaatcgattaacagtagaaaaatggttttcaaaaagttctcaacttgaattacaac

SEQ ID NO: 132718 - DNA, 416 bp, Glycine max
  unsure (1)..(416): unsure at all n locations
agctntactgatttagatttcgctgtctttataatctaagtgggtctgagaagaggaaaattngatcatactgctttgatgaataggaagcctgaggcaaatgaaaagaataagaaagagggaggaacccatgctgngactgcggttcctacatgggaaaacttcccaccagctcaacaatatcaaaactcaggcgatattagttcttctcattatccaccaccctattagccaagaacacccaatcatccacaaaggccacccctaaatcatccacaaaaccctgctgttgacattcaagaccaaacacccccctaataccaatcaaaacaaccaccaggaagtgaacttttcaaaaagaagcttggaaattaccccaattttgggtcggatctaactactccataagacgtatc

SEQ ID NO: 132719 - DNA, 343 bp, Glycine max
  unsure (1)..(343): unsure at all n locations
ctcttaagggcatttggattgaatggtggattgggtggtgcatcctaaactctatcctttcatatgggcctcaagcattatcatggccgaagaaggagaaaagttggtaaagtagaaaatttcttcataaggcaaaactctctattttaattgattacaaccttacagtaatcaattacacaagttggtttaagcttggagagaaatgtctcgtatcaatttaatcgattacaagtttatcgtaatcgattacatagttgtttttgagacgacgattgatttattcaggagtctttaatttaatggattaccatgtgatataatcgantacttctctttctat

SEQ ID NO: 132720 - DNA, 448 bp, Glycine max
  unsure (1)..(448): unsure at all n locations
agcttntgaaattatatagcnattgaagtttttcatttattggagacgncgagntcaagtcgaattatctgcagtgcaagagtattatgactaattaatcccaaactttagtgtacttttggtatatgtggagtggagcaccgtcagaataagataatactattgggggcagtgagagtcacgtcaaagaggttagaagggcatcaatcattaaagcgaaacaatatgataaccttagcagtgcagctatgattgtgcttcctagagtggtgtccccaatgatatattagaatccagtcgcaacctgacttaatccccgcaatctacgcagaaacgaagaaagtgtaaaagattntgtcgcactgccacgcctttagccggagggaccatgtctcatcaataatggccactcaatgtgtattatgcatttctcttcaaattaattagc

SEQ ID NO: 132721 - DNA, 357 bp, Glycine max
  unsure (1)..(357): unsure at all n locations
agcttccatcatggaatcctaggtttggtggtctgttagatatgaattggagaagnaggttcctgagctattgcttcctcctgagcgactgaacagtctcaaagataaatggctcaggaggaacaagctcatcctctgcatctggcataagctcctctactggcataagctcttgggctgctaaagcctcaccctctccagaaggagaaagctagactccgggccaagccacctgtgcaggaactcatctacactcatagctggctactggctagagctctgcaacctctgtatgatgatgatctggcctttgtgtaggctctagaacatggccaataatgtctctaaagtgaatga

SEQ ID NO: 132722 - DNA, 466 bp, Glycine max
agcttcctcggtgccattccttctaaagtttacatttggaaagataactttagtggggcattactcttaaagcaaatatggcatgtaacctcctcccataaatacaaacatcaatgtagatttagagcaagcttatgcgcatattttcttacaaacgttctcttgcacaagacatttaaccgaaaaaatgcacccatatacaatcaaggcagcttcgttacctagattatttacgcgtacctccaaggtgtatttgttacttacatcacacacatctttttggctaaattcacatacatgcatactcaaagcattttggggtaccaaaaattgcacatgtgcacatcctggcatttctaatacctattcatacccgcaacttatgatgaatcttgactatcttcacaaaaggtgctacatttatgctcttcttcaagttttgctcttaaagccgatgcaaatcaag

SEQ ID NO: 132723 - DNA, 362 bp, Glycine max
  unsure (1)..(362): unsure at all n locations
agctttatataagctgaaccatttatcttttatcacaaggtgaggtttattcagaaaaataaaggttatctcttttatcttaatgagagtgattcttctaaattcttgaatgattcaagaacaacctggcttgattaaaggactttcacaaccttttgtgtgtgcccttcgtggaaagagngaatctttcctttctttcatcttcacccttgttctttcaaaccacaattccagaaaatccacctctgcccagaattatctcgtggccataactcccattntacgcactcaaattaagtgattcttgagcctaaattgaatttcaaaacgagaacctttcacctcgtttggaatcacctcat

SEQ ID NO: 132724 - DNA, 384 bp, Glycine max
agcttgcatctttaccaggaatgtggaattgatttcttattgtgaatggactttccaagggtggtctgtgaggatattaagaatatggcccttaagggtagtggaaaatcttattaccaccaattttggtttccgcatgcctgtggttggggtggtaaaccccttgttttggtttaaatctcgatgaaaatctggtttttcctaaactgtttggaaaatattgcaatggagacagcctccggtctgaattatgatggtttcaacttgtggtcttgtatgccttctattaaaggttggggtttggtatattgctgctctacacattttttgtccatgaaaaagatccaatcaagttcttgtattcctttccctttatttatgtaa

SEQ ID NO: 132725 - DNA, 419 bp, Glycine max
  unsure (1)..(419): unsure at all n locations
agcttaaatagaccggtccatgccaatacctattattacctggtttttttattaaaaaattacttttcaattacattaatgatatagcacctatctatctatctatatatatgaagattaaaataattaatttactataaaaaccataatttactatcatggtataaaaatagtatactcttttattactataatatagttaccgatgtttcttttttttttttaaacagcaaaatatattattaatgaagaaaccatgtgattacccacaaggagtgacaaccaacatgcatagagtcaccgattnttgataatcaatataattataacctgatatagggtatacttaaaacatttatttattagtttctaacacgaagaattttctattattaaattactctnataaacanaactgc

SEQ ID NO: 132726 - DNA, 383 bp, Glycine max
  unsure (1)..(383): unsure at all n locations
agcttgcttgtggagcttctatggatggttgtgatcttngagctcaatgaggtccttcaatggtgattntacaccatggagatgcaacggaaggcaaaggagaagaggagatgggaggcaccatccactagggaataagctaaggaagaaggagcttcaccacaaagaatggccttggataagaagcttgaaaaggatgctttaatggaggaaaagaaagagagaaggggggagcacgaaattgaaggaataaaagagggatagaagtggaactttgaagtgtatctcataagactttcattcatcaaagttacaacaagtggtacgcatgcttctatntatagactaggtagcttccatgaagaagctttctaagaaaactt

SEQ ID NO: 132727 - DNA, 280 bp, Glycine max
  unsure (1)..(280): unsure at all n locations
agctntagacaaaatgaatgagtttgagtatattcatgatatgctaattgaaaagctttgaggttgtttatatttacctcttcatctgatttaaagtcttatctttctgatgcagtgtctgccatcaaatagaggtaggcnttttttcctcttctgtctcctcatcagacaatgtgtcgtccagttcttcccatgtgctcatcaatactttattgtcctttgcaatgccctgaaattctgataactgaaaatcaatgtctaatgtatctcttgcgccctt

SEQ ID NO: 132728 - DNA, 351 bp, Glycine max
  unsure (1)..(351): unsure at all n locations
aactaagtacgagctcactttgatgctactcgattatctattttgctgctcaagagagaaataattttattagaaccactttgtacaggcatgcctttacctaaaaacacatgtacaacataccaatgactgatggactgagtncttaaacaacagatcggatgaaacatcgatgtatatgtggacgacatggtcgtcaagtctcaaagcatagcccaatatgtggcaaacctaaaagaagtgtttggggaactccgcaaatatgacatgtgcctcaaccttgaaaaatgtacttttggggtaggtggaagcaagttcctcggcttcatgatcactcaccanatggagatg

SEQ ID NO: 132729 - DNA, 402 bp, Glycine max
  unsure (1)..(402): unsure at all n locations
agcttgttcttcactcatcttctccttgttgtggcatctccaatcacctttcctccttctctattctactatcnatgatcttcaagaagaaaaagactccattgatgaagaagtttcaaggcgtacaagctccacatggngctacatcagacagcgtcgactgcgtcacgtcaccagaaaccaccaagtcctcggcagcatccaggtggaacctcccattcgtcggcgagaacgagtgtgctagcatccccaagctcccgtcgaacggcttcccctggctggggtcaccactgaagaacccgatccttaatgccgtgcttgttactaatatcgcacctcgtcctctttcattgtgctctcatgtgccccttccatctccctaatcctggtcattacatcccc

SEQ ID NO: 132730 - DNA, 435 bp, Glycine max
  unsure (1)..(435): unsure at all n locations
agcttccncatagaagatggtgtcatccgctaatctggagaatattcactggaccttgntcttccccaccataaagctgtgaaataagtttctagacactgcttccctcatcaatcctggtaacctttcagcaacccagacaaataataaaggggccaagggatccccttgtctcaatcctctccgaggcttaaattcatcagttgggcttccatttacaaggatggatattgaggctgatgtgaagcatcctttaacccaaccaatccacctttcatgaaacctcattcttctcatcatataaaatatgaattgccaaggcacagagtcataagattttcaaagccaactttaacaccaagcaagaattcttaacctgctaccttctaacaacctactagcataagactcatgagcgttgctcccttaacaagc

SEQ ID NO: 132731 - DNA, 282 bp, Glycine max
cacaatcaccaattattacttaaatcaacattcccaagttggccactttaaactgaactcacgtactcccacggagcctttattcttggtcctttcaacaccggggtcccatcaatccctccaagcgttcacaacatccaagaaattcaacatccaaacatcatgaactatccaaaaccaagataacagggcaaaggcagaaaactcagcccaaaacacattccaataccacaactttccttactcaaataccccagtaacattctcttcgatccgactcgt

SEQ ID NO: 132732 - DNA, 382 bp, Glycine max
tgacgctgcagctagacactcactctaccagcttaactcttaactacaagaaaatgtgaagaattaacacatgacaatgacaccatatcaatactcatttgtcaaaattaaaagacgagaatgctacgaatgactcgggtgtattttcagaattgcttcagggacttcccatgttacctccaaaagaaaggatgcacagtttggattgagttgaatttgactaaatttattattcaactggatcaaatatctatggattgggatgagttgagtttttgttaaacaagttatatccaatccaacttaatcatacatggattatgttgaattggattaattgagtccatatattgttattttaaacaaagataagaatcataat

SEQ ID NO: 132733 - DNA, 430 bp, Glycine max
  unsure (1)..(430): unsure at all n locations
agcttatgcattgctgcttaatntataaatatatggatggtaagccttggtacttcgatatcaaatgatatagcanaaacaaggaatacccgcgggaggcctctggcaatgacaagagaacattgcgaaggttggcggttggcggttggcttcttcctaagtgggaatatcctatacaagaggaaccatgacatggtgctatttcgatgtatggacgtcgaagaggctaagcaaatgctggtagaggtgcatgaaggatcatttggaacacatgccatgtcccggaaaattctgagagcgaggtattatcggctcactatagagagtgattggtgcatccatgtgagaaaatgccataagtgtcatgccttcaccgataatgtaatgctccaccataccttgaatgtctggcagaccttggcattcttat

SEQ ID NO: 132734 - DNA, 458 bp, Glycine max
  unsure (1)..(458): unsure at all n locations
agcttcccagatccgatcatggaatgancttgtctactgccttcattaggcaataccaggacaacacggacatggctcccgatcggaaccagcttcagggtatgattaaatgagagcatgagtccattaacgaatatgcctagagatggagagatcttgccgcccaagttgtaccgcccatgacggagagggagatgatcacaattatggtagatacgttacccacgttctactatgaaaagctgataagctacatgccagctaactttgtggatctcgtcttcgccggagaaaggattgaatccggattacgaaaaggcaagttcgaatatgctgccatatggcccccacaacaacagaagagcctaatagtgggcgcaggaaaaggaagagacgccccgcggcaccaccgcccaacatggatgaagcccccanatatcaaagctatccagccaatc

SEQ ID NO: 132735 - DNA, 451 bp, Glycine max
ggctgcaactcgaatcgagaatttgttctggttactcctatgcaagctacaaacacttgtgtaatcgattatgatcagctggcaatcgagtaaaacaaaataatttaactacataagaaattttctaactttacaacttttcttcctactcttacaagatgatgcatgatgcgcatacgaaatgatagagactaagatccaacacataatgcaacaatcaatacaaatgcaactcaagatagttgggcatgtaaaagacaaaacttcttcaaggtcttcttcaagcttcaaggctaagtcttcatgttgctccccttatctctagcaaaattgaagccaacggttgaatgtgctaaatacaaggcatgattagtggccaaagggttactggagaaatatcgtttggattaccatgaagtctctgttctagttgcaagaactgaactaatta

SEQ ID NO: 132736 - DNA, 346 bp, Glycine max
  unsure (1)..(346): unsure at all n locations
agctngacttcattccaatatctttctgtttgttgcaaatcatggctgtgttatagaatcaccaaggactatactttggcggactaaaaagaaaaatggtttgcataattactaacatcttgagtcgcatagtgggtgcaccagaatacatccgtggattatanaccttctctacttgagtcttgcaagaataataaaatggggcacaagacagacagagggtcttaatgtgactgaacaagaaaaagatgcttcatactatagtgcaatctgtggactatatgactgactatcaagcttgatcatattcctgcttattgtatgcttgctagaatgggatgatcac

SEQ ID NO: 132737 - DNA, 127 bp, Glycine max
  unsure (1)..(127): unsure at all n locations
gatggttagagaattatacctcttagagcagtttagagacatgagtttatcatgtgagatcacctctagtaacattaagttgggtgtgttgagagtcaccaangaactcttgagtgagatccgtgag

SEQ ID NO: 132738 - DNA, 266 bp, Glycine max
ctgaatgaatcccggaacatattgagacgctcgacattgaacggtgaagctcttagcccatataaaccaccattacctttttcctagatggcctgattgaagtctggtacattttgagacgctcgaaatggatggttgattctttggaaaaatcaaacgacattaaatttttactcgaatggctgattgagccccgtaacataattgagacactcgaaattgaaagtggacctctgtgcaaattcaaacgacaataacttttttct

SEQ ID NO: 132739 - DNA, 448 bp, Glycine max
  unsure (1)..(448): unsure at all n locations
agcttgntggacttgttaaaacaataaattaatactattattnggattcgncttatatatactttttaaaattgcctgatctgatataccaagcttttcggaggtcaatttttagcctttacgagtttaaaattgaggccaggatgtgattgtcaatgaagtgatcttctaaggtctctcttataatatgtaatttgctctatcaatttatactcttttcatataaactgcagaatggaaagcagggaaggcaaatcaatttctgacttgtacgaagaaatttgtcacaaattcagagatttcatgacagagtactttctaatcacactactgtgtagctttcagtatttntctatgtgctaaaaatcattggtatatatgtggtagttgtaatcgtcatggagcaaataatatatgtttgctctgctgangtgacccgtcacattga

SEQ ID NO: 132740 - DNA, 148 bp, Glycine max
tgcaagcttgtaacgccactgcaaaggttatttatgcgatgccgccattgacagcaggcggacagggtctgagtcactacccataccgacattcaaactggcgggacatgctgactaagcatctcgccattggtactggggggacatg

SEQ ID NO: 132741 - DNA, 303 bp, Glycine max
  unsure (1)..(303): unsure at all n locations
agcttctagcgtagccactctaggttgcttatataatnccaaaaacaaatccctcttattactagctattttgaattctttagttcctgaatgtacaactttcaaataggtgggcgttccactcttttgtttatgcaaaaaatgaaatcaatatcaaacagaacatgcatacaactggcatcgttattgctacttgaaccataaggaataacatctaaagaagtactttaaaacgcctatttattttttttggtattctttgaattacaattttacttccatatctaatcttttaatggactt

SEQ ID NO: 132742 - DNA, 322 bp, Glycine max
  unsure (1)..(322): unsure at all n locations
agcttattatgtattaatgattataactctcnattatttatacgaattgttaatatanatttagggaattaattagtttcaaataataacaatataattcaaggaaatccatttattaagatcaacgataatactctaatgcattcttagttaattattattaactccttttaattgaaataatatagcttgatttaatatatacatgtgtttgtgccatgtnaatattaatattgcgtgatgtttatatgattcatgaggtgtgataacatgttgctttgggataacattatgattgagattgagcgtatgtgataaactg

SEQ ID NO: 132743 - DNA, 256 bp, Glycine max
cagatagcttcacatttgcaagcatcgttctcagcgggaacacccatttcagcactctcgaattgagccttaactggtgccactcccatgaccaaggtctctgtgggggttgactcgcgtgaactcaagactgagtacatcttgcagctgcataacaagtagaataaagaaaacacggattagtgaaagttacataacacaattacacaatagcaaaagaagattcttatgagtaattctcacatgaacatctcat

SEQ ID NO: 132744 - DNA, 228 bp, Glycine max
  unsure (1)..(228): unsure at all n locations
agcttactctatgtctttgcttataacgcttttctatgtaaccgatgatatattcaggcagttcttttatagcgtaaaaggcgtgtgtccttctcacaattctactcacatccttgtaaatatagagcatgcttatgcacctactgtaccacngtcgctgtctcgcgccacacttttaacccaatatctgctcccatatacaataaaagcagctcagaaaactacata

SEQ ID NO: 132745 - DNA, 249 bp, Glycine max
  unsure (1)..(249): unsure at all n locations
agcntctgggctgagaacctatataacattaccaaggttttagttttaggagttctacgttctggagaggagaactaatttaggttttgcaattccagtttttactgttcatgcatactattcacgtagcaataaaatttgttttctgcttcaatctgcaatttcgctttctattgattaatggaaggctaagtctccaacgttgtttctcttgaggagcaaccacccctctcttgatggatcaattat

SEQ ID NO: 132746 - DNA, 381 bp, Glycine max
agcttagctacacacacccatctaaaaactatgctcacctccttgacaaaatacatgaaaatacaaaaaaaagtccctactacaaagactactcaaaatgccctgaaatacaaggctaaaaccctatactactagaatggccaaaaatacaaggcccaaacgaaggaaaaacctattctaatatttacaaagataagcgggctgatacttagcccatgggctcgaaatctaccctaaggctcatgagaaccctagggtcttcccttggatctctgacccaatctacttggagtcttctatctaatgcccttgcggtgtcagattgcatcaggaatcccccttcttgtgtaagaaactatcattctctgtattaatctcatt

SEQ ID NO: 132747 - DNA, 486 bp, Glycine max
cttaaccgcctgatgatgcagctaagggcctccaactgcacaagactcttaatatttgatgattttgcttatggaaccttcacccgacgaagacactgacaaaaacttatcttctcctttttggacaaagtatggctggctggtggcacgataattttcttcccgtccgaccttgggtgccactgtgatcgagtgcccatatcacctggatctcgacgggtattctagccatccctcgtgttgaccagaaccgtgagcggcgtccaagcacactgtacgatacattcttcccgcatgcataacatcaagacaacgtgtaacgtcgagatcagactagttcggaagatcaaagaccatagacctcttctttcatatgcaactcttacttttatccttctgttgggtcttaccacatacaatattcaggtgtggaacacgctcatatacctgctcaccaatcaacaggatcggcgcaatatcatgctc

SEQ ID NO: 132748 - DNA, 227 bp, Glycine max
  unsure (1)..(227): unsure at all n locations
agctagcggaggantaatagcgtactataatatggaggacgattgcacgtaaacaatgcaagatttttttcaaataaccaagagctacagaaagatgccatcgccacgccatcaattctcctggtgtctgcgatgtgagatgctattcttaaattatagcacttaccgtgcgtctcgctgattgttacagtggtgccgcctattgtcaatgacctctctgggctttt

SEQ ID NO: 132749 - DNA, 352 bp, Glycine max
  unsure (1)..(352): unsure at all n locations
agcttaatgcaatagtattgtattaagtctgttctcgcacgctacttatgagagggcgtatactattcacacatggctcacaacggatctctgagcattctgagcaaatgtacccctgattctatcggatatgttggcgtttatgaacataacagagagacaatctgttcgtctccactttacatgaaggtcaacatccttaggatcgttagttccagccataccagttggcgcattactccgtaaagcatatttagtatgcatccagcccaaataatgagaattatttncttccaactcttataattatcaccctcttaaagtggcattgctcatattcattccgatattt

SEQ ID NO: 132750 - DNA, 278 bp, Glycine max
tttatagcaaaggaaagtaagatatttactttttattatttcaatcggctttattagggctaatttgtcaaacggtggatgtaaagtgcatggaataaactaacaatataacatctggtatagacaaaccgtttagattggatccttcaaacggtataatacgagaattagacgatttggctttttcattttgaaatgcctatctacgagttttggtcctcttcttgttcatcttcatttcttctttttacgtagccctataagtctaatctctggga

SEQ ID NO: 132751 - DNA, 411 bp, Glycine max
  unsure (1)..(411): unsure at all n locations
gattacccgtgactggttctgaataaatcaaaagatgtaactcttcaaattggtttttttttctaaaaggtttaactcttcaaaatggtcttcttgactagacatgaagagtctataaaagcaaggctttgttttgcaatttcaatcaattcattctttcactttttacttttccaatcatcctttacaagccttgaatctctttgaacttcttcttcttctttgaaccaaaagatttctggttttccaaaccttgaaaacttgtgctattcatcatttcattctcttctccctatgacaaaaagaattcgcaaggactaaccgcctcgaatctttntgtggctctctttctccttttccaaaagaacaaaggactaaccgcctgaattctttatgtctccttctccttgc

SEQ ID NO: 132752 - DNA, 360 bp, Glycine max
agcttgtgtcgaagacctacatttcccataacacgaggctcttttgttttgcgttgccctcggaggaccagctcttgggtttacccgtgggaaagcacattttcttgtacgccaccattggtgacaagctatgcatacgagcctacactccaacaagtagtgtggacgaagtggggttctttgaccttcttatcaaggtgtacttcaaaggcgtgcaccccaagtacccaaatggaggactcatgtcccaacatttggattctctctccattgggtctatgttggacgtgaagggcccgttgggccacatatagtacacccgaagaggcaactttatggttcatggtaaacaaaaatttg

SEQ ID NO: 132753 - DNA, 228 bp, Glycine max
tcgagaaaaatacatgtttgtcattatcaaacagggggagaatgggaacgtatgtatacatgatattgatgatgccaaagaaaaatctaacaaggctgcttcaaatgataagcattctcttcaagaataattcaagattgcttcaacaaacaaaagccttgtttcaagatatactacaaaccaatccccgccttagaacaaaatgcatttaagacatacaaggccctc

SEQ ID NO: 132754 - DNA, 354 bp, Glycine max
  unsure (1)..(354): unsure at all n locations
tcgaacctcatcaaaatntgagcatatgtgtctcccaactatggcacaaaacaaatatcggccaacaccaacatcataagaaggcaataatatgctcttctaagagccatattaagttgatcacacgctgaaccaaaatgggttattggttgacgagacaggatataatagaaggcatattgatactatttaagaacaatagaactatcgtaaactaattaagaacaaagaactatcgagagtttgaatggaagtgtcacttgaaatttgattcattgtttaaggggttacattgtctatattctacatgcacatcatattctgttatggctgctatatcttatttatatattt

SEQ ID NO: 132755 - DNA, 322 bp, Glycine max
  unsure (1)..(322): unsure at all n locations
agctntattcaagacaagaatccaagaaagtctagatatatgatcaagtttgatctcttagaatctttaggaagaagtttccaaattgaaacaaacaaaaggtttgaccaaggaattctatcctttcaaattgagattngctctctggtaatcgattaccagcagtttgaaaatggtttaattcaaaattttaaaacctgtaatcgattacataagtcttgtaattgattaccagaggggattttcagaaaataatttccaagagacatatctattcaaatgttttatgaacggccattcaaatgttntaaagagagatttc

SEQ ID NO: 132756 - DNA, 385 bp, Glycine max
tatagaacacaatgcttcaatcatctccaaatatgcatgtgaattatgaagcatcaacaagaatcaagcctaggctattgtgcaagcaatcaatggggcaaaacacaccaaatgattatgatgatggatggctcaaattctcacaaaggtgaactcatcactttcaaattgagctttcaaaactatcatgacatgtagaggagaatcaaggatttcaagtcacaaaatgtcaaaaacttttattttcaaaacaattacccattttttgaacatattctataattcaaagaaaaacatgcaaagtctttcatgcacacaaatattgacccatatattaaactattaatccgacgatactaacaacattacatattaacacaactta

SEQ ID NO: 132757 - DNA, 357 bp, Glycine max
  unsure (1)..(357): unsure at all n locations
ttatctcaagaaaagcagttatttttatcacaacaagtgcgttttctttgtagttctttcaaagcttaatttttttggttaattgtttgggtgttcctgatccttctcctacattgtttcgcatagaagcccaaagaacactaaagctttgattnttatctcaagaaaaacagcgatttttatcacaacaggtgcgttttctttgtagttctttcaaagcttaatttttttggttaattgtttcggcgatcctgatccttcttctactatgttttgcatagaagcctgaagaacactaaagctttgattttatctcaacagaaaagcagagattttatgacacaggcgtgatttttg

SEQ ID NO: 132758 - DNA, 168 bp, Glycine max
  unsure (1)..(168): unsure at all n locations
ntntacatatttaataataatggcacaatgctntctcattcttttctttctcggtctcaccatactcattctctccgtcggtggcattcttccgagcacaagtgcttcgccgttgttcatcgtatcgtagcgcttggttaggtccggtgaacgtgaatgtaccaatgt

SEQ ID NO: 132759 - DNA, 373 bp, Glycine max
agcttctacttatgtggcagggcgggctttcttcactttcttgtctccaacgcgagctctgaccactggtcttccttcccgcgatgcttcttttcatgtccgcctgagtgggcttataacctaaaccatacttcccacgatttccttgggtttttatcaggctagttatgccgccgttgtctttgcctaaacccatcccgggttcataaccgttccccaacataactcgggccatcattactgctgcatcggacagacaaggttgcccaaagagggagtccacgaaggaaatgctgaccacctcaaaagactggaaagcggtttctaacgattcttctgcggcttcacataagcatggaggatgggcagctta

SEQ ID NO: 132760 - DNA, 423 bp, Glycine max
ctcaagctttgacaaccagagtgctagttatagcgtgagattgttgtatagactggccatatcctgaattaccaaaagtgcaaaatgacaatgtctacaatttaaaattaatttaaagaggtggggaaaaataatgcttaaaattacgtgtgattctgacatgagtaagaatatagtctactctcccatcacattatggtgatgttaagaaataattttattagcggtcaactttttcttttccaaataggccgcccacattcgttaatgaggaatccgagatataacattctgagtctattatgaaccaataaaacttattgctaagatgcatgagaacaaataatgaaaaaagcactgggcacattcttatatacactcttatgctctcccattgtaattaaattgtgtaaacttcaaatt

SEQ ID NO: 132761 - DNA, 425 bp, Glycine max
  unsure (1)..(425): unsure at all n locations
agcttgctccagacccatgaggtaatatgtgtcttgctaatgacgttaaatgagcgcttcctgtgaggcaacccagttctttttctttatttttcattaaacattgcatatagttaggatcaacttgtttgtgattgctgagtaagtcatcagcatgttttgcacagagatataggttgtctaagcttctctgaagctgtggatgaaaaataacttagaaaattattcagtcatccactcgctcaacgcaccctgtgcgctaagagaatcatcatgcatgcgttgaacgagtctcaacttgtgctaagcgcatcaatccctacccattggtgatgagaatcctgaaactggccaaatataagctaaaggcccaagtggagaaggatgatngcccaagtggagaaggataacagccccgagtggag

SEQ ID NO: 132762 - DNA, 159 bp, Glycine max
agcttgtatacgatatacaatattgaagatatcttaccacttgttaaacgagcggccaattacctagtaagaaggagcactggatctgtatagcgcaaactagtttgtcgtgactttggctatctcctgttgggagcgaggagacacctctattttata

SEQ ID NO: 132763 - DNA, 436 bp, Glycine max
ccgcggcttatatttcaaatctaggcacaattttaaccttttaatgatgaacttaagatgtaaagctcggtctattatattcacttacatgataactatgagaaccaactaatgtataaagccaaaagagaaataaacatggtgaaaattggttaaaaagggagtgtcatgagcaattatagaaatgagatattagttatcggtttctaacaagactcactttttatactaagttcatcatgtttatgtctctttttgctctcaaagttagactattctaataattttcatggaaatagatataacgagacaagttccatatcctaaattaaaaacagaattcacagttgtgtttgaaaatctaaaataatacagtctttgaaaggaccgatgtgtcattaataaaaatataatgacacgtgacatatatgcacac

SEQ ID NO: 132764 - DNA, 399 bp, Glycine max
  unsure (1)..(399): unsure at all n locations
tgaggctgcagctttcctctttgacaaatacccctcagtcaatagtatccatcttgggcctttttcccacaactctcgtaaatgggagagaaatgttcatctaaagcatacaagtccctaatattatcaaatccttaaaattgagctcctagggagaaaaacaatgggtgtctcctagagagggcatcaactaccacactttgttttccctttttgtatttgatgacatatggaaattgctctaggtactctacccattntgcatgcctcttgtttaacttggcttttcctctaatgtacttaagtgattgatgatcactatgaatgacaaattccttggaaacatggtaatgttccacagttggatgactcttattaaggcataaagctctttatcat

SEQ ID NO: 132765 - DNA, 319 bp, Glycine max
agcttcagaaaactatagaagataatgctactgcagccgcttccaatacagctagggaagcggaaccggtgctacagcccgcaataaacttgggccgagacataaacacgacggttttcggtcggaggtatagtcctcaagcctacccttatggtttgtctccggacttcactccccgtaccgctccagacgatttgagccaagcccctaccttcgaggggaaactccctccttgtgccgactatcctctgcaagaagatgatgaaggagatgcccatctaggcccttctacttccctcaaagatccggccccccatga

SEQ ID NO: 132766 - DNA, 444 bp, Glycine max
tcttatccaatgctcatcttggtggtgaagctccttcttccatggcttatttcctaggggatggcgccgcctcttacctcttctactttgtcttccgctgcatcttcatggtggaaaatcaccatttaaggacctcattgaagctcaaagatccagcctccatagaagctccaccagcaagcttccatcaagtcttcagaagttaaaggacaagaaaatctctcaaagcagcatttcctaggatctatttggaaaacactaagaggaccctgtgcaaaaagtggaacccccaaatatagagtttcagaaggtgtacctatggacgcccattaccaaactcttactagtgcatccagttaatcttaatctttccaaagaagatagcttatcctcttgcagattcgatgaacaaatgtaccttatagaccaagccatcgcctacct

SEQ ID NO: 132767 - DNA, 237 bp, Glycine max
agcttggttcgaggtacttacccgttgaagattgaagaacgatgaagaacgaatgaagaacgtcgaagaacggttgaaacctttgcgagattcctcacggaaaacgttacggaaacatttcggaagcgcctcggcttagattttcttcacggaaaccaattttccaagcaaaattcaaagagggagaagtggctcaggggctgaacccctttcttcttcacttccttccctatttat

SEQ ID NO: 132768 - DNA, 295 bp, Glycine max
  unsure (1)..(295): unsure at all n locations
ncaacgggatcgacagaccctaggcatcactctacgatcttaaatctggaaagctccacctggatacataccaaagtgtgacaatccattgccctcctgcaatggggcacacgactgatccaaacgccttatggcgtctcactatgcccaaccatccaatcttctctaataaaaggggaaaactcgaacgacaacaaaccggatgactgagtaaatgaccaatggcttcattgcggtcagccaaaacggtcaagtgattaaacaaacatcctctttgaaggagaccctcaagaga

SEQ ID NO: 132769 - DNA, 436 bp, Glycine max
  unsure (1)..(436): unsure at all n locations
agcttaatttgattattgctntgaaacaattttaaaggtatgtcaattagttatatataactttttatatctacaccacttagaaactctatctttactatttttcatatatatatatatatatatatatatattattttgcatatgatattgataaatttgtcttttttttagcctcgattttattttaagattaatgaagctggtgcaaaacagtattgcaaattgagtatgggaagaaaatgggttgaaataggcaaagcttatggaatgaattcaacgatccaaccaaaacaagagatgaaatcataaaaaatgtgccgataggcataaataanaatcaatgggctcgttttgttcattatcgtcataaaccatcaacattggtacaattagattggtttaattattngaatggntttataagctaatatat

SEQ ID NO: 132770 - DNA, 378 bp, Glycine max
tcaagcttaatgaagtagaccctataatgtcccttatgttgaggtactggtatatttggtatgcaacaaacaaattcatcgatcaaaacaatactcctaatcgtaccatctagattacatctaattattgcaatcattaaaatgatatattctatgaaaaaaattattattgaaaaactaatataatgtttatgataaacaaaacagttatgaaaacttcagttatatgtcacgacacgatttgaagttttttttccttttttttcaataatgtcaagaatgtaccactcgtacaaggcatgctaacaaataaacaccaaacacatgaactactaccatcttaattgtttctctagagtgctactattgctaataata

SEQ ID NO: 132771 - DNA, 428 bp, Glycine max
  unsure (1)..(428): unsure at all n locations
gcttggagtttccaagtgccaattcgtcttcttctttagtccagacttcttctggcttcaattcttcagtgggctttccttctgtgtccagcatcttgggatgtttccagcctttgatgacagctttccaggttctgctatccaatgatttgaggaaggccaccattcttgctttccaatattcataggtgcttccatcgagaattggtggtctgttcactggtccgccttctttctccatgttcatcagaatttatctccctagatctcactctgtgatttcgagtgttggctctgataccaattgaaattctgataccaggggacagatgtcgtacaggatgtcacgacatcacgcttcagaacatgcagattatatgtgtccgtttgaacagattaaacangttaataacacaagagaattgtta

SEQ ID NO: 132772 - DNA, 237 bp, Glycine max
acacttaaatactcaagcttagttctaaatacgagcgtctcgatatattacgggactttttcaacactcccaatagaaagttattgtcattctacttcttatagagccttcgttttcaatgtcgagcgtcttcatatattaaagggctcaattggacatccgatgcaaaacttattgtcgtttgcatgtacttcagctttcgtttgtaatcatgagcgtcgcgatattctacgggac

SEQ ID NO: 132773 - DNA, 74 bp, Glycine max
gcattttggctttgccagcccttggcatatttcttctaccatatagcccatgggaatggcacctctctcaagat

SEQ ID NO: 132774 - DNA, 383 bp, Glycine max
  unsure (1)..(383): unsure at all n locations
agcttctaaggaagctacctattctataaatagaagcatgtgtaacacttgttgtaactttgatgaatgagagtcttgtgagacacaactcaaagttcaacttctctccctttttcttccttcaatttcgagctcccccctctctctttctctccctctttcttttcctccattgaagcatcctctccaagcttcttatccaaggctcatcttggtggtgaagcttcttcttccatggcttatcccctagtggatggcgccgcctcttacctcttctcctttgtcttccgctgcatctccatggtgaaaaatcaccattaaaggacctcattgaagctcanagatccaacctccataaaagcttcacatgcaagcttccatca

SEQ ID NO: 132775 - DNA, 429 bp, Glycine max
agcttgaaaggagtgtgaggtgatactaatcattcttttcaacaatggcccgagctcatcaataagccaggattttatgcaaaatggttttggctccatgagtgataaagaaaataaagagactgtaatgcaggttcccgaagaactatctgaaataaaaaatatgaagaacatgtatatcgaactaactctaacagcactgcataccttggagcaaatcaggggtagaagctcaactctaagcatgttcccatcttctccacacaactaggatttgcaattgcaagaggattgaaagaaaaaaaaaaattgcactagagagagcaacctagtagatactgagaataacatggatcttctcgtgttttatatggtaatattatagagacaatgcagcatccaataagtactccgatatatacacatgat

SEQ ID NO: 132776 - DNA, 364 bp, Glycine max
ccaccttagcttaatcccatgtcggaccatctgcaacactatcaccaacttgccacattcgatttactccctgtgcagtcaatcgaaccaccattctaacctcccaggaataacattcctatggagttctgcaatattagcctcccagacgcttccggttaccgctcaataagtccgatcagatgaaagttcctgcatgggcatccatgaacaaaacaaaggttaataatagcttgccttcaactgagaacactgcttgaataagcgtatcattttaaaagatatccatggcccccttacatcaacagtgaatgcatgcaccatttgagttagaactaaattttcataaacacaaacgggtata

SEQ ID NO: 132777 - DNA, 446 bp, Glycine max
agcttgcttgtggagcttctatggaggctgtatctttgagcttcaatgaagtcctttaatggtgattttccaccatggagatgcagcggaagacaaaggagaagaggtaagatgcggcgccatccactagggaataagccatggaagaaggagcttcaccaccaagatgagccttggataagaagctcggagaggatgcttcaatggaggaaaagaaagagggagagaaagagagaggggggagcacgaaattgaaggaagaaaaagggagagaagttgaactttgagttgtgtctcacaagattcttattcatcaaaggtataacaagtggtacacatgcttctatttatagactaggtagcttccttgagaagccttcttgagaaaacattcttgagaagcttctatgagaacacttcccttgtaagctagaacttagctctca

SEQ ID NO: 132778 - DNA, 309 bp, Glycine max
ataaagcatagtgtgtttatcttatgcctacatcacaagcctaggaagggcattccttccaaccctccttaagaacttgtgccgggcagctaataagacaactagtacagcttcacttgcgagtccctggataactccaccacctttccctgcaataaaatcacatgccatgttgcaaagggttacatgtagtatttgagtttttctatcaaataaattattcatatgccatttagggtcaaatttttattatctatgaaattcatctcaagcaagagcttacaagcttaaaaaaaacaaaactctgac

SEQ ID NO: 132779 - DNA, 448 bp, Glycine max
ttatcgtgagattactccaatatcttcatagtgcattgtggacacctagtcatagtcatcatggttactaaaacctatttaatgtctgaacggctcctatgattctagattattgagtaacaaaaaaaccaaaaactaattgaatgtgtgtgcactatatatatatatatataataaaaacaaaaaggatttgcttaaggcacttacccaaaaccatgctttttataataaggaattgtggacaaaagggtctcatcaatatcaaaaattcacgaatctttgccatcatctgtcatagtgcataatacactcatgtagagccttatcttcttcactgttctaacagaatcaaccttgtattgagatgaggacatgtacttctttcaattgtccacacatttcttgatgcacaacactgaacgctttaatgttggttagcatacattat

SEQ ID NO: 132780 - DNA, 483 bp, Glycine max
  unsure (1)..(483): unsure at all n locations
gcatgcaagctcgcttctacaatcttgccctttgtgatgatgacaactntgtaatcaagaaacacacacgcacacacacactttttgctagttgatcactcacataaatttccattctccacctttggttttgagtttatgcttcatttgaaattaagttagttaattacttatgcgagttcttgatttaagccctatttctctccccctttggcatcaacaaaaagccaaagtgcgtaacaagtatgaaacatacatatactactgattattcacaagacaatcatggaagaatataaaccaatcatgaagcaagaaacatgaatataaaaaccacatagtgctataatataattcataattggtcattcaaaccatgcatataaagaaatactaatttatccaaatgtcataatatagccaaatacacggctagaaaacaaagtactatgtatagtaaataatatgaaaacctcagatgag

SEQ ID NO: 132781 - DNA, 337 bp, Glycine max
agctttgcggatttggtcttcgctggcgaaatgatcgatgtgggtctaaaaaagagcaaatctgataatcatgccttgataaattcaaaaaaaaaaactagggcaagtgaagagggtgagaatgagggagaaacgcatgctgtgactgccattcctatacatccaagtttcccaccaacccaacaatgtcattactcagccaataacaaaccttctccttacccaccacccagttatccacaaaggccatccctaaatcaaccacaaagcttgtctaccgcacttccaatgacgaacaccacctttagcacaaaccaaaacaccaaccaagaaatga

SEQ ID NO: 132782 - DNA, 329 bp, Glycine max
  unsure (1)..(329): unsure at all n locations
ctcaagcttctccacgaagaggtcctagaacgatcccactagagaaagctccatcttctccccnggtttataccggcactgatttctgagtgtcgagcattatcaccgcttcaagaccatcaagggatggtcattccacagagagaggcaagtcaagcttatggaggatgagtaccctgattttccagtaaaagttacctcttaagcgttgggctccacttgtgactcctaatgctaaattccacccagagatagtcatggaattctatgccaatgtctggcccactcaggaaggggttctggatattctctcgtgggttaggggtcac

SEQ ID NO: 132783 - DNA, 457 bp, Glycine max
  unsure (1)..(457): unsure at all n locations
agcttgtccaatcctctaataggatcatctccataaatataatcactttcatcaccatctccatcatcatcaatgccttcctcagattgtgcatcatcatcaggttccacgaaaattaaattatctagatcaagagcttaaaatagatatcaaagatgttatatcagaaatagttaaaacttaaaataatacacaagcacattttaaatttgagaaagttcataaattataccttctcttggtgttattaaaattgcattttatcttctcttttgcattntccatctcatatatgaaaagtattcagtaacaagattgatccaactccaacattgtagggtcagttgttgtgttttgtaatagactaatataaagtatgaactatgaactatgaggttatcgtcatttgtttgcaattgtggcatttnatatattacttatattcatatntttttac

SEQ ID NO: 132784 - DNA, 459 bp, Glycine max
  unsure (1)..(459): unsure at all n locations
ngatatgaggaagtgtagaagggtgaaacttcctgctnttattcgttgaccacagagcggtacctggagatatgtcgcgggggtcatgagaccttgaggacgtcaggtggggtgctattgcccaaaaccaagcttgaccaatcccgacccaacccgggcatagtcagtcagtgagaacctgtgatgtacctaagcatgcgagctcctggcagtcaacagataaaaggaacaaagaccacaaagcaaggaggcttgtgtggtggctggccagctgtgaactttgattgatatatgggatatggcctctggtaatcgattaccaagggtgggtaatctatttcaaggcttaaaaatgaatacacgaggcttatatggtctcttgtaatcgaataccaagggagtgtattgattaccacgcttgaaactagtgcagaactatgaggcttcttgaatctatac

SEQ ID NO: 132785 - DNA, 364 bp, Glycine max
ctgcagcttaatccgaagctatgccgaaaatttgttatctattctgaaaattgtgaatggagaaagagaaagcattagaagggagagggctgttttcactttaaatcaagttcaatatgggttatatatattcagctaaacgtgagttcagaatatatataaaaaattatatattaaatattttttaattaatacattttgatatttttttaaaaatatttctttaataataatacataaaaaataaaactaatataattaattaaacataacacatatcttaatatcttaatgatttattatttgttctattaataaacaattatgagataaattcttattaagatatattctttatcttttt

SEQ ID NO: 132786 - DNA, 227 bp, Glycine max
cggatccttaagcacctgaggatgcagcttcgagaagtgtgaggaccagttttatgtttagcttggaagaacctgggtagtcgaaaaaaaattcaagtccataaccctcaaagtctggaaagagtatgatgaactaagggatgtcaatatgggcacccatgaaaccttggaatgagaaaccaaaaagggcccgaagggaaaacaccacccaagccaaggtttgaggg

SEQ ID NO: 132787 - DNA, 199 bp, Glycine max
attttaattcagcgccgaattaatggcttgaactttcttcaaaaaatgtagaccaatgatatcttgaagcatccgtgtcatttatagcgtctctctatgcagcaccggattttcctttagcgatattctagaccattatagtctcgaaacgtcctgtcacatatagcgtttaattcttggtctgacctatccttaggaa

SEQ ID NO: 132788 - DNA, 368 bp, Glycine max
  unsure (1)..(368): unsure at all n locations
agctntctacacttaaagnagatgatctcattactttcttcctagnttttcttttggaaccttgaatctttacgtctagaggaatgttggaaatttcctttcttcttcatcatttgtttgaattttctagacatgaggttcactttatcatctgtggatccaacagagttctctagtccatcagattcctatatttgcactatcagagctttagaaaagctcttttcttcttctcttctgaagcttgtcgctttagatttaacagtagtagaattctattgtagatgctcattattttgaagatgaactccattgattatcaaaatgcccaacaactcttcctatgcaagatttttcaaatctcttgc

SEQ ID NO: 132789 - DNA, 438 bp, Glycine max
gacacttaaatactcagcttcttcacatagtccgccttagcttgaccgtctttatgcttaaaaacagaaacattaggcaaaagaacgagaagagttagtgggttaaaaccataaacaacttcaaaaggagaacaattagtggtgctctgaacagctctattgtaagcaaattcaacatggggttaacaagcttcccaagtttttaagttattcctcaaaactgtcctaagcaaagttcccaaagtcctattaacaacttccgtttgcccatcggtttgtgggtgacaagtggttgaaaataacaatttaatgcccaacttgctccacaaagtgctccaaaaatgcgaatcatcaatcctatgtatatgatgcctatatttcaaggtgatattattaatggctcttcaatcagaatacatgctccttgtactctccttt

SEQ ID NO: 132790 - DNA, 333 bp, Glycine max
ccaagaaatgctactcttaaaacaaaaatggcgtacaacctcctccaataaacacaaacatcaatgttaatttagagcaaactcatgcacatacttcctcacgaacattcactcgcacaaaatattcttctaactaagaaaaatgcacccatgcacaatcaaagcaccttcgttacctagattatgtatatgtacttccaaggtgtatttgctaccttcatcacatgcacttccttggctaaatttacatacatgcatactcaaagcatcttggctaccaaaaattgcacacgtgcacattctggtatttctaatacctatgcatatacaaac

SEQ ID NO: 132791 - DNA, 389 bp, Glycine max
agcttctatgaaggccaaaaatgtgtctatttacaaaaatgaattatgcatacagtatcaagtatcaactataaacatgtatataagaacagaaatcactttttaaattttaataaacaaaacctcaatgttttgaaagaaacaagcatatcttttgggttacagggctatcaaacatcaaatgatccactgtatagcagctcatcttaacccttagcatgcagagatactcaactcacatgtgaatttacaaaattccatcccaaagaaaaagcttcaattgttatcttgttattcacatattgcatagtaattccaatttaggaaaaaagcttcagatttagtttgtctcgatatataagaaaaaatcatttaatcataagagctca

SEQ ID NO: 132792 - DNA, 302 bp, Glycine max
tggggatatctcatagtcctagagaacacaaatatcctatgttctgcgattaaaaatcaaaataaatatcaattgataaacaaattaatcaattaactcatgcatagaataaagttcacttttttggataaatgggtcttttcgcaatgcggtgtctttgagttgcttgcctatatagacacttgcaacatgtcttccacctgtgtgactaaacttcccatttaggtctcacgcaatatgtctcactctttaccgtagacatgttaactacgcattctttatactcgttttaattgagactc

SEQ ID NO: 132793 - DNA, 444 bp, Glycine max
  unsure (1)..(444): unsure at all n locations
agctngtcttgtgcagaattatggtacaatacttttacaacagaattttagcaacattctagagcacactaaagtgcctatttcgggaaaaaagctctggaggcagcaagaggagcagcttttgcagagatacctagcttttataatctcattattgttaggggtttttctgtaatggctggctaaacacccttgttggggatttctaaagaacaactgatgtaattactttaatatctaattgattgtgtttcttgtgttcaatgcttctttcagtgcttaaattttgtatgctcttggtctgatcacccatttgtgtgcatagttaggtgactttagcattgggaaatgtattgttgccttataacttgattgaagcacgattgaaacttattcttaaatgagggatctgcggataaagtttgggtttaaatatgttgtata

SEQ ID NO: 132794 - DNA, 377 bp, Glycine max
tctccaaatggcatagttatttcccgtttcctgaaaatatctatgaatctcgtcaggcggcgttccttatctctcttggaaggtaccaaagggtatggcatcttctttccctcatctgaagttgactctctatctttttctctttctttttcactcttactcgttatttctttattctcttcaactttttcattctactcattatctttttgaattcctccctctatttctttttcatcgtctttaatttcttccattccaataattataggtatttcttttcactgactcttctcatttgttatcccatttcctttttttacagattgttctttatagctacaacattcttattctaatctgcacaagctaattct

SEQ ID NO: 132795 - DNA, 424 bp, Glycine max
agcttcttgtttggaaattaatatacaattatgatcaaggattgtttcttcttaagtacttggatgaaatgatgaaacaaattaaaacttccaactaaacctaaatttactacttcaaagctacccttaaaatcatagattctggtatctagtagagtctgatttttaacttttccgtcttagggtagatgtggcttctgaatgataatttttttttttgtaaaatcctttcgataaaatatcatagtaaatattttgtaaacaaggttttttgaaacttaaagcatgaaacaatagaaaataaacaagaaaaaataaattaaaaaaggatacaacatacacaggaattatattggtttacctcaacttggacaacgtttagtaccgacacctataggctttttccaccaagattaaacacata

SEQ ID NO: 132796 - DNA, 246 bp, Glycine max
  unsure (1)..(246): unsure at all n locations
acacatanaacactcaagctggtagcaaataagaagtatattgaagataactctgttgttatgttataataactccaccggctggatgcaccttcaaaaatttatgctcctaagtcttcacatttgcccctccctctcactatgttgaacatccaactatgaattctatctcgtatcgatagtcctgtttcacaattagtcctctcctgggtctcaaagctcatgcacattctcataccaatttct

SEQ ID NO: 132797 - DNA, 276 bp, Glycine max
agcttataaccaattttaggctcgacatctgattacattacaacatacgttatgctccctctaaactaccatactggcatgaagttctcccgaatgggtagtgtgctaataacatactttcatggttggccttgtctaaagtggatcgggtgacatcgtatgagaacctgtgtgggctatgctaatttgagaaagttgaaacctttacttattatccgaatactttatgctaaccataccactctaggttgagaacagaatactaccgttcatata

SEQ ID NO: 132798 - DNA, 305 bp, Glycine max
tgctcgagcatcatacctgtgacacactctgtcttatctttttacgctcgaccagtccctcaaggctggatataccctacgagtcatgcttcgatatctcatcatgatggcctcataatgtctggcatgcctaggatctccgctatagctcatgaatatctctatggtggggttgagagccagccaatccttcgctcttgtgatacatgtggcagtatttctgatttctgtcaaggttagattgtccttgatcttaaccatattgactcctgtgactctttccattcacctccacttgcttctgt

SEQ ID NO: 132799 - DNA, 414 bp, Glycine max
tattcgaagatcctcgagatgttataatatgggccaatctttctagaaagactctcaagaagtttttgaagatttctctagatgaaaactataatctgcatccttttgagttcaaccattcccacttctgcaccatgggatttgttacctggtgggagaaatattattcgagccgttcagttggagacactactatcatgatctccagacttgagagtggttttacacaaccaacggtcgagaatatccgctcaaaccttcaagctcgaggtatttaattacttttgactttctaaattgatatgtattcttgccttatcttatattcttactatcaagcgaaataatcattacgaagtaaagtgctgaaccgtctctatgctgatgtgagaactcatcatacccactggggtg

SEQ ID NO: 132800 - DNA, 381 bp, Glycine max
  unsure (1)..(381): unsure at all n locations
agcttacatgtgcaagggtntcaccctaagtatatngatatttcctatntttgctttagagaaaatgtaatttcgtgttggatcaaatggtggcacttgaagggggagaaacaaggaatcttccaacaaaagatatgggagggttggtgtggacaatcacaaggaagtgcaaatgatatgtggaacaagatgtcccaagagattattaaagtggctaaagagacgttaggtgaatctagaggttttggacctaggggtaaagaatcgtggtggtggaatgaaaatgttcaaagcaaagttagagtaaaaaaggagtgcttcaaggagtggtctangttgaaaaattctgaaacttgtgataagtataagatagctagaaat

SEQ ID NO: 132801 - DNA, 333 bp, Glycine max
  unsure (1)..(333): unsure at all n locations
acctaccaaaaaaaatgtcatcatagaatcggattgcaaagtgggtacagataatttcaactcttatattataggcaatttcgatttttatgtaattatggataagggtaggcaacaattctcttcttttaccaaacttaaagtgagtttttgagataagcttattttgtaattcataacttggcaaaactttcaagattttactcttcatctcatgagtttcatcacatccctcatgcattgtttcaaacattntaaataaaataatacaactatgattaaaaaataagaagaanaaaccaaattcaaatgtggagtaattaatttcagtta

SEQ ID NO: 132802 - DNA, 428 bp, Glycine max
  unsure (1)..(428): unsure at all n locations
agcttagcatgaactaaaaaatcaggtgaattaaacaaagcgtgaatgacatgaccggtaatgcctatttaacgagtgtgtcctctaacggatctcacattttttgtggtgctaatagaagtcatttatatgttagatgttatggagtgtttatatacaagtgtttcaaaataatcattggaatacaattgtccaatttatattataaaaaaaacaatacagttgtctaatttataacttttttccttaatggttaaaaaatctgatgcaaacatgtgttaatgactaaaacttgttgaaatattaacatctatattgattcaagtgactcttaataatcattgtagcttctttcttactcgaatctttatctcgaattcatgtctttcttgaaggcagtacattntcttcttttttgcacttataca

SEQ ID NO: 132803 - DNA, 379 bp, Glycine max
gaagacatgttctatatatgttgctgtttctcatattcggcactcgacgttggtctaatattatattgtggtgctactacagagataaacagttagataattaattcaatatactattttctgtcatgccacattaaatatgattgctatggtgattattttctgtgatatgatcttatttaaagtggagcattgaactgggcccgcaagtaatgaccttcctctatgtacatccagctctgataaataatatacacttatttctcataatacatcccaaaattcttctctgatacttgtgggaaagatttggtcttcagattaagttcggatgacaatgaatactcttgtgctagcctcgtagaggaacaatcttttt

SEQ ID NO: 132804 - DNA, 233 bp, Glycine max
tgatcaagacaatctctagagtcttagaaagggtatattaaataggaagggaattcccattgaagtagccaatttggcctgcataacatattattatgtaacatttaatgcatgtcaacaatttcaagtgttaataacaaaaaattaaataccactccctgttaagtctaattaccaaaatgtcatccatactatgtccttctgaggatctcgcaccttctttctattctctt

SEQ ID NO: 132805 - DNA, 454 bp, Glycine max
agcttgatactttagtcaatttaggctcataataatgagttttgatgagcatatatgagatatcccttgatgtgtgcttgtgtatggaaaaaaatgtgcattggtagggagtagctcgttcttattatttaggtatgatttgagtgacttttataaggattggcctgattggaatattgattgaggaaatcatgcaattagtcattatagttgttgatcatgtgtattattaatgcctcgttatagtgcagattctctagctagcatgatttgaggattaacaagtttaataattatgattaagatgcttgatgatgaagccgactgatgtccttgggaccgtgagggtacagaattccacatgttatgcgagtgttataagttgagaaactttttaattgctcgagacttacggtcaaaggtataaatggttatttctaatacaaatcatata

SEQ ID NO: 132806 - DNA, 428 bp, Glycine max
  unsure (1)..(428): unsure at all n locations
agctttactgatttagntttttcttgcaaaagaatcgaagngggtctgagaagaagaaaatttgattatcctgctttgatgaataagaagcctggggcaaatgaaaagaataagaaagagggaggaacccatgctgtgactgcagttcctacatggcaaaatttcccaccagctcaacaatatcaaaactcagccaatattagtccttctcattatccaccaccctattagccaagaacacccaatcatccacaaaggccacccctaaatcagccacaaaacccgtctgttgcacatccaagaccaaacaccacccctaataccaatcaaaacaccaaccaggaaaggaattttncaaaaagaagcttgtagaattcaccccaattctgggggtcgatactaactttactccatatctactcaataat

SEQ ID NO: 132807 - DNA, 357 bp, Glycine max
acacatagaatctcagcttatgagaatcaagatgattcaggagttttgtgattacaaagatgatgaaataaactcaaaagtctagatcactccatgattacaaagatgaagacattcaagaatgagttctagaatgagtctagaactacttaatgatcaagagcaaatgtgatttcaagaatcaagattctaagatgcaaaagtattctagatcaagattcaagactcaaagatgcaagaatcaagagaagacttaatcaagataagtattaaaaagtttgttcaacatcgagtgtgacaagaagtttttactagatcattaccaaagagtgttacttcgtggtaatcaattaccag

SEQ ID NO: 132808 - DNA, 195 bp, Glycine max
taaactctctaatttttcttctttcccgttatcactgatggattttcctgtgattattgtgtagattatgataatatgttttttccaatgtattttgcttttcggcatcactttgtgtaaacactctgtgcctgaatgcatactacataagctgatctttatttcctccaccccctaaccctaccacttgctctt

SEQ ID NO: 132809 - DNA, 341 bp, Glycine max
  unsure (1)..(341): unsure at all n locations
agctntctcatattacttacacttaagctattttctaacctatgcataaactagttttagtttatgaactagtcttaggttatggagaagcttatttcattttttcttctattttcttctctcattaatatttatggagagatttatccaaacaaaaataccatgaagaacataagatttgtcggcttaacctctaaagtacggagaaggttaaggcaattcataaactatcattatgttgtgacacttacaatttgtgtacaaagaaggttgagtctattcataaactacagcagggtaatcatctcccgcgtatatatggttgaacttgaatgccacat

SEQ ID NO: 132810 - DNA, 432 bp, Glycine max
  unsure (1)..(432): unsure at all n locations
ngaaccattctaagctctatgccgaatagcagttctcagtgtcaagaacttcatccttctgatgtagactctaatgcaactccattctaatgttggatgctctcttggtgtccctatatatgtcttctattaacgcccatattgtcttgcactttgccaagatcaagtacttagaacgaagctctctccattatcgttgataggcctcatacgatcccttcacgcttttactcttgacaatagttcttaaacaacatttatgagtactgctttgagcacctcatagtgtacacacatttctgcttcttaagaatatttaacattggaacactttattgtagtgatagtcatcacataaatccctcattttacctgttgcattgctaatgattcgccatattcaaatcaggaattggattcaccaaaattctc

SEQ ID NO: 132811 - DNA, 444 bp, Glycine max
  unsure (1)..(444): unsure at all n locations
agctntagtcaaggaaagtaacccaaaaatgaccaagaatagggtgttgaaagagcataataagactatcctaaattggtttaaagatacaatctttggtaacgataatgcttcagaaacgtcaagaaagttagcagatgggcctaaaagaaatgttataacttggcaatgatacgatatcaacaagtattcgatctacatttaatcacaagacgacaagagtaagatgcaaaataatggggttagtctaaggtttgaatctcaacactttgctactgtacatgacgacaatcctcaggtggctttcatgccttactttggagtcattgaagaaatctgggagcttaattatgtaaaattcattgtttgtgttttcaagtgtaagtgggttgataccaatatcggtgtgctaatcgatgattntgtatttactttggtagatat

SEQ ID NO: 132812 - DNA, 414 bp, Glycine max
  unsure (1)..(414): unsure at all n locations
taatccgctatgacntaaaaaacaaaacttcgatcaagtttcatcttctaacacaacattatctgcatcaaggaagcaactcgaattcaatttgactagcaaaacttgtcattttgcctcactgttcaaagacttttctacccacaaagtttctgttatctttattggaaaaattcagcaactaaatcatatattggcatatccttcaactatacttatgactttctctaaactcaatccaaattgtgcttcttttttgcaacatacttaatagagtgtgaaccaacaattcacactttgcattctagccaagaataaaaggttgctttatcaacaattactcacaaatatgaaacacctcccatacatgaaacctttgattataaagttggatcttgaactaccttcactcct

SEQ ID NO: 132813 - DNA, 372 bp, Glycine max
  unsure (1)..(372): unsure at all n locations
tgaggcatgcaagcttgtgccgatcccacatggttggagcatattctctttaacaggngaccctgactggtctccctatgattttacctagtaagagcgacttgacttaccagagtgtggtctatcttgtcatgtactcctaagcacccaacgagggttttcattgacatggtaccacattgcatatagaattgagtcttaacataattgggtggataatgcttatctattgatcaatattgattgattgagtgatatcgcgttttgattcttgagtacgtaaatgatgtgaaaatgtgtgagacgtgtagcgttgagatgtgatgtcacgcaacaagtggtggaatgatgtgagctcgattttatatatat

SEQ ID NO: 132814 - DNA, 297 bp, Glycine max
agctcttatccataaatatcacttgaagcctttctagggccaatgccctaatgggctcttttgcttttatcggataaaaggaacctttcaaaagtttaaaatcaaccccacgcataactttcttgctcttaaaaactacctaagtctgaatccctcttccctctccacgatacattggagcaagagccacgctcttgtccacctccagagattgccatacctagagagggaacacaatcaacattggatcatgattgtgccactagataaaggctgttgaccttgcatggatgcgtg

SEQ ID NO: 132815 - DNA, 415 bp, Glycine max
  unsure (1)..(415): unsure at all n locations
tgtggtcaattatagntgtcactttctacaaagcacttaaccaagcatttgctctaaactcgggaccctattctctacttttcaacatcatattctgggtgtggccacactagctgaagccacgccgctatctggttaaatatcatattcacgacgccactgtattgccttggaagttgcacatcctaatgatcccctctattttattctaaggatgtcgcgatctctatcttttgaacctgtgggtctagccatcttgttgtactatgcaatggaatgtgactttagtgttattttcctgactttatgccctatataactaactcttatggatctgtgtgtgttaatcgagaaattctgattatttcattatatcaaatttttttatatatatatgctttttctatctttctat

SEQ ID NO: 132816 - DNA, 355 bp, Glycine max
aaaatttctaaaagatccaaagcagaaaattctctaaaccttcaaagaaggtagagagtaacaacaacaccttcacatgctttgaatatggaaagcaagttcacatcaaatctgaatgtcctaccttcattagaaaacaacttgttgaaaagaaaggaaagaaggacagaaaacagaaaaaatcctacatagcttaggaagacaatgaatctacatcctctgattcttttagtgaagaggaagttgaaaatgtatgcttgatggcagactcaatggatgactccttaaccattgaagaaactgaggtaaatccataatttgaagaagttttggaagcatttaatgaaatacatga

SEQ ID NO: 132817 - DNA, 296 bp, Glycine max
agaaactcaagctctgtagcatatggactaaggtttgcgagtgttggacatctggtcctatggttgctgactgaggagctgggatggatgattaacggatgtcattgtgtttagtcctatttcttgatgccatctacaactaaaaagaacttaaaacttcttataccaaatattttcaagttcaaagactgataaaagaaaacttaaatgacattatatgcttagcgagacacagttcacttatctggccttcactaaacacactaccgcttagcgacatgtgatgctgctatgca

SEQ ID NO: 132818 - DNA, 244 bp, Glycine max
  unsure (1)..(244): unsure at all n locations
atcgtgcatgccatagctgcttatgtggatgttttagccacattttaaaatttaaaattgtctgttgcttaagatctattttgtaggagctctgattttgtnttttatcaaactagaaactgttttagtcatgcctaaggatttttttgtttgtctatttaactctaaccaagagccaatgactcacaactatgtgtccttcataaatatatgtgcccttctctgtctacgatctaatatgcaa

SEQ ID NO: 132819 - DNA, 331 bp, Glycine max
  unsure (1)..(331): unsure at all n locations
tcatggatntctcataagcttaatatcagagagggaccctatattcatgagtcaattctagcacgagctnttcaagttgtatgggactaagctgcgtatgagcactgcttaccatcctcaaagtgatggacaaactaaagtgcttgattgagttttggaacaatatttgtgggtgttagtgcatcataagccatcctaatgggataagtttttgtatcttgctgaatggtgctacaaccccactactcatttagccactaatttaacctcgtatgaaattgtttatggtaagccttctcctagttatttcaattatcaagctggaaccttt

SEQ ID NO: 132820 - DNA, 310 bp, Glycine max
  unsure (1)..(310): unsure at all n locations
agctngcttgcggagcttctatggaggctgtatctttgatcttcaatgagggccttcaacggtgattttacaccacggagatgcaccggaaggcacaggagaagaggagatgggaggcaccatccactatggaataagctaaggaagatagagcttcaccacaaagaatagccttggataagaagcttgaaaaggatgctttaatggacgaaaagaaagagagaaggggggagcactatattgaatgaatagaagacggatccaagtgcaaccttgaagtgactctattttcacctcccatcatatctgt

SEQ ID NO: 132821 - DNA, 389 bp, Glycine max
gacacaagaaactaagcttctttggacctagaacaggcaacggactcctcatacagtaccatgccatgtgctcgcgactcggcccttgcttcccttcgcaactagaattcactattgctaccccatagagctcctcgaaattcgttccggccatactctgacttgcgagccctcttggtctcttgttcaaaggcttctgcggtaattgcatgctctttccgttacccggcacactccttccgaacgtgtgtagcggccaacttgaacttctccttggcaaggtttgcctttcctaactcgcttttgagagcttggacttgtttgtattctttcagtgctataaaattctcttcgctgactacttttaacttggcgagccgatctaaacc

SEQ ID NO: 132822 - DNA, 426 bp, Glycine max
agcttgtagcaaatgcaaaccactttaaattttaactcggatgttcgattaagtgctgtaatatatcgagacgctagaaattgaaaatagaaattctgagcaaattcaaacgacaataactttttacttggatgtccgattgtgtcccgtagtatattgagatgcatgaaattctgaacagaagctctgagcaaaatcaaacgacaataactttttgctcggattttcgaatgaatcccacaatatatcgagacgctcgtaattgaaaatggaagctcgttgcaaatacaaaccacaattacttttaactcagatgtccgattaagtcctataatatatcgagatgctagaaattgaaaacgaaagctcgtataaaatgcacaccacaataactcttaactcggatgtgcgactaagtctgtatat

SEQ ID NO: 132823 - DNA, 455 bp, Glycine max
  unsure (1)..(455): unsure at all n locations
ctaacaaaaggcatgcgaagtgagtggaattcctatagctatttccttatgtnatcaaacataacaagggaaaaggttatattgtagccgatgctctttctcggcgtcatgcattactttctatgcttgaaacaaaattgattggtcttgaatgtttgaaaagcatgtgtgaatatgatgaaacttctggagaaattcttaaaaattgtgaaaaattatcagaaaatggtttctttagacatgaatgcttactttttaaagaaaacatattgtgtgtgcctaaatgttctactagaaatttgcttgtttgcgaagcacatgaatgaggtttaatgtggcattttggggtccaaagactcttaaaacattcaagaacatttctattggcctcattgacaaagatgtcagatattattgaacattgcttgtttgtaaacgcaagtctatgtaagccc

SEQ ID NO: 132824 - DNA, 376 bp, Glycine max
agcttatgactcttggcaatttctttaaaactagtcacttaaaaaaaagttgtgacttttgaaaaaatatttagaaacaagtcacttgaagaattgtgacttttggaaatgtatttttcaaaatcagtcactggtaatcgattaccattaaggtgtaatcgattacacatcaatagatgtcactcttcattttgaattttgaaaattaaaatgtttagaagctctggtaatcgattacaagtattgtgtaatcgattacacaagtttaaaatactttaagactatttaaacataagttataactcttaaaatttgatatcttaacgtttcaaaacactggtaatcaattacatgattatggaaattcgatacaact

SEQ ID NO: 132825 - DNA, 322 bp, Glycine max
  unsure (1)..(322): unsure at all n locations
ggagctagctccactactacaaaagggtgntttcacgacatcgtttctaagacggttatgaaggaccatcttataaaagaacgtgatgacatttttgtaatttaggggccaattattcaaatttacgacgcacattctaaggcagttgtaaataaccgtcttagaatgtaaaggtcaaacaagacaacgtcaattattgatttaataatacgacggctataatataaccgtcaagtatgtttgagttactacgttggttatactataaccatcgtagaaagtaatttccaaaaaaaaaaaatactacgatggttatatagca

SEQ ID NO: 132826 - DNA, 449 bp, Glycine max
  unsure (1)..(449): unsure at all n locations
agctttttatgaaaggatgtgactcttcacaattgaanttgaattccaacgttcagatgcactggtaatcgattaccaatatcttgtaatcgattacaccattttgaaatcaattggaacgttgcaaattcagttgaaaacttttgaaatcaaaactttgccactggtaatcgattacaggcaactggtaatcgattaccagagagtaaaaactctggtaacttagaaaattttgagaaaactcttttgaaaaacaaaattgtgctatgtttgttttttgaaaaatattttcaatacttcccttgtgaagtcttcttgatttcttctcttgaaacttgaattcatcttttcttgaatcttgaaatcaaatttctctttgattcttgaatggttcttgactcaatcttgaaatcattctcttgggaagtttgcatcatctttgtattatc

SEQ ID NO: 132827 - DNA, 460 bp, Glycine max
  unsure (1)..(460): unsure at all n locations
ctgtccactcaatatttcttcaaatatagtaagttatatacatgttcaggaatttcaagaagctcatatttttttacaatagctccttttgtaaagaacaacctgtatggatgcttgcaatatatttttttgtcaaaatctctttagtgtctccacacatggatcattttaacacaaattggaaggaagaggaaaaagtattaacacctataggaaggcaatgtaattttcctaaaataaattagttgtatgaaccatagtatatctacctgtgggtccttcatatgaatgaccatctntggattaacatgacagtctttgcttatgtcaacaaactgatcatatcacatttgtctaataatagaagataataaatcttaaattgttctccaaagcatacaccatattgtttctataatgattaatatgtcaattagacatttcctactaattcattatt

SEQ ID NO: 132828 - DNA, 370 bp, Glycine max
  unsure (1)..(370): unsure at all n locations
agcttcttggatgcttactccggatataaccatattaggatgcatgctctagatgaggagaaaataacatttatcacttaagaagccaacttttgctacagggtcatgccttttagcctcaaaaacacatgtacaacataccaatgactgatggactgagtctttaaacaacagatcggatgaaacatcgatgtatatgtggacgacatggtcgtcaagtctcaaagcatagcccaatatgtggcaaacctaaaagaagtgtttggggaactccgcaaatatgacatgtgcctcaaccttgaaaaatgtacttttggggtaggtggaagcaagttcctcggcttcatgatcactcaccanatggagatgc

SEQ ID NO: 132829 - DNA, 436 bp, Glycine max
  unsure (1)..(436): unsure at all n locations
ctgttctgtcccttccnctcacttgcaactgtagctnttttttggatgttgcaggttttgaactaaagacttgaggcttgtgacatttaattaaacaacgaaataactaaagacttgcaagtgttatataaatcttcatctattttatgttaaagttgttgacaatgtgcatgccacaataaacaatgaaataacttctgcctgctggtacaaaccttaacaatattttggttttttatttcctattttcctaaataattatcatcttgtgtacagtttatttgtgaccttcaaagatttgtataaaaaacggtgaaaacaaccaagttcatgtcacattttaatatttctntgcgaaaacacagagtgaaagcaagagatctagtatgaaatatttaacggttaacgttgcccttaattgaaatatgcaaagagt

SEQ ID NO: 132830 - DNA, 428 bp, Glycine max
  unsure (1)..(428): unsure at all n locations
agctntgttagaacttagaattctatgtgttttttctnggcccttctatctattaatagttacatccattcaatgcttgaaacatcaaactttgtcaaaaaacagttctattgcgaccttctagatcaatctaagcagaatctcctataaattcatacgaagctataacttcagctttgttcaacacaatcatgataagcggaatgttaacaaactgataagtgtaccaaatttatctccagtggtaaagattaaaacggggaatcgagtatcaagtccatagggactctctttgtacttgtgttggaaataccccatctgttagaaggagaagaatgagtataattgaatatgaagagaaaaaagaaattacatttagagggaaaaatctcttataataagaaacaaagatgattcatatgcattat

SEQ ID NO: 132831 - DNA, 424 bp, Glycine max
  unsure (1)..(424): unsure at all n locations
agcttcagggtggtcaattgcttcagattgttgcacataagggcaaaggtctgtgtggtggtcggtagaggaacataaaccatagagtctggcgacaggtgcagattttttattcatggccagttgggttaccaaggtaaccaaggcatctagtttaccttcaagcttcttagtctcacttgatgaattcgtggctacttcatgcactcctctaatgacaatagcatcacttctggcactaaattgctgggagtttgaagtcatcttctcaattaaatttctagcttcagcaggggtcatgtctctaagggctccaccactggcagcatctatcatacttctctccatgttgctgagntcttcataaaaatattggagaagaagctgctctgaaatctggtggtgagggcaactggcacataat

SEQ ID NO: 132832 - DNA, 358 bp, Glycine max
  unsure (1)..(358): unsure at all n locations
ctaaaatntgctaactaaataaactgtaatatattattgtatactaaaaacataaactgtgtctaaagcagaaaaataaatcatagccttgtcatcactcgtcatgtgtcactgtgggctcatccaaaggtgaggaggaagcattctatgctggttgaggagtgtcctgagctgctgctggccatggattccaatgctctgcactactgccatatttgctgcataatctgtatctacagtgccatcctcctcatcagagacctctacccttggtgtagtaactggagaagtcctcggggtgggctttatagtggccttcagttgatgcttatggctcttgatgttagttccattgggg

SEQ ID NO: 132833 - DNA, 257 bp, Glycine max
tccaacacgagagcattggatacaactatggctagccctttctcaggcaccaacttttgctccttacaccccacctgcccagcgggacaacacttgcccgggactttcttcctcaattcatcacacgcccacgggaagtccctgcacataaacaccctaacgaaattaaggtcatccatacaccagcaataattcaccacagctattaaaaatacccatcaacaaggtaataaacaataccaaaaccacccctaaac

SEQ ID NO: 132834 - DNA, 286 bp, Glycine max
agtttttttttggacaatgactgagttattcaagaagctttgctttaatcgactaccatgggatatgatcaattacttctttttctataagtggttcataagtgaacaagaacaccttatcaattacattaaggatctaatcaattacattatttttgagttggttctagattttgggaagaacaatttaatcgattaaaaagagaattaatcgattacttcagtgaattaattgattaccttgtagatttaatcggttacacgcagttataactatcttttctat

SEQ ID NO: 132835 - DNA, 341 bp, Glycine max
  unsure (1)..(341): unsure at all n locations
ngcagccactataagagaaagaacgtgtgactagaactttgattgtatatgttagtcagttcgacacatcgacagagagtgagtgcattgattgtatcctggtgagagtgtgatccttaacttctgagataaatgactatcatttactactgattcttgcgcgaatctctgaagtatggacctaatgcctgaaattgaggatgatgaaagccatgattgtttctgatagcctcttagccacaaagttgccacatgcttgaatgattataccttgacccggtttggatgaataaatatatatgattgaccttgagccataccggttacccatgctacctgtg

SEQ ID NO: 132836 - DNA, 436 bp, Glycine max
  unsure (1)..(436): unsure at all n locations
tgtccgcgcaagcattgcattccctacaaatgtgagatatcctaaagttgcgggtatttccaaccacaacaaggtccaattntcttcagctgctttctcaatcgcaattatggcagccataatttctaccatgaatgcaaagtgaatgccagtattgatagcgaaagctttaataaacttcatatttatttagaaaaataccaccacacccgaccatacctgggcttccttttgcaaccccatcaatattgcattcgatccagggggtgtaggcagtctcaaaataatagtattgattttgtttactttcctaggatgacagcaccaagaaatgcttgatgatttggaaatcaacaaatgagtgtgtttatggttcttgtggaagtggaaccccggatgtgaactcctatagtgatgctattaagcactggttgga

SEQ ID NO: 132837 - DNA, 316 bp, Glycine max
gtatgactttaatggtaacctaccctgtttctaacaagggtacttttccattgtaatgaagtgatgtatgaattgacttcatttatgaaactttcagggtcatataaaagggccaagggtttcgtggaagaaaggctctcaggaattctatctgggaaagggcaccctttgaatgaaagctcaacacacacaaccacaatctattttctgtcttaacattaaagatggcactacatccgtttgcatgagaagaaaaagctctcggaatgaaaatttatttcgattatacttacatctttttggaccgatattctat

SEQ ID NO: 132838 - DNA, 388 bp, Glycine max
tcctcaatttttgtggattgatgctcttaagacgactgcttatatattaaaccgagttccaaccaaggctgtctcaaagacaccttttgagttattcaagggttggaaaccaagtttgcgacatatacgcgtttggggatgtccatctgaagtaagaatttataatccacaagagaagaaactagaccctaaaactattactgggtatttcattggatatgctgaaaggtgtaaagggtataggttctattgtccatcccacaacactaggattgtgaaatcaacgaatgcaaagtttcttgaaaatgacttgatcagtgggagtgatcaatttcagaacatatcttcttgaagggatcactatgaagctgaaccttctgggataagt

SEQ ID NO: 132839 - DNA, 437 bp, Glycine max
  unsure (1)..(437): unsure at all n locations
agctntagcttctttaggaatcttcttaatgaagcttctcaaggaggtgagcttagttatgagaggggtgtgtgtagataagctctagcttctcaaggaatttttctcaaagaagcttctcaaggaagttttctcaagaaagcttctcaaggaagctacctagtctataaatagaagcatgtgtaacacttgttgtaactttgatgaatgagagtcttgtgagacatacgtcaaagttccacttctctccctctcttattccttcaatttcatgctcccccctctctctttctctccctctttcttttcctccattgaagcatccttccaagcctcttatcccaggctcatcttgtgggtgaagctcctttcttcatgccttattccctagtggatggtgcctcctcttacctcttcttctatggcttccgctgcat

SEQ ID NO: 132840 - DNA, 391 bp, Glycine max
ctgcttctacagaaagttcccaacgaaacactcactatcctaatggataattgcctaaaattattacacacaaatggaagtatggtgacttattggaggctcctaacttacttccaatgaaaggcctttttgttacaaaatttgaaagcaatgcctattgccaattactaaattacaaaaaaaaagtcctgaattgtggtggctattctctctttggtgttccactcaatttggagtgcttcttagtccaatagctcttaaggtggttggcccctttcttcttgactcaaatttttcaagggatgacaccaattcttctttccaattccctatatggcaactcacatgcaagggaacatagagactagctattaccaaagacctaataaaa

SEQ ID NO: 132841 - DNA, 428 bp, Glycine max
  unsure (1)..(428): unsure at all n locations
agcttggacacgtaataggaatctaatgttattntattatgcaataacaatctttctttctatatgatcacgcctcacatgattcaacgtataaaatctaatgtaattttaaaagtacactcaatatttcatttgaaccattttattttagcacatattatgcttctacataagatctgtcagaataaaattcttacttttattggagaagagaatcaaaagaaaaaatgaagtaaggttattaacatgtataagtaaaaaataatcttttaaagaagataatgtaaaagagtgtttaaaaattatttcatgtatggagctaatttaacttatgctaaaattcattctatttcttcttattaattcttttagaaatgattgtggagaagtttattcaaacacaatcataataatatataaatgttaat

SEQ ID NO: 132842 - DNA, 428 bp, Glycine max
  unsure (1)..(428): unsure at all n locations
ntaacacaattattctaaacagattctaattgatcaactttctttgatatctagcaagtagcagttgaaaagaatgacagatctttctttatgaatttggtgaagtaaaatgtcatgacattcacatgaattaaccgaactaaggttgtttcttttaattaataattctgagtcttaagatattcaattattttaaatattaaagaaagaatcttgttgttcacattatttttatttgaatagagcaaaattatctttaacaaaagattcatgtagtctatatcttaaaaattaataaattaagagaaaaagtcttaagttacaaataggaagatagtttcatcttaaatttcttttaaataaaatgtactttctctcttcttagcacatcattgttttcatttgccatctcttgatacacctgcaat

SEQ ID NO: 132843 - DNA, 401 bp, Glycine max
  unsure (1)..(401): unsure at all n locations
agctntgtctcaattggtgacaagtcgggagccatgtttccaatggctcgtccgatgataattnttttggcatttacgtataggccacataagtgaaaaaggtctagaaattttaagcaagcaaggcttacttggaaatcttaaggtagaactttctcaattttgtaagcattttgtctgtgggaaacaacatcatacaaaattccaaaaggctatgcacattacaaaggccaaagtggtctgccttcattntgactactatggtcctttcaaagttccatcactaggaagagcaaggtacttcctcttcatcattgatgatactccaagatgacatgggtattcatgacacatagaaatatgaagatttcaaatggtncaagcatttgacaattcttatg

SEQ ID NO: 132844 - DNA, 445 bp, Glycine max
  unsure (1)..(445): unsure at all n locations
ggaccataaaactaagctattctttaattgaagctgtaggaaatgatctaccttttctttatgatngcaggttggaaatggtttatcaaaagatgacaaagctcaaaaacttgctttgcaacactagcttgaagcagctagtcatacaccctttcccctcaaaaaacaatcaagatagcagcacaccttcttagagagagcaatgttatctttcattagatttgaattcttcaacatcattaatttgaaatttaagactttaagtcctgctctatgcgctttcttcttggtatctatgcctttagatttatctatgtgcagggtcatatcaaaacatttgtactcattagtattgtcttgcgttgttgcagggtagtatttatattgtctgcattaatatattatatgggacttacatcgtgtctttatgctaatctaattttat

SEQ ID NO: 132845 - DNA, 203 bp, Glycine max
aaactcccaccgggatctcactcgacctgatatcgctgctttcccttggagagcgttcctgggcacagtatcgctggagcatgcgatcgatgcgattggtttcttccgggcacgatgcagtacctaactccatcctcaccgatgtataagccggtggtgactacggtgtcttcctgcttgtgggttgcgaagtgcgccctccc

SEQ ID NO: 132846 - DNA, 356 bp, Glycine max
  unsure (1)..(356): unsure at all n locations
agctngagctgaccgctaaactatgcgttatgctggacttgncttgcacgctaagcgagatgcaatttccctccaaatttttgcatcaatttttgcatcaatttacctccaaaacacttgcaatttccctccttttgaatcctgtcggtcaagaattaaaatgatatcaaaatcctcattattctcttaaaaataaatagtaaagtagaggaaatctagtcattcttgtttgatgtgactatcaattaaacctaaatttcacagttatcatgatgaagttagagattctaatgagttatatactcgagatggaaatgacgatgatagtaatccacaagtcaaatttcctccattta

SEQ ID NO: 132847 - DNA, 398 bp, Glycine max
  unsure (1)..(398): unsure at all n locations
agcttacatcaatgcttaatgtattgcttggtatattctanaagaaaacacattaccaaaaagttactatgaggcgaagatattatgtttgataggtatgaagtatccaaaaaatcatgtgtgccctaatgattgcatactgtacagagatgagtttgaagaaatgcataaatgccccaagtgtggggtattacggtacaaagtgaaggatgactagtgtagtagtgatgaacggctccccagcaaaggggttatggtatcttcctattattccaaggtttaagagattgtttcgtgataaaggtgacacaaaagaccttacatgacatgcagatgggagaaactgtaatggaatgctctgtcattcgattgattcttcccaacaaaagaaaattaat

SEQ ID NO: 132848 - DNA, 407 bp, Glycine max
aactaagctgaggatatgggtatcatacatgtggtactaggttgtgttttgcgatgggcaaaacaatttccacatccacaaatcacgtataaacccaccatgccttgttgtgcatctcaactaagctcacgtacttccacgttgcccttatccttgtatcatctcaatgccggggtccaataaatcctctcaagcttccaagaaatccaagtaattcaacattcaagcattaggaactaacacagccaataaaacagggcagaggcagagaactctgctcaaaacacataccaacatcacagcttttccactcacataccccagtgagatactcttctgtcagttctttaccgctggttgactcgaaattttactgaagttttagctctaatctaaatttgtcggtg

SEQ ID NO: 132849 - DNA, 368 bp, Glycine max
  unsure (1)..(368): unsure at all n locations
agcttctatggaggctggatctttgagcttttatggtgantctccaccatggagatgcagcggaaggaaaaggagaagaggagaggggaggcaccatccacaagggaattagccatggaagaaggagcttcaccaccatgaatgtgccttggataagaagcttgaagaggatgctttaatggaggaaaagaaagagagaaagggggagcacgaaattgaaggaataaaagagggagagaagtggaactttgaagtatgtctcataagactttcattcatcaaagttacaacaagtgttacacatgcttctatttatagaactggtagctntcttgagaagctttttgagaaaacttccttgagaagct

SEQ ID NO: 132850 - DNA, 264 bp, Glycine max
agcttgtattcattctatgatcacaccggtgatgcaaactatggcgttgcaatagtatcacccaggaccatcctttgtcagactaaaaagaacaatgctttgcaaaataacaactacttgaagtgactaatttggtgcactagatgtctgccgctggatgataaaccttctctacttgactctatgagaacaaataaaatagggcaccctacaaacatagggtctgaatggtgcgaatcacgaaagagaggcttcactactatt

SEQ ID NO: 132851 - DNA, 181 bp, Glycine max
cgttgaggttaaagtacgtggaacacttactctgtttgttttatcaacaggcgcaggttgccgtctgttatctcaatatctaaaagagtacagactttcgccagcacgattgaagttaccaagattctacatacgatgtcccagcgctccaatatcataattgccatgaacacttcgtaat

SEQ ID NO: 132852 - DNA, 375 bp, Glycine max
  unsure (1)..(375): unsure at all n locations
tctataggtattcatataggtcatatagcaatgacttttcacatggaaaatattgcactgctcatatacctgcttttcaactgttcaattacttcaagactattttctggtcatcttatggtgaggccaagtattcgcaacctaagtttcatcaatgggatatattgctcactcttttttcaatgatttatggaacaagtgagtaagcaggaggatcttattgtctggatgcgtactgctgctttgcaacttttaggaagntgtatggaaagatagaggctgatcttactgcacgtgatcaaataaatgttcacctgcaaataacctacaacacatactgccttaatggcataaaaaacttgtctatcaactact

SEQ ID NO: 132853 - DNA, 422 bp, Glycine max
  unsure (1)..(422): unsure at all n locations
agctnngtttcatcatcctcttctgaagctaccatgtgcaaacattaaaacactgcatgttcctatgctttttccgtcctagctttttcattgctagcttcacaataatcataaatggaagtcatgtggtagcttcacgagattaaaacactgttgttttcagctttntcattattgcacattgactgaaaaacacactacattaaacaagctccatgtaaaccaaaatggtgcagtttttggctgcattntgcaacactttaactgcatgctaatacctgcattaaacgcgaaaatatcaagtcgagaagaaacatacaactttgaagttgtgatccttcctacgacttcactggtggagatcaacggtcaagaatgaagcatgaaagaatggatggcgcngactgaagcatgaaagaatg

SEQ ID NO: 132854 - DNA, 316 bp, Glycine max
  unsure (1)..(316): unsure at all n locations
cccagcttagannactaacacagctaaggaagtttaactcactccaagaacatcgttaaatcgaacacataaaagtcagaagtgcatccagaaaaatgagttaggggcacatgcctatgaagcattctacaaagaagaaaggaggaacttgagaaagatggaaattatttaatacccaaaagacgatcttcttgagcaaaacaccaccaccacttcttggaccaaagaattatggaagaaaatgagaaaaatgatgacaagatggaaaagtgcaagaactcaccaactatttgagacaatggggaagagaatagat

SEQ ID NO: 132855 - DNA, 356 bp, Glycine max
  unsure (1)..(356): unsure at all n locations
tcaagctgctcaatngctccaggttgctgcatggaaaggctaaagtttatatggtggacagcagatgagcacaaaccacaaacccttgcgacaggtacagatttctgattcaatgccagctgggtttccaagttgaccaacgcattcatttngcctttaagcttcttagtttcagatgatgcatatgggtttgtatctacctcatgcactcctctaatgactatggcatcatttctggcactaaactgctgggagttggaggccatcttctcaatttaacttctggctttagcaggagtcatgtttcctatggctccaccactggcatcatattatatacatttgtttatataact

SEQ ID NO: 132856 - DNA, 460 bp, Glycine max
agcttctgctacaattcatgcatcaaagctctattattgtcctaattctaggtagacttttgcatttgagacatttattggatttcttgctttattcaagaaatatctgttaaaatattttaaaattttgcagtgaaatatctgctaatggttcagttcaggcaacatccactgaaggtgacaaagaagacattgaacaaaataattctcggttggacacgagggacctggacactaaatgtcacagtttggataatcaacatactcagactgtttcagatatgtctgttaactcttgtacaaatgttgattgtggaaaggaaagtgatgcatatgcaggaaaagatactcatgaaacttctgttgaccattctaaggtctcttgtgaagttggtagcataaaagaacctaatccttcttatagtgaagggaggatccatattgatcatgtttatggtga

SEQ ID NO: 132857 - DNA, 434 bp, Glycine max
ggacaaatggaacataatccaacaccttaaaggcctctttgatggtgaagaaaatttgtagactgcatttaaaatgtcctgaattagattttgcatctttggctggcatctgatcttcctaatatccttccaacttccaagggaacactaacatgggtcattaatagatctgaccaagattaatcaatcttagttgtgaaattttcatctgaagtatacaccaaaataaatctcttatgcccaaattcaaatcggggaatgatcattgacaaagtttcatatataacctaattagggagaaaagataatagaataattagatcccaattttgttgatctgtaacagaattccttactaccttctgaccatgatcttgtggaataagatctattttatgttcccttcaaataatcctagacttaccaataattaa

SEQ ID NO: 132858 - DNA, 366 bp, Glycine max
  unsure (1)..(366): unsure at all n locations
agcttttatctagccaagatcatacaanagtgttacaacaaaacctaatggtttctaattatatgggccattaaatctatcatgtgttgacagtaattgattaacccgggaatttcctctagagctgaacacacttcgctgatgggctttgctttggatagtagtcgcgggaggtcttgactttcatttaaggtcaaggcgaacctatccatccccatggtcgcttcttgatgcaatgcatcaatcactctccctcttgcttccttctcggcgtacgcttgtgcaaaagtctctactaatttttgttcatggggcaaagactggnttaactcttctttgtctcgcctattatggctagcatgctat

SEQ ID NO: 132859 - DNA, 457 bp, Glycine max
gaaactaagctcagctctagccaaactcccttacaaaatctgattttatgtgtcttgttcgtgctcatgcgcttagcgcaattctgaaccgcttatcgcacattagtgaattttggcttatcgagtgcgtttcttgctcagcgaatatgactaaagcggtgcgcttagtgagatgaagctgtgtgcttaacgagcctattcaacttatcttcttccatattctgtctcgcgcttagccaatgagtgttgtgcttagcggatgctcgctaagccagtagattggcttatcgaaaaggtgaaatacaacacttctcaagttttctaatttacctgaaattgagagaatattgatattaaacacatcaaactggagttgctagttttattctctatcttaaagaaagtcttatactcttcatataatcattattggggagtttgatctatctctcacgtt

SEQ ID NO: 132860 - DNA, 350 bp, Glycine max
  unsure (1)..(350): unsure at all n locations
agcttanatgttggcggctatattctcgctgaacgatttaatttccgctcagcgcccactcctctgtactcaagacacatgatttcagctaagcgagcctagagtcccactaagcgagagatgtaggttttctaatctgcagatctcgctaagcgatagaatccatgcgctaagctaagccttttctcttgtttcaaaaaaaaaactctttgaattcgaaatgtcagctaagcgcacagattcgctcagcaacaggtcttgataaaccatacggctctctcgctntgcgagacatttcgctaagcgcgagcgtaaaaaatagcttgggtgagtgaacatcagtatattga

SEQ ID NO: 132861 - DNA, 350 bp, Glycine max
  unsure (1)..(350): unsure at all n locations
tacggaccataaaactaagctgcacacactccgcagcgagcaagatttcctgtttttattgcaccctcaatgaactaaagacaccacncttgctattattggtgagatgttgcaaacgttactaaactttacaacttttctaatgatgctcgtatctatatcctaaagtatcgaaaccttactgacaacctatgtctttctcttttttgccgtgatgaacgtttcagaactttatagatggcgcactaacactttctattaaattgctacttattcccgaactttacagattgtgcctcaaagctttcttatgagaccaggttgtacggttactataaattttctcaaaa

SEQ ID NO: 132862 - DNA, 417 bp, Glycine max
agcttattatgcattaatgattataacacatatatatttatatgaatggctaatatacattaggaattaatagttcaaataatataattaaatgccaggaaatcaatatattaagattcaacgataaatacttttaatgcatttgtagtttaattattcattaactctttttaatcgaaaataatatagcttgatttaatatatacatgtgttggcgccacgcaaatattaatattgtgtgatggttatatgattcatgaggtgtgataacatgtcgctttgggataacattatgattgagattgagtgtatgtgataaattgagtatgtgttgaattgtaagatacatgtgtattgagattttgtatgcattgaggtgcgagctatggactgtattatcacacaactgtacgacac

SEQ ID NO: 132863 - DNA, 215 bp, Glycine max
tgccacgatcctaaatagacctttccagttgggccctattatttcttgcctcgggcgaattccttgctagaactcatactcgccacacctatgtttctatgtgaaaggcttgacgctggatatagtttcatatctcattgatgcttgatgcttatatggcctcttcctaaattctagccatcttcggacttcctcctttgacactagttccacct

SEQ ID NO: 132864 - DNA, 456 bp, Glycine max
  unsure (1)..(456): unsure at all n locations
agcttangtcttgaaatagaagagaagctttattctcaacaaagggatttncttcaacaacaacaccatccaatattaaaagggttatcaacacaagagaaacgaggagaacatcttgccttgaagagaatcaagcctcaaaaaaggatgtanggtttgatctcccactcacaacaagaaaagacataaaggaagaatgaagaatgaaagaaatgtggaattaagggaggctcttgcacatttaaatgccctcttcaattacttttgttttttgcacccaagttcctctaaatcaccctttctatatctaacactctcaaaatctacactttaagccgtacaactttatgaaaaactatcaataatactatagaagatagcacaacaatatatttattaaattgcgttatagatatcatgaatcacaattaattacttcttatagtatgtatcaag

SEQ ID NO: 132865 - DNA, 311 bp, Glycine max
  unsure (1)..(311): unsure at all n locations
actatgaatactaagcttgttcggtaaagaagacacatatatgcttacattacatctactcccgcgtctnctccctgctatatatttacttttaacataatctagttccaatatcatttcctgaaactatttcccctgatggttcaattctagatagcaaatcttctttaacatgctcggcatatttgacctgtgttatgttcgatctaaatcatcacctgtgctgataatgatacctcaatcagatgaaagcttggaatgagaaggctttgcacattagctactgctatttgctatcttcgaatggtgtg

SEQ ID NO: 132866 - DNA, 263 bp, Glycine max
atctatctgaacagagatatatacgggcatatcttctaacatgtaaaaggtgagaagcgttcacccaaatctaaacacaaccttgtaaatatagagcatatttatgccccaactggaccacagacctactatcggccacattttaacccaaatctgtcccaaaactataaagccgtcaatactacaacccaacacatacctaaaggtgattggataaacagacccgttgtgaggtggtacacaggcaactgaagatttgggac

SEQ ID NO: 132867 - DNA, 428 bp, Glycine max
  unsure (1)..(428): unsure at all n locations
agcttcacaactagntattgncttcactattttattcatgttggggtgctcaaattaaatgtattgatctaattttttaacattgctatttttctttgtaggggaaaacacacccaactcaactttttttgcttttgatgtccaccccaacccaattatgtgtgtttaaactgtattagcagcgtgagttgttatattttgtgaaaactgggaatatcattctgtaattgtctgtttgtgtactgggcttgctttattgcaaaagcaaaggagacactctcttgttttggaatggccttttctctcactctggtgtcttacagatgaaaatgtatgnttctaccatttttgtttgttttcaaaattaatacacccatttcaatggaaccttttctttttatattggaatcattgatgttaatagcttt

SEQ ID NO: 132868 - DNA, 326 bp, Glycine max
aaaatgctgtcggtttttgttgcatattctgtttttaactggcatggtcttttcttccgtaactgaaaaaaatatttactttgtgagtggcttctaactttaataatccttaacaattttaaataatgaatgatgcccattgctgattgcatgaaccaatgaaatggaatccttcccaatctttgaataacttctcatgctatcatgcatgaggaatatattgcgaatttattcatatgccgacatatataaattcttgacccactcaagtatggtattaacttaatatctattaatatgaaggtctggtttgaatgtacatttca

SEQ ID NO: 132869 - DNA, 456 bp, Glycine max
tcagatgcaagttcaaaggataattataatcgtttagaatctacaaacacttgaaaatgaaaacctataaatactagatgctttgaagaaatgagtaacgaacctacacgctatcattcaaattctttatgtagaaaactctttgtatattcttataaagtttgaaaagctctcaaaacatcttgaatactctaagacaaaaaactaaatgcttagatttcacatttgtttgttagatgattaagatttaatcagttagcaaatcaaacaacatatcttttgatttgtatagaaccaacagtggcttggtatgacaaagaatattcggttggtaaagcttgatgataaactttgttgtgagagctaaaagtaacttttgtgaaatagcgaaacttgatagctaaccaaaaactggacttagtttgaatggatgacacataccattataatatgtgt

SEQ ID NO: 132870 - DNA, 285 bp, Glycine max
ctcaaggaagaaaattgaagatctgcttaatgtgtctcaggcgcttaacacgatgcacaggctcagtggacaaagcacgcttagcgctaggaagtatggagaagtttggaacatgaaggcgagcttagcgcgagacacacactggacgcgagaataccgccatactcgctaagcaaggcaagcacgcttagcgcgaaggttgcgtgaaaactaggttgatctgcacctataacagaaggagagagaagaaggaaaaaaacacagagaaaattcacgagaattcaa

SEQ ID NO: 132871 - DNA, 355 bp, Glycine max
  unsure (1)..(355): unsure at all n locations
agcttggnggntccttatgcatcacaaggttntggtgatgatgatgatgatgatcagaagaggacatcaaagatggtttcaactttctcttgatcacaattgattcctcaataacgttgaagtcatctctaggtgtttcatttcccacaaggtggtgagggtgatgagtatgtgatgaccttgattgatgcataatttgagtgtggttgttttcaattgcagggcactttttcttcaagtcttgtagcaccttccctcctgtgttgttggtgttaacattgcacataataatcctgttactaggtctttcgctcgctcttgctcttgcgttcttccttgactacttcatctttgc

SEQ ID NO: 132872 - DNA, 125 bp, Glycine max
actccctctctcctttctaatttcaagcttaaataggggaccctggtggtgcttgcacgcttaacgcaactccgactcacttagcgtgcataagtgaatttctgcttggcgctcgtcttcttcct

SEQ ID NO: 132873 - DNA, 329 bp, Glycine max
acctgaatctaagcttcaatcgaaagaataaataaggcatcatgagcaccagttattactcttatgccttgaaagtgataaaactggatagccatgacgtttccacatgctatcgaacttgatcgtctctgattagcagagaagagtcttgcgcgtctatcgacttgaatgtctctggatgacaaacgttaaacccgcaaatatcttcaaattgattagaaattagactggcttgtctctggacgaccatcatcatcccgatatcttctgtcttggtcgcctccggctgacgatgatgcggattacctataggtatcttcccatgcttc

SEQ ID NO: 132874 - DNA, 450 bp, Glycine max
  unsure (1)..(450): unsure at all n locations
agctngccgcccagctcgcccaggcgagctaggttgcttcctccagaagcaacagccttctggaggaatcttctggagggcccaagtgggcctagttgctttttgcaccccccctttttactaaatgcaccccttctatttttttggtaattctttttccgtaacgttacgaaactttatgaatttcgtaacgatacttattttccttccgcaaggttacgaatctttacggattatgtatttactctttnttagctttcgaagaagttacggaaacttacggattgtgcaaaaacacctcttttcgacttccgccatattacggaatttcacggatggcgcaagcctgcttccttttgatttctgacacgtctcgggacttcattcattgtgcaacaaaggacgccaagtacctcanaagggtgcatgtcatcaagtaataatccccga

SEQ ID NO: 132875 - DNA, 282 bp, Glycine max
agcttgaaatgatatgaccatttaatttctctgggctttcgagataaattcagcgatgaatatttataagcctgaatcggacctcagtgtgaaaagatatgaccatttgaagttctcgagagcttacgttgttcatattcaagcgtatctggataggatgctcccgtatcccacatccctgatgaaagatctgaccatttcaaattcatgggagctttccatgaacattgtcgagcgcctctatatgtgatgcacctgaatcggacctcatggtgaaatgtt

SEQ ID NO: 132876 - DNA, 381 bp, Glycine max
tctctaccaaacaaagtgcttttatacaggtacagaggctttatgtgcaccgatctttgaccaccaaatatgtttgtgtttaatcagctacacaacaagttcactatgtgaacggggactatcgaccacaaaggaaactatataggttatacaacttatttctgctgtgtacacgaagcatgttgaaatgctgcatgtatatggttgcaccatatactgcgatcaagaaggatatggtaatgaccattcatttgattcacatacaatctaattaaaatacgttagactaaagagaagatactattatttaaggaacattttttttcaacacctcatcttttaaaagaaatattatcaatttggatacaaagctattaacat

SEQ ID NO: 132877 - DNA, 370 bp, Glycine max
  unsure (1)..(370): unsure at all n locations
agcttgctcgctaagccagtgctgttaatttattagtccactaagcccgccttgccacgctaagcgcaaatcgttctttgttttgaaaatttgtggaattgggcttaacgagcctgcttgctaagccaattctgcagaaaaaattggatctgtgttcactcgctaagcgtgtggctatcgcgcttagcgcatgagtcatttnttctaaggcgcgctaagcgccgagtctaatttttagttttattttctgctttttattttgaataaattactgtctaatcttgggttttgattcttttgtattgtagatgccttcccgtangagaaaagccatatctttagtgtctcgaaccggatatgatagatcaat

SEQ ID NO: 132878 - DNA, 336 bp, Glycine max
catgcaagcttagttcgaaggacttaccctttgaagatcgaataacgacgaagaacgaatgaagaacgtcgaagaacgggcgaaacctttgcgaaattcctcacggaaaacggtacggaaaccgttcggaaacggctcggcttatattttcttcacggaaacaatttttccaagcaaactccaaagagagagaagtgcctaaggggctgaaccctttttcttctcacttcctcccctatttatagcaaaataggggagatgcttgccgcccagctcgcccaggcgagcagggttgctttctccagaagcaacagccttctggaggaatattctgga

SEQ ID NO: 132879 - DNA, 254 bp, Glycine max
gacacttaaatactaagcttcacaggcaccacatcacacataacacaattcttgtctttttctatggagaaaccaacttcaacttgcttattcatgatcatttcaccatcttcaataagccactgaagcatgttaagtcttggatgtggtttagttttcaaattcagttttgtcacccatctagctctaaccgccttggtgtcaatccctccttcacttatcctagaatattacttattgctttctacccctca

SEQ ID NO: 132880 - DNA, 453 bp, Glycine max
  unsure (1)..(453): unsure at all n locations
agctngttgtgagatgttcttatcatctataaggagtggacaatgatggataagacaaatccttggcctgactgctccaccttttatccaagatataagaacaaaatgaaagtcatctaaaatgatgagaatctttatcttagattgcaaccaaccccaaatcctctcagcaaaattgcaagaaagaaaaaaattccttttgtcttcatcattttgaccatagagaaagcaaattgaaaccaatgtgcatcctctatgccttaaattatcatcatttggaattttctcatggaggatcctccaaagaataaaggattttgagggaggaacctcttaggaccaaataagcttgaacagatgggtaactgggttggactgacaaaagtgcaagatagctcactttaaagaaaggacaccatcaacataggggcccctaattgagacatcaacaac

SEQ ID NO: 132881 - DNA, 263 bp, Glycine max
  unsure (1)..(263): unsure at all n locations
ctgcaagcaccaacatgaccggacaccttaagactatcttctcttatacactccaagcgccaacaatagatatcatccaggtcattgcttgggtataaaaggtaccaaactgtattaagaagggttattacttcattatccttgaccgggaactcctttagaaagggttgacaactacctttactcaaatgtttgtgcagcttgttatcagactatgtcatgcgtgagtngccttatgggatctatgacctttacatatgggg

SEQ ID NO: 132882 - DNA, 278 bp, Glycine max
tctctcgcgacatatgagaaagtgtattcttttcttccttgctaaattacgaatttctgagcttgcagaaaaaacgatgctctgcttctctcagagttgaagggggtggtgcacataacagagtgacaaactattgtcgctggcatcacttgatggaatcttttcataagaatgtatacaacaaccaaaccattttgtgctagagtccgagatacatatttgtactgctgaccagctcaacttcagaccattatacgcttgctcatgttatctaccat

SEQ ID NO: 132883 - DNA, 308 bp, Glycine max
  unsure (1)..(308): unsure at all n locations
agcttangaaagtgttgtcaactcccattttatatngccactacaaagattattcaccttgtgacctatatctaattcgccatatactgggatcagtctgatatttttgtattaggatattttttatagcaaaggaaactaatatatttactttttattgtttcaattggcttcttttgggctaatgcttcaattgtaggagatagagtgcagtagaataaaaaaacatttatacatatgttaatagaacaaacctgcttagatttggataccttcaaggacggctattaaaacaaagaatctaagac

SEQ ID NO: 132884 - DNA, 346 bp, Glycine max
  unsure (1)..(346): unsure at all n locations
agatggacctntctagtgcttgaatatttctatacaatgcttaanaagttgagctacccagttagtataatgntagntccaccttcaatgtatctgacttatctcttnttaatgcagatggagaatccgatttgaggacaaatccttctcaagggggagagaatgatgaggacatgaccaagagcaagggcaatgatccacttgaaggacttggaggacctatgacaagggctatagcaaggaaagcaaaggaagctcctcaacaagtgntgtccatactatntgaatacaagccctagtttcaaggagaaatagccaatgttgntagttgtatcatggcccaaat

SEQ ID NO: 132885 - DNA, 177 bp, Glycine max
  unsure (1)..(177): unsure at all n locations
agctngaccaggaattatntgtatgggttgtatgtgatttctggccgcncctggagcggagatgatggtacagcgggtgaactaagaacggaagtatctttnggtgaggaagccatggaaaaactcagctgttggaaagattttctaactctcgtaacactatagggaaatgcaggc

SEQ ID NO: 132886 - DNA, 340 bp, Glycine max
  unsure (1)..(340): unsure at all n locations
acaaccgagcaanaagnnatgggcggtttaatttgcttagtgcttctgttctcaatnacgggcgtctcgatatactacgggacacaatcggacaccctagttagatgttattgtcgtttgaatttgctcacagctgctattttaaattacgagcgtctcgatatattacgggactcaatcggacaaccgtagtaatagttattgtccgaagaatttgcctagagcttctgtttcaatttcgagtcgtctgattactacgggactcaatcggacacccgagttaatagttatcgtcgtttgatattgcttagagcttctgttataattaccatctgctcga

SEQ ID NO: 132887 - DNA, 302 bp, Glycine max
agctctaatacaaaagaagctcaaactcgtttatggattcattgaaatgtacggatccatatgctggtagaaaaataaaataaaaaatgaatgataaaaataagaagaagatccacattctcgaattaaataacaaaataacagtagcaaaataaatttaattgacaacacatgaataatgcattaaaacatacaataagtccaaggaaaaattaaatcaagggaaaaaatcaaatagtctgggttgaagcgcgtaaacgctatccttagagagaaaactcctcactacattggtaggaaaa

SEQ ID NO: 132888 - DNA, 263 bp, Glycine max
  unsure (1)..(263): unsure at all n locations
tgtcaaacctaacacctgcgatatattataaatttaaaacgtgattacagatattacggaggaaaaattaactaaacccggaataatatatatagttgaggacatttatntatctatatggttattcaaaacttgacatagaaaaaatatttatctatcaccattggtgtaatttatttgtctaagaacttcacagcaactgcaagagaatggctctggtggtggtggccaataacaaagtgacctcacattcttggtatttg

SEQ ID NO: 132889 - DNA, 250 bp, Glycine max
  unsure (1)..(250): unsure at all n locations
agctngagatgaggaagtgttgaagggtgattcttctcttcttttattgttgaccacagagtggtacctggagatatgtcgcggnggtcaggagaccttgtggacgtcaggtggggtgctattgcccaaaaccaagcttgaccaatcccgacccaacccgggcatagtcggtcagtgagaacctgtgatgtacctaaacatgcaagctcctggcggtcaacaaattcatggaatacactactactaacta

SEQ ID NO: 132890 - DNA, 442 bp, Glycine max
  unsure (1)..(442): unsure at all n locations
ggacatgtcgaccaattactctatgtgagacaacaatccttttattatatttatgcagatcccacaacggatatctcattgaagtctataagaggatgtctccctcaatgaagcaacttgacaaanaacataagaggaaaaagaacaagagcacgggaaatattgagaaagtgaaagtctattataaacactacatgttctacattgttattattctgtggaaagcaaagtagtttatatatgtgcttaattgtatatttactattcgagtgttaagaatatttgtattcaatcaaacaattggttgtgaaagtcaatagtggtttagcggaaaaaaatacttgagctcttaaatttacggggagtctaagaagataccagaagtagtgttaagaatacttgtaaggcaatagagcaggtaaaatactgttgtataagtctt

SEQ ID NO: 132891 - DNA, 371 bp, Glycine max
agctttgagccaaaatcctgactcacaatatatcttgacccagggtgagaatgtcaatccttaccctcggaagcaaaaaaagaagagaaggaatatttccaatcaaagaggaagcaaaaaaggagagaaggaaaatttccaatcaaaggaaaaaagagaggaaaggaaattcccaatcaaagagtgggagaaagcaaatagaaaagaaagaaaattcccaatcaaagaatgggagaaagaaaaaaagagaaggagaagaaggaaagaaagctcctgatcaaggatcgaaagaaaacggaagaaatgtgcagagaggtctttggaccagacaatatctgaacaatacggaattgtcaccaaatgaacaaaag

SEQ ID NO: 132892 - DNA, 269 bp, Glycine max
  unsure (1)..(269): unsure at all n locations
ctcggcaccatagaaaacgatggataacagctcgaatggaggagaagatgagngaatgtagacggataccaggagcacgatatctcgtgcctcacatgatgtatgaactatgatagctaattctcagatgatcaatgtcgaaaaaaatgcacacacagggcctctattatagcctaagcgcacacacaagtggaaggaacttcgaatctctatgcaaatctcacttgaatgtgatatgaattgcggacccaatttggagccaaattcac

SEQ ID NO: 132893 - DNA, 200 bp, Glycine max
agcttgctctaatatacattgtatgttgtattgatgggaggagggtacatgccatctttgcttgtaaagtatcagcccactggtaaaactaactttccaaatgttggccttcgcatgaatggccccgaggaagcttgcctcacagaggtccaggaaggacatggcggacggaggacctacttcccgcccggagtgctaca

SEQ ID NO: 132894 - DNA, 284 bp, Glycine max
tggaccttattctacttattacgacttgcaatagcctcatatgcctcttccattcccacctagagcaattccaaacaaaaagatggaagatagtgaaaaggagatcttgtagaccttcaggaaagtagaggtgaacatacctctgctagatgccatcgagcaaattccaagatatgtcaagtttctaaaggagttgtgcacccacataatgaagctcaaagcaatgaaaggattatcatgggcagaaatgtgtcagcattgatgggaaatttgttcctacattc

SEQ ID NO: 132895 - DNA, 469 bp, Glycine max
  unsure (1)..(469): unsure at all n locations
agcttgtgcgctntactcaacatttgtgcttatacatgcacaacttttttccaaaattccaactcatcaaatcactatgatgactttcaccctgttaattaatgtaataattttcacgctgtcaattaattacttaattagaaatcagtatcgacgcaacttttttttccttttattagcatgcttctcatattttaagataattattttaaaacttaataataaatttattataaatattagttgtcactgaatgaaaatataaaaatatttatactgttaatgcatctatttttttttcgtaatattataaagcaaataggagtatgaaaaatgcaatagataattacttccaaatcaccataggctacaaattaactgaataattaattagaagcgtgagatattataaaggaaagcttgcgtaggttccttccagtatctacatgcagttgccacttcgcttata

SEQ ID NO: 132896 - DNA, 421 bp, Glycine max
  unsure (1)..(421): unsure at all n locations
atctcatctttcattgctagctcccactcaataaagtcattcccctgcgtagcctaactgaaacattatggctcaccatcatcagttaacaacaaataatgcaatgaaggggaatacctatctggtggtactgaaattctactagactttcttggaggagatgatggttctggttctgactcaacctctacgcctgcactctggnttctattggctacatcactttctgaaatttcttcaagtgttgctctctcaaaaaaaattggcagattacctgcacatgtagattctgcagaatatttgtccttataaaacaagttctcattaaaaatgacattcctacttctgataacttctttgtgtggcatcccatacctgtatcatacttgtatatccataacaataaataacacttctcact

SEQ ID NO: 132897 - DNA, 424 bp, Glycine max
agcttgacacagttcgcttaatatcttgctatatctttacaatatagctagaatgtatttcagctagatgtgaagagtgcctttcttcacagtgaaaataaagaggagatctatgtgcagcaaccaaatggttttttgaaaaagggtgaagaagaaaaaatgtacaagttaaaaaaggaactttatggtcttaaacaagcaccgagagcttggtacaacaaaatagaggcctattttattcaaaatggatttggtagatgcctttgtgaacatacattgtttacaaaatcacaagagggaggtaaaattttaattgtaagtctctatgtagatgacttaatatatactggaaatgatggaagtatgtgtgatgagtttacaagatccatgatgacacaattgatatgtcagagttcggaaaatg

SEQ ID NO: 132898 - DNA, 332 bp, Glycine max
  unsure (1)..(332): unsure at all n locations
agcttcttaaaatctctatcatgtatcaattattntttttttaatggctggtatttgtaactgactatgtataaattataaccctgttctttcctaccctttatctgctgcatgcatgaattgaagagttctggctttgtttgaattttattttgacatatgaacatatggtattttagctcaccatggtgctgaaccaactctgctagatgttctggcgctattttaagactacaagttgatcatcagagaagtgtctaatatgaaatttacgggaatataagaaatttaactttctaatatcgtggaatgaatactccttagaagttgag

SEQ ID NO: 132899 - DNA, 374 bp, Glycine max
gacacataaaactagctgactgactaaacaccacacactttcatattttgacacatagagataaaaagagataaagctatggtacatccttgtgcgtggcaaataaatgtaccactcccatgctgcaggctcatttttctcttgtatcgggataagagagcacatatgtgtcacactagaaatgctaaaagctaggggaaaatgtatataaatgttatcaagggaaacatatttaaagaagatgtccgtgtctctgagaaacaaaacaggcgaacccccaaaatttaacttttgtaacaaccgtctctgaagttgagaaaaatcaacttatggtcttcacctcttgctcacatgcaaaaattcgaccatccatc

SEQ ID NO: 132900 - DNA, 411 bp, Glycine max
  unsure (1)..(411): unsure at all n locations
agctcgagagacgaatgtatcgcgtttggtaagtgagggctgctgaataccccaaagcagcatggtctcctccgcagcggattcctccccaccaaccaccaaccgaacctcaccaccgtaagaacccaacttcaccattggcgccactgcttcctcttcctcttcgttgttgttggccatggtgtcctcgctctctctgtttcggattgaatcgagttttaatttgtggcctttctaggtatgggcgttgaaaggaggagggctcttgcttcctgcaccccataaaaaagtgaaaaatcatgttccccatcgaaagtaggccaaccgagctccagggcacctcatgcatcccctctgtcagagatanaggcaagatttgggaaacgccagctttgctttgcagagctttct

SEQ ID NO: 132901 - DNA, 446 bp, Glycine max
  unsure (1)..(446): unsure at all n locations
agctttatccctctctctctcacgttgctattcctttcttcttcctcaccattgaagctccatcaaagctccaacctttgtacaccatttctgctccaaatcgcgaaaggaaaccattttcggagtcgtgaagcgcacctatccattgtgggacttcacatttcaggtttgggtagacttattctcacataaattttcgtgggtattgagttttgggagttatgatgggtagttttactaggtttatgcctcatgatagttatttgtgaaaaaatttgataaaagcatgttaaacttgtcacgtgtggtatgaatcaagcttacccattctgttttaggggttttatgatgatgctngtatgctgaaatggctgatggaaaactgatagagatgaacggtagaattaacctanggttaataggtgagaatgtagtgatatgagtgg

SEQ ID NO: 132902 - DNA, 464 bp, Glycine max
  unsure (1)..(464): unsure at all n locations
agtgactcttagctatttctntanaactattctcttatttttttgngactttngaaagaatcttcagaaataagtcacttgaagaattgtgacttttggaaatgtanttttcaaaatcaatcactggtgatctattaccattaaggtgtaatcgattacacatcaacagatgtgactctttattttgaattttgaaaattaaaacgcttagaagctctggtaatcgattactagtattgtgtaatcgattacacaagtttaaaatactttaaaactgtttaaacatatagttgaactcttgaatattgaaatcttaaccatttaaaacactggtaattgattactaccttctggtaatcgattaccagagagtaaaactctctggtaatgatgttgtgaaaacttctcgtgctactcaatgtttngaaanaacattttagtacttatcttggattgagcttccc

SEQ ID NO: 132903 - DNA, 409 bp, Glycine max
  unsure (1)..(409): unsure at all n locations
gacacaaaaactcagcttngaagatnataagcatgcatcatgccatgtntcggnttttattctagatgatccatgatgaaccaataaaatcattttcagaaatngggtctgaatagtaacctcagcactcaacagtgtcaataacaccaaaaaattattaaaacaaatattaagaatatgcttgaatgaaattgaagcggtaatagttgaggagtgtgttcaaagtgttgtcattgcgcctgaaagtactattatgaagtgcatgtgaattatcatattcttccagtattccccctcaaatatctccatctgaaacactatatactatatagaaaccaatatgaatttcctcatcatngtcaatcaagtaatcctcatcacttttcatatgatcttctcaagttttaat

SEQ ID NO: 132904 - DNA, 445 bp, Glycine max
agcttgatgaataataccacataaatcacttttcttgatgaattgttacaaaattgatgtgttggtatgaaaattatatttacaagtatgattttaagttaagcaatcactatgatcttcccaccaaaaatgggaaaaaaaacagaagcttcagagtagaatcttctaaaccttttcccttgataaaaacatcagggactaaattatgccaattcctctttcaaggacacattgtcatccctctgatctatatgctccaatgctcctctatccacaaaatttaccattctgtgaggcacaaaagccttaagtaaaatgagttgcttcttaattaaaactcctattcttctcgtagtgcttcttctggggaaagtactccagacttatctatacatgtggcatgacaagtaccaatgatcaatgagaagtagttattccaagattt

SEQ ID NO: 132905 - DNA, 433 bp, Glycine max
  unsure (1)..(433): unsure at all n locations
ntaacctcatcgtccgtcacagtctatagatgtgggagcttatctaatcctggngntcggactctcagccacttatgatagccgacgatgatcccattactgcttcccctaagctctctgtcctttcttcacgccgcatcccatgccttgcgaactccttgtagtaccctctcgttgtggtcactaaaaccccgtgcgatgaaaggcgtgatgctntcgtctaatggcactcctttcatggngtagccaagctgtcttatggtgagaacgggattataattaatacaaccccttgttcccatcaagggaacatttggacatccttcgcatgaagatagaatcttgattcttccttccttctaacgagggaaccaattaacagacgcccnccccaatgctagccaataggtggcccaattcgcctttccttttc

SEQ ID NO: 132906 - DNA, 316 bp, Glycine max
agagcaccgcagctgcagcttacagctgccaaatatagaaattctacacttattactaaagatacagaactactaagatgataaggctaacagaaacatccctctatatctaacaaacttatatgcatgataacttaatttgcccttgcctgcttatatataaatccaatactaccttgggcatcattggcattcatcataatccagattttattgagtggaaagcagtttgactggcaatgcttgtgcctatgcagaaaaaaaggaatatttgtagcgaattcgaatgaaactactggttaaaatagcatttcac

SEQ ID NO: 132907 - DNA, 475 bp, Glycine max
tgtatgaatatcgaggatgggattcaaaagcagcaaaccctatatcatcgtcgttttacatgaggacttagagcagctgatgtaattgcattaatctgctcagtcttttcttatcagactgccaaattttcaaatttgatcaaatattcaggatttcttgatatgcatttgccatggaggtgatctacatagtgcgttttctaataaaatatgctttgctcacatgaactgatgagagagaaacacaaaagaggcatctacttaatataatcttttccttgatgtagtgagagtttatctcaatttcttatattagattgcatcgtgatactaaatcttctttattgattccatctttttctctcccaaattcttccttaatgatgttcttcttatattcttccttctttattctacttgtatcaatctccttcacttcaatcattttctcatctccttctatctattcttctct

SEQ ID NO: 132908 - DNA, 388 bp, Glycine max
agcttctaggatattgctctgtaagcagcagtctctagtattgaatccatcaaccggtgtgatgagtagatatgacgttgcatatatgcagtgcaagctgtcgtctaacacgacccctggaagatgatctcttcaatctatcattacttgatttaccttggaacacaagactagagatcatgctcaattgcctttctatacatgctaatttgcaattcttcattcatagccaccttgtggcgtgttcaaaacaaatcagttccactgaatggagtttaaatctcgatcttaggaggatattcatagcttatgcgtgtgtgcgaatggaatataaatttgtagaattctactacagacccttactttagttttgtcacttttctcggga

SEQ ID NO: 132909 - DNA, 362 bp, Glycine max
  unsure (1)..(362): unsure at all n locations
actaagctggaggcctatgatcttcttcatcaatggaagcagnggcttcttgtatatattttgacngcggcatagagaagaaagagagagaggagacgttctttcgaggagaagattagtctagaagaagntcaccaccataggaagccatggataagagcttggaggaagaataagatgaatgaagggagaggaagagaagagcacgaactnttgtgctctaaaagagctctgaaatctgaagtttaattttcaaatgatcaaagttgaaaaaatgcacacacatgacctctattgatagtcttagtgtcacacaaaattggagggaaattagaatttcaattcaaatttcacttgatatt

SEQ ID NO: 132910 - DNA, 454 bp, Glycine max
  unsure (1)..(454): unsure at all n locations
agcttcgtcctcagatccctcttgttggactatgcccaatttagacagccctcttaggtttagactaacttaaactaagttttgtccacagatctctcttgtaagactagactcagctcaagcagcttacgaaattntagcctaatttagcctaagcttcgtccacagatccttcttgtaagactaggcctagactaaacaacattattgtaacaacataattaaaaccaaaacttaatccgcaaatccctcttgtaagactaagctttgatcctgcttcaatcaagttctaaggcaacagtacatttcccaatgctaaagtcacctaactatgcacacaaatggataattagaccaaaagcatacaaacattaagcattgaaggaagcatngaacacagaanacataatcaattagatattanagttttacatcagctattcattagaaatcc

SEQ ID NO: 132911 - DNA, 260 bp, Glycine max
  unsure (1)..(260): unsure at all n locations
aaaaccagccaaaaacaacggagaaaaaacctttgtttggacccaagancagggaaacatctcattggttagaaaaaaaaccccaggacaaagcgatacccaagncagcgggaagaaaaatgccactcgttcataagagatgaatataactgagccaagacggaggcgcacatgagtgaaacaatggcctctaaaacatgacagaagaagggggacgcactacgcatcgcacaagatcataagaagacccgagattgggg

SEQ ID NO: 132912 - DNA, 314 bp, Glycine max
  unsure (1)..(314): unsure at all n locations
agctntatgtgtcaccttagtattcatgggttcaaatcaaaccggcaagaggttttaccaagtcaaggttaaaggcctagataccaccagcatcaaggaattacggcgcgtgatggaacctgtccaaatgcaagtctttcgcaagacttacggaaagatcttagagttgaccatagcagaggtatgcataaaagccattgcatcactcacccaatcctacgaccagcctatgagatgctgtacgttcggagacttccaattggtaccagaccattgaagaattagaggaaattctaacatgttctctctgggga

SEQ ID NO: 132913 - DNA, 258 bp, Glycine max
  unsure (1)..(258): unsure at all n locations
tctagtcaaatagacttaccttgaataactcctttgattctctctttgagcctattctcccctttctttgntgtgaagctcattacacgcctttagtgaacaaccatgatatcaccttacccttaagaatatctggagctttggaatcgttttgggaataagctgggaatatagtgtggngtggtatgtgtcattggaagatatgattgttggtcatgcttaatgtcttattgtcggcacgcttgactgttatatata

SEQ ID NO: 132914 - DNA, 466 bp, Glycine max
  unsure (1)..(466): unsure at all n locations
agcttcgttccttcaacgaacacttctactatatatgcaacattcagtctacgtggtttgtcttcactaaggagctaaggagaaaaataatacaatccatagaaaagatcttgttgccagaatatggaaacttcattgggaggttgcaggattttattggtaaccaagcttatgagcacattgagtatggaatgtttgacattcaagatagactcaacaatttgtttcttgtaagagagtagatgaatctgatgccagaagagaaggaaaggagacacaagtttgcattgatttagaatacaaaaatatcatcatcattcattgcaaacatagttgcaaaggatttgtgccattgtngtacatatattccactgtatgtctcaacacaaaatcccaactggtgtaaggattcctctctaatttgttccatgttaagattggttanatcaagaacgatatcatcatg

SEQ ID NO: 132915 - DNA, 406 bp, Glycine max
ctatgaaactcagctactagaacaaagatggaatgggaaatgatctattttgctcaacatgcataggtgcaagagcttcctgtacacaagatggaaacacaaaaatgagctgagggtgggattgtatgttgacatgcacaaacttcctagcttggtgacgttacctcataggtttgggtagtatacttctacatctatgctcgctcaaaggtgtagaggtaggtatcttgatcaaggaaagaaaccgtaatttgaggattttgaaatttgaaattttgaaaaaaaaaccaggaaatatgaagaagaagaatagagaacacataattagaaatagaggattgtgcgaaattggaaatagagaaaacatatttattctaatagatgaaaattttgtgagtgaacacat

SEQ ID NO: 132916 - DNA, 450 bp, Glycine max
  unsure (1)..(450): unsure at all n locations
agcttccttaagaagattcgtaaagaagctatagcttatctacacatacctctctaatagctaagctcacctccttgagatgagaagctagagcttagctacacaccccctataatagctaagctcacccccatgacaaaaaacatgaaaataaaaaaaaaaaagtccttattacaaagacaactcanaatgccccgaaatacaaggctaaaaccctatactactagaatggccaaaatacaaggccttgatgaaggaaaaacctattctaatattttcaaagataagcgggctcatacttagcccatgggctcgaaatctaccctaaggctcatgagaaccctagggcctttccttggatctcttgcccaatctacttggagtcttctaaccaatgcccttgcgggtaggattgcatactggaggcaaccacttctttctttctttcta

SEQ ID NO: 132917 - DNA, 366 bp, Glycine max
  unsure (1)..(366): unsure at all n locations
ngagtgtgtgtagtccaccatcttttcatagatattcttattttttgtctactatcattggtatcattttttctccgtcattgaggtgccacttgagcttccaggtctctttacctttgggcgtattctttgaaagatctgtgcccctttttgcacatgttctgttggtgcatcctatccggaaccatatcaaaattgtactgatactgcctaacgaaggcaaccattaggtccttccaatagtggactcgagaaggttccatgttagtgtaccaggtaacagctaccccagtaatattttcttggaaggaatgtatcagcaattcctcatctttttgcgatgcccncatcttccgataatacatc

SEQ ID NO: 132918 - DNA, 454 bp, Glycine max
  unsure (1)..(454): unsure at all n locations
agctngccttgccccttgaatatttgatgtactcatggtcactatgaatgacaaattccttgggataaaggtagtgctgccatgttttcaaagcccgtactaaggcatacaactccttatcataagttgaatagttaaaggaaggaccacttaacttttcactaaaataagcaattggatggccttcttgcaacaacacagccccaatcccaacatttgaagcatcacactcaatttcaaaatatttttgaaagtttggcaacacaagtatgggggcattagttagcttttgcttaagaacattgaaagcttcttcttgtttctctccccatttgaaaccaacatttttcttgagcacttcattgagaggtgctgncaatgtcctaaaatccttcacaaaccgtctatataaacttgctangccatgaaaaatcctcacctcggtcacgaactt

SEQ ID NO: 132919 - DNA, 391 bp, Glycine max
  unsure (1)..(391): unsure at all n locations
ggttaacatanattatattaagctagagaattaatcatattgtaatttatccttcatctgggctctgtaacaaaaggggaataaccaagctgctatgatatcacctaatgtggtgtcctggactgctatgatatcaggctgttgtgaaaatgagaactacatggatgccctacagtttttcagccaaatgcaagaataaaatgtaaaacctaactctactaccatttgcacacttctccgggcatgtgcaggcccgtcgctgttaaagataggtgaagagatacaccgctcatctatctggctacaagaattcaggtntagttatggatgtggggaagtactttgacagcatcaagacagattacaatggttaattcaacatattgagcac

SEQ ID NO: 132920 - DNA, 305 bp, Glycine max
  unsure (1)..(305): unsure at all n locations
ggacctataaaactcagctttagccaagggctacctgaataatttttttatatctccttagagccttgattccctttccttgtnttgaagctcactacaagccttatgtgaataaccatgatattaccatatccttaaggaattttggagctttggaattgttttgggaataatcgaggagggtttttgtttcattggacaactagttatggtggctatgcttcatgatgtattttgggccatacttgatgtacattgtatattggttaaatgttggacatgctgaatgatatgttgtttctcaa

SEQ ID NO: 132921 - DNA, 429 bp, Glycine max
  unsure (1)..(429): unsure at all n locations
agcttaccttgaacgataactgtttctcttttgtccctntgngagttgaatgattttatcaataattgaaccctgaacctgaatgattatctccagataccttgtttagactctaggagagcatataattcaaggcaaattcaccccaaatttaggggagtggaactgaatgggatgtaaagaaaaaaagaagataaacatcagcacacataacaaataagttgtgtgttaaaaaaaaaaagagaaagaaatcaaagaaaatgtgtgctgatgtaataaagttaaaagcaaatggaagtgaaaagctagtgagcaagctaattgtattaagaccacttggataagtctaggatttgtgctcttagaatctaatcctttgaatatgagacaaaccaatgagtttttgtagccaaacctcactacaagcct

SEQ ID NO: 132922 - DNA, 393 bp, Glycine max
ggtaatgaagatgaacatgaacttatgatcacttatttctggtcagatttcactcattgctcagtccaactcctcgcggcttggatttccagccctgattactgccttgtgcaaggcccgaggagtcacctcagattctcttaccttctagtcactcagcccagccattaatttggcttatattaagaagaattgctggaacctggatgacccttcggtaacttttctagggacccaaaaatccatggctagaagatctgaggccctatcttcttcagctactcctgctccccctacccctgctccctttacttttgctctcccttcagcaccagtaactccagttcttccaggtcctttcgctcagagcttagagcctttcatgtctatgct

SEQ ID NO: 132923 - DNA, 482 bp, Glycine max
  unsure (1)..(482): unsure at all n locations
ccagctgtgagtaatgctgcgaggtaacctttatttcttatgctcattgtgtttaaagttcaaaagacagtcagagtcttatgccattgcgagttaattgcttgcgagtgtagatcgtatttttaaccaattaaatgacagagacatcgtgatctaataggcctctggatagagaaagttaactaggaaagtaatntatcatataatttgaatttctgttatttagaattcattggttggatggtttttaatgaaaaatttaaaattgtggaattgttaaacaaaattttaaacaactaaaaatctggtatttcaatatccttttacaaggtgagaaattgagattctcttcttaccgtcttcttaagaaacacttgccgagctnctaaatattggatgtggcttagagaacatgttaatttgcacttaatcatatttctcttgttttttcatcatttttatnccataatttaattttttat

SEQ ID NO: 132924 - DNA, 359 bp, Glycine max
cgaactgaaggtaacaaaatcacatacaggccaaaacatagcaccacctaataatgtaggaagtagatcttggctcaaccaggaaataattctatgcacaccttcacctgatattgttggcatcaaaacgctaattcagaatcaagaataactcttgtaaaacataagaaaatcatatgctcgtctcataaatatggtcctatgtatataaacttctccataagtacttataggaaaacaaaatagatagattaaatgaatgaagctccacccaatatgtaacactagtcgatgcaatagtctaaacaatacttaaacattagcactactagaagaaccttttataccacatacaatta

SEQ ID NO: 132925 - DNA, 379 bp, Glycine max
  unsure (1)..(379): unsure at all n locations
ctctaagtcacctgcggcatgcaagcttcatgagagagtcaaagatncaaattttaggaatattnatatctatgctaaacaagccaacaaatggagaaagattgttgtctctaaacccggagattgggtttgggcgcacatgagaaaataaaggtttcctgaacaaaggaaatcaaagcttcaaccaaagggagacggaccatttcaagtgcttgaaagaatcaatgacaatgcttacaaagttgagctgcccggtgagtattatgtntgtatcaccttcaatgactctgatatatctctgtttgatgcatatggagaatcccatatgaggacaaatccttctctaaagggatagaatgattatgacattatcattagc

SEQ ID NO: 132926 - DNA, 382 bp, Glycine max
  unsure (1)..(382): unsure at all n locations
actggatgcaatggntaacttgggaacccatttggctcttgttttataaanacgcacctatcgcaagagttagtggtttatgctcctctgctgaccaccatatagacctctgcccttgcatgcagcaacctggagcaattgagcagtctgaagcttatgctgcaaacatttaaaatagacctcctcaacctcagcatgcgaatctaccacagcagaacaattatgacctctccagcaacagatacaaccctagatggaggaatcaccctaatctcagatggcttatccctcatcaacaacaacgacagcctacttctttcttccaaaatgctgctggcccaagcaaaccatacatatctccatctattcaacaatagcagca

SEQ ID NO: 132927 - DNA, 137 bp, Glycine max
ggggatgcccctacatatttccatgacacaaatgcagatatgatgatttggaaacttcatgcaaaacttggacatgcactgcacctactgtggacacttcaacaagtccaaacatctttatggtcatcgtcgatgct

SEQ ID NO: 132928 - DNA, 479 bp, Glycine max
  unsure (1)..(479): unsure at all n locations
ntataagcaaatagttaaaatctatcatgacaaatatctattcttaaggaatttntagtctggtcaataggtattggtatttaattgtcaattaagattggttctaggtaagcataaatcctagtggtctggaccattcatcatcaaagaagttatgccacatggagcaatgatattggaagacccaaccaccaaaaggacatggaccgtgaatggtatcaagaggataatcactgttgtccagctgcaagaggcttgaaccataaaaaagacgtccagctattaagacgttaaagaagcactcctgtgaggcaacctagtatttctaaaccctactttttaaaactttctttttggctagcttcatactcatgctatgtaaatatttgttgtttgaactatttctatatcaggattatcattcttaggaatatcacttctatatgattttctcactaaaaaaaatagaccttactcgc

SEQ ID NO: 132929 - DNA, 252 bp, Glycine max
acacaagaacctcagctgacacccactccgagataagcctagtttcttttggattgtcacaatccccccctctctcatacagtgctcttatatatagagatctcccaattcctatgacttcacctacggctagcgacatctcgagcaatagattctgaacacatcacagcacagacttctctgaaaaaatcgcactactacacatgtttgagcagtcctctaactataactcatgatgactgcacatccttg

SEQ ID NO: 132930 - DNA, 406 bp, Glycine max
  unsure (1)..(406): unsure at all n locations
agctcgagaatctttactcctgtatatcgttgtccaactcacaatttatctcaactgtgtctctacacgaaggagacttcggaaaaatcttnggtcttcgttctcaacggccaagtaattaattaatcctccaaatctgaaaatattacttgaaatacacaaatggcatccaataaatcatcaatggcacaacctctcatgctaacaaataagaccatcaacactactactttaccacaattgcaataacgattgtttttcttctactatattcttgcttgcatttctcttactctatcgacattctggaggctcatcttgtcatggcatattcgcatcattctcttcaattcaaaatgcaagcttgagaagactttcttctcctgcatatcgctggcccacttac

SEQ ID NO: 132931 - DNA, 440 bp, Glycine max
  unsure (1)..(440): unsure at all n locations
gcgctctgctgatatagtnttcgccgatgaaaggatcgatttgtttcttataagacgcatatctgatcatcatgctttgatgaatacaaaaaaactagggccaatgatgatggtgagaattaaggagaaacccatgttgtgactgccattcctatacagtcatagttcccaccaacccaacaatgtcattacttagccaataactaaccttttccttacccaccacccagttatccataaatgccatccctaatcaaccactaagcctgctaccgcacttccatgagaacacccctttagctctactcaaaccccaccataaacgtatttgcatcgaaaagctcgataatcaccgcaattctgtgtcatggtgactgtccctatctcttgattatcaatggtgccataaccccgcatgtgatatacccattctttaaata

SEQ ID NO: 132932 - DNA, 404 bp, Glycine max
  unsure (1)..(404): unsure at all n locations
agcttcatctagagntntcctcttttggtgatgtattattgctaatagtccccatcgccacaatgtattacctaaaaggatgatattnttagaagccagtgaagttacatgaaaccatccttatgagctatcactagaagtggacttttggatcctttccattaggttcctaaattatggtggcacatagcaaactcactctggcatgttcctcgagtgcatcatgcatctcttcatggcatcataatgggcatatcattcctgtatttatcatattcatgcattgcattgtgcatgagtcattgcattattgtgcatcttcatttaacatgctctttntgtgtattctacaaactacgtacattttattgttattgttcgcatgtatatgcatgaacctttca

SEQ ID NO: 132933 - DNA, 351 bp, Glycine max
  unsure (1)..(351): unsure at all n locations
gcttctcctggcactgtaccaagatggtattattattattatcaggaatgcataaaaggggcttttatttattcttgagtctaaatcgggtatcaatgttatgcacgccatcttttatgtctgcagatgtcacacattcgttaataatacacatatttaaactcaggcctctaatactcccncagaataccaaaattgattgtttttttttaaggcaaaagtatagttttattaatatataaacataacagtaccagaatgactgagtataacaaatacaacgctactgaaatgccacctttcaaaacaatacacaaccaaaaaaacccaccacgagaggaaatattacat

SEQ ID NO: 132934 - DNA, 436 bp, Glycine max
  unsure (1)..(436): unsure at all n locations
agctctataatctagtatcatagatggtgattattagcagagacgtggcgtttaacgagaaaggcatgaaggattggtcttcaaagtctcaataggagtcgatggtgatcgctgacaaccatgaagaaaattatgaatggctactaaatccaacacctgatgagccataatcattcaggaggccatagaggaatcctcaactctcagctagattgcaagattatgtcatgtttaatgacaaagatacatctaatgaagagattatcaattttactttatttgcagactgtgatccagttattnttgaagaagcctcaagtgacgagaattggagaaaggcaatggatgatgagattcttgctattgagataaatgacacatgtgaggtggtggactcgacaacaaacgaaaggccatcattatgagataaatgggt

SEQ ID NO: 132935 - DNA, 249 bp, Glycine max
  unsure (1)..(249): unsure at all n locations
agctacatagcctaacttgccaacttacaacaacaagccacaagagtctcaacataaggatgcacatgctcatagtgagtctgtgaacaaattattntaccaattgaatgtactacatttctacgaagaattgaaagatattcctagtaaccctacttaataatgaaggatgtggtatcttaacaccatgattatacccgacatttgaaagcaaattgttatatcaaaggagggaatgatgagaatcct

SEQ ID NO: 132936 - DNA, 466 bp, Glycine max
  unsure (1)..(466): unsure at all n locations
agcttctaatttctatttgtagaccagaattcaattattaatatcntagggcatttttagtcaaatttgataattgattttagtaattgttagttttgcatactagtgtctcaatcatgtcaagaatcatccactnttcgtaattctaagattaattaattaaagcaaaaataacattatctattgtcactataaagtttataaattcaaatgtgatttatatactataactcccttaatatagtatttcaaaataaccttttgattttctttatgaaaagataatcttcaattctaattaatgctaactcaaaagattagaaaagatagaggaaactcttgacgaacatgaaaactctccatttcaatttcgtaaaccatcacttgatttacaaaacgtgcttgataaaacgtagtaaccgctaacatgtaaaaccttgggtattaagtaaataaaatgtaataa

SEQ ID NO: 132937 - DNA, 351 bp, Glycine max
  unsure (1)..(351): unsure at all n locations
tcatcctacgtggacgaatgagaataaactggcgcaaatgaaaaggatgagaatgagggaataacccatgctatgactgtcattcctatatggtcaagtttcccaccaacccaacaatgccattactcatgcaataacaacccatctcgttacccaccaaccagctatccacaaagggcattcctaaatcaaactacaaaacccacctaccacacaaccaatgctaaacactacttctagcacaaacccaatacaccaaccaagatatgagttttgcagcgaaaaacaacctgtagaattcaccccaattctatntgcctatgctgacttgctcccatatccactcgataa

SEQ ID NO: 132938 - DNA, 478 bp, Glycine max
  unsure (1)..(478): unsure at all n locations
agcttcagntgcaagcacttccttcttgaatataatattatgtcgancactttacaatatctcttcttggctatatatcctgaaaagctcacccatggcaactgtttctgcggtctcagctcctattagaaggtaaggaactcgttacttcacctcattttttcattatacaaagataatagaatctgtcagtttgttaacctaactcgccatgcatgcttgaggggaaagtggctattatcactggtggtgcaagcggcataggtgaggccactgcaagactcttctctaagcacggagcacacgttgacatagctgatattcaagacgatatgggcctctctctttgcaacacttggaatccgcttcctatgttcactgcgacgtgacaaatgaagaggacgttgaaaactgcgtgaacacatcggtctccaagtatggaaaatagacatcatgcttaataacgcatgtatatgtc

SEQ ID NO: 132939 - DNA, 401 bp, Glycine max
  unsure (1)..(401): unsure at all n locations
gacctatnacactcagcttgaattcctgatcctaagataacataggtggtaaatgttgttattgtaacaagncaccaatgactntctagagatgatcatataactgagggaaagttttcattaatccttttagccaatgatcttctcttgtaatgttgcatcttcaagaacacccaattaccgactgcatatactatgtcccggtggcatttgttggcatttgcttgcatgatatcttgagacttcaacaaattttctcttagagtagccaataattcattctgaacaattgttagattattgacttcttcaagacgggaaggaatggtgtatcccttgagaatgtgaggaggatcatgtccatacaaagcttgtgaaggagatatctngcttgaatcgta

SEQ ID NO: 132940 - DNA, 398 bp, Glycine max
agcttagaattgcatttgggcacctattttgaatcctctatgtatataaaacagtcccacaatcccaatctttcaaaaccatattcatatgtcattggggcatttctccgagcacttgttgggcgcatgcttaggcataaatagcaagagaatgggggcaatgtggcatgccccattgcttcagaatacaacataatcctaaggccatcccctacaacccctcaactctaacaaatcaagcatgaaaacaacccaaaacttccccacaaatttgagcacattctcacaatttagagtaccaaaagatgaacaaaatggaccaatgaaaagctaaaaaattcaaggattatatacttgttggagtgagtaggaataacaaaaatgaaaagcaaattcaa

SEQ ID NO: 132941 - DNA, 490 bp, Glycine max
  unsure (1)..(490): unsure at all n locations
tcaaaccacaacaacacanaatctaggtgtccaaaaccttttaattcatgggttttctagggttgaaaaggtgaaatttataatgaggtaaatttgaagcaaactctcacctcacaccagtccataacatctatttagacttgttcaagctggatttacacctaaaacctcaccgaatcaaaatttgactcttcaacacccaaattttgccctagaaatggctcttggttcactntggtcatttgtttttctctctagctcagcctaactcttctcacatgttctaaatgacatttcaagctagtattaactcactctaacctccatttaccacagaattcagacttagccttccaactctcatagtctcactcttgttccactcataacatcacattctcactttctaaccttgagttagatctacccttcatctctaacagatntccatcagcatattcagcatataaacatcacagacatcatcaca

SEQ ID NO: 132942 - DNA, 423 bp, Glycine max
  unsure (1)..(423): unsure at all n locations
cgcaagcttgaggatatgaggctaaaggttgaattacgtttttatggagggcgtagtggtggacattggaattagaaaaacatgaaaagttgggatcaacaagagacatgttctgattcatctgccaggcatgatgttgttctactggttgttgcctatgaccatatgctgcttgagaattgtctgccattaaattctttgacccataaaacggaaacggaggagcattgttgggaaacaactgtgcttcaatggccatatcctgttaaaataaacaccgaaccgttgttcttcaccgcatttgcacgcaattgcacagaacaagattaaaaggatggatcatattcagaggatgaactgggtgtgttgngattgccacgaatacgcangcaacaatctgagtattgtggcagtgcttggtgt

SEQ ID NO: 132943 - DNA, 401 bp, Glycine max
tgcggatagaggcccagaatttccgacaggaatgtctggattgttatccaaaactgagaagctggcgggcctcctccgccaggccgccaggaatagcaacgacctctacgagcgtcccacgcgccgcatcatcgacgacaccgaacaagtcctcgacaaggccctcgttctcgtcaccagatgtcgcgccaacagcctcatcaagaagctcttcaccatcatccccgccacagccttccgcaagacctccatgcagctcgagaattccgtcggtgatcgccaatggctcctccgcgtctctgcctccgacgacgagcgcgacgactagtacctcggtctcccttcccatcgcagcaacgagcccattctctgcctcatctgggaacagggtcgcattcttc

SEQ ID NO: 132944 - DNA, 463 bp, Glycine max
  unsure (1)..(463): unsure at all n locations
agcttctaaactntatacaagaatgaagctctgataccacttgttagacaagtggcctcaaatatcttaagaaggggggggttgaattaagatatcacaaactatttccccaattaaaattttattcttctttaatgataatgtcaatgttcccttattatgaattactataattcaattcaaactaaacttccttaatgcaaaagataaataacaataaataaatgagtttatggaaagagaaagttcaaactcagttttatactggttcggccacacccttgtacctacgtccagtccctaagcaacccgcttgagagttctactatcttgtgaaaaccctttacaagatctgaaccacacaaggacaacccctcctttgtattcagatcgctttacaaaaagagaccctcagtcccttaatcactttccttaagtaagaagaagagaagaaaaatctctc

SEQ ID NO: 132945 - DNA, 428 bp, Glycine max
  unsure (1)..(428): unsure at all n locations
atactcgagcatgcatctgtttgcctaattctcatgcttctctttataacttctttntccccctgagttattataggggctagagcacatatccttaatgagcttgagtgcacgaagcagagatcattcgtagagagcacacatatcttttggaaacaagaaattgatgctaatagtttatttaccaaaataaccgagataataatggatggattcgttgaaccaatgaaagaacataatttggaaatgttgggtctacttgcataaatcccaagccttagtatcacaatgccataaactggatgcttgagtacccacctacctgtatgcatgactaattntgcacgttgtttccaaatcatcattggtacgcgtgcctcatggaaataatatgttagtttaacccacaaccgacaccctgacacatg

SEQ ID NO: 132946 - DNA, 472 bp, Glycine max
agcttcccatacaaaaatgttgtcttcacatccatctgttctaacacaagatcaaattctgccaccatagccataagaattctgattgacctgtgtttcactacaggagagaaaacttcattgaaatcaatttcctccttttgagtgaatcctcgagcaacaagtctagctttaaatctgtctggttcaactccttggatgccttcctttttcttgaagatccatttgctgctgaccactctagaaccagggttttttttaatcaattcccatgtatggttgtcatggagagacttaatctcttcattcatggcacttagccatttatctttctccttactagctaagacaactttgacaattgttggatcttcttctcaaacttcattggcagctaccagagcaaatgctattagatcagcatatcgatacctctcaggggggttgaattcccttctggttctatcttgac

SEQ ID NO: 132947 - DNA, 409 bp, Glycine max
atatatacatatatatatatatatgaccttaatagcctaaaaagaataagcaaagtaaccacttatttcttggagcacgtgtgctacatatccaagccgaaattgctggcatcaatgccaaattaaccacttatttcttgtggtcttatcaagtagactctacacgctttattaggctggtaatagaatcacatatcccaacacatctacagttcaacacatattcatccacttagaataatcgaagacaaataatcttgagaactatttgaaatctggaagtattgaagtggaacgggcttacatatggtaaaatagtatattgatataagcataacctcggatttatataattacatcgagcctacaacagcgttgaacaactagaaatcaagcggtttatggtaca

SEQ ID NO: 132948 - DNA, 430 bp, Glycine max
  unsure (1)..(430): unsure at all n locations
agcttcacatgtctgagtggactcatccaatgaaacatctacttgatcttgaagggttttctcaagttttaaatgatctatggttagattcttgaaatatttttgtaggtttttgtaagcttttgagagaatagatgagtttgatagaatctcatgataagcttttctaagagattcaggatcatcaaaatttacctcataatcttcatcagacgaggtgttgtccaggtcctcccaggtactcataagacccttattttctctagtcttgaagaatttcttcttatcatgagctcttcttcaattttggcattcaaacttgaaatgtccaggctttttgcactcatagaanattatggagcttttgctttatctttcttttctttggaccgtcttcttgagaagtttctccacttagagcctcttttct

SEQ ID NO: 132949 - DNA, 343 bp, Glycine max
  unsure (1)..(343): unsure at all n locations
actcaagcttacgaggagattctgatgttanggngaagcttattctttattttattcctcaggtggtattctgtgtatttgtagtgataaatcattctagctggaaaggaagattactggagctggctttattatggtggtggggaagtggcagcaggaggcacaaacacttaacattatcaacatttattcactgtgtgatattcaaagcacaatagtactatgggataatatccagcaatcgaaaagtcagaatattggggaattgtggtgcatattgggggacttcaataacattatggccccgcagagagagtcacagcttataacagggggatggatg

SEQ ID NO: 132950 - DNA, 432 bp, Glycine max
  unsure (1)..(432): unsure at all n locations
agcttgtcatttgtcaatacattcttctattctaataatcattntaattgttctctttattgaatggattaattattgtgatgtaaatttcaaaattaaaaatgaagtgaattactcatagaattagaattggtagaatcattaaaagacgatccttttatcaagaaacctcaattacaactcatttttatttattggctgatatcttataaactaataaagcaaatctatacacctataaaaaaaattgcagctccaatgataatagctcgagagactcggtcatatgccattgcaatatacgcaacaagaaatgccaataatcctgccaacagtgttccgaatcctctggtgagccctttgcataaagttacccctagaaccaaaagaaactaaaaaaatattatgatcatgcacaaataacatgcaaca

SEQ ID NO: 132951 - DNA, 473 bp, Glycine max
  unsure (1)..(473): unsure at all n locations
cgtcaaagaatccaacctctcatggtaaaagctttctcttgtttcgaggtttcactatcttagggatcttgtgaacaaagagaaactgatagtgtagtagtgctgcacatttgatcaacttgctgatattttaaccaaacccctcaaaggggagaggtttaaaatgttaagggacagaattgacttgatgaaccttggagatcataattaagggagggtgtgagagtttaattctgttttgtgtggtgtagatttgattgtacattgaatataagatagtaacagtaatttaaaactctgttattagtgcctaccctatgcgtgaatggttgttgctctcgtttgcttatataagaggacatacatacantctaataataagtgtgtttccattctctggtgctatactagggtgttggtgtgcattcttttcttgaaacagtgagtgatcacaagtgatgagtgaggagtga

SEQ ID NO: 132952 - DNA, 463 bp, Glycine max
  unsure (1)..(463): unsure at all n locations
agcttggatctgtgtttcagaggaatntgatgttttcaacgtatcaagagcaattcttgacacgattactggttcgactgatcatggtagagagctataaatagttcagagaagactaaaagaaaatttggcagataaaaaatttctcctcgttttggatgacgttcggaacgaaagcaggcctaaatgggaagctgtgcaggattctcttgtttgtggagctcagggaagtaggatccttgtcacaacacgcagtgaggaagttgcttctaccatgaggtcaaaaaaacacaagctggagcaattaccagaagattattgctggctattgttcgcaaaacatgcattcagagatgataatcttccacgagatccagtatgcccagatattggtatgaagattggttaaaaatgtaaaggacttcctctggcctcgaagtcaatgggaagtctattacacaac

SEQ ID NO: 132953 - DNA, 422 bp, Glycine max
acctatgaaactcagcttctgaggtggtcagcatcaggactggtgtaaggtatctatggatgtataaaattcctagcaaaatttctgtttttgcttggaggctaatagaagacagactaccaacaaggatgaatctacataggagactagtgcaattgcatgatctgcgatgtcctttctgcagagaagctgtagaggaggcatctcacttgttcttccactgcgtctttatccaaccaatttggtgggaatcgatgtcgtggctgaacttacaaactgcctttcctcttgggccgaaacagaactttctacagcatatatctatccaggcagcatgattaagtgagaacagatggcgatattggtggatggcggtaacttgggctatttggaaaaccagaaatagtagtcttgtttcaaat

SEQ ID NO: 132954 - DNA, 476 bp, Glycine max
  unsure (1)..(476): unsure at all n locations
agcttctatgaaggttcgttcctaatttctctacaattgcatcacctctcaatgagctggtgaagaagaatgtggcatttacctgnggtgaaaaacaagagcaagcctttgctttgctcaaagaaaagcttactaaggcacctgttctagctcttcctgacttttctaaaacttttgagctagaatgtgatgcctctggagtgggagttggagctgtattgttacaaggtgggcaccctattgcttattttagtgaaaaacttcatagtgccaccctcaactaccccacctatgataaagagctttatgccttaataagagccctccaaacttgggaacattaccttgtttccaaggaatttgtcattcatagtgatcatcaatcacttaagtacattagaggacaaagcaagttaaacaagaggcatgcanaatgggtagagtacctagagcaatttccatatgttatcaaatac

SEQ ID NO: 132955 - DNA, 435 bp, Glycine max
  unsure (1)..(435): unsure at all n locations
agctttgattgtccatactcatatatattttgataactgggcacaaggaagcaaaaatagtgatcgaactatacaaaacacttatgctttgtaacactacacagtaatcgcgtttgtatgcttaactttaaatgcaacatggtttgtgtaagtaaaattgtatactttatccaggtgcatcaaattatatcagcaggttttgtgtattaattagactttaatctgacacaagtgataggcctaggtaacaacaatcctttcatggtaatgtgatacctaatgtcacacatatgggcaacgaanaaatgaatataaaanaggaatgattgataataatattcatcttctctacagntaagcanatgttctagctgaatnatcaatggtaataacattaaagtctatataaataatgttctttcatttgacaaatcc

SEQ ID NO: 132956 - DNA, 414 bp, Glycine max
  unsure (1)..(414): unsure at all n locations
tggataaatacaagttatggttgctgcggctcaattgtcttgaataacagaattcaagagagcttaagacttattttgattaacaaatccagccacaactcagcaccacaactcaatttcttcataggcatcatataggaaacttagaaaacaaaacaaagttcaacaacaaaactactttaaggaattgatttagaacacgttatgaattaaataacaggcatgaattagactcaaaattcataatatatgctaagaatgacaagaatacatgaacaaatgtatctagaattcaatcaacaaaataaaattcaacacaaacttagaacataatgtgacannatatatgactaaatatgactctaagacaacatggattaagtgantaccaatatgattttgggtttttttcta

SEQ ID NO: 132957 - DNA, 418 bp, Glycine max
  unsure (1)..(418): unsure at all n locations
agctttagtgaaaggatgtgactcttcatatttgaatttgaatttcaacgttcaaaggcactggttatcgattaccaaaacattgtaatcgattacagcttttttgaaatcaattggaacattgtaaattcatttgaaaactttttcaaatccattttgctactggtaatcgattacaacaatctggtaatcgattaccagagagtaaaaactctttggtaaacatgttttgagaaaaatccatgtgctattcagtttttgaaaaaaccttatcatacttatcttgattaagccttctcttgagtcttgaatcttgagtcttggatcttgatcttgattattcttgattcttgattctcgaacacttgaaactggaaacttctcttgattcttgagtncttgtgcatcatcaaaataa

SEQ ID NO: 132958 - DNA, 428 bp, Glycine max
  unsure (1)..(428): unsure at all n locations
taaacacaagtatntagggactgaagagtgtggcttaatttctgnancnnggngcttaggtgtagggcttaaacacaagtgtattaaagacttaagcataaggcttaagcataatatatttttggggcttaagtcggaaacttaagtgagcttagttttatatcacatatgtaaatatgattggccaaatgtaacctaaatgtgattaacttgtcatatgagctaatatgagatttgttgaacaaacaaatgaactaaactgaaatgtgcgaagatgatgttatgctattatcatctaattaacttgtcttatgaattaatatgagatgcatgaagttgttgtcatgctattactatgtcattaactttctcttacaaactaatataagatgaatatgagtatgtatgtcgagtaactatatgtacat

SEQ ID NO: 132959 - DNA, 172 bp, Glycine max
  unsure (1)..(172): unsure at all n locations
agctnnttcctttgttgctctattagggtttctagcgttagagagaaggagaagagattgtatcctccattttactgtcaatatgcgagactaatgtctgtttgcaataacattatttcgcaatcccaacattgagaatgtgagaaaataggttctgaacgtggtgcataat

SEQ ID NO: 132960 - DNA, 488 bp, Glycine max
  unsure (1)..(488): unsure at all n locations
ctatgaaactaagctntaatatatnttaatttaattatgatgccattatccttatattttattataggtatctgctcatctagtagccacaaattatctatagggttcttacactactataacaaccctgacaatcaaggaaccaggactcccatccaacgttataaataactagnttctaccttcacttttcatcccattcccaactcattcatatacttacttgaacgtcggagtcccttttagtaggtacccccctccctttcctccggaggaagacgcctgcagatttgacgtaggagatcgaggagcccctccaagctatcgtaaccctgacgtcagtctggttcatattttggtgaataataataattataataataataataataataatcataataataataataataataataataataataataataataataataataataataaccacaacaacaacaccatcactacaacacaac

SEQ ID NO: 132961 - DNA, 452 bp, Glycine max
  unsure (1)..(452): unsure at all n locations
agctntgcctttagggcttgtacctcatcactttcttccgaagctttaacctcatcgtctctcacagtctttagatttgggagccaatccaatccttgtgttcggactctcagccacttatgatagccgccgatgatcccattactgcttcccctaagctctctgtcctttcttcacgccgcatcccatgccttgcgaactcctttgagtaccctcgcgttgtggtcaccgaaaccccgtgcgatgaaaggcgtgatgctttcgtctgatggcactcctctcatggggtagccaagctgtcttatggcgaggacgagattataattaatacaaccccttgttccatcaagggaacatttggacatccttcgcatgaagatagaatcctgattcttcctttcttctagcgagggaacaaattaacagacgcctctccatgctagccaagagtt

SEQ ID NO: 132962 - DNA, 424 bp, Glycine max
  unsure (1)..(424): unsure at all n locations
gtcggaccatgaaactatgcttacatagatttagtaatgatccactaacctagaattttatgatgttaatgccactaacctagggaattaaaaaaaaanaacttaatggctgtagtgaactgaaattgtggcaagcaaaagtcacccccaacagccaacaagtcacccccgacatcggccaagaaaaattaccagtcgaggcatcccaaaaagaacccccggatgaaccaactgaacagttcctaatcgacatcatccaaaaattattcgaggattgaacagaaaacaatagcccacattggtcataaacttgaccggactgattnttgatgacaaaccttacgggaaatcttggcacatgaatgtgtttttttttccaacattgtgcaatttntttatttttcaccaacgccggccaataata

SEQ ID NO: 132963 - DNA, 458 bp, Glycine max
  unsure (1)..(458): unsure at all n locations
agcttgagaagctatntgtgaaatgagatatttgattaccacattttgtaatcgattgccacgtttctacaaatgcagaacaaaaagggatttggatgaattaattgattaccatatttgataattgattaaatcaattttagttgttaaaattataaataccctcgcttgttctttctcatcagtgactcttaatatgatcttatcgtttagaaaacacattttaagagtcatctaaaggaattactctgcatttcttcaagagattcaggtttatcgagattcatttattcttcatcacgagttgataatcaaaggaagagcttanagatgttgtgatttgcacatcaaggtgtattcaatctaattttntatttctttctagattctnaatcctggtagggttataaagggtttgtgtgaagtgataaagtttcaactcttgatccttctcttgc

SEQ ID NO: 132964 - DNA, 442 bp, Glycine max
  unsure (1)..(442): unsure at all n locations
ntatatatatgcttgcacacagtacataataatgtatgattattgttctcacactaacaaaaaataaaatattgtcttttttcaccttgatagggaattgatggatgaaatacctgcactgttaggtacatatatagtttgaaagtcacaaacttcataggatatgacactatgagcagaaatataaaataagcatagatctaatataagtacattctctaccttgccagctcttgaagctttaacatgtaatggcaagtgtttatcttgatccagatgatagccggaaacaatcatctctctgtacacatgctcaaagtattcccattgctgtgcactagctgaagcttccaacatttgagtatatgttgacacatctgggacaacagagctattaccaccccctggtggtggataaaattctgattnggctactttgact

SEQ ID NO: 132965 - DNA, 487 bp, Glycine max
  unsure (1)..(487): unsure at all n locations
agcttgatttgtgagttgattntagccttagtttcacttggttatttctcaactcatttaaaaacaactttcaaagtaaatgcccatttgaaattttcctttttgatgattaatcgaggttacaacatgaacgatcagttgaatttttattttataggcgattaaacgagattacaacataaacgatcgggtgaaattcattttaatattgattaagtgagattacgacttaaatgatcggttgaaactcgcttaaaaatgaagaaaaagaatactaaaagtagacgagatgaaggtgaaaacatacaaagcaagaatagacacctaagggtgcatagaatgaattcaaagcttggaaataaaaaactaaccggttgaagatcgacgaacgatgaagaacgaacgaagaacggcgaagaatgttagcgaaattgatcacaaaaatgttacggaagcatctcagtttggattttttcttcttcttctt

SEQ ID NO: 132966 - DNA, 487 bp, Glycine max
  unsure (1)..(487): unsure at all n locations
gttgcacgtatcagtcaagtgtatggaccatgtcgtagcctttgttctttctataatggttctagnttaaacgtgatgcctaagagcactttggagaaattaccattcaatgcttcccacttaaagctgagttcaatggtggtttgtgccttcgacggcacccgccgagaggttaggggagagatcgatctcccagtacagataggccctcacacctgtcaagtcaccttccaaataatggatattaaccccccctacagctgtctgttggggcgcccgatgatccactcagtgggagttgttccctctacactccaccantagatgaaattcgtagtggaggggcatttggtcatcttgtcaggcgaggaagacatcttggtgagctgcccatcctctatgccttatgtggaggccgcagaggagtcattataaaccgctttccagtctttcgaggctgaaaagcatttctacgaggattcctttc

SEQ ID NO: 132967 - DNA, 320 bp, Glycine max
agcttgccaacccatggaagctcttaatatctcccacactttttggggtgggccattcttggatggccttgattttctcagggtccacttggaccccatttctaccaactacaaaccctaagaaaactatattatctacacaaaaagtacacttctctatatttgcatagagggtgtttttcctaaggactgaaagaacttgcctgagatgtcctcagtgatcatctaggctcctactgtacactaaaatatcatcaaaataaacaactacaaatctacctatgaaatcccttaagacatgatgcataagcctcataaag

SEQ ID NO: 132968 - DNA, 481 bp, Glycine max
  unsure (1)..(481): unsure at all n locations
cgcctgatgattatggngcacccatcacatgtggtactatgtttttgccgggcgatggngcacaacaagttttccacatccacaatgcgcgcataaacccaccatcccctgttgcccaccttcaactgaactcacgtactcccacgtagcccatatcctcgtttctctccacccgggtccccatcaatcctcccaagcttccacaacatccaatcaaaacaacattcaaacagcacaagctatcacagccaagcaaaacagagcaaaggcagaaaactctgctcaacacatcaaccaaaatcacagcttttctctcttaaggaccacagtaacaattcctacgatccaattcgntaaccggaggatcgactccaaaattttactggaagtctatagtgcataagcctacattgtgaccgttgtgatcgactagcaaacatccagatactcatctgactactctttcacagccaccacacac

SEQ ID NO: 132969 - DNA, 328 bp, Glycine max
  unsure (1)..(328): unsure at all n locations
agcttgctactacaaaagtccagtgggattatatttattactnaggtattatctgttgatggcatcctactagcatcatacgatttagagttgcaaaatagatatatcgcaatttatcatgaattctgggtgtcctaaggtgatataagagtaatctaggtatgcaacactggaaacgaggcaaatgtattatgtgctaatttaatacaacaagaaatcgcgtgttttcatatacaaatactaccacattagagatcattgggctttataacttcatcttatgcagactattttagtatcaatgactctacatactaagccactaggt

SEQ ID NO: 132970 - DNA, 343 bp, Glycine max
  unsure (1)..(343): unsure at all n locations
tcataacaacatcagtttctataaaatcgatgatgctgttattataacaatatcagntcttaccaaaaaccaatgtgtgttatcagattatgacattggtttttagtgaaaaaccaacatcggttttggaaaaaactgatgttgatatgaagatatatgaccatcttttttataattcttactatataaaaccgggtatttaaataactgatattgtgattttatgttaacatcggtattagaaaatcgatgttaattgtattactatcaacgtctgtactttcaacatcaattgataatcgatgtcgaaagtccttaataaccgatgttaagacgctatttt

SEQ ID NO: 132971 - DNA, 460 bp, Glycine max
  unsure (1)..(460): unsure at all n locations
agcttgacattgacagagttattctttcatggaatgcagtagctgatgagaacttcaggtcatttcttgtcaaagttttgccaacactcaagtggctagatgatgaagaattatcttgacctatcctggcttttagggatacagttttatcttaccggtataatgtgaaaatatacttcctcatccagaagattgttcattcattgggtaaacttgtccttgacaaaggacatttttaacccatttatcatttggtcctaactggcataagatcctagattgctactatggattgtgctaataaaagtgggtaacatattntactgtctatacaaaataccanatgacgtccttgatgagttatacaagctccttgntcaaatatcagtgcttcgccttagtcatgaagaagggtgcagttattntacaagtcttatacatgtacccgatctttgatatt

SEQ ID NO: 132972 - DNA, 337 bp, Glycine max
  unsure (1)..(337): unsure at all n locations
tggctgttttcccatccagaggacacacatgatgatgatgaacttgctcgtgcacttgccatgtcccttgggaactctgaatcagacaccaaggatgctgctgctgcaattgacagtgttcaacagcttgaggaagaaatggtccatcttcctccttgtgatgaattattatcaacttgcactaaacttcttcaaaaggaacctcttgcttttcctgtccgngacttgctcatgatgatatgctctcagaatgatggccaatatagatctaatgttgtcatctttattattgaccagatcaaggaatgtggattgatttctggtaatggaaataata

SEQ ID NO: 132973 - DNA, 478 bp, Glycine max
agcttcgagccaaaatcctaacttactatataccttgacccagggtgagaatgtcaatccttaccctcgaaagcaaaaaaagaagagaaggaaaatttccaataaaagagaaagcaaaaaaaaaaaagagaaggaaaatttccaatcaaaggaaaaaaagagaggaaaggaaattcccaatcaaagagtgggagaaggaaaaaagagaggaaaggaaattcccaatcaaagagtgggagaaagcaaaaagaaaagaaagaaaattcccaaccatagagtgggagaaagtaaatggaaggaaagaaagctcctgatcaaggatcgaaagatatcataagaaatgtgcataaaggtctttggaccggacaatatctgtacaatacaaaattgtcaccaaatgaacaataaataagggaaaggaaaccacgacctgaaagtggtcttcttcctttgattaccaaccacaatcctgtgcgtc

SEQ ID NO: 132974 - DNA, 463 bp, Glycine max
  unsure (1)..(463): unsure at all n locations
tatctgtcccgttntgcctctcagatgccggcgatgtattttatctcttcaactcaatcagttatgatgtagcataatatttgcataatgaaaatgtatttnttagttcaagatctatgtacgaaacagcatttaatatttgtagtaagagatttattatcaattatacttctatttaattcaaataatattatctcttcgaggaagatacatgttgttcataccaaaacaaatgaaaatgttttttcttcttttattctaaaattatggcattgtttttacccaagctactatgatatctcaaaaatcacagggaatagtgaaactactcctatagtgtacttagaaactaatatatacggattatatagtattaatcagntaacagattagtaatggttggccactttactatgttatactttatcggcanaacattttgagtcttttattaaaatatcga

SEQ ID NO: 132975 - DNA, 471 bp, Glycine max
  unsure (1)..(471): unsure at all n locations
agctttcaacaagtttcttcacatttaactatcatgaagcagaaaactagcaagactacccatcatatctcccaaaaccccatacccacgaaatttaagagagaaagaagtccacccaaacctgaattttcgaagtcccactcgtagccacgcacttcacgaccccgaaaatgccctcctttcgcgatttggggcagaaatgatggccaaaggttgaagctttgcttggagcttcaatggagaatgaagaagaagaagaaaatgggaacgtgagggagagagagagctgtctgaaaaagtgtggggctgagtgaagagagagaaaagctctttggttttaaataaaaggggtttctctgtttctattattttatttaagcaatgccacatgtctccatttgagtggagcaaagagggcccactttcccttnttgactgtgacccatactcagtcacaaaagtgaggaaaat

SEQ ID NO: 132976 - DNA, 455 bp, Glycine max
  unsure (1)..(455): unsure at all n locations
tgctggtggagcttctatggaggcaggaacantgttcttttatgttgtcctttaatggngattttccaccatggagacgcagcggaagacaaaggaaaataggtgagaggaggcgccatccattaaggaataagccatggaagaaggagcttcaccaccaagatgagccttggataagaagcttggagaagatgcttctatggaggaaaagaaagagggagagaaagagagaggggggagcacgaaattgaaggaataaaagaggtatagaagtggaactttgaagtatgtctcacaagactctcattcatcaaagttacaacaagtggtacacatgcttctatttatagactangtagcttccttgagaagctttcttgagaaagcttctctgagacaacttccttgagaagctagagcttagctacacacacncctctcataacttagctcac

SEQ ID NO: 132977 - DNA, 387 bp, Glycine max
ctgcagcttcttggaagcttgggcttatcatacacacccctctgatgactatgctcacctccttgaaaagctgccttgagaagctgtctggagaaactttcttgagaagcgtcctttagaagatgcctatagaagctagagcttagctacacacctcctataatagctaaggtcaccccccatgccaaagtacatgaagaaactatcaaattcctactgcggagactactcaaaatgccatgatatacaaggctgataacctatactaatagaatggttaaaatgcacggcctagaagaaggacacacatattctaatatttacaaaaaagagtggacccgaccttggcccatgggctgatacatctaccctaagggtcatgagaac

SEQ ID NO: 132978 - DNA, 308 bp, Glycine max
gcagtcggacctatgaaactaagctgagagctgagccctagtagttttttttttttgacgagcctacagtgtgatagatagctgtgattgatgttttagccagcatggagtgcttagttgttgatattcatgcctagggtgacgtatgaaagatgaaatttttcttatgatagaagaactcatttctctaaaattggcttcacatgtataatcgatgctactgggagcactccttccattgcaaaaagaagcctacaggtagataacataccttttgatatcatatgagtcagaacaacaaggtctta

SEQ ID NO: 132979 - DNA, 425 bp, Glycine max
  unsure (1)..(425): unsure at all n locations
agcttgtgagctggacatggtgaggacccttatactaagatgcttggtgtgagtaactggcctttatttatattatctgactaaactccaaaacggaccatagaatagaacatatcaacacaaaaagaactctgactctcctttgcttgattgcacatttcatctaggattactaactcaatggacctaccatgtataatacatggaagaaaatgtacactattcattcaagtttgttcacactgtacagtcacaaagacagagagatatgaaaggcatttcatatcatcctctgcagatttgaaaactaatataatctcaatgcttcaacatcaagatgatatgtaaatgatctagactcatcttncatgtgatcagagagatatgaaaggcatttaaaaacaagttctagatgcaagtgtgaa

SEQ ID NO: 132980 - DNA, 442 bp, Glycine max
  unsure (1)..(442): unsure at all n locations
ntaaagctgggcttagtgacgcaagatcttctattctttttctcttaccgnttaggaattcttggaaatgcgcttagcgcacctattgcgctaagcctgaactactcactgttagatgaagnttgatggtatgctaagcctcacatctcatgctaagcgcatattgaagaaaatttttgtgttgcagaaagtgctaagcgcagcctgctacgctaagccccagatgctcactagaccttacaacttcaagttcgacttagcgagaggctatgctaagcgcttgggttctaaactcaaacatcatgtgggcatgctaagagcagttgtgcactaagtgcgacatacgaatttcagtttttaagataaccaaaggctgaagcactttggtgtaccccatatacctcagcttctgcttttgagaccttgacaagtgcgtattcta

SEQ ID NO: 132981 - DNA, 360 bp, Glycine max
agcttagacctaagtcttatgatatagctgtgtctattacagtcctatgatatggtttaaatttttctatatagatggaaattgaaagtaagagtatagttgaccaaaaaagtaattattttatcttcaattttgaaaattatagatagatagtttttttttaactctaacatttaaaaaagaaaaagaaagagtattaaaattatttttttttatacttgatcaaaattaagaacatatataatcacacctagtgacctaggggtgtgaaaaaataactaaagcgaaccgatctaaaatcgagtggagcgtgtttgaataaattaaaccattctagagatagtgatttaattaaccgaa

SEQ ID NO: 132982 - DNA, 402 bp, Glycine max
  unsure (1)..(402): unsure at all n locations
taaaaatagaaagcatagcattcattatggtggttgccaataacagtgcaaaattcattatatatggctaactcttaatggcagatagcggtgaagaaactgaaagcaatgaactcaaaggcagagatggaatttgctgtagaagttgaagttcttggaatggttaggcacanaaatttgctgggtcttaggtggtatggtgctggagatgatcaacggctcatagtctatgattacatgccaaatctcagcctgctttctcatctgcatggccagtttgctgttgaagtgcaactcaactggcagaggagaatgaagaatgaattggctctgagganggcttctgtagcttcacctgactattcaacaattatttcctatcantaacattaactgattata

SEQ ID NO: 132983 - DNA, 434 bp, Glycine max
agcttgcgaaattgaattttaaacaacatatatcaaatttcttgaaaatccaacggttaacgaaaccgggttcgtagttttaccgagacagctctgggtttctgcgggaaaggaaaatgctacaatgcaaggggtatttctcttatcatggacatattatcgaaattcccaacggtgggaattctcggaattgggttgtgaacgtggtgctccagtttaacgacgatccaacggtgaatgagcccgagattgtcatttttctaagacaaattaggtggcctacggaaaaaaaagaaggttttgggagaagagagaaaaaccaaattgtgaggcagaggaggctaaggagtcagtctgaaaaatgacctatcatgttgctatttatagctagggacatttacgacctattatttactcctattatctattgatta

SEQ ID NO: 132984 - DNA, 473 bp, Glycine max
ggacctatgaaactcagcttgactggtacgcaagcatagagctcaaacactctttaatttaagtctctcctttaccttaggagtatcatgaactgtttagaaacaaaactgcaacaattagaaagggattaaacttgaaagaagttaattttgcatcatcacagggaccagggtactcaatgacaaaccttgtatcttatggtatgctcttctaacatttttctagaattgcaagaacctaacaaggatattttataatttcctaaaggctagtaaagcctttaaacaaattacatcactagttattgatcaagttaaactcaagaatctatagtattcagattccataattgtgcatcaaacttcaagaagaacaacaataattcacaatccagcaatggctaaataaataagaatgacctggtgaaagatcactgatgtccttaaacatagagaggaactgatccggtgta

SEQ ID NO: 132985 - DNA, 462 bp, Glycine max
  unsure (1)..(462): unsure at all n locations
agcttataataagagagtgaagtcaaaaacttttaatgttggagatttagtttggaaggttatcctgcccatggatagtaaggatcgagctttgggcaaatggtccccaaattgggaaggaccgtttaaaataattcagatctattcgaatggtgcttatgaattagaggaattaacccctcagaaatgtactttgagtataaatggtaaatatttgaaaaaatataaaccaacattgctcgaagttaaaataagcatagaataagagaaatacgggaaacataaaaatggcgataacagtaaatttgccacgaaagggcatgtgtcaatattacatcgaanagtagaatcgaaatacagaattcanaataaagaaatcataagttctactaagtcatgaccaaatcctcatatagcttcttcaaggtggccatctctttggttaagacctcggcagcattc

SEQ ID NO: 132986 - DNA, 476 bp, Glycine max
  unsure (1)..(476): unsure at all n locations
tgtagaacggctgggcatgacatatgtcgatggttggccttctttttgtggataaaggggatgtcccacattatttccatgatacacatgcaacaatgatgatntaggaaatttatgcataactggtcccacattatttccatgatactcaagcatcacatttttatggtcatgtgatactagggctcaggattcattttctttattttagtcaacccattgtttccaaaacatgttcctttatcaattcatgcattcatcctagtccattttgggcgttcgggaaaattttcacagcattacacacattttctttcaaaaactggttatgattagtgtaattttnttcaaagaatagctagatagtatctcttttcaaaagcatgttgtgtttttagctagacaacttantanntattnnttttctttnttctctcttttttcttttccatgaggggatttgctacctaaacata

SEQ ID NO: 132987 - DNA, 467 bp, Glycine max
agcttcatggtgaatcaaaggtgattcattgttgttttgatgataacaatgatgataacaaaagatgatgacaaaggtgacgacaaaaagctcaaagatcaatcaaagaacaactcaagtgaatcaagaacaattcatgagttcacgataagaatcaagaagaattccagactcaagaagaaagtttagagtcaagaatcaagattcaaggttcaagatctcaagaatcaagatcaagattcaagactcaggattcaagaatcaagagaaggcttaaccaagataagtatgaaaagtttttctcataaattgagtatcacatgatatttctcagaacatgtttaccagagagtttttactctcaggtaatcgattaccaaattgttgtaatcgagtaccaatagcataattgttttgaaaagtttcatattgaattacaccgtccaattatttcaaatgcttaatcg

SEQ ID NO: 132988 - DNA, 427 bp, Glycine max
tcttatccaaggctcatcttggtggtgaagctccttcttttatgtcttattccctagaggatggcgcctcctctcccctcttctcctttgtcttccgctgcatctccatggaggaaaaccaccattaaaggacctcattgaagctcaaagatccaacctccatagaagctccacaagcaagctttcatctagtggtaatcagagcacaagagcttcaaggaggtgctccttaaacctccattaattttttttctttaccttctcttccattgttgtttcttcatttttctccatgtatctcctcacatgtcttgttctaaatgttgttcacatgattctttaaagtttccacctattaaacttgctatagaagctagatatgattttctatgggtcaaatttcttgttctcgttcttgaaccatgaa

SEQ ID NO: 132989 - DNA, 431 bp, Glycine max
  unsure (1)..(431): unsure at all n locations
agcttacagcagaatttagtaatgacccactaacctataattaaaataacttaatgccattaacctagggaattaaaaaaaacttaatggctgagtgtaactgaaattgtggcaaccaaaagtcacccccaacagccaacaagtcaaccaccatttggtctcccaaaaggctgatgcctangttgccaattgggcccttattacaacttgaactaaacctaactaaagcccttttagttgattaacccacaacatatttttggtcagccaactctacaaggattgagccattatttagacaaactaaacactctanaattgagacaaagtggtgtcatttagtcctcctccatttgggccatgatacaactcacaaccttggacttttctccttgaaacttgggcttgtattcaaatagtatggacaacac

SEQ ID NO: 132990 - DNA, 333 bp, Glycine max
  unsure (1)..(333): unsure at all n locations
tataaaactcagctnggagctataaggtagttggaagacaggaaggtggatctatttttgttcacttacaacactgttatgtatggattttccagtcatggaaaggaggaattgcttttgcatgctttgaggagaatgctggntaaagtagtgaagccagacgccattactgctaatgtagatatttatgcagactctaagctgggtaaagatagaactgccatccactttatggatacaattacaacaggaaaagaatcgcgtcctgacataatatctcataccagcctttggtggagtatctgtaattcgttacgcatagactacgccatt

SEQ ID NO: 132991 - DNA, 408 bp, Glycine max
  unsure (1)..(408): unsure at all n locations
agcttgctaacctatggaagcttctaatatctcccacactntntggggtgggccattctggatggctntgattttcttagggtccacttggacccatttctaccaactacaaaccctaagaacactatattatctacacaaaaagtacacttctctatatttgcatagagggtgtttttcctaaggactgaaagaacttgcctgagatgttctaagtgatcatctaggctcctactgtacactaaaatatcatcaaaataaacaactacaaaaatctacttatgaaatcccttaagacatgatgcataagcctcataaaggtgcttggtgcattagtgagcccaaaaggcatcactagccattcatacaaatcgaacttggtcttgaaagcgggtttccactcatcac

SEQ ID NO: 132992 - DNA, 415 bp, Glycine max
agcttgaactgaggaagtgtggaagggtgatactttctactcttattcgttgaccacagagtggtacctggagatatgttgcgggggtcaggagaccttggggacgtcaggtggggtgctattgcccaaaaccaagcttgaccaataccgacccaacccgggcatagtcagtcagtgagaacctgtgatgtacctaaacaggcgagctcctggcagttaaccgataaaagaacaaagaccacaaagcaagggggcttgtgtggtggctggccagctgtgaatcttgagtgatatatgggatatggcctctggtaatcgattacaaggcttaaaagtgaagacaggaagctaagatggcctctggttatcgattaccaacggagtgtaattcataccatgcttaaaaacagatcag

SEQ ID NO: 132993 - DNA, 480 bp, Glycine max
  unsure (1)..(480): unsure at all n locations
ggaccataaaactcagctggatggttaaagtctcacgattgtcacgtgctcttgcatcatttgnntagtcgggctatacgagacatcttgccaaacaaagtcaggttaacaataactcgcctgtgctttttcttccattctatatgtagcaaagtcattgatccagtcatgtttaatgagttggaaaataaggccgcaattatactgtgccagttggagatgtattttccccctgctttctttgacatcatgattcacttgattgtgcatctggtcagagaaatcaaatgttgtggtcctgtttatctacggaggatgtaccgggttgagcgatacatgaagatcttaaaatggtatacaaagaatctatatcgtccagaagcatctattggtgagaggtacatttgcaaataagccattgaaaatttgtcagaatacttagagaaggctannagctgtgggcttcctgagntctcgcat

SEQ ID NO: 132994 - DNA, 473 bp, Glycine max
agcttgccctaacctatggaatgagctatataaatagccaaaacaactccctctagttcagttgtaaagaaagaaagatacccacatataaaacatatcctcctaagaaagcaccagagtaataatgaaataacctaccatagcgaagggaaccatgaaatgattttaccagccttgggtgcatgaatattgatgttaaaagctttgatgacctgaaactcactcaaagaggatctcatacagcttgaagtaagataaccggcccacaagcaaaatatgagcaaacataaggatcattgcttgctgctatgagacaaaaagattatgaaagcaggcttgattgtggcaacttaagatcgcccaaaccacatagataaaactagcaagaacaacatctttagcttgcaggtgaacaactaatttgccaacaaccaggataagatccataggagaagcaagattaaaactatgac

SEQ ID NO: 132995 - DNA, 454 bp, Glycine max
tcagataactatagaggataatgccacggcgacctgtttcttacagctagggaagcggaaccggtgctacagcccgcaataaacttaggccgagatagaaacacgacggtgttcggtcggaggtatagtcctcaagcttacccttatggcttgcctctagacttcactccccgtaccgctccggacgatttgaaccaagcccctaccttcgaggggcaactccctccttatgccgattatcccctgcaagaagacgatgaagaagatgcccgtctaggccctctactgcccctcaaggatccggccccccatgaattgccccaaccaaagatattgttccctttgcaaaagatagggaaagattgatttacttgaagagaggctgagggcggtagaaggcctcgacaactacccgttctcggatttggctgatctgtgtctggtacctgacatc

SEQ ID NO: 132996 - DNA, 427 bp, Glycine max
  unsure (1)..(427): unsure at all n locations
agcttgtgcttttacgaaaaggttcatcgattcaagttgaagtatggaagtaaccatcttgcataaattgnggcaaaagatggatcgtgttacatcgctgtttcgtctactgccaaacacatttagggctgccgatgtccctgttacttccagtttcaccttgatgaagatgtcatggaccatgttgaaaatctaaattgattcaaccccatatcctgtgtaaaaatttgcaatacttcaattgtgcatcattcgcatacatccatgttgttcattggttgcattgctcattgcattctttccttgaaaagaacaagagaacctaatcattgttataaaaaaagaaaataaagcatgctttacggtgccctcaccgaacctgtgctatagctagagtaatgggtaaagcggatgaggtacaagagta

SEQ ID NO: 132997 - DNA, 459 bp, Glycine max
  unsure (1)..(459): unsure at all n locations
ttatgtgtcatctntaaataaagatatggtagaagagactttatcttgtggntctatgntaacttctaatgggtgtttgaattgtcgtgtggaaatttctggaagaacattcttaattgatttgatttgtttgcctttgagccaaattgatgttattctatgtatggactggttatcttccaaccatgtcttgttaaactgttttaataaaatggtgatgtttgatgattccatgtgtgaccttcttattgtcagatagtttcctgaggatatatttggtttaccacctaagagagagacatagttttccattgacctagtactcggtgctggacccatatccatagcccctcataggatgntctctatatagttagatgagcttaagaaaatagtagaggtagttgtggataagcattttgtgagacctattgtgtcttcgtggggagcacctgatgc

SEQ ID NO: 132998 - DNA, 452 bp, Glycine max
  unsure (1)..(452): unsure at all n locations
agcttgcaccagatcatataagataaatgcattcatgcaatctgcagatatatcctcctaaacgtcaaattctccgcctatatattcaacctttccatcactggcacgtggagtgagtcttcctccatggtgcaatactaaagttatattgtcattcattctacacaatcagaaaccacaaacattgtcatatattatgaaataaaaagcctaccgcaaactcaaacataggcacattacacaacaacatgcaatgtcatctataaaaacaaagcatcataaacgaaaataataaaggatcataaacctccctacgaagcgcgaagacaatgcaaatgaaaccccttgaacatataaaaccccaactcanaccaccaaaacaatgcaaacaaaatgaactgcaaaaaaccaccaacctgactaaaaacgcgaaccctcacaatcacgagaat

SEQ ID NO: 132999 - DNA, 291 bp, Glycine max
gacacaccaacaagaatcaagccagggctattgcgcaagcaatcaatggggcaaaacacacctgatgattatgatgatggatggctcaaattctcacagaggtaaactcatcactttcaaattgagccttcaaaactatcatgacatgtagagaataatcaggattcaagtcacaaaatgtcaagaacttttattttcaaaacaattacccatttcttgaacatatcctataattcaaagaacaacatgctttgtcgcacgtgcacacaatattgacccgcaataataaac

SEQ ID NO: 133000 - DNA, 166 bp, Glycine max
agcttctaccaagggcttcttggatctcttttttatctcactaccacctcggcctacgttgctgattaatcatttgtctccacgagacacatcacaggggctgtgcataacggtgtaaacatgattctttagactgcgcatcggataaacttgctattcaatcacg

SEQ ID NO: 133001 - DNA, 291 bp, Glycine max
agcttgagtcatgaattgatggcagcttatttaccggttggcgacttaaatctactgacgaaggagacagataccaataaccgacgccttctgccccttttgcacaagtgaagacgaagacgcacttccactatatattatacgaatagctccacacacaccttcctctatggtgggagttcctaccgtggattaaaaccctgatggcatttcccgttaatccaacacacctttcgttgtggcacacagacaggaggcttggaaagaataactatcacaaaaggcaatgct

SEQ ID NO: 133002 - DNA, 208 bp, Glycine max
gctgatgcttcacaacatctcatataggagcacgtaatgcaataaagagcataccgacttattcgttcgaaggagagacacattttatatccccatgaatgaagtcctggattgtgcccaattccaaatagaagatggaaatgaggatgatagacagtgcagcctatgtcgcagcgcatgacgaaggataacttcaactccaacgtta

SEQ ID NO: 133003 - DNA, 401 bp, Glycine max
agcttgaagagttcctctctcgcttagagtgtataacgtgtcaatattgatgccttcaagcgcgagcttcctctctgcatgcaactcctcaccaacggtacaagtttcaatcaatcatcatcatggtttcaccaaagaaacatatcaaacgtagttgatgatattccaaattccaatgaaccaattaaaacatggaatgtcctaaaccctaaagtttcatcaataccccatgatgaaaatattatatatacttttataaaaaaaactcagtatattcatcttttttttcttctgttcttccaaataatataaatggctgttgtattaaggtctttttttttaacctcttgctctcttttagcagccttcttctttcgctttccttctcatataaaagtgag

SEQ ID NO: 133004 - DNA, 346 bp, Glycine max
  unsure (1)..(346): unsure at all n locations
ngtgctatgaactgagtgttgttattagttacaatggcattagtgtatgccatattgcatatgagatgttccaagtgaattttttgaccctaatggctaggatttctcataagaaccctgcttttggccacttggggaaataatccattgcgactaataaaaacttgacctatctcagggcctttggcaacagtcctaggatgtccattcctcgcatggcaaaaggccaatgggagcttaagctgaggatgttgtcaggaggggtatgtggaacatctatgagttttttagcattgtctctgcctccttngaaagatgatggtgtcagcaaataatattcgcacac

SEQ ID NO: 133005 - DNA, 479 bp, Glycine max
cgccagcttatgcaatccgttgaagggtatatgtttccatatcttcaagggctaaacgaaatacactctgaggtaggcattggagactttgaattgcaagatcggctttctcttttgctaactcttgtgctctttcaatgcccccacaactcttgaccaaattgatggcttcctcaagggaaccaacctcactgaattcagactcgatgatatccctcaatttcggttctttctccagtgcgaaaattactggtgcagtcaggttgcccttggcaaggtcactgccagcaggctttcccagttgctcggctgattgagtgaaatccaatatgtcatccacaactcggaaggatagaccaagatttcttccatattcgtacattatctcagtcacgcatgctgtcagcaccactaaagatcgacgctctctttgtgctggcaacatcatagatgctgcgttgaacagctcttaattacat

SEQ ID NO: 133006 - DNA, 433 bp, Glycine max
  unsure (1)..(433): unsure at all n locations
cttgaagattcaagagagggaaataagagaattatttgatttgtattacaactaatgaggatgaactattaccctccatgccctgaaccagagaacgttattggcctcactcctcattcagacggaattggactcgctattcttctacaactcaatgaagatgaaggtcttcagataaggaaagatggcttgttggttccggctaaacccttgattaatgctttcattgtcaatgttggtgacatattagaggtaatatcaattcatatcttgcatttaatattttcaactgctttatgaagacttgtctcttattaaatagtattgcacgagtcaactttctggttccttatatttattgntaaagaacacagtacacagataagaaacttttataatatttatnntatataaaaatcatttcttgggctta

SEQ ID NO: 133007 - DNA, 475 bp, Glycine max
agcttgataagtgtagcccgtttttgtgtttgtggctgatttctttccaaaatgtcgtggtactctatggattacacggtgatgggtgttaagcctctcaaagtgatcaaccaaggtccacatgccgacaacaattgtccctggatgaaattagggtatgacaccataacataaggataaaagagaaaagggcacataaataaagcaaaagttaagaataaaaagcacactgaccaaatggcttaaatctctaacaactccctagtggagtcgccatctgtcgtaacctaccttatgacgggacgctaaaagaaaataaaagaaagcactttcgtctcctatggagataacgagtgggagtcgtcaccaatgtttattcgagggaaacattagaataaccaaaagaggtctacgaattctgaatagaacggttcgggagtcgcttacgcataaggaatgtattatcaccccacgt

SEQ ID NO: 133008 - DNA, 488 bp, Glycine max
  unsure (1)..(488): unsure at all n locations
taaaggaagtgaacggattatcatgggcagaaatgtctctgtatttattgttaaatctgntcctcaaattcctgaagatgcaaagatccaggtacattcagcataccttgtatcatagggaatagttagtttgacaatgccatgctagatttaggagcttctgttagtgttatgcctctgtctattnttaattctctatctctaggtcccttgcagtcaactgatgtggtaattcatttagctaatagaagtgttgcctatcctgttggtttcatagaagatgtcttagntagaggtggngaactgattttccctgatgatttttatatcttgaatatggaagatggattttctcaatgatcagntcccatcattctaggcagaccctttatganaactgctagaactaagatagtatgttatgcangcacacttgctatggagtgtggtgatataactggtcatnttaatattctggatgctatgaa

SEQ ID NO: 133009 - DNA, 329 bp, Glycine max
agcttgtggcatatgaagctgagatcgatgtctgttatgtctaatgcactctaaggaacacatgtcaacattgcttagcatcacttgctctacttcttttggcactacatcctctatttgattgtcgattttggtgcattggtgtgactccctttcaaactgaaaacaatagatgtctcctatcggggttggtctctgatcttcagaatctaatccacgagaaagatcctccaatatggtgataataatgctgttattggagattccgtatatgtcttccaactcaataacccatcgtatcggggaatgttgctctgcatccatactca

SEQ ID NO: 133010 - DNA, 368 bp, Glycine max
  unsure (1)..(368): unsure at all n locations
tgcggcgtgatatggctggttgcgttcgaatcggtagtgtagattatattatagaagaagaaagagaggaagatgcactggagacatanagagagaaatgatattacgcacagaagaagaaagaaaggaagagacacgggagaaatggacagtcggatggtcacgtgtcaatcttaaaaaatgtacaaaattccaattctgttaactacaggaggactcgtgtcaccacctggagcatgggcacaataggcatttccatagacatctcatttataagacttagtatagatatatattataaaatataccttaataatacgcctacattccagtatttaattatatatgatggtaatattaatattttc

SEQ ID NO: 133011 - DNA, 430 bp, Glycine max
cgcaagctttacaaaaatgaagataaaaataaaatagtgagtatatatatagatttctaaattatttaatacgaaatattcaaaatataaaataaaagtttcttgcccgtagaacaattctatttaattcaaataagattacatttaatagaagatacacaccatttaaacaaaaacaaaaatttatagatggacaattagaaactaaggaagctatagctagctaagctactacatattaataaagaacaaaacactacaagataaggaaataattaacaaaggtagataaagaaaaaagtgaggtgaatgtttcaaattatgtgcggttccaggcttgcaaaccaatcctccagataggaattgttgagaaaaagtaatgggttttcttcaaagccaaccaaataaataaaagtttcttgtccgtaca

SEQ ID NO: 133012 - DNA, 393 bp, Glycine max
  unsure (1)..(393): unsure at all n locations
ggtggtgcanatgattacatctatacgaggaatttttttttgttcagcctccaagactccattaagattccttgggtgaggtgggacatattctgcctacctaatagtaaaggttggttagtgatcaaagatatgattaaattcaatgaggctttgcttgctaaatggtggtgggtagtggcaaataatcagaatcagttgtgggccacaattctattgtctagatatggtgggtggaggaatatgatttctcataggaactgcagtttagactctcctttggggaaagacctcatgggtatcttcaagcagtagcacagcaacacaatttgcaaaaatagctttatttacgccatatgtgaggacggtccatggaatacaaacctagtactt

SEQ ID NO: 133013 - DNA, 437 bp, Glycine max
agcttctaaggaggtgagcttatttatgatatgggtgtgtgtagctaagctctaacttctcaaggaagttttctcaaagaagcttctcaaggaagttttcttaaagaagcttctcaaggatgtttcctcaagatagcttctcaaggaagctacctagtctataaatagaagcatgtgtaacacttgttgtaacttttatgaatgagagtcttgtgagacatacttcaaagttccacttctctccctcttttattccttcaatttcgtgctcccccctctctcttttcctccattgaaacatccttccaagcttcttatccaacgctcatcttggtggtgaagctccttcttccatggcttattccctagcggatggtgccttctctcacctcttctcctttgtcttccgctgcatccccatggtggaagatcaccat

SEQ ID NO: 133014 - DNA, 461 bp, Glycine max
  unsure (1)..(461): unsure at all n locations
agcttcttcagcccanatatatttattactatagtatgcatganaaccaatgcacaaattgtgtagtattgcactgtatgccaaaattcttctccggcctagtactttgccatataaacattttagagctatcacaaacaaattccagattatcataagaacttgagtaatgacatcagaaagaaatactagtttacaatttttaaagacatgatgaagccttgtgccaagtttcatgtctatatagccatgacatggactgttcctattttgcctccagaatcgtatcatatgaaagattaccaataccagaacacaattattttaattaatcaaagcagcttttaaaattagatggaggtcaacatggtcttaatcattcggacntaaggcctaactctatctcacgaaaaatgtcttcaactgaagagaagaccacccatactttataaactctattt

SEQ ID NO: 133015 - DNA, 438 bp, Glycine max
  unsure (1)..(438): unsure at all n locations
tcctcaaccacctcattgatgatcagaantccattaatgttatgtttatcctnnangaaggatgagtgcctctcatcaacaataccaaaaatgtgagtgtggaggaggttacagatgcagatgctccagttcctgtacccactgatgatgttttcttagtggggcagacacttcacaccttccttgcttggccgacacatctggtctagtctttatcacagcaggtacttattggccttactatatttttcttctttttaaattaattcattaattgtgccttaaattaggctatataactttgtttcatgaacatggagctgngtctccggcnaaaccaccttcaaagccctatccggatgtcgatgatctgctntatctgatgacattgaccatcccagagcttttcttgatgccttaccatgtagatgggatgct

SEQ ID NO: 133016 - DNA, 407 bp, Glycine max
  unsure (1)..(407): unsure at all n locations
caagaattgcattatgcactgagtcgcagtgtaatttgtctctatgtgtatgtactttgtgcaaggtttactttgagtacctgtattcctaggaaggttagcacaataatctatgaagttagcatgccaatctagaagattaagataagatttacccgttttagcaaaaataactcttaccattttttgcttaagtctactttagccatttctggtaaaaaattcataagctaaaatacccatttatggtagccttgggcacgttgagcatggcctangcaagggtcattcttgttgccaattgattctctactaccttaattcttatatcttattttttcacaaagcaaacttggatcttcgttctcatccttgacgagtcttcagggagagaaagactcattttt

SEQ ID NO: 133017 - DNA, 413 bp, Glycine max
  unsure (1)..(413): unsure at all n locations
tagacggccttgattgagccgagatgactntattatttatttttactagntngaatatgatgnagaaggaaggtaatgtgagccttttacccctttgaaagacttgtatttaaaaatgttttaaaaatacttntaattaatatttgaatttttattcctttattagtatatatgtgaggggtagatggtgtcacaggaattgacatcaatagcttggtatccattgcttctgcacctgttagttactacattgaggatgatgattcaaccaaacaaatctctcgttcaatagtgggaaacccattatagcttttgttgattacgatgctgctcaaagtgttaacaatgttacaatttctgcatcttctaacanacccaaaagaccactcttgtcctatcatgatgatctttca

SEQ ID NO: 133018 - DNA, 301 bp, Glycine max
agctttgctgtgatgcaagtgttactgtttatgtttgtggcgaccgataaagatagcaatatattttgaacacttacatttagcatactgtcattccattgaaagttgcatctcacgacaacaaatatttccttactatcatctctcgaggtgtgtatgtgattctcacacttatgtgcgcacgtacttatgctatggttggcatgctactattcttcagactacattgtgatcgatgagtgagccatagttccccgctcgagatttgatacaaccattaatacggacagtctggatttat

SEQ ID NO: 133019 - DNA, 376 bp, Glycine max
  unsure (1)..(376): unsure at all n locations
agagatacatntccctaacctaattattataaatttacttatctntatatataatagttttacatcaccactaccacaagaatttcatatagaattcaagttaaacaatttttccgagggttgttatttctactctttttctatgtacctgggaacattatgttgtgtttaatagaaataaatttgtttttttcttagtttagtgatgaaaaaccaataatgcatgaaaaatgtatcaaagaatgaacatcctaggcaaatttaaggaataaacatagtcaagaaaaattttaaagctcttcaataacctacgtaaggtataagcaccaatagttatgaatcaatagaaaaaacactttcattgttcataagatac

SEQ ID NO: 133020 - DNA, 424 bp, Glycine max
  unsure (1)..(424): unsure at all n locations
agctnggtgcccaacactctggtcattctctcccanaacctaaaggtagatgtaggatctctatcagatactatgcaacatggcacaccatgtaacctgactaccttacttatatacaaggtcttcaactttcttcaccgaaaatctgatattaatggaaatgatatgagtcgacttatgcaatctgtcaactctatcccatatataatctaaacctataggggttgatatgtagtcctaccacaaaatccatggaaacactgccccacttccactgtggtatctataagggatgcaacttccctgaacgtctctgatcgtctatcttagccttctgacaaactaggtatgcatacacaaactcactatcctctctcttcatgttgggccaccgaaacataatcnttacatcatgatccatctt

SEQ ID NO: 133021 - DNA, 175 bp, Glycine max
aactttctttacaggaagacatatacttcatgtgatcctgattcttaacgacgaggcggacgaatcaccgttattgccacaggatagaccaaaaaataatttccttacataggaaagttctgtggggaggagacactactcataataaaattccttgggtgaaatgggctgatat

SEQ ID NO: 133022 - DNA, 246 bp, Glycine max
ttaatcaccgcggctgcagcatgaacaaactgtatacttctttttcctgagggggagtgagttggtgtatatagaaatcacaactattacaacgtctagactaagataggttgaaaacattgttcggtgtgatatccactgaaagaaatatggcttagtaagacactgttgagcttacatgactcattcagcgagtcttaccgcaattcctcatatggctcttgctttggagaactgcgtagaatg

SEQ ID NO: 133023 - DNA, 261 bp, Glycine max
catttgtagctgaccaagaagttacgacaactcacggattacgcacaaacacctctgttctatttccggcacattacggaattgcactggtcgcgtgagcctgcttacttttgatttatgacacgtctcgcgacttcatattttgtgcacaaaggacgccatgtaatctcaaagcggctgaccaaaggatgcgtgtcatctagtaataatccccagacacattatggtatgacagcgacattaggatatatgtcgtatatt

SEQ ID NO: 133024 - DNA, 464 bp, Glycine max
  unsure (1)..(464): unsure at all n locations
agctngatagacctgaactaaattatgattatttagntattaatattacgttaacatgttataattgtggatacacttatagtctgccttcataagaatttatgtatatatttaaataaataattttcttatttataattatactttaatcctatgttttattatattgtataaatttattttcttctaatcttttagattttataatctcatataaattatagtctttagttattataaataagatattataagataatatctcaaaaagaagatattataaataagatcatgttgagataaattgttcgataagtacttataacaaaagaaaataagacaataaaaatttctcaaagggtgaaagtgaatattaaaataaatgaaaacattgaatctaatattctcataaatcattattgcttgctgtctacaagactgtcattgatatgggttatgcattc

SEQ ID NO: 133025 - DNA, 402 bp, Glycine max
  unsure (1)..(402): unsure at all n locations
cgccagcttgttcatcttgagataataggtggtcatcctcatttgaagttgatggngcaacatatttctttggcctaacaggaactccaatatttttacaacttctaatgttatgattggtttggccacaccttccacatgtaaactcagccaatttcctctttagcttatgtcctgtgacattgtcctcatctacagatctcctcctatttttctttggccttcctctttggacccttttatgtggtggaacagggtgtgtatactgtgtctgggcccaatattgtggtccttggactggttcaataaaatgctggtatgtcttattataagcttctattgatagccactcatgacacatgtcctcaggcttccctcctttgtgaagttattgtgcaatgg

SEQ ID NO: 133026 - DNA, 329 bp, Glycine max
  unsure (1)..(329): unsure at all n locations
gaccttgaaactcagctttgtgctccttagcagctcnaagatggtatctggtttattttcatctcaagtgtaagaacaaacgatgcaaactttttccttttaaattgtcaacttgacaagaacttttgtaatgatcaaatggacaagaaagaagaaatattgtgcactgagcacnttgaatttataatgctnngaatanncagaaaatgaaagtttatgctggtacacaaacaatagtttaattaggaataatatatgcatagagagagcataccataccactatgtactcgtcaccaaactcgatgagaagnnttctcttcttcaatt

SEQ ID NO: 133027 - DNA, 419 bp, Glycine max
  unsure (1)..(419): unsure at all n locations
cgccagctntgttgtggggctctgataggcgcctgtacattctatctttaacttgaagactgcatccttgtttccaccatgctcaacggtctgaccactatggagaaattttgtaggagctctcatcatacctgcatgtccatgaaaacaacagagattccctctgcatatactgcggggggaaacttcttgaaaacgtctctttatggtttgtccacctcaatgcctaaagctgaagttgtggggcccaatattataccgtcttgaaccagtgagagagacacttctcccaattcagctccggattagcttcatcacatcttcacaccacaagctctacattatntaatctttatacaaaggagggtctgattgactagaaaatcgtacatgaagacctttgtgcgcttctctaccat

SEQ ID NO: 133028 - DNA, 178 bp, Glycine max
  unsure (1)..(178): unsure at all n locations
tggaacgccgctctaccacgacagtagtggtgaatgatttacttaggtgntcccacaaggcggggaagaaagacngtgatcagctgaaccatatcaaaattagcgcggatggagcgctataccgcataatgatgagtgccacaaaggaacagagtagtctaaacatatttccatgggc

SEQ ID NO: 133029 - DNA, 428 bp, Glycine max
agcttgtgtagatatgatgtgttcggatttatgtgggatctctcacaatccattaattgtagggattagttatgatttgaattgtaattgatcaaaattcttatatattctctctttttttatttgtgattttattttgatattttgtcctcgataatcatggagagatgatagaaagaatcatgtatttatttactgtctcataccaataaaaaatcatcacattccattttcttaacatggtattagagccaactccaattatctctcttctttacgaattggagattaacttttgaatacaaaaatggagaataggttaaatagatcatattctgctccacatttgtgagttcatagttattatgtctcacgggtgtttcgctttaatatgttaagatataaaatctctatcatggtcttctata

SEQ ID NO: 133030 - DNA, 490 bp, Glycine max
  unsure (1)..(490): unsure at all n locations
tagacatggtagtcatccaagagggctagtgtcttcgatgtactgttatttttaaaaaaaataaaaagaaagaaagataagaanaacatattgttagtttccaaaatgtgtaaatgagaataaataaaattcttatacctataaaaagaaatttctagaaattgaagtaatcagaataataacatctagttaatgatagattcaaatcacaatagtttataagaaaaacttttatggtaataatggagatcattaatattttatgatcaagtattgaacatcaataattatgagtttaatgattatgcaatgacaatataattttatgctggtaattaatcttaatataacttgttggaaaactccacaaacttatcatctatataatatataataaatgatagtataaaatatttctatactgctagnacataacntattntctctaantatatctctatnntaatttaatatcatcaaactttccatc

SEQ ID NO: 133031 - DNA, 403 bp, Glycine max
  unsure (1)..(403): unsure at all n locations
agctttgagggtgcgcagcccaccatctttttatagtatagtactgataatgtgtctaccatcatgattatcgtctcccattccattattgggggtaccacctgngccgccagatccctccaccttttgggcgtgttctttgaatgatccgtccccctttttgcacatgttctgtagttgcatcctatccggaaccatatcaaaattgtactgatactgcctaacaaaggcaaccattaggtccttccaagaatggactcgggaaggttccaagttagtataccaggtaacagctaccccagtaagactttcttggaaggaatgtatcancaattcctcatcttttgcgtattcccccatattctgacaatacatctttagatggttcttgagacaagtagtc

SEQ ID NO: 133032 - DNA, 479 bp, Glycine max
  unsure (1)..(479): unsure at all n locations
taactggattagacttttcaattaacactctctctggattctttcatataatactgccactcttctaccatttgtgacatctcttgatcaatcttcaaataaattttctggagcaatacctatgagtcttgcaaattgtaccgaccttaatgcccttaaacttgatcagaatcgactaagttatcattttccccaacagttgggccttctccaacgacccaggacatttactgtgtcaaacaattctttgacggngcctgttccaaactttaccaatggtcatgttgtggtaaattattcaaataatgaagggctatgtggaccttcattgaggccttgccccaataattcaagcactggtcactgatagtgaatagaggtatcttgatatggaaaactaaagcaaatatggagaataataaaagatngaagcttgactgggaataatttatattaagtttacttatattctataaagc

SEQ ID NO: 133033 - DNA, 470 bp, Glycine max
  unsure (1)..(470): unsure at all n locations
agcttgtaaggctntgtgtgggaaataagagtgagactcaacttggataccaaccttgtgctacaacaattgcagcaagaccctctatccataatgagaaaacaattnttgtttaaaaccttgcatcttgtatgaaagatgttctctctttgggtttgggttagggcacaagattgactcccaaggatccttctcaccattagaagatcaccatcttcataggggtaagcctcttcaatatgctcatcacccttggcttcaccctcacttccacttgacgaaggagaagaagtagcctcctcttggctactatagttgtcttgacccctcatgatcatggttttctttgtggggcattgagaaacaatgtggcctttcccaatacatttgaagcactcgatgttactagttctatcttgtgaactagcctttggatngatttcctctatgtttttaccctcatcatcctt

SEQ ID NO: 133034 - DNA, 418 bp, Glycine max
  unsure (1)..(418): unsure at all n locations
ctgcatctattttcctaattctcatgntttctctttataactcctttttccccctgagttattataggggctagagcacatatccttaatgatcttgattgcatcaataaggggttttaacatgaggttacccccacaatcaacatcttaacttgtcctattatgtgaggacactccaccatagaanatgtgaaatagcctttgntgggagaagccatgatatggacaacttctgatcctttcttataatctctcttaggcttcaagaagactctcttgctctttctgcacaaaattcccaatgtcccttatgtactgtgttatcttaaaagagaaatatttccttaagaaagtacttgtgcactagttcaatgtggtgatactgttctctagcactaaacataaccaatcccatgca

SEQ ID NO: 133035 - DNA, 445 bp, Glycine max
  unsure (1)..(445): unsure at all n locations
agcttgacggatattggtgcatttggaaatattctcactatagaagcgggtcccaattggattcctaatttncaacttacctattcggaagtgacatcatggcagttaaggcccagctttccattgtggattcagtcacaaaacacacttaaatatgtgggactatctaacacggcgattttcgatactattcccacttggttctgggaagcacattctcaggttttgtatataaacctctctcataatcatatccgtggtgagcttgtgactacaataaaaaaatccaatatctatccaaactgttgatctaagcacacatcacttatgtggtaaattaccctatctttcaaatgatgtggatgacttatacctttcaaccaaatgattctctgaatccatgcaagagtntttatgtaacaatcaggacaagccaatgcgatta

SEQ ID NO: 133036 - DNA, 365 bp, Glycine max
  unsure (1)..(365): unsure at all n locations
tagagagattcccgatctgagatggtactgttctgttgtattatctgaactcangtcaagatacaccaaatttgatagattcccaatctgaggaggaatcttcccccacaatccattatgagagatgatgaggctagtcaaggaagtcattgtcccaaggaaagaaggtattgacataccttctgcaaggtattcattggcgctcaagtccaagttattcaaatgctttaaatcagccaaacaaggacttatctctccaccaaactgtgatctctcatcagcttcctcatcgtagacagcagaatcatagtagtcatgatcganagcatcagaaagtgaatagttgaggtgaagctgaacaacat

SEQ ID NO: 133037 - DNA, 456 bp, Glycine max
  unsure (1)..(456): unsure at all n locations
agcttatataccctttatcatagatgagatctaatctgagttcattgagggaagacatctattacatagtgttctcattgcgaatgaggtgattgaaaaggccaaaaggaacaacaaatcgtgccttgtattcaaagtagattacaagaaggcatatgattcggtttcttgggaattttattatacatgctggaaagaacaggtttcagctctaaatgggtcaaatggattgaggagtgtctgaaatcagcatccgtctcagttttagtgaatgggagtctctcggctgagttcctcccccaaaagagtcttaggcaaggggacccattagctcccttcctgtttaatgtggnggctgaaggtctgaatgggttgataaggagagctaaagaagaaaacctgtataagggtttccaagtacgcatcaatcatgtgaatattagcattcctacagac

SEQ ID NO: 133038 - DNA, 355 bp, Glycine max
cctatgaaactcagcttaaagatattgaggaaaaatagtaaattatctcttgtatgatctccttttaccaatttgactcaacacgaaaacatccctttgagctcttaatctaatttaactccaaatattttaggattggtgtgaccaaataggtcaaagtcttgtccacaccattcgatttcaaatcaatgggccaccatcaatcgccaaagtttacaaatagaattaactatgtttttatgaattttttacttttaataaggattaaataattttataacagctaaaaattttcaaatagtggttcattttgaaaattcatgaacctaaaaatctaatctaactccacacgttc

SEQ ID NO: 133039 - DNA, 422 bp, Glycine max
  unsure (1)..(422): unsure at all n locations
agcttatagtgagcttcaaaactatgaaaggtaaacaaggctcaaaagggctatcaaaggaattaattcaaggtaagtccattcggctagaagcttataaaaacaaaattgcctcaatcatttacaaatatgcatgtgaattaggacgcatcaaaaagaatctagccaaggctattgtgcaagcaatcaatggggcaaaacacaccaaattattatgatgatggatggctcaaattctcacaaaggtaaactcatcactttcaaattgagctttcaaaactatcatgacatgtagagaagaatcaaggatttctactgtggcatttagtattggggtctanggagtgcgagtgaagcgagtcataccatgacggttcaaatagatttttacttaatagatcacctcattatatagtaaatga

SEQ ID NO: 133040 - DNA, 452 bp, Glycine max
  unsure (1)..(452): unsure at all n locations
ntaccgttgtaggtggtttctcttgagatattttcttttttctggaaaaaaaannactcgagcttgtgctcattgtgattctcacttagtctggcagtatttggttggatattgctttggactgaaaacaaatgttgacacattttgattttcatttggattggttggatattgcttaggactaaaaacatatgtaacctttgtctgattgccactctcatttactttagtgcttgataacttcttctatatccagctctgaaactgtcatttggatcttctttttccaaggttgcctttggttatcgtgtttctgnctgatntcattgatgtgagaaaatcttttattaccttccgatgtgatttttatattatttcctctataatagaccatctttatttcggtaccctcacctttatgtggcttactgacggcggtgtatttctctata

SEQ ID NO: 133041 - DNA, 433 bp, Glycine max
  unsure (1)..(433): unsure at all n locations
agctntaagagcaattcccttctttntcttatcattnttttcgagttgatttaatctcaacagttccatttcgtgttcctgtaactttccaaatagtgtagcaagagacatgttagttaaatctcgtgactcagtaatggctgttaccttaggttgccattctctgcttaaacatctcaatactttatttatgagatcttcatttgcaaaaattttccctaaagatgcaagatgatttattatatgtgtaaaccttttttgcatgtcttgtatactttcatttgaattcattctaaataattcatactcatgagttaatgtatttatcctagatcttttcacatcgattgtgccttcatgtgttacttgtagggtatcccacatttcttttgcactcttacatgttgataccctanagtactcatccattcct

SEQ ID NO: 133042 - DNA, 339 bp, Glycine max
  unsure (1)..(339): unsure at all n locations
tcagccccttaggcacttctctctctttcgaatgtgcttggaaaaattggttccgtgaagaaaatctaagccgaggcgcttccgaaacatttccgtaacgtttccgtgaggaatttcgcagaggtttcgaccgttcttcgacgatcttcattcgttcttcatcgttcttcgatcttcaacgtggaagtacctcgaaccaagcttttcgattcattctatgtatccgtggtggtccacattgggtttcgggtattattattctcgctntatttactttttataccccctcttgacgtgcttaagccattttatttaagtcatttctcgcttaaactaaaa

SEQ ID NO: 133043 - DNA, 396 bp, Glycine max
  unsure (1)..(396): unsure at all n locations
agctngtgatttgtagtatgattgcattaataaatacccagataactaaatatatggctactaaggccactcataagtacttcaatatatatagcaagcatgtgagccctaacttgcaacataaatagaaatctctcattgcacattattaaatatgcatgggcacaacgtcaacatggggaaggatctcattctaactgaatagagactttgaaagcaaagctgagataaactaactgggcttgcaattgcaaagcatgtggatcatatccaatgaagataagtgaatacagcccaatgcattgaatgacactatgctctctgacatgacggagacacctcaccttctgttgtagtttttccgctctatctttcaattgtactataatccacatg

SEQ ID NO: 133044 - DNA, 317 bp, Glycine max
agtcggaccttgaactagctgaccgccacgaaggcagctggaacctttttcaagggtcaaggttgctccttggcgattgtatcacaagagctcctctacgtcacatcgacttatgtacctcaattatgaagaagctggacttgcgacttatatactaggaatgggacatgctgatctctatatgaagacctggaatagctcatctcttagattcatgctattttattctcctgttggcgaccactgaacatgttatacaaacggatctttgtacgggctatgagcctcatggaactgacgctatataccaatataaa

SEQ ID NO: 133045 - DNA, 428 bp, Glycine max
agcttcctttatgtgatatatgcaacattgtacaataattggcatgctgtgtacaggttaatcctgatatgatatcacaactcgagagtgctggtctatcttttgttggcaaagacgaaactgggaagcgcatggaggtgtgtctttgcttgaaacccttacggcatggatcttgaattcgccacatattattaaatatttcccttattcgaatttgagttatataaatgcagatagttgaatttcctggtcatcctttcttcattggtgctcagtttcatcctgagttcaagtccagaccagggaaaccttctccattattcttaggtattttctccttagttaattcatgcctagtttcatttaaacttaaagatgtgtcttctacaatgatgagattattgattctcttctttggggaatgaagt

SEQ ID NO: 133046 - DNA, 354 bp, Glycine max
  unsure (1)..(354): unsure at all n locations
ggctctnagttacattgatggtnggatttatgttatgttgttgtatgccacttttgtgctaatagtattgtcccactggtaagactaactttccaaatgtcttccttcgcaagaaatggccccgaggaagcttgcctcaaagaggtccacgaaggacaaggcagccgaaggaactagttccgctccggagtatgacagtcaccgctataggagtgctgtacaccaacagcgcttcgaggccatcaaaggatggtcgtttctccgggagcgacgcatccagctcaaggacgactagtatactgatttccaggaggaaatagggcgccggcggtgggcaccactggntactcctat

SEQ ID NO: 133047 - DNA, 472 bp, Glycine max
  unsure (1)..(472): unsure at all n locations
agctttaagcacagagtttgttgcttattttaagattagnatagtttggtcctcccaatgcatgagagttagtttatgcttatgttttgatgacacataagtgacaagagtcttgttttggatttatttatgtaatgtatctttaactttaagtttccgcatatataacctctgttattattctatgctaaattttcataatttagtaatataagaagtaaaaagaggttgtatcaaatagggtgttacatctaactaataatattttttaacattcatctaatttactctatctccatatcaacaaaacacagctgaacatataaaatattaatataaatctctcacctatatttcatgtgcttaaatagtaaattctactaaactaatagcttacattacatctgatagtctataataaaatttcctaattataaattcgacatactgatatcatcatatttaacagtat

SEQ ID NO: 133048 - DNA, 403 bp, Glycine max
  unsure (1)..(403): unsure at all n locations
tgcttgtggagcttctatggaggcgggatcttttatcttatatgaagtccttcaatggngattttccaccatggagatgcagcanaaggcaaaggagaaaaggagatgggaggcaccatccactagggaataagccatggaagaaggaacttcaccaccaagaatgtgctttggataagaagcttgaagatgatgctttaatggaggaaaagaaagagagaaggggggagcacgaaattgaaggaataaaagacgaagagaagtggaactctgaagggtgtctcataagacttttattcatcaaagntacaactagtgttacacatgcttctatttatagactangtagcttccttgagaagctttcttgagaaaacttccttgagaagcttctttgagaaaa

SEQ ID NO: 133049 - DNA, 400 bp, Glycine max
  unsure (1)..(400): unsure at all n locations
tccctctnctcttctgcttttccttccgctgcttcttcatggtgaaaaatcaccattggaggacctcattgaagctcaatgatccaccctccattgaagctccacaagcaagcttccatcacccttcttcattctccttcttcatctttctaaaccttcattctttaatcctacttgaacaccattgttatcatcttcattttccatccaaacacattcaaactttgaaccaaataccttacattcaaccctccataaactcgtcactttctctctcattcaataaatntcataanaaaaaggaaagaggaacctttgaagatccatcttcaacccttgtgcaaatgggtttacatcactttggtattagagctctggttcaagggtttttcaagagtgc

SEQ ID NO: 133050 - DNA, 345 bp, Glycine max
tcgcgtggaggcgtgtctttactggacaccctcaccgcgtggatcttgtgtatgccacactttattaagatactcccttattggaatatgagttatataagtgcgagaacgatgaatgtccgggtcatcctgtctagattggtgctcaggaacagcctgagatcagactcagaccaatgaaaccttctccattattactaaggattctattcttagactatgcatgcctattgacattcttacttgaagatgttttccttacaatgatgaaataatagactttcttctttggcgaatgaagtgtaattatgccatcctaactagttagcggatcctgttgtgtat

SEQ ID NO: 133051 - DNA, 457 bp, Glycine max
  unsure (1)..(457): unsure at all n locations
gctgctgcaagcttcaccgttcttcgacgntcntcatttgttcttcatcgttcttcgatcttcatttgtttagtacctcgaaccaagcctttcgattcattctatgcacccgtaggggtccacattgtgtttcgtgcatttttattctcgttttggttactttgtataccccctgttgacgtgcttaagccattatacttaagtcatttctcgcttaacttaaaaataaaataaatttccaccgaacgtttgaattgtattatccattaacttcggttaaaataaattccgaccgttcggtcatgccgtaaccacgtgggaaatcaaaaagaggtaaaaaataatataaataatcaaaaaaacatcttgtagtaaaataaagcggaaaatcaatcggacgttttctctgtgggatttctcattcttaatcgaattgattaataactaaagtgaaact

SEQ ID NO: 133052 - DNA, 400 bp, Glycine max
gagagaggggggttctctttcttgaacgagtaaaagagggagagaagtggaactttgaagtatgtctcacaagactctcattcatcaaagttacaacaggtgttactcatgcttctatttatagactacgtagcttccttgagaagctgtcttaagaaaacttcgatgagaagcttctttgagaagacttccttgagaagctagagcttatctacacacgcccctctcataactaagctcacctccttgagaagcttccttaagaagagtcctaaggaagctagagcttagctacacatacctctgtaatagctaagctcacctgcttgagatgagaagctagagcttagctacacaccgccctaaaatagctaagctcacccccatgtcaagctacatg

SEQ ID NO: 133053 - DNA, 222 bp, Glycine max
gaaacttctcaaacaagcttctcaaggaagtttcaaaaggaagtttcttaaggaagctacctacgctataaataaaagcatgtgtaacacttgttgaactttgatgaataaagtctgtgaacacaactcaagtcaactctttctttcctctcatttggcccccgcccttttattctttttcttctctgacacttcacttatcagacattgggaacctctctg

SEQ ID NO: 133054 - DNA, 225 bp, Glycine max
  unsure (1)..(225): unsure at all n locations
cgaatatgacagcttttattttaggagcgctgagcaccagcaagcgctttgaggccatcaagggatggtcatttctccgggagcgacgcgttcagctcagggacgacgagtatacccactttcatgaggagatagttcgccggcgttgggcatcactggttacccccatggccaaattcgacccagacatagtcctcgaatnttatgctaatggcttgcctacag

SEQ ID NO: 133055 - DNA, 395 bp, Glycine max
caagacattcttataactaagaaaaatgcacccatatacaatcaaggcaccttcggtacctagattatttatatgtacttccaagtgtatttgttacctacatcacacgcatttcctttgctaaatttacatacatgcttactcaaagcactttggctatcaaaattgcatacgtgcacattctggtatttctaatacctgtacatacacaaacttcatgatgaatcttgactatctacacaataaggtgctacatttcatgctttttttgaagtgctttcactacctaaagccgcatgcaaattcaagtatattttcttttgccgattaaaattgtattcaaattaaaaggtatttttgtaaggtattttctttacataacatgcaacatatat

SEQ ID NO: 133056 - DNA, 436 bp, Glycine max
tgcttaagtgctgcttacatggcagaaagttgatgccaaagttcatgctacttgtgtgacgaaattatttctcctgcccatactcagacaaataagacacttcagctacaagttctagagattgatgatgctgaccctactcctatagaacttgaagaggtagtaattgctagtgagtcagatgcttcacaacctcaaatcttaatgaatgctcttactggtgttgcaaatttcaaaactatgtgtgtgactggttatcataagaagaaggctttgcacatacttattgacagtggaagtacacataacttcctagatatcaacatggaaaagaagctaggttgtctaataactcctatggatgctgcgaatgcggtggttgcagatggcacaaagttgcagattacttcagtcaccaacaacttctcttggactc

SEQ ID NO: 133057 - DNA, 361 bp, Glycine max
  unsure (1)..(361): unsure at all n locations
tgcggtactattgactgttttgtatgggatattgatggtgataattcatattatggcaactacaaatgggagtgtcaatgtagatgctaatgtaactgatacaacttgtgggaaaatgataagaaagccaatcctctcgctatgtgtagtgcaggcatcttaaaataacaccaatgcaactttatttatttttatatttaatgtctaatactgttgatcaagtaagaatgtttcactntccttattatactttattcatatcatagcttataatgtagcttactactccacctatgtgcattggcatatattaatatggtaggtaacatctcgtgaggaatttgtgaaggctttcacttgt

SEQ ID NO: 133058 - DNA, 481 bp, Glycine max
  unsure (1)..(481): unsure at all n locations
ggatccttaatgancgttgatgcagctggttccaacgctctgtcaagctctgcctccttctagaggctaaatctacgatctctatcagatactatgctagatggcacaccatgtaacctgacaacctcacttatatacaatgtagtcaacttttccaaggaaaatctgatattaatgggaatgaagtgagtagacttagtcaatctgtcaacaataacccatatagaatctaaacctctaggggttctaggtagtcctaccacaaaatccatggaaatactgtcccacttccactgtggtatctctaagggttgtaacttccctgaaggtctctgatgttctatcttagccttctgacagactaggcatgcatacacaaactcactaacctctctcttcatgttgggccaccaaaacatcatctttaaatcatgatacatcttggtagcaccaggatggatgctcaaattactcctatgtc

SEQ ID NO: 133059 - DNA, 444 bp, Glycine max
tctttcactttattctcttattacaatattcaaagaattgtatttcagtggacaattcatctaaaggtaaatagtttaatttattcttgaaatataaaatattaataaattgattctttaaaaaataaaaactttaaatttaatctttaaataagtaaaaagtgcaacgaatcttgtagacaatttaataacatatttgtctttaaaccttgaaacttgatatcaaattgattattgaaaaatataatatattgtcaaattagtcctttaatattataacttaatgataaaatgatcttacaaagttaacgacaaaattaattcatcgtactctttccacatttaaagaagtaaattatattttgtcatattctaatctaagaatagcttaattaagatttttatacctgtgatatagaccggtttcagattattaccttacat

SEQ ID NO: 133060 - DNA, 386 bp, Glycine max
gaaatgaattctcatgtattataaaaaaaaacttgagatagttgtgtaaaacctcttgtttatttactaaaactcacctttattgtagaaatatattacattgataaaattcattgaaggactaggatctcatatagtgataatgtcattgcaaagaatccattcctatggaagagacagatgggagagatcgattgctctatctgaagacaacttgatgttcaaataatgagtacatgacccatcatcattcgtggagagggaataaagattaatctcatagtcaatctaaagtaccaaagcttacaagatcggaataccttttagtctcaccaaaaactaaagctaaagaccttggttaggtgattaccataaaaaaaaaaaaa

SEQ ID NO: 133061 - DNA, 352 bp, Glycine max
  unsure (1)..(352): unsure at all n locations
ctacagtcctgagggaccttcaccaaaacaagtcagaatacgaggcccacttgataaggattggtgcagatagcctcaatgcctttttagaaacacctgtggtgcttgctgagggtgaatctctactcgcttactcaagatactgctggatgcctactgacatcaaagaaattgaggttgctctgtgcatacccggctaagggttcattctaaatgctgaaggtcacttggggaagatcctcagaaaagatctaaccacccttgctcangtttggagtgttctattctactccaacctggctccgacctcccacacatcggatctgactgtggatcgagctangttaatctt

SEQ ID NO: 133062 - DNA, 329 bp, Glycine max
agagaattatgacccttgcatgaaaggaaaatgagtggtaagtctttgaattctatgaaatgaagctcgccttaatttgatctcttattggtagggagatagcttcattataagctcaaggccatagtctgataactctcagtcttaaaaattcatactttcttcaagtgcctccaagatgatctcctctatctcaaaagtctctccagacttggtggatcccaagggagaacaacattgaaggcacatatgagacccatcaactgttgaagatccaagggagtagagaacaaaattttagcagactcgacctctctatatttctagac

SEQ ID NO: 133063 - DNA, 381 bp, Glycine max
  unsure (1)..(381): unsure at all n locations
tgatcatgtattccaaaatatagggggagaaaactgatgcacattttatctatatacaattgtttgttgcttgcttgaatcttgatttcaggtattgtattgtcatcatcaaaaagggggagattgtagatgcaattggctttgatgttttgatgatgatcatgatgatgtgttgcaattgatgcaaatgggcttttcaagattaaaattcaagacaatacttcaagattacaaggcacaacatcaagatgatcactagaatattaggaagggaattcctaattgaattagcaaaggtttggccaagtgatttaaaataaaaagtgtttttcaaaggttntactctctggtaatcgattaccagaggatgtaatcgattac

SEQ ID NO: 133064 - DNA, 349 bp, Glycine max
  unsure (1)..(349): unsure at all n locations
tctttccaaaatgtcgtggtactttatggattacacggtgatgggtgtaagcctctcaaagtgatcaaccaaggtccacatgccgacaacaatngtcccttggatgaaatagggtatgacaccataacataaggataaaagagaaaagggcacataaataaagcacaagttaagaataaaaagcacactgaccaaatggcttaaatctctaacaactccctagtggagtcgccatctgtcgtaacctaccttatgacgggacgctaaaagaaaataaaagaaagcactttcgtctcctagggagaaaacgagtgggagtcgtcaccaatgtttattcgagggaaacatt

SEQ ID NO: 133065 - DNA, 374 bp, Glycine max
  unsure (1)..(374): unsure at all n locations
gaccaattacgagctgcaccgcttcattcatgaattgttttcttcacccttgtgagacatccgcagttgcattcaatactacacgacttcaagtcaagttggtttttgctcaccttttcacgaagaaagtgaaaatcntggcctctatgtggtttgatcttctgtgcgctactggattcatggcccaagctgatagtgggtttgttgccacatacaattcaactaacctctgaatttctatcttcaattcttcaagtacagagtctagccatagggcgtggcatgcaacatagcatgctgcaatgtactcagcctcccaagaagaatatgccactacagggtggttctttgtacacccgctttgaatgaaacat

SEQ ID NO: 133066 - DNA, 303 bp, Glycine max
gagacaagtccaaataagtgatgcatgctgccccttttttataaatgaggaggaggacgcatcccacttaattttcgattgcaccaaaacacaacctctatggagggaatccctatcgtggattaaaaccctaagggcatatcctgttaaaccaagacaacatttcttgtggcacacaaacaggaggcctggaaagaaaaactataacaaatggaaatgctggtgggtagactcaacctggaccacttggcggcctagaaacataatcatatcttcatacgaatcattcaatggaagcaagac

SEQ ID NO: 133067 - DNA, 453 bp, Glycine max
  unsure (1)..(453): unsure at all n locations
tagcatctattaatactattatacaaatgtcatccataaagcgccagaggaagttttcgttattctctgcaactnttaacaacgcaggggaatgcatatatcaaagttatccaagttacatacataatatggttcactttgtcttgtaaatgaggtatttgaaacacgtaatgatggttaacattgtttcttaagtggttatgttaatagttaacctaaccatgtccttctgcttgagcttgagtatttgagaaggaaaagaaaaatgcattaaccatatgttagaatcattggaacatttttcaagagactattttcgacgatcattcttttgattattgtttacatagttggaggattcatactttatcggaaaatatgatttccaccaaactgcaagtattagagcacaatatcgaaggtcgaaagtataggtgttgatttaatataaca

SEQ ID NO: 133068 - DNA, 378 bp, Glycine max
aactccgctatattcaaccttccatttctggcacgcggagtgagtcttcctccatggtgcaatactaaagatatattgtcattcgttttaacaatcggaaaccacaacatatgtatatattaggaaataaaaagcctaccgcaaacgtaaacataggcacatcacacaacaacatgcgttgtcatctataaaaacaaagcattatagacgaaaataatagaggatcataaacctccctacgaagcgcgaagacaatgcatatgataccccttgaacataataaacctcctctcaaaccaccaaaacaatgcatacataatgaaccgcaaataaccaccaacctgacaaataacgcgaaccctcacaatcacgagaatg

SEQ ID NO: 133069 - DNA, 221 bp, Glycine max
tctgcggctcctacgaatactctacccgaggacttgttacgcagccctcctacctagggagatggcgctatgattgcttcgctagtgctttatacagtcaacctccttccagacttgtccatgcgcttagccatcagattgggcgcttagcgaatgatgcgcttagccagaagataaatggcttaatgaagttcatgaaaatcttgcacttcacccgatct

SEQ ID NO: 133070 - DNA, 415 bp, Glycine max
  unsure (1)..(415): unsure at all n locations
tctngttactccatgttgagttntcatatctatagagttttcatagcactactaatntngtctcgtttgaagtttgttatgggtttaacccactaactcctcttgatcttttggctatgcccaaatattctgtttttaagcataaagaaggtcaagcaaaagcggactatgtgaagaagcttcatgagagagtcaaagatcaaattgagaggagaaaataaagctatgctaaacaagccaacatagggagaaagaaggttgtctttgaacccgaagaatgtngttgggtgcacatgagaaaagaaagattttcagaacaaaggatatcaaagcctcaaccaaggtgagatgaaatcattcatgtgcttgaaagaaatcaatgacatgctctacaagntgagctacccggtgagta

SEQ ID NO: 133071 - DNA, 370 bp, Glycine max
gatgcctataaagcctatctcgtggtcaggtaaattctcatccgattacatctgggaaattatcattcatattctagctactcctatggcttcaattggtggtggccaacaaccaaataaagaagagaagctacttctatcccttcataaagagaggagttggtcatcaccttatgtttatctatttcaagaattctggtgcctatcaactgttattcttgttaccagccttccaaagtcaggtactacctgtgtgaaatcccttattttcacaattgcaatcaacaatacttctcccccacccattacttacttccaatccccatgaccttgtgacttccctttgatatacattgtttaatgatgatat

SEQ ID NO: 133072 - DNA, 456 bp, Glycine max
  unsure (1)..(456): unsure at all n locations
gatccttgagtcacctgggctgcttcttaaatcatatttgaagaaacttttatctaatgtaataggggagagagtctatacgtgaaaaataggctttatagaaaagatttgatacgttgatgtaaattataagggagaattgtgaactttttttgtactcgtccgtaatatatcagagcacaaagacagagaaatggatccttatcgattagaatcaggatggtttagtttgcagaggaagattgtcctaaagttcaagtcttcaagctgtacgcgcatcaatatccgcgttctacactacactacactaacgtgatgtgctaagaatttttggtgttgttatgacacattcttatcccgtctgccatattagttataaatgtttggcatgattgtgaaactagntaagtctattggttcttttaacataaccaaggtatctataacacatcttat

SEQ ID NO: 133073 - DNA, 258 bp, Glycine max
gtcaacagataacggatattcagatcagaagactcaaaaaatcagatgagagagatgattcacaggagtttgacaaattttaaaaacccgcatagcatagatttgttttacaagaaaagtttttctcaaaattttctagttaccagagttttactctctggtaataagttaccaatttcctgtaattgattactagtggcaaagtttgatttcaaaagcttttaactgaattttcaacgttcccattgatttttaata

SEQ ID NO: 133074 - DNA, 385 bp, Glycine max
aagataataacttgttataacttttagaacacttatttattgaaaaatatatgtacggggagatattcactttaaagaaaataggttgtaataaagacatgtgagatcgatcaatgacttactaagaagagaatttaccgcaattattcagatcaatacttagcataaaataagtgaccaatacatgctaataaaacacttattaatccattgataagagaaatatacgctcttggtttatactggctcactcaacctgagctatatctagatctcttttactcaatagtaaaggatctctctacatgagaattgattaccaaacaaggcttctgacttgcacttctagctcaataagattcttaatcgactacagcatagctta

SEQ ID NO: 133075 - DNA, 497 bp, Glycine max
  unsure (1)..(497): unsure at all n locations
tctcgacccgggatcttaagtgacccgtggatgccgctaatgtcgcanactcaggcaccncatatccagttcattagtagtagtttgctttggcagagaatgtttcacacaaattagttaaatggaattgattgaacctacgtggagcattagacatgtttgaccaaattaattaacatgtggttttttttaaaattatgaaacagcttcaccatccatcagcattagacatgtttgacaaaattattgatgcgccaaaaggaaaacaatntgtcatgtttctggactatgatggcacgctgtctcctatagtcgacgaccctgaccgtgctttcatgtgtgattcggttagtttcattacttactgatgtttttgaatatgaccgcgctctcatgtcttatatactaaatctatacgtaaaaatttgttgtgtgtatcagatgagaaaaacaatgaggaaacttcctatgtgtttccctactgctatagtgaccgg

SEQ ID NO: 133076 - DNA, 328 bp, Glycine max
gagagaaagaagtgcagccaaacccgaataaacgaagtccaaatcggagccacgcgactaacgaacacgaaaatgccctcctttcgcgattcgtggcagacatgatggacaaaggatgaaggcaagcaaggagcttcaacggggaatgaagaagaagaaaataatgggaacgtgagggagagagagagctgtctgaaaaagagtggggctgagagaagagagagaaaagcacacggggactaaataagaggagaagcacgcaacctactattatagaaaagcaagggcacatgtctgcattcgagaggagcaaacaggggccacttac

SEQ ID NO: 133077 - DNA, 248 bp, Glycine max
ttccaataaaagagaaagcaaaaaaaaaaaagagaatgaaaatttccaatcaaaggaaaaaaagagaggaaaggaaattcccatcaaagagtgggagaagaaaaagagagaaagaattccatcaagagggaaagcaaaatagaaaaatcccccaaagggaaagaagaaaaaactcgacagcaaaaaaaaagctaagttgcgcaatgcaacatgccagaaaaagaagaccacgaggttctataacaacg

SEQ ID NO: 133078 - DNA, 348 bp, Glycine max
  unsure (1)..(348): unsure at all n locations
tttaagacttgttcttccccgttgtgtttctgaaacttctgttcatgcacaatcagtgagctctgcaactcatctattgataacacatcaatatccttagattcttcgattgagcaaactatgtaattaaatctcagtcaaagatctaaggatcttctccacaacggttacatctcgtatctgctccccataagccctcattttattngccacagacatgaccctagcanagtactcagtgacattctcacctggtttcatctcgagggtctcaaaatcctttctcanggattgaagaactgaacgcttcactcttgcattcccctcatatttccttttcatggaatc

SEQ ID NO: 133079 - DNA, 380 bp, Glycine max
  unsure (1)..(380): unsure at all n locations
atgtggctcaccttttggtaatattatgagccaacttctcataagatgtagccagttgtgaataagatacatacctgtgcaacatatgttgtgtgttgagcctangtgaggaggggattggcttaagagtaaacagtgcgtcatggtaaatgtgaaaatctcaaaggttggatgaaagctctgtggggcaggttgaaccacgtagtgcaagtgcgtatggtgtattaacaaagatggttggggataatggttgtcaaatgtatcggtactgttactgggaaaagaagatgtggtctcggttctattattggaatccttttgtacgtagtggagagatctgttgggtgagtggtgaatgttctatgtgatggtcaaaaatg

SEQ ID NO: 133080 - DNA, 318 bp, Glycine max
  unsure (1)..(318): unsure at all n locations
tttaataataaaacactgagtaagccctgaatttctttaagataatcaggaaacagaacgacagtgaatattttttatggcgatgatcgagattcaccataaacgagcggaatggagattcattatactattgattaagtgagactacgacttagatgatcgtgtgaaactcgcttaaacaatgaaaaaacaagtaattctgcatgtagacgagatgaaggtgaaagcatacaacgtcttgacattgatcacctaaggggtgcaattnaatgaattccaagcttggagattataaccttaccggttgaagatcgacga

SEQ ID NO: 133081 - DNA, 334 bp, Glycine max
  unsure (1)..(334): unsure at all n locations
gatgtcttcatatgtgcgtacactgagtatatgttttcgtctctagattcatnggagtattactgtgattctgatgatgaccttctgattaaaatattgctctaatcatcaagtggcatcttatattggtgctcatcttccaatcatgtctagttaaactgcttgataatctttcttgttgttacttctaatacgaataaagagatacttcgcctttgacaatcaccgttaagatgttttgagaggaaatacttgagtagacatgagcactgttacctatagacgaaagtcaaacttagtaagacgtgtccctgtgttccttgaagatatgctt

SEQ ID NO: 133082 - DNA, 405 bp, Glycine max
  unsure (1)..(405): unsure at all n locations
ttcttcaatctctgtatcaatgattccacatatgaagattttagtattgtcgtttgggtttggtaccctttgttggcttcttgctggaggagagggctntgcttgttgctgctagttcttctgttactgggatacgacattgttgagttctgtttgaaccatttcgagtggtagtgattggtttgagaatcaaacttctgaagtgctctgcttggatggattggtttttgaacatatgtgatgaagttcctcattgttattgttggcacgtggattctgtcaatagtgggtagttgtgtggtggtgatggtgcttctgtgaatggaggatnttgtgttggtacagaatctactagacatggatattgcattccatgttgttggaagcaattatcattagaatgac

SEQ ID NO: 133083 - DNA, 357 bp, Glycine max
  unsure (1)..(357): unsure at all n locations
taccactcacaacacttgaacccaaccctacacatcaaatttgaaatcaacaccatcaccaccactaataggaattgtgcatgtaactcacacatgtcaaaccacaccctaaccaaactcaaacctgcatctttatagcttgttcctgggcctctgtccatgggtttgcctaacactagcgacgacactgcactgaagtgtttaaggacctagcagtggcatccgagctagcaatggaagccaatgcgaaaagataaatctgaaggtngcacaatggtttaggttgcgtagtggtttggtgaaggtcatatgcgtaacacgagggtgaataaggtgacatcgatggtagtttgacat

SEQ ID NO: 133084 - DNA, 284 bp, Glycine max
tgatttttctgctcacctcccagagatgagaagcttgagctcacctactcgcgcagtataatagctaagatcccccgcgtgactagagccttgcaaatcatacgtgtgtcctgactacagatcacaactcttgaggcgaccaactacaacgctgataccctatccttctagaatggccactctacaccgtctcgacaaaggagaaacctattctaatatgttcaaagacaagcgggcttatacttgccccaggggctcgagatctacccttaggctcatgaaaa

SEQ ID NO: 133085 - DNA, 441 bp, Glycine max
  unsure (1)..(441): unsure at all n locations
ctctgcgtctcttgtttaaactgcatgtnttgcatagacatanattgcacaagttcttcaagggaaggcggcggaggggcctcaactgtttgttgtttctggggacgttgttgttgttgttgttgctggattggtggaggaatgtatggtctgcttgggccagcaacattatgaaaataacgctgttgttggtgttgctgctgttgtgaacgactctaccatctaaggatgggatgattcctccatccgcgattgtatctattgctggagagggcataatctgttctgctgtggatgatctcgctgttgaggctgaggatgtctatcgctagtgggtgcggcataagcatccagctgctcaaatgctcctgggtgctgcatagaatggaaaacgtacttcccatggtcctcagaagatcataaatcacatactctctccag

SEQ ID NO: 133086 - DNA, 365 bp, Glycine max
tgatcaaatcaacgacaataatttttactcggatgtctgattgagtcccgtaatatatcgagttgctcaaaatggaaattcgaagctctgagcaaattcaaacgacaataacgtttcacttccgtgtctgactgagtcccgtaatatatcgagacgctcgaaattgattatcgaagctctgagcaaattcaaacgacaataattttttactcggatgtctgatttagtcctgtaatatatcgagtttcttcaaatcgaataccgaagctctgagcaaattcaaacgacaataactttttactcggatgtttgactgagtcccgtaatatatcgagatggctcgaatggaatttcgaagctctgag

SEQ ID NO: 133087 - DNA, 329 bp, Glycine max
tgtctcgtggcattcaaggtcccatcccgggataaattggggattttattctgtgattcagtttcagaatagagtcacagctgttacctaccataaacagttttctagttattcaacctcaatagtaaaataataaagtcacacattttgtgacttcaattgcatttaaatgtgtagtggaatattaatattaaaatcgttgacaatgaaaatgatggcaggggttgaatcagcggaagcggatctgaataagtcggaggtaagcgtgaagggggtgttcgatacagcgaagctggcggagcacgtgtcctataggacagggaatcatg

SEQ ID NO: 133088 - DNA, 124 bp, Glycine max
  unsure (1)..(124): unsure at all n locations
tggatgtatgattgaattttgttgatgatatgtgaaatgttgagggtttactgtccgtggattgagaaacatttttgtataaatttttctgtgtcntttgatagggattcaacattgataaaat

SEQ ID NO: 133089 - DNA, 400 bp, Glycine max
atatgataactctatggaccaagccatcatcctttctattaactcaggcttacataacactttaactatggggtagttggtccaaacagtaatcttgtggctttggaaacattattggagatgccggcagcattaacaagtttttaggtcttgtaacactcgaccaacaaaatatactagtcttaactcattggtttcttcttggacgagggattcacttatggctttggtagaaactaagaggttactataagcccattgtcggtgctaggttttgaaagcactggaggggttgtaagtgtaacctttaactgctaaaaggtttcttcacactcatcattccattcaaagttctttgtctttttaagaaagatttgtatcgctttggccttctcaatga

SEQ ID NO: 133090 - DNA, 372 bp, Glycine max
  unsure (1)..(372): unsure at all n locations
ttatcgattaacatggaccattcaaaagcataaaatcaacccataactttactacttttgcaagaactacgtaggtctgagtttctcatcgcaattgaggatacataggagcaaaagccccgcttttgtcgaccaccccaagagatcgttaatggtccaatgccttaacgtttctctcctttcaaaaacaagagattgttaatggtccaacgccttaacgtttctctcctttcaaaaacaagagatcgttaatggtctaacgcgttaacgtttctgtcctttcaaaatcaaaagatcgtttaatggtccaacgccttanatgacctttgttcggttaaaattaatcttgcggaaaaagatcaaaacaactta

SEQ ID NO: 133091 - DNA, 220 bp, Glycine max
  unsure (1)..(220): unsure at all n locations
tcaaggcactggtaatcttttaccaaaacattgtaatcgattacagccttttgaaaatattggaacgttgtaaattcagtttgaaaacattttcaaactcattttgctacaatatggtaatcgattaccagagagtaaaaactcnttggaaaggttttgtcaaaactcatgtgctatcaaagttaaaaactttaaacttatttgatgagcttcttcatct

SEQ ID NO: 133092 - DNA, 357 bp, Glycine max
  unsure (1)..(357): unsure at all n locations
tatcagaaatagagttacttttttttatgaaggatctctaatctgaggaataaaaacctgctgatcaagacttcacaccttgggtgcctcctgaaaaggatctttcttcctcatctcacccttgtctttcaaccacaattccagaaaatccaccacctctgcccagaaatatctcgtggccataactcccatttaacgcactcaaattaagtgattcttgagcctacaatgaatttcaaaacgagacctttcacctcgttttggaatcacctcanttggagccctgtagcttcccgtatttccatttctatanttctgtccagccaccacttaacctacngtttaccatcccattca

SEQ ID NO: 133093 - DNA, 181 bp, Glycine max
ctccctaggttggcaaaaaatgcatgacaagggcttatccttgcacaagcattagaaatatgttcatgaaaaaattaccaccatatacctcatggtatatgtggcctggcacatttgacattcatgttgcctggatttacttttcaaaaagaaactttcatgttaaacattattgataaat

SEQ ID NO: 133094 - DNA, 124 bp, Glycine max
  unsure (1)..(124): unsure at all n locations
ccttgatgtagaattgaaggttgtggactctactgggtacatgtgggtatcagtcttttttaatgatggattntattataattgacgacattattaggacttggcgttcaataaaaaaaaaaaa

SEQ ID NO: 133095 - DNA, 401 bp, Glycine max
ctaatcaacttttgtgtaatcgattaccaagtgtatacaattcaatgtgattccaaaaactagagttaatcaacttggctaatctaatgattaactattaagcatgatgaactagattaaattcctagttctaaaacaaataatacaatgccacattcaaatgatcaaaattaaaaactaagtaacatgttgaatcttcaatcaacaatattgaagatgaatatcaaaagcttaagatggatatggaagaaatgaagacaaaaaattgtaaaattaaggaacatgtattggtggtgatagtagccagtcgatgacagtggtagcattggtggtggtggtgatgatagtggtggagcttgtatcggtggtggtggtagttgtgccactggcggtggcatgac

SEQ ID NO: 133096 - DNA, 303 bp, Glycine max
caggcagacatccttataagcaggtatggtcggtcgcaaaggctccaagctgcaccattcgatatcgagcacctccatgtatgacaggactcaatgctacatccgactacacctgttattgtcgtattaattggctcagaccttcaacattccttttctcgcggctcgatagattgcgggactcagtcagacgtccgagaacatgtaatggacagatgaattggctcacagcttcaacatactagtgccaccgtatctgtgtataaccggactcagtcaaacatccgagaaaagcgatgtagg

SEQ ID NO: 133097 - DNA, 340 bp, Glycine max
  unsure (1)..(340): unsure at all n locations
ctatacacctattgaaacctgaatcacttccctaagaatttggactttgaattgttttggaataagctgtgaataattgtgggggggtatgtttcattggaagatatgatttttggccatgcttaatgttttattttccccatgcttcatgtatatatatattgcctagttcttttctttaatcttcaatttcgtactgttcaatataaaaatatgaaaaatgaaaaaaaattcagaaaatttcaaaaattcagttgctgcaaattttgcaatttcgtactcttcanaaataatatgagcaatagaattgaagttgaataaataaggtcttgatttggga

SEQ ID NO: 133098 - DNA, 405 bp, Glycine max
  unsure (1)..(405): unsure at all n locations
ctaattctctctggggctgttcctggaagattatcataatgtcctttgggcttgtgttccgcccaaggacgaatatgattttattgcacattttccataccctctttaaggtgcttcctattgtccataatgaaattaaccagaaagagggaagggatcaataaatcgacagtgctgttatgaatcaagacagtgtttaaaaaggttntggagacatatcacagatggatgttttcaaatctactattttcagcattgtagatgagcaaacacgttaatgggcgaaacaaaatgtcatgtattcttattttggtaagaaagtgaatgtatattttaaggtctgtattctgtattcaagctcaatgcttctctttcaattatgcaagtatatattgtaccaaacat

SEQ ID NO: 133099 - DNA, 391 bp, Glycine max
gcatgtgtaacacttgtcataactttgatgaatgtgtaacttgtgagacacactttcagttcaacttctctccctctttttctccttcaatttcgggccccccccccccctctcactctctcattctcttcctccattgaagcttcctctctaagctttttatccaagacactctcttggtgggaaagctcttccttccatggcttattccctagtcgattgcgccgcctctcacctcttctcctttatcttccactgcaacttcatggttgaaaatcaccattgaaggacctcattgaagctcaaagatccagcctccataaaagcttctaaaaaaagcttccattataaccaaaaatcaacaaaaaaacattattcaagagtagatcta

SEQ ID NO: 133100 - DNA, 297 bp, Glycine max
  unsure (1)..(297): unsure at all n locations
accttgataagtctgagattgggtcaacaaggaacccagagagaagctctcacaaaattttatcaaatgccaaaagttcctctattgaaaatgaaaaccaatacatatagtgtgtctgaacaaaaagatagaaataaacatgggccttctaaacagtttgggccaacattacaactaanaaattataaataaaaaagaacatatttggcatgggccttcaaattagtttgggcattcagcaacaattaatagtctgggaatgcctctgcctctgggccttcatccttctccacttga

SEQ ID NO: 133101 - DNA, 457 bp, Glycine max
  unsure (1)..(457): unsure at all n locations
tttggaaaagttcgatggtcttcagacttagcccgtcgacatgcggnttgatgccatggaatcaaggatcaccaaagttgaagaagatgtctccttcatccgtacttgctntgatccaccaccaccgcctccatcatcctcttagcttatatgttattattaagactaagtattattagtggttaagtattattagtactttgttttattgccgcgtatttggctttttgttgctctagttatcataatcttgcactataattatatttctagactttgctntggttgattatgacaatgtatggatttattttggtttaatggttggttttgtttggatatttattgtgttactgtttggatattgattgccttgctctagttctttttgatgttgccaaagggggagagaacttatgcaagaacatggttagaaatcaattataaatttatcgtt

SEQ ID NO: 133102 - DNA, 451 bp, Glycine max
actatgagacacgcgcgggcttctcactctcttgcctcaactgcgagctttgtccaccgctctttcttcccgcgatgcttctttatatatccgcctgagtaggcttatagcctaaaccatactttccacgatttcctttggcatttatcaagctagttatgccgccgttgtctttgcctaaacccattccgggttcataaccgttccccaacataactcgggccatcattactgctgcatcggacaggcaaggctgcccagaaaaggaattcacggaggaaatgcttaccacctccaaagactggaaagcggtttctaatgactcctctgcggcctccacataaggcatagaggatgggcagctcaccaagatgtcttcctcgcctgacacgatgaccaaatgcccctccactacgaatttctaactttggtggagtgtagagggaacaac

SEQ ID NO: 133103 - DNA, 360 bp, Glycine max
  unsure (1)..(360): unsure at all n locations
ttcttatctggtcatctacacacctcagaagcataactgccatcttttagtctctgtgaatgatatcatcatcacaagcaaatctatctctcttattcaacagctaacttccaaactaaacactgccttctctcttaagcagctaggtcaattggattatnttttgggactagagatcaaataccttgctaataattctatactanggactcaaagcaaatatatttgtgatttacttcacaaactcaaatggctgaagcacattctatttcctctcccatggtttctaactgtaaactatccagacatggtgctgatttgtttcaagacccaactctctacagatcagtagtgcgtgct

SEQ ID NO: 133104 - DNA, 74 bp, Glycine max
ctgagcgggagaaaggatactgcgaaattgtaaaagaaaaaaggtagaaggatagaaagaggagagtaggaaaa

SEQ ID NO: 133105 - DNA, 310 bp, Glycine max
  unsure (1)..(310): unsure at all n locations
tatggtaccaacttatgacccaatgagtatggaatgtttgacattcaagatagactcaacaatttgtttctttgtagagagtagatgaatctgatgccacaagagaaggaaaggagacacaagtttgcattgatttanaatacaaaaatatcatcatcattcattgcaaacatagttgcanaggatttgtgccatngttgtacatttattccactgtatgtctcaacacaaaatcccaactgtgtaaggattcctctttaattgtntccatgtttaagattggtaaattccaagaacgataatcatcatg

SEQ ID NO: 133106 - DNA, 294 bp, Glycine max
agtgcattcatagtgacaccatagtcgtggagggaaactgcagtgttgtgattcaacgtatcctttcaccaaaacataaggatccaggaagcgcactatccttgtatgtagtcaaagttcagtagtcaaggcttttattgactcgggagctaacattaatttgatgccgctttccatgtgtcgaaaacttggggagtgggagataatgcctactaagatgactttacagttagcagatcgctctatcaccagaccctatggagtgattgatgatgttctggttcacgtccaaca

SEQ ID NO: 133107 - DNA, 404 bp, Glycine max
  unsure (1)..(404): unsure at all n locations
ctgcagatatatcctcccaaacggcaaattcttctgctatatattcaacctttccatcactggcacgtggagtgaatcttcctccatggtgcaatactaaagttatattgtcattcattctacacaattagaaaccgcaaacatggtcagatattatgaaataaaaaaacctaccttaaaaagcgcgaaaacattgacattgtcaaaaaccgcgaagacacaatcaaaaaccaaaaacattgtcatctataaaaacagagcatcataaacgaaaataataaacgatcataaacctccctacgaagcgcgaagacaatgccgcaaatgaaaaccctcgaacatgtaaaaccccatattaaaccaccaacacaatgcanacgaattgaatgaaaccaccaacctga

SEQ ID NO: 133108 - DNA, 353 bp, Glycine max
  unsure (1)..(353): unsure at all n locations
tcaatggggcaaaacacaccaaatgattataatgatggatggctcaaantctcacaaaaggtaaaatcatcactttcaaattaagctttcaaaactatcatgacatgtagagaagaatcaaggatttcaagtcacaaaatgtcaagaacttttattttcaaaacaattacccatttcttgaacatatcctataattcaaagaaaaacatgcaaagtcgtacgtgcacacgaaattgacccaaaatattaaactgaaaatccaacgaaactaacaacattaacaaattaacacaactaacaaattaacaaaaccaacanaactagcataaccaaagaacactccccccccccct

SEQ ID NO: 133109 - DNA, 318 bp, Glycine max
ttaatgccatctaggtgagtaaggtacactggcccaaacatttgaaagacataacgaccttcagaagggttatctacaaagccttgcaaaaggtgggcatgattccccacggcgggcgcagaatagaatcttgcttaatgcatctgggtgaactgcatgacatggaaacatgtttggcggtaagagatctattacaattgatgatataccaaggccggcttgaggtctgcagtgaaggggaggaggaacaacatgtatacatgcagtctgtagatgaaaaatgtcctataaagcctaaacttttggtaatagacttca

SEQ ID NO: 133110 - DNA, 442 bp, Glycine max
attgaatcatacacattagtttctgctggttatcgattacagatattgttttatcgattacacaatgtaaaatgtgaattaaaatgtttattaactgctggtaatcgattaccaatattgtgaaatcgattacacagtgtaaaatttgaattcaaatttctaatagttgttgtaaaccattttggccactggattacatcctctgtgatcgattaccagagagtaaatctctcgaaaaatactttttaacttaaatttcttggccaaaccttttgctatttcaattaggaattcccttcctaaaatactagagatcttcttgatgtcttgtattcttggatcgttgtcttgaattaaacttgagaagcgcattttcatcaaatcatcacgatcatatggcgtcatcaaaacatcaaagacaaggtctgttgctttacaatct

SEQ ID NO: 133111 - DNA, 418 bp, Glycine max
  unsure (1)..(418): unsure at all n locations
tgggctgctgaataccccaaagtttcatggtctcctccgcagcggattcctccccaccaaccaccaaccgaacctcaccaccgtaagaacccaacttcaccattggcgccactgcttcctcttcctcttcgttgttgttggccatggtgtcctcgctctctctgtttcggattgaattgggttttaatttgtggcctttttaggtatgggcgttgaaaggaggagggcttttgcttcctgcaccccataaaaaagtgaaaaatcatgtaccccatcgaaagtaggccaaccgagctccaaggcacctcatgcatcccctctgtcagagataaaggcaagttttgggaaacgtcagctntgctttgcagagctttctatgttgcttgccatttgtntatatagtatgtattatctgttc

SEQ ID NO: 133112 - DNA, 209 bp, Glycine max
gaacctttggtctaaaccaaccgaacgcttggctactgaattacggggatttattaaaatacgtatgcccttggaaccattccgcagagtattctgaacaatttaggaaggcgtgaattaatagtgagtgatctaacacacgcacctgaatatgcagacagtcacgaacactgtgttaaagacattcctaccataatctcttattctta

SEQ ID NO: 133113 - DNA, 331 bp, Glycine max
  unsure (1)..(331): unsure at all n locations
ttccaactcatcaaagtgaatatgatgaacttaccctggtaataatggaataattttcacgctgtcaattaattacttaattagaaatcagtatcgacgcaacttttatttccttttagtagcatgcttctcatattgtaagataattattttaaaacttaataataaatttattataaatattagttgtcactgaatgaaaatataaaaatatttatactgctaatgcatctatttntttttcgtaatattataaagcacatatgagtatgacaaatgcaatagataattacttccaaatcaccatgggctacaattaagtgaattaatt

SEQ ID NO: 133114 - DNA, 388 bp, Glycine max
gatgagtttcttctgagtagtagagattatctctgtcatattagtgagagtgattctcctaacttcttgagagaattcaagaacaccctggctgcaataacagactctcgaaaacgttgtgcgcagaccttactggaaagagagaatctttccttcctttcatcttcaccctagttcttgctaaccacagtgtcagaccattcacctctgcccagaactatctagtggccataactctgatttgacgcactcagattaagtgattcttgagcctagattgactttcaaaacgagacctttcaccgcgctttggaagtacctcatacggagccctgaagcttcagctattgccatgtctatattgatgggcagccaccacttatcctac

SEQ ID NO: 133115 - DNA, 407 bp, Glycine max
  unsure (1)..(407): unsure at all n locations
gattaattatntgaattcctcattcctcagcatgagatcctgttagaacaatggtgccactagtcaacagagttcagtgaacctcggtttagagagagagtaacagagaaaagagtgagaaaatggtttaaaactgaaatgatgcattgagtcattaattttattggttccatagtcttgtatagtgaactttagcttgcgcttcaataaccagccgatcactttgaaatttagcctaactgaataccacgctgagtctgactcagctaactacaggttagtgacagctgtataactgctggacgataaaattacagttacagttactcttgctgataaaaaaaaaattacagttactctagtactagcnaatatgatagctgcnaaacagacaaagaatttcaaag

SEQ ID NO: 133116 - DNA, 282 bp, Glycine max
  unsure (1)..(282): unsure at all n locations
aacttagtggaatactaacttaaaaaaacttattaaatttcatattagtaatgtacaaattccaaaataattggttaataaaataatattggattcaagttattaaaacacaaagtatatcaaaagaaaaggaaaaaaaacataatttaaaatatacatggttagagatatttatctatataatcaataaatattaatgctgnatatttcaaaatcttnttagaataattgtgatatctcactgatcttcttgnacttaatcaggactttatatatgatcat

SEQ ID NO: 133117 - DNA, 233 bp, Glycine max
  unsure (1)..(233): unsure at all n locations
atccttagagcgacctgcggctgcagcttatgcgatgctgtaggagaaatctggttcatattctctcagattaacttcagaatcatgcattttttntttgggaattcactccttacctggaaatctaagaagcaacacaggtactagattcttagacaggtagagtaccgagtccttggcttcgctactagcgaaattatttggtctataaacctttctttaagaccctgtcg

SEQ ID NO: 133118 - DNA, 338 bp, Glycine max
tccgcagtggatttcttcccaacaaccaccaaccgaaccttaccaccgtaagaacccaacttcaccattggcgccactgcttactcttcctttcgatgtgtggaacaagagatcaaaaaaatctatcgaacatttttttggaagttcctcgaacgaatgctaaaaccaagtgaaactaggcttaattcactacaataagcttgtcgcaaaaatcactaaaccgtttaggcccatgcttaacaactcttctttatgggtacaggaccgtcaaacataaacacactccttctgctttgcaaactcgagtcgtacctttctgggaatctggaccaatcctt

SEQ ID NO: 133119 - DNA, 260 bp, Glycine max
gaagaggaagaagaagaaaatgaagattgggatgagataagtgctccaaggccttacctttctgaagcatgggaggttcaggaatatgataggagaaaaaaagagaactctttggtgaattggaaaatgcctgctatcaacaatgaaactgacatgaaagaaagtcttagatggtgggctcatactgttgcttccactgtcagatgatgatgcaccttgtcataatccaaaaatcttccttctttttctttcgctccata

SEQ ID NO: 133120 - DNA, 324 bp, Glycine max
cctttgagggcattaagtgcatatggtaatgaatgaatggtgatgaagaagagatcaaaccaacctacataattacagcctgaaacatgggacatggtgatcccaggcatttgcagtgcaaggaaaattgaataaagtgtctcttgtgtgggtctttttcatggtcatgcaccattaagcatcttaataggctctataaaactaataagatgtggttgaatagaatcatttataagtattgagtgatcatactctgtgtgagagagatgaaacaccttacaaggaatgggttggtaacttgtaaaatggaatgagttataacat

SEQ ID NO: 133121 - DNA, 143 bp, Glycine max
agctttctcgatatatttatgcaccctgaaacatttctttctcgttttataagagtaagaacacattgaattctctggagaagcttccggtgggcgcaatttggagcgtctcgaatatatatgccgcctgaattgaaccttcc

SEQ ID NO: 133122 - DNA, 365 bp, Glycine max
  unsure (1)..(365): unsure at all n locations
agctagtgacatttgtgactngatcttaagtgattatgtttacaagagagattcaggagaatcttctagtcatgtttccaaatcagcattgaataccaaaggcagaggaaggactacccaaaaaggttagaatggtcgaggtagatcaaagtcaagaggaaaaggtcagacaaaattttgaagtgacattatctgctagaattgtgacaagagaggtcactttaccaattagtgcaaggcaccaaagaagaacaagactcacaaaaacaagaagcgcgatgatgatgaatccccaaatgcacgaaatgatgaatttgatgatgaatctgcaactcaaatagtcctgctgattcatggattatgga

SEQ ID NO: 133123 - DNA, 301 bp, Glycine max
  unsure (1)..(301): unsure at all n locations
actttctgcttttattttttttcagagtggnacctggagatgggggcgtgggtcttgagacctcggggacatcacgtggggtgctattgcccaaaaccaagcttgaccaatcccgacccaacctgggcatattctgtcagtgagaacctgtgatgtacttaagcaggcgagctcctagcagtcaacagttaaaaggtatacatgactaccatgcaatgaggcttgttgtggctgtcccattttgaattttgtgttatatgtggttgtttgcctctgtcatatattgtcatggtggtttttt

SEQ ID NO: 133124 - DNA, 152 bp, Glycine max
tattcttaatcctaggttccctctcattccaaagcaacttctacccaagaaggatctatagctacctctcttctagacgaagcatactctatatcatcatctcactaaaatgcctactaagacgcctagcaccaaaggcgatccccatcgac

SEQ ID NO: 133125 - DNA, 412 bp, Glycine max
  unsure (1)..(412): unsure at all n locations
acatagaaactcagctaggtgtgacgtgatcgtcatgctcataacaattgttataatgagcaactatgtcaataccaaacttcataacccacatctaataattgtacaactacaccaccatatgcagaaaggcttggctagcaaaacaatgggcgatcgaacaggcgaatgacaactnggagcatatctatgaggaattatcccgattgctcttagctcttcgaacatttgtgtttggaaccatttgtgagcaattgttgaagccaacttatgatgaacaacgacaactacttactggttattcaacgtaccatcacctattttggacatgtaatgtacttgtcgatgtgattgcttactgcttaccaatagtataggtcattggtactctccttacgagatgttgaactaa

SEQ ID NO: 133126 - DNA, 369 bp, Glycine max
  unsure (1)..(369): unsure at all n locations
agcttaatagagatatgggtaacgagaattcattctgtttgtttgaagcctatgataagggaggagaaataaattgctagactgatgtttcgcttgtcaatgttggatagtgataccatcccacatgatcccacttttacaagtatgcatatacatcgtatgtatatgtgtatatatatatatatatgaaaagtggnttaacttgacaaaacatcttcaaactattacatgctacagggagaggtggagtcattatcggtaaagcaatgtttttgactacccctgctcctccaagattttatgttgaaggagaggaaatattttctggaaaacttgtaatgtttccattcttcaccaacgtgctccgca

SEQ ID NO: 133127 - DNA, 250 bp, Glycine max
  unsure (1)..(250): unsure at all n locations
aatcattttcccctgccattcattgatcaaatgcttgaagcgctggcaggtaagtctcattactattttcttgatgggttttctggttatttacaaattcatattgctcctgaggatcaagaaaagaccacattcacctgtccctttggcactnttgcctataggaggatgccctttggcctatgcaacgcccttggtaccttccagtggtgtatacttnagcatttcagtgactctttagagagtcgat

SEQ ID NO: 133128 - DNA, 376 bp, Glycine max
agcttcatccgcagatccctcatttaagacttcttcaatttagatcaccctcttagggttagactaacttaaactgagtttcgtccgcagatccctcatgtaagactagactcagctcaagtagcttactaaagtttagcctaatttagcctaagcttcgtccgtggatccctcatgtaagactaggcctaaactaaacagcattattgtaacagcataattaaaaccaaaacttaacccgcagatccctcatgtaaggctaaaagcatacaaacgttaagcattgaaggaagcattgaacacagaaaacataatcaattagatattaggtatttacatcagctattcattagaaatccccaactagggtgtttat

SEQ ID NO: 133129 - DNA, 196 bp, Glycine max
ttttttcgcctgcctgaaaaaaagtctgcttcttcctgccacgccaaactaaaactgcggcaaaatacttcacctcccctgcataaaaaggtccaccccaaataaaaaattagggcgcattataaccatcatctttaaaaccactctagtgtaactacccatgccaacattcttttttatatcaaagagaatactt

SEQ ID NO: 133130 - DNA, 397 bp, Glycine max
  unsure (1)..(397): unsure at all n locations
atgtntctatcatttatacgaatgaatgaacttgtttatttatctctatccagcngcaacccgagactctngcatcacacttggttcccatcattctacgaactctgtccacatcactccaatgtctatgggaagcataaatgtttgacatgactgcatagtntacattcttctctggctctatggtgaagagcttctctgcggtccaattagccagtcctatatttgcatggagattgcaagatgcaacaaacgctactaatgtatgtgattcagcttccattggcattgacctcaagaattcaaaagcctcatttatataaccgtatcgttcaataaggtcacaacgccggtattgtgaccttaatcacgatctatctcattcacactgtgcatt

SEQ ID NO: 133131 - DNA, 354 bp, Glycine max
caaccctcttaggctgagactaacttaaactgagtttcggccgcagatccctcatgtaagactaaactcaggtcaagtagcttactaaagtttaccctaatttaacctaagcttcggccgtggatccctcatgtaagactaggcctaaactaaacagcattattgtaacagcataattaaaaccaaaacttaacccgcagatccctcatgtaaggctaaaagcatacaaacgttaagcattgaaggaagcattgaacacagaaaacataatcaattagatattagggatttacatcagctattcattagaaatccccaactacggtgtttatgtcggatcgagtgcgctcaaat

SEQ ID NO: 133132 - DNA, 177 bp, Glycine max
tttctttggtgagaagcccattgcccaccctaagcgaaaaaccatggattcaacttacccgtgggaattttgagcttcggaatgtttggaataaactgggaataagtgtggggggaggtgaaacattgtaagatctcattctcggacatgcttagtgtttatacggcgcacgcctca

SEQ ID NO: 133133 - DNA, 248 bp, Glycine max
ctattcagacgttaataatgaagcaataacaagttttaatgaatagaagaacaattagaaaggcgtaaaatcagaagccacactattactagtccattttattctattatagactatagccaatatcacatttgttatataaccttttcttttctttggtggtcaatttcttatgaattcaattaaaacgcatgaataactcctaggagtcaatccttttcctgaaacatttatgacatattatgata

SEQ ID NO: 133134 - DNA, 355 bp, Glycine max
  unsure (1)..(355): unsure at all n locations
ttccatggtcttagggacaaaaaaatgctttcatgtgattaaactgatagtggttaatctggaatcagaggtgcatctggaaagtccagggaacatgtgctaaagtcaccattggtcaggttctttttcttgtgtggtgaaggagaacaacaaccattatgcacaaaaggatctttgtcgtgctaagtttaagttccctagtcatcaaaagatcataagtagctggtgtcagaccctaatttcatttggggacaatcatttgcaaacatttggattcttgctagccgaattgagctgcttaacactacttgtctcgatatctgaaaggttntttgacatttccgaaagaatgtgg

SEQ ID NO: 133135 - DNA, 382 bp, Glycine max
  unsure (1)..(382): unsure at all n locations
atccttatatgccgaacccagaaactctttattcttcctctctagcaactgccaaacattagtcaaagcaacactttccctaatcacacagcatacaaggttttaaaaaaaaaatcactaacctttcatttcatgactaaaactaatacagacatacttcaatcaatcatcaattcacataattgaagaaataaagcacacaaactaatacacacatacttcaatcactcataaaaaatnagtaactaccacacgtttgataaaaaaacacagacacacatgtctttgtaagttacataccggttgggtatccaagcgggtgggtcgggaccgtaatccttgttgcaaccatagtacagcatctgattaaaggagaaaggaa

SEQ ID NO: 133136 - DNA, 393 bp, Glycine max
  unsure (1)..(393): unsure at all n locations
agcttttgtccacaagaaaatttcttgttatctgttcacaggtcacacgccttanatggtctttntactttatcgggtaaaacgaaccgcttaaaagtctaaaatcaacactccgcatcactttcttgctttttaaagaactacgtaggactgagttcctcatcgcaattgaggatacataagagtgagagccccgctcttgtcgatcccaaaaagataaaaagcataaaaaagggaaaaataaaataaatttgaagtcatgattttgcacatttgattaaaggatgtcgtcccttgtgacggacgtgtggggtgctaataccttccccatgcgtaaacaactcccgaacctttatttcttaaaaactcgagactcacttttagttnttctga

SEQ ID NO: 133137 - DNA, 87 bp, Glycine max
cgacagcccgacgggccccacaggaagaaattaagaacatatttggggattgtcgcgcatgatagggggacgtcacgtacgagaact

SEQ ID NO: 133138 - DNA, 480 bp, Glycine max
  unsure (1)..(480): unsure at all n locations
ctaagcttacatcattgcttaaagtagtgcatggtatgcttaaattattttctttgtctaanagttactatgaggcgaagaagatactgtgtttgatgggtatgaagtaatagaaaatccatgcatgccttaatgatttcatactatacagagatgagtttgaagaaatgcataaatgccccaagtgtggggtatcacggtacaaagttaaggttgacgagtgtagtaatgatgaaagcacaaagaaagacccccaaaaaaggtgttatggtatcttcctattatttcaaggtttaagcgactgtntgctaatggagatgacacataagaccgtacgtggcatgcagataggagaaactatgatggaatgctcttncattcgatngattcttccttatggaagaaaaataatcattcgtatccagaatttggaaagaggcaagaacatataggcttggagttgccattgatggaatgaat

SEQ ID NO: 133139 - DNA, 210 bp, Glycine max
tgcttggaaataatattggcttccattcatattcttatgatagatagtcatgacggcttagttcgagagtagacatagatcactccttcactaccagcttgataagtgaaacctagcagagagtaactgacctcatgcattgtctaaatcaatgccatgctatgtcatcctgtgataaccataaccaactactctgctgtgtcaatctga

SEQ ID NO: 133140 - DNA, 362 bp, Glycine max
tatttgggcgtagttctttgaaagatccatcccccctttttgcacatgttctgtagatgcatcctatctcaaaccatattaaaattgtactgatactgcctaacgaaggcaaacattatgtcctttcaagagtggacatcggaaagttccaagatagtgtaccaggtaacagctaccccattaaaactttcttggaaagaatgtatcagcaattcctcaatctttgcgtatttccccatcttctgacaatcaatcttagatggttctggaacaagtagtcacttgacttgtcaagtcaacaccttgacttggagggggataaataggtctatgacatctcccccccccccacgccccccccc

SEQ ID NO: 133141 - DNA, 462 bp, Glycine max
  unsure (1)..(462): unsure at all n locations
caagccaaaatcgacctctatagtttacataccatgtccttattactactaataaagaaaccttcacgttggtgcacgtatattatctcactcaaatcaccattcagaanagctatcttcacatccatttggtgcaactccaaatcgaagtgagctacgagggccataatgattctaaaggaatcatttgttgatacaagtgaaaaagtctctttaaagttaacactctccttctgcataaaacccttttccaccagtctagccttgaatatctcaatgttaccatttaagtccttcttttcttgaagacccattcacaattgattgccttaaaattcttaggtaattcaactagctcccatatgccattaactgacatagattgcatctcttcattcattgcatgcttccacatttctgactaagggcaagaaacaacttcatgatagctctttggatcaa

SEQ ID NO: 133142 - DNA, 454 bp, Glycine max
  unsure (1)..(454): unsure at all n locations
gccttaaaccagctgtctctcccaatgtgttccactaagctattttttngttttagtctttatggcatccttcctctctatagtatgttcaagtatggccttcttcctggattcagccaaatacttcttctttgccttcctcatggggggagaggctggtttgggtgaaggttgggaagtctatggtggaagggctagagaaggtaaaggttgaaaggatggggtattaagaatctcaatcaacatcaaatttaaacatgaagagttgataaagatgaagaatcttagcttattttgatgatgtaattgtattaaggaaccttagtcattattacgatgatcgtttatacttaaaatgctcgattgtgtgtgatatcattcatacatgcatcctaggctaggataagtagctcaatatgttcaaacctaacttacatttcattgatcattgatc

SEQ ID NO: 133143 - DNA, 199 bp, Glycine max
ctatgcttggaacaagctctatggaaggtgacacggagatggacaaaaaaatccgcggtattgcgagtagcagttagagagacacctacgttcctgaggctgaaaatgatgttcctcgtcttgcgacccatatgttgctgtccctgaagctgatgaagatgtcccaacatcttccacccgcaatgttctgtgactggtg

SEQ ID NO: 133144 - DNA, 435 bp, Glycine max
  unsure (1)..(435): unsure at all n locations
cattcttaaagaagctagagcttagctacacatacttctctaatagctaagctcacctccttgagatgagaagctagagcttagctacacaccccctataatagctaagctcacccccatgacaaaaaaaaacatgaaaatacaaaaaaaaagtccttactacaaagactactcaaaatgccccgaaatacaaggctaaaaccctatactattagaagggccaaaatacaaggcccaaacgaagaanaaacctactttaatatttacaaagataagcgggtcatgcttagcccatgggctcgaaatctaccctaaggctcatgagaaccttanggccttcccttggatctctagcccaatctacttggagtcttctacccaatgcccttgtgggataggatngcatcataaaagttcataanacataataaatat

SEQ ID NO: 133145 - DNA, 301 bp, Glycine max
ttatagagaagatcattcttttatctatagccatcttatcatcagaagaaacattaccacaataaggaatataacattgaaagcatcagaactatgaatatgactcgattttgctagcaataagctacgtgtattaatgacgggggaaatgatctttactcataatagctcacacaaaatcgccaacaacaaaggccactgattggcgcttctggtaagcttcgaactcgcaacttttagctgaaatggtcaattatacacatgcaatcttaattctcaacacactttatggatgagcctt

SEQ ID NO: 133146 - DNA, 468 bp, Glycine max
  unsure (1)..(468): unsure at all n locations
ggcacctgctacaactccgggtaatacanaacaattgcttatttttgaggctgntcaattcacattccctatcaattacttatcattgatatttttttaattatcctcaattaattatttttttaaagttagtcctaactcctaagttattgtattcttagttgtctattcgcatataattgaggacaatttagaaaatttcaatttaaccaaggttatgagtaatgtgaattaataattctttgctcaacagtctctgactatcatccttgtttatccttactggagatggtactaatgtctnttttcctgatctcgctactacagcctcttggaaaatggtcatcatgtaataaaggggctcttagattgaaatcctttaaatttctagtgattataatcatctttggattatcaagaaagaaaggtgtgcacctgcgctttatgatgttttgagacaagttattt

SEQ ID NO: 133147 - DNA, 428 bp, Glycine max
atagccaagatggacggaacaacaaatgagcatcccagggccaaggtaaacccaaatttaaactagatgttgacagaatatactatagtttgtgctattgctattatcaataatttgcatttgctctaacacttggtatgttttgaattttcatgaatgttgagtactaaccgagttatgttctccactttgcagtctgatggattccccacccttctcttcttcccagcaggcaacaagagttctgaccctgtgcgtgattattaaatgacagcgcacagtttttctattcagctatcctggattagcatgcactgtatcactagatgatctaatatgtatctgtttcattggatatgcagattcctggtgatgtggatcatacagtgaaagccttttataagttcctcaggaaacatgcatcaatc

SEQ ID NO: 133148 - DNA, 388 bp, Glycine max
  unsure (1)..(388): unsure at all n locations
actcagctgaaaataatatcattgttacatattgcatattatatgaacaacgagtaatctanaaacatgaatagagagttttctaatgtaatcagaagtataagatggaacagcttataagttgggtctgtgaccaaatcatgatggattatataatttgattggggtcaatttgaagaaggcagattggttaattgtgaagcggtacagcagcaggtctatatgtgcattcggattggtcataccatggctgaatggaactacgtaaattgacctctttgaggccttactttctgacagggttcctttggtactttattcgaatcagtcgactgtacaacattgagagtcttctcgtctcatgtattgtcattgttctttgcttaca

SEQ ID NO: 133149 - DNA, 448 bp, Glycine max
actccgcttgtctctctaagtggtgtatcgtgtatcacaccatcttgtcgtcgtgaagcacaccagcagtgtcatcgttgtcgtcgaccattctccatcactattgcgggtcagcttccaggtcatcttcctttctccctttctttcttatacatagtctctgaggtaagagggctttgtggtgcccctctttgaatttggttgtatctgcagtcctgttctttgcgtaaccatatagcttgctgcatttcaaagaaactcgattagggcttgtagtatgatggaactgtgtaaatgcaacgaggcatccgttctgtctacgaaatatttaatctatgctaacatatatgactcttggagaaattgtaaaatactaattctttggacttaacttatgcttatacctgtttgacgaggggactgacaacatcatatatctttgatcctc

SEQ ID NO: 133150 - DNA, 387 bp, Glycine max
  unsure (1)..(387): unsure at all n locations
agctntgagccaaaatcctgactcaccataaatcnntttccagngtgagaatgtcaatccttaccctcggaagccaaaaaaggaagagaaggaaaatttcccagccaaaaaaaggagagaaggaaaatttccaatccaaggaaaaaaagaggaaagaaaattttcaatccaggaaaaaagagaggaaaggaaattcccaatcaaagaatgggagaaagaaaaaaaaaagagagaaggagaagaaggaaagaaagctcctgatcaaggatcgaaagaaaacagaagaaatgtgcaaaagaacaataccgaattgtcaccaaatgaacaaaagaaagaanaggaaatcataacctaaaagtggtcttctccctgtgattaccaatcaaa

SEQ ID NO: 133151 - DNA, 215 bp, Glycine max
aatgaataaacatgaagaataacacaatcaaaagacatagactggtgatactagtaacgcttttcaagaattatgccaaagacaatggacacaagagctacacccaagatgaacttgaaatttatgacaggagaatcatggccagtttgaacatgagtctcggatgaagatgatgtctgaccacttgttacttctgacattttcttgctctttct

SEQ ID NO: 133152 - DNA, 308 bp, Glycine max
  unsure (1)..(308): unsure at all n locations
atggcaatccttaccctcggaagcgaaacctcgtagtgaatgatatttgtcctaaaatggatacgcttaaatgatatactccgccccaacgcaaactaaggaaggtcaagactccaggaaaggcaaacatagatgaaacgccatgtcggtcactatacgggagaaggaactaaagaagagagaacgagaagaacggacgaaagctcctgatcaaggaacgaaagaaaacagcngaaatgtgcaaaagaacaatacggatatgtcaccacatgaacaaaagaaagaaaagggaatcataacctataagt

SEQ ID NO: 133153 - DNA, 382 bp, Glycine max
  unsure (1)..(382): unsure at all n locations
tcataccagctaacagaggtactctcagattgtgagttgaccccagtaaatccgaccaacaaatcagaatgttctggtatttctccatacaagtggttcaatatgaagagagcagtatcataatcccgtctatagtctctgttaagcaaataaaaagattaaacacggcagtcataaacataaaacgtgatatcaatggcaattcagccagaaatcactcattatggtagtaaaaatagtcagaaccaaagctgcaaacaaattccctcatcaaatattatactggttagtattaaccatgtatacttctacatgtttntctggcatgagagataacagacatgctttttaagaaaacacgcaatcacattcgctatctata

SEQ ID NO: 133154 - DNA, 350 bp, Glycine max
acacatagaaactcagctcttccttgaactaacttgaatttcgcattctttttattggcttcgcattgccaaaaaaattgagaattattttttctgacaattactaatgctaataaatagtatgattaaatgtgattaagatatggatgacttgatgttagccaaagttttagcaacaatattatgtactccttaaaaacgtaaataatatcgtcctagctaaaaccgctcggatgttcctcataaataataatgcattaatttaagatgacaactactaaacgactaagatcgtgtgcgcgcgtgcctgtgtgctacctcttgaagaaaaaatctacatgcgtgtgtgt

SEQ ID NO: 133155 - DNA, 265 bp, Glycine max
  unsure (1)..(265): unsure at all n locations
agcttctcgatatgttatgcgnctgtttttttttttctattgaaaaccaagaccanccaaattcccgagagcgcgcggcggcaaatctaacattccatacctatgtgcctgaattggacatgcgagggaaaagctatgaccatttgaatctcccgagagctatcgtagccacaagtctagcggctcgactcgtattgcgcctacattgcacctgcgactgaaaagtgatgaccatctttacttcttgcgagcccccgctggtctc

SEQ ID NO: 133156 - DNA, 220 bp, Glycine max
gcaacatttggagaggttaatgaaacaactatattattctctttctgagaggtcggatcaaatggagaatagatatcataatgaacaacaaaggatgagaagagggaatgattgtgttcctagacaaaaccgaattgatggtattaaactcaacattcctccatttaatagataaaattatccggacgcctccattgagtgggagaagaaaatacagcat

SEQ ID NO: 133157 - DNA, 159 bp, Glycine max
  unsure (1)..(159): unsure at all n locations
gctagcttccatcataaacattatntactatgttagttatgactccagnggtcatgacgaaaattcttgtctttggggcatgtcactcccgtaggaactttcttgagacttcaagataatcaccatggggggggggtgtttcgtacgtctctttctttt

SEQ ID NO: 133158 - DNA, 374 bp, Glycine max
agcttgcgtgagctccacccattcttgttatctcttcccaaccttataactttgtctataactagatgtagagggattgaaagccttaatgttcattcaaaatctctccaaagggtgtatgacaatggttgattatatctgtcgaggaattctcagcggcatcaaaggaaatgacaatcttgaacttatctaccacctccatagtgcaattccatcatcaatttggcctaataagaaacttagctttctttctttaagtagttataacaaggttgacaagttatcaaatgatttgggaatgggatccataacagcaccagatcattatgggagcatgcagcgcaatgcaccggaactgtcatccttactaacac

SEQ ID NO: 133159 - DNA, 376 bp, Glycine max
  unsure (1)..(376): unsure at all n locations
acacaagaatctcaactnccatcagacggggctgcaggcttcatcttatggtcttcacactggtactactccacatactatcgaagggctagattagagtagaagcacctggtcttacgccgcttacacactttgatcatgattaccacaacttcacgtacctggtttatcaggtacaaatctattagcaacacttcgttattctcatctttagcgaagatacggctttaaagaattactcctccacttcgactagtaacatagtgtcccatccgcatgtaaactgaactggtgtctctgagtcgatacttatcggtgcacatgctatctataaaatctccatagctattcgacccacctttcctattctccacct

SEQ ID NO: 133160 - DNA, 270 bp, Glycine max
  unsure (1)..(270): unsure at all n locations
agctnggttcgaggtacttaccccgtcngaagatctatatatcgattgaagaaccgaatggaagaacggtcgtagaacgggtcgaaacctcttggcgaaattcttcacgggaaaacgttaccggaagcgattcggaagcgcctcggcttaaattttcttcacggaaacaatttttccaagcaaattcgaaagagagagaagtgcccaaggggctgaacccttttttcttcacttcctccctattatagcaaaatagggagggggttttct

SEQ ID NO: 133161 - DNA, 349 bp, Glycine max
tgcctgcttgattaggagcctctgtagtgttattctcttttctattttaattcactatctctaggtcccctgtagtcaactgatgtggtaacttactcaactaatataagtgtcgcctatcctgttggtgttattgaatatgtatcatttgagtcggtgatctgatcttccctgtcgatctcatatcttgaatattgaaatggactctttaacgttcatttacctcactctactcagaccctctacgaaacatctcgaactaatatatatgtttatgtatgcactctgtccatggatgatggcgatatcattgtccatataatattctggtcgtatgaaatcccatcta

SEQ ID NO: 133162 - DNA, 446 bp, Glycine max
  unsure (1)..(446): unsure at all n locations
cttaattgtttgctatatggacaagggattattgtatatatattaagataganatataaaactactcttttaatataacacagaacggagactatcttcatttaaatcttgagttgtctacattatcacataagaatgcatgcactaatataatgtacaacttactttttaataattgaaacatgttactgtgtttctcctgctacgtcaggattaatgaaatgaattatctatgatattaatattcatctcagtaaatacgtcctattataatataggatttgcgtgtcatcctatatatttcaacgtcttccttctaattgccaatctatgttgcaggtcacctagtaaagtgagtcttattttgaagatctattatgaggcaattttgatgtggtgacgacactattattatgtgaccacattattggatgcctaaatatctt

SEQ ID NO: 133163 - DNA, 389 bp, Glycine max
cccaacatggatcttcagaatgacattggaaactttgtggtttcaccacctaccaaaatagataactcaaaatttcaaaaaaattaacgagaggatttctctgtgggagcaaagctttcagcttattttgatgatgccaaagactcaagtcaagaatcaagattctagcaaggttcaagaatcaaagagtcattcaatcaagaatcaagattcaagtgatgattctaaagagactcaagaacctctagaaaagcttcagatagtataaatagaatttttcaaaaaaaaaatgaatacacaatttgtcaaagaattttcaagaaaatttttctacagtttatcttctgtatcattacctacgcaggatcatttcaaagcccaacagttat

SEQ ID NO: 133164 - DNA, 375 bp, Glycine max
catgactgaagagttataaagcagtttttttttctttggatattagcatatttcaatcttgacacttctaatcaatctttacaacctaaactattgacttttcttctcttgtaccaaagcttccaaagtttctggtttctaaatcttgaaacttgtgcaattcatcttttcatctgtcgcaatggccctttgcgggcgtgcgatggaggctcacatgtgccttcccaaagatgaaaatgccggagtctcaccaacttatttgtgaaacattgaaaccgtagaactcgcaaatgaatctagtctgagtgatactttgagaagatacccttccttgctaaggcaaccattttaatgtgaatggtactactttatcct

SEQ ID NO: 133165 - DNA, 306 bp, Glycine max
gtgcaccatagtgaaaatttcgagatagaagctctaaagcagcaagaggagcagctttgcagagaagcctacggttcttcaattataaagagattagtgagttgtaagtgattgtgagatgctgcaaagaggaggagggatccctcttcttgcgtaaggaacaattattctgtactctcaatctcatttgtggtacggtatttctctaatggctggctcaacacccttgttggtatttcttagaacaactgatggactacttaatatcaattaactgtgtttacgagtccaagctaattctgctgc

SEQ ID NO: 133166 - DNA, 311 bp, Glycine max
atggtctaccttgtgaccaagaatcaaagaatgaaagggcttacatggtgactatagaatgaacctgaaaaccgaaaagttgcatgaagtcgaagtggaaatgcccacaggttctacaatgacctggaaaacatgaaagttgcatgaagtagaagtcaaaacgctactgttgggcctattataagaaaacccatgtccataagttaaaagtcataaaattgagtaaaaactaaaatattgactctgattggttaaaaaccaatagagtaaaattttataaacccccctgacttgtgcacgtgagtcttaac

SEQ ID NO: 133167 - DNA, 444 bp, Glycine max
  unsure (1)..(444): unsure at all n locations
gagctanctacacacacccctcttattacttatctcacctccttgagaagcttccttgagagagcttcctagagaagctagagcttanctatacacacctctctaatagctaagctcacctccttgagatgagaagctagaggttagctatacacaccccctataatagctaagctcacctccatgccaaaatgcatgagaatacataaatgtccctactacaaagactactcaaaatgccctgaaatacaaggctgaaaccctatactaatagaatggccaaaatacaaggcccaaaagaaggaaaaacctattctaatatttacaaagaaaagtggacccatccttggccccggggcttagaaatctaccctgaggttcatgagaaccttaggaccttctttagtagctctagctcaatgctcttgaatattctattcaata

SEQ ID NO: 133168 - DNA, 250 bp, Glycine max
ctatctcgagcttgatgcataaattaaattgtcaacatcaaaaagggggagattgtagaagcaaagacattctaatgttttgatgatgccaaaggatcatgtgcttctcacgtttaattcaagacaagaatccaagaaattcaagatatatgatcaagataatctctagagaattaggaagggaattccaagttgaaacaacaagaggtttgaccattgaatttaagctaaactgttcttacaagagatt

SEQ ID NO: 133169 - DNA, 445 bp, Glycine max
ctaaagagaaacttataatgactcttttttgtttattaaaccaaaccgaagagactcaagagacctcttagttttggaactttctcttcacacgaattttcaattgaaatttcagaactaggataggtataaaataggcaccaattatagaacataatttgagccaaaacaacaagcacacttccctttcacttttgtttcctgtacactgattgttctgccaacttgtgtgattatgcttattttttcctttaatccacatcgcttgggtctttttcataattttggtccagatgtctagaaaattaagtaaaaatttcagtctaaaacacgtagtgaccatattccagtctaaaatttaattggatgggcttctacaattcattaaatttattgtcacacacacataaatattacttagtgctgtgaaatacaaaacacccta

SEQ ID NO: 133170 - DNA, 72 bp, Glycine max
cgcaaaaaaaaaagaaggcggcacacaagtgcgaaccccccaaaaacaagcaaagcagacccaaaaaaagga

SEQ ID NO: 133171 - DNA, 403 bp, Glycine max
  unsure (1)..(403): unsure at all n locations
cactcagttccattcgagtacctaactgtgtgatttttaacgttnaanaccagaatcacaatacccttaagcttaccgacaagcaatttttggatgaaatttactaccggcagcctttcatgtatgcaggtaatcaatttctgtttcaatgtatgcaactgaaagatgatgctgatgttaacacaatgttaatgtgtaatcatgaatattcatttgttggtcccattgagttattatgtatcgttgcgagaaccccaaattggattttaaacttactcgaagcttctatgacctctactcatgatgccctgctttatacaatgggatgtggaactggttacgccataatgagtttgttggttattcattcataggataaatcccaaaaactttgcctttccac

SEQ ID NO: 133172 - DNA, 390 bp, Glycine max
  unsure (1)..(390): unsure at all n locations
agcttgtattntctatataaagaggtggatctctttatatcttaccaatgganaattccttccgcttaagaacctttctctaaatcccgagtgtcgattacattgaggcccactctagtgctgctcacgccaactaaataaaggcattgtcttcttcgtcgcttggtgatcaaagagcaagcccttggtttcaaaagcgttctgagtgactcttgtgtaaagtgtggtccattggatgggtttctttctactcatgttccttttagaacatttaaaattttaaaccatgtaactcctacaacaacttcctactaacccttttatgaatgaatcccacatctctttcttcttctgatttctcctacaacacttccctactctctttcttag

SEQ ID NO: 133173 - DNA, 405 bp, Glycine max
  unsure (1)..(405): unsure at all n locations
agcttgaatcggacatccgtgtgacaacttatgtttatttttatttcacgagagcttccggtggtcaatctcgagcgtcactatatgcgatgcacaaaaattggacattcgaattaaatgggatgaccatttgaatttctcaagagcttccggtgttcaattctgagcgtctcgatatgtgatttgcctgaatcggacctccgtgtgaaaagttatgaccatttgaatttctcaagagctatctgtgntcaatgtcgagcctctcgacatattatgcgcccgaatcggacatccgtgtgaaagttatgaccatttgaaattctcgagagcttctgacgtttactttctcacgtatcaatatattattagcctgattcccccttcgcgtgaaaggtatgaccattt

SEQ ID NO: 133174 - DNA, 311 bp, Glycine max
  unsure (1)..(311): unsure at all n locations
tgctcganattaacatagaagctctctatatttttattggccataactatgcacactgatgtacgattcttgcaaatcacatatctagacgctcataacttatcaacggatgctctcgagatattctaatggtcaaaacttttcacaccgatgtccgattcatgcgaactacatatcgagacgctcgaaattgaacaacagaagctctcgagaaattcaaatggtcataacatttaactcgaatgaccaattcaggcgcatcacatatagtgacactcgaaattgaacaacggaagctctcgtgaaattca

SEQ ID NO: 133175 - DNA, 393 bp, Glycine max
  unsure (1)..(393): unsure at all n locations
ctctatgccaacctctacagtcctgagggaccttcaccaaaacaagtcagaatacgaggccacttgataagggatggtgcagatagcctcaatgcctttttagaaacacctgtggtgcttgctgagggtgaatctctactcgcttactcaagatactgctggatgcctactgacatcaaagaaattgaggttgctctgtgcatacccggctaagggttcattctaaatgctgaaggtcacttggggaagatcctcagaaaagatctaaccacccttgctcaggtttggagtgttctatcctactccaacctggctccgacctcccacacatcggatctgactgtggatcgagctagggtaatctttggcctagntactcagctggacatgaat

SEQ ID NO: 133176 - DNA, 374 bp, Glycine max
gagtttccaagtgccaattcgacttcttctttagtctagtcttcttctggcttcaattcagtgagggggctctccttctgtgtccagcatctcgggatgttcccagcctttgatgacagctgtccacgatctgctatccagtgatttgagaaaggccaccatccttgctttccagtattcatatgtgggcccatccagaaatggtggactgttcactggtcctccttctttctccatgttcatcagaatttatctccctagatctcactcagtgatattgagtgcccgctctgataccacattgaaatctgatactggggacagatgtccttactggatgtaacgacattacgcttcacaacatgcatatagtc

SEQ ID NO: 133177 - DNA, 361 bp, Glycine max
catttatttttctgcttgtcaatcgaatacacagggtaagaattggatgtcaatctctgatagctgatataaatcattttggccgccggtattcaattacatcctctgcgaatcgattaccagagagtaaatctcttgaaatagacacttttgattaaatctcttggcccaaccttttgcagattcaatttggaattcccttcctaacacactagagatcttcttgctgctgtatccgctattcatggatttttgtcttgaattaaacttcgaaagtgcattattataaggcatccaatcatcatgatcatatggcatcatcacaacatcataggcacagtcttgcttctccactctcctc

SEQ ID NO: 133178 - DNA, 182 bp, Glycine max
ttaagaaaaaacgagggtggtttttggaattttttaaaggggtaactggttttttaataacccccaattaacccggcaatttaaaaaccgaacccccagtgaatattggcatttctgtcttaaaacatttttagccgaaaattccttaaaattggatatttactatgattaaaagaatattt

SEQ ID NO: 133179 - DNA, 244 bp, Glycine max
ttataccctattgtaccacgccaatggtcttcacttaattttctggaccactatgctccgagctctctggagaaagctctctttgcaagctaaagctgatatatataagagaagctcattcgccaaaaaacactaaagcatttcatccaaaaacatatctcatcattttctactaaaatcattatcataatttagatctattaaacttataatagcattcacatatatcatgtaaaaagaatta

SEQ ID NO: 133180 - DNA, 308 bp, Glycine max
aagctgcactaatggttaggggacttttttttttttttatacatatttgagtgatgaatttgttgaatgtttatcttaaacaattaatgcaaaattatatttcttttttaacgtaaaatacctacgtactttaggcaactcatttggataaaaaaaagtgattattgctgaacctatttggatattgttttatcccttaatgatcttttcggctataaattataaggacttttattgattaatataataattattatttgttcattagatttatatgatattttcatttttttgatattttttttaga

SEQ ID NO: 133181 - DNA, 317 bp, Glycine max
agcttctccccccaatatctatatatgtgtgagaagagaagcagaaaagggttcagccccttatgcacttctctctctctcgaaatagctgaggaaaattagttccgtgaacaaaatccaagccgaggcgcttccgtaacgtttccgtgagtaattacgcaaagattctcgaccgttcttcaagattcatcgttcgttcttcgatttcttcagtcttcaacgggtaagtacctcataccaagcttttcaattcattctatgtacccgaggaggtccacattttcgtccatgtattcttattctaagattcaattact

SEQ ID NO: 133182 - DNA, 299 bp, Glycine max
  unsure (1)..(299): unsure at all n locations
cgacccaactcgggcatagtcggncagttatatcctgngangnacctaagcaggcgagctcctggcagtcaacagataaaaggaaaacaagaccacaaagcaaggaggcttgtgatggctggccagctgtgaattttgcgtaatatgtggattgtggcctctggtaatcgattaccaagggtgggtaatcgattacaaggcttaaaattgaagacaggaggctaagatggtctctggtaatcgattaccaaggggtgttatcgattaccangcttgaaaacgaagtcatgaagctaggg

SEQ ID NO: 133183 - DNA, 371 bp, Glycine max
cgtaacatgacaattataatggtcgttcgaatacctcacccactcaagtgtatcacacaattatggctcctctctaatgaaacactattgccttttaccactctaattccccttgagttcttatgcaattcaagagactatggccgcaacagagaacaattcaccaatatgtgtcacgtaaggctacatagacaacgaaaacgtaaccgagaaaaaggctaacaatgtatagaatgaatattggatgatgtccattaggaaatgtatggacgacggattttctacaggattacttcacatcattctaagcacacccttatttaaactactagaactaagacgatgtatatgcagacacactatctatggag

SEQ ID NO: 133184 - DNA, 458 bp, Glycine max
ggtagaatggctagacatgatacatgtcagggcttggttttggttattgtataaatggatgccccacattatttccatgacacaaatgcaaaaaatgatgaattggaaattttatgcataactggtcatgcatgcgcctatgcggacgctcaagtgtcaaatatttatggtcatgtgatgctatggctcaggattcattcctctattttagcaacccaatatttccaaaatatgttcttttatccatttgtgcattcctccaagtccatttcgggcgtgcggggaaatttttacagcattcacccttcaggtgtaaacacgtatttttcttcgaaaatcgggtattgatcaatgaaatttttttccaagaatagttggaaatcatctcttttataagcatgtcgatttttagctagacaacttatttctcttttccaacctttcctacttgcttcttt

SEQ ID NO: 133185 - DNA, 432 bp, Glycine max
  unsure (1)..(432): unsure at all n locations
gaagtattggcgatcaganatgcaattccttggaattatagggtgaaccaagctcacgcttttacaaaaaggttcatcaagtcaaaattgaaatatggaagtaaccgtcttgcaaaattggggcaaaagatgaatcacatcactgcttcgtctactgccaaacatatttaggattattgatgtccttgttacttccagtttcaccttgacaaagatgtcatggaccatgttgaaaatctaaattgattcaaccccatatcctgcgtaaaaattcgcaatacttcgactgtacatcattcgcatgcatccatgcttttcattggttgcattgctcattgcattctttccttgaaaaataaaataaaataaaataaaatgaacttataaaaaagaanatgacacactttacggcacccttaccgaactcgtact

SEQ ID NO: 133186 - DNA, 453 bp, Glycine max
  unsure (1)..(453): unsure at all n locations
ctcttattttttcatttctaaaactgccacatcacaacttagatcttaattgaattttctagctcaccaaaccatattaaataaattctaaccctgcttcctctgtttttgtcttttcacagattgtttatcatttttgtatcttcatcacttccactcgattntttcacctgctcacaccttccattttgtgatgcctttgcttttacttaaagctttcttgcttcttagatttcattcctgttcttgcttattcttatcgtccattcctaaaactgtcacatcacaacttagatcttaattgaattttctagctcaccagaccatattaaataattntagattatcgactatactgattatttcaattgttgttttcatatcgtgtntatttgtgcatgttaacctccctcatttaaatttgtattcatcattctatcagcataataatga

SEQ ID NO: 133187 - DNA, 393 bp, Glycine max
  unsure (1)..(393): unsure at all n locations
tcttgaaccatgaatggtggtgagtttatgttcctttgagtattatattgtcaatttttttggctgaaacctaaaccataaaattcttacaaaaacattaaagtagaagaaaacctcaaaaatctagaatgacatattcacctattgtagttntgtcataaaagtcatgtctagtcatgaaacttgtcacgtaagatttcttatgttgtgttgaaatttatttttcttgtttctttgtctaactcatttgttcatgagtgtatgaannatttttagcctataatttgatttgagtcaaatctttcatgttaattagtccttaacatgttcatgcataattcttagagagtctttgatgtgaaccttttcttggaactttaggtttccttatga

SEQ ID NO: 133188 - DNA, 376 bp, Glycine max
agcttatgcgcatactctcttactatctttatttgtacaagacattcttataactaagaaaaatgcacccatatacaagcaaagcaccttcgttacctagattatttatatggacttccaaggtgtatttgttacctacatcacacgcattttctttgctaaatttacatacatgcttactcaaagcactatggctatcaaaattgcatacgtgcacattctggtatttctaatacctgtgcatacacaaacttcatgatgaatcttgactatctacacaataaggggctacattacatgctttttttgaagagctttgactacctaaaggcgcatgcgaattcaagaatattttcttttgccgagtaaaaatgga

SEQ ID NO: 133189 - DNA, 473 bp, Glycine max
  unsure (1)..(473): unsure at all n locations
agctttctcccttcccttcctatttncattttttttcattttgcatcgnttcttcatgcattaattgtggcacggntatcaccacaccaaatacgcgcatttccttattttattttcattccgggcatttctacctattgtgcattaattgtggcacaattatcgacgcaccatgctgatacacagcaaggaccttctgtctgagggaaaaatttaccgtgggaaaaaaaaccaaagctctacataaagaagatagagtttttttttataaaaaaagaacaaaggtctgccacatgtcacaatgaccttaaacaggcagtcaaggtcttgtttataaggggaaaaactcccgtggaaaaaaaatcaaagctctgcatagaggagacaaagctnttttttaattaanaaagaaaaaaggttcggtactccaatttgagtattagaaaagtggaatagttaatgtcgagctacat

SEQ ID NO: 133190 - DNA, 442 bp, Glycine max
  unsure (1)..(442): unsure at all n locations
gacctatgaaactcaagctgttacccangttgaattgcttataaagatttgtttattcaccactaattgttctcctttagaagttgtttatggttttaacccactaactcctcttgatcttttgatcttttgcctatgcctaatgtttctgtttttaagcataaagaaggtcaagcaaaagtggactatgtgaagaagcttcatgagagagtcaaagatcaaattgagaggaaaaataaaagttatgctaaacaagccaacagaaggagaaagaaggttgtcttcgaacccgaagattgggtttgggtgcacatgagaaaagaaaggtttccggaacaaaggaaatcaaagcttcaaccaaagggagatggaccatttcaagtgcttgaaagaatccatgacaatgcttacaaagttgagctgcccggtgagtataatgtta

SEQ ID NO: 133191 - DNA, 342 bp, Glycine max
  unsure (1)..(342): unsure at all n locations
accccatatttacaaactacaaacccttataaaactatattatctacacaaagggtacaattctctatattttcataaaggtgtttttccttaagactgaaagacttgcctgagatgttctaagtgatcatctatgctcctactgtacactaaaatatcatcaaaataaacaactacacatatacttatgaaaatccttaagacatgattgcatagccttataaaggtgctcggtgcattagtgagcccaaaaggcattactagccattcataccaaccaaacttggtcttgaaagcgttntcactcatcaccctcttctcctgatttgtgaaaccacttta

SEQ ID NO: 133192 - DNA, 441 bp, Glycine max
  unsure (1)..(441): unsure at all n locations
ntatacaagggagcataagatacaagtatcattcattgttatgcttttggtcaaaagagcttgagtctatacaattcatggccttcatcatgttctgagttagacaaatcattctagaattcagagatttatgctaagatcaatattcacagttagtcgttcactcacagagtaaggtcacactcttaccggttttggttcaagcttttctttcacaatcaatctgtctactgactaacaattctaattacaagtttacattcttgttctttctttgtctaacatacacacttgctcaaactcatgataagaaacacaaactccatcacaatcatgcgttcaattcataataaagcttcactcatattataagtaataaagtgcttactgcatgtatcaaccagtaactatctaaacttaaatagcaactactcctaagaa

SEQ ID NO: 133193 - DNA, 466 bp, Glycine max
aagcaccgcggctgcagcttgagccaaatcccaactactatatttcttgcccttggaagaaagcaaaaatggagaaaaatcccaatcaaagagtgggagaaagcacaaaagaaagaacattcatggtcatagatcggaagataacaaatgaaatatgcagaaaggtctttggaccagacaatatctgaacaatacacgattgtctccaccgaacaaaaaaaaaaaggaaaccacgatctaaagtggtcctctccctttgattgccaaccaaaaatcctgcgcgtcggagacttattcgcctcacactaaacaaaaacagaaaaggaaaaggccaaatactctcaaagccaaatttcccaccaaaaaacaccattcccaaagaaaagtcctattgatccatgatcacgcatgtaatctttgatttgataggaaatgactttgcaaatcaagtcatggcatatctatg

SEQ ID NO: 133194 - DNA, 427 bp, Glycine max
ttaagtcaccgcggctgcagctgtagtttattggataattgttgtttcttatgcttttaatgtctttagaggttacttcctcgttgacatcttttgttttgaatggaattgccatgacaggtttattactactgtctttgatatttggtagttgatattgtgttgtgggaggtaattccgattagattaactcaccatctctcacttgccagtttgttatgacattcgttgttggatcacctatgatttcttgtttccaagggtaatctatattctttctgatggcataagcatgaaaccaatcaaagaaaaggacattaattctgactctttcgacaaattcatagaacttgtcttggatttgttttttgtttgttccctttgaatgttggaaaaaccatctcctttgaggttcattctccggaga

SEQ ID NO: 133195 - DNA, 316 bp, Glycine max
  unsure (1)..(316): unsure at all n locations
atttaaagcgggttgcagcaccggcttcgctttcctaaccgtactggaggcggntgccgtggcttttgcctctatggttttctggaggtttaacatgacctccgagatggaagccatttgatcttttaaggccaatagatcggccttcatctgtttctgcacgccctcttctttatacatttttctggatcgagtgttataagggtgccttggtgttttcttatttattgatgaaatcccaaagaaataaacaacggtgagtatgccaccaaaacatgagtatgcaaatggatgatcggagcactttgatccaccc

SEQ ID NO: 133196 - DNA, 456 bp, Glycine max
  unsure (1)..(456): unsure at all n locations
actcaagctgttttntctccaatccccaacacatgaacaaagttctttagccctcagaaccctgaccttatctcaccttcaacaaccctcttcactccattatccaaaatgattttccccacaaaaacattcactttatccaccaaactcatgcaccgtgttctcacaccttgcaaatccaaccaacacanaagtgggaagtggtgactgtagttaagcactctaagcaaatcatacctttcactcactaactcctcaagctcacaccatcaccccctaaccctcgccaaacacataactcttcacaaacatgttcttgatcatgttattcaatgacccaatatgcaacaccttccttaccttcaccacaatgtgctttaccaccatgcccaaagattctttcaccacttgagctcaaaactcaccacaagcagtcatcctcctaaaagagaacat

SEQ ID NO: 133197 - DNA, 348 bp, Glycine max
  unsure (1)..(348): unsure at all n locations
gagggggagaagtagaactttggagtgtgtctcataagactttcattcatcaaaggtacaacaagggttacacatgcttctatttatagactaggtagcttccttgagaagctttcttgagaaaaattccttgagaagcttctttgagaaaacatccttgagaagctagagcttagctacacacacccctctaatactaagctcacctccttgagaagcttncttgagaagcttcctagagaagctagagcttagctacacacacctctctaatagctaagctcaccctcttgagatgantacgtagagcttagctacacaccccctattatagctaagctcacccct

SEQ ID NO: 133198 - DNA, 471 bp, Glycine max
  unsure (1)..(471): unsure at all n locations
actaagcctgaagagttacaggcaaccgcggaagttaggactgttatatgagcctacacacaccaacgtgaggaggatttccctagaaaggaggggaaagagcatgggccagtcgcaagggccgtaagtgaaaaggattcccttatgtaacatcaacaaaagctttgtcagtgcggattggatgtgtgaagggtaggtcaccatgatccatgaagaagtccttcaagagcaatcaaattgggtgcgatcgtgccctccagagtttgaattgtggaactggcgaattgttgaacaacctggaatttctttggcaatcacaatgtaattcgttagtcctaaccctatagttgggcctaggctntagggttctctccctatttgggcatgtctnttngttccataaatatataaatatacaatccttcttaattngtcttgcactttcatcatgaaatgccgaccacacaccga

SEQ ID NO: 133199 - DNA, 334 bp, Glycine max
  unsure (1)..(334): unsure at all n locations
tcttccttggcttattccctagaggatggtgcctcccctctcctcttctccttttccttccgctgcttctccatggtgaaaaatcaccattgaaggacctcattgaagctcaatgatccaccctccattgaagctccacaagcaagcttncatcacccttcttcattctccttcttcatctttctaaaccttcattctttaatcctacttgaacaccattgttatcatcttcattttccatccaaacacattcaaactttgaaccaaataccttacattcaaccctncataaactcgtcactttctctctcattcaataaatttcataaaaaaa

SEQ ID NO: 133200 - DNA, 359 bp, Glycine max
atatgtgatatgcatgttcttatgagtgatgaaatgcaccgatgttatagaagtttatgtcatgatggagtgtcataagacacatagttatttgattatatagttatgtcacgtgatgctttatcttgatatcttgagttttagcttttggcctttgaaatctgaaaagttcacaagtattctcataactaaattagtagaaaagttttaaatgaattaatataaagccctccagttgagctagttcctagtttcatgtaacagcgacaggtcattataggaactactataccaacaactttggtcactgtactgaagcagaatcaatttggtagttcaccctcgaaggacccaaatga

SEQ ID NO: 133201 - DNA, 309 bp, Glycine max
  unsure (1)..(309): unsure at all n locations
atgatctaataatctgctattttcaactcagacattctcattctgtgacttggcaactgcaactaganaatttttgagctgaatgtcttttgggagagggaggctttggtagagtatatgccattaggatgcctggaagaccacttgcatggtattngcatttcaactattcaagttggtntatcccttctttaatttatatcatcttgaaagtattattggtcatatatgtttgatttgcagatattcgtgctggcaagaaacaacttgactggaacacacaaatgaaaattgttgctgggttattac

SEQ ID NO: 133202 - DNA, 442 bp, Glycine max
  unsure (1)..(442): unsure at all n locations
tcacttacaacactgttatgtatggattttccagtcatggaaaggaggaatgggttttgcaggttttggggagaatgttggtaaatggagtgaagccagatgccattactgttaatgtagttatttatgcgtactctaagttgggtaaggttagaactgccatccagtttttggatagaattacagcaggaaaggaattgtgtcctgacataatagctcatanccagcctttgtggngtatctgtaattcgttaggcattgaagaggcaattgtgtatctaaataaaatgttaaataaaggaatctttcccaatattgccacttgngatgtgttagttcgaggcttctttaagaaattgggtcatatgggaccaatccgcatctttgatgatatcttgggaaaacgataatactactataaatttcagaatctaatagatat

SEQ ID NO: 133203 - DNA, 485 bp, Glycine max
  unsure (1)..(485): unsure at all n locations
aaatagctgctagaacttataggtatgtcatattcttataagccatttttataagctcaaatatttcaaatgccctccaagagcatactgttgttaagacaaacaattttcaaaatatgctcctcttaccactccctcaacaacttaaatgcaaattacaaccaacttctcaagacacaagcatggaaaatatattaaacaatgtggtaactgtaaaactttgtgacagccaaggacaaatgtaccactaagaatatcttggttaagctatgcatacctcataataccctaacccagattacctctaaaatattaaccaattaaagcatcgtgcctaatctataactagaagaaaatgcttagggtattaagtcaacatactaaagacatataccagaacatatacatgaataattacaagaaaatatatccnctttatgttctagaattatttaagtaaaataggctagcagtcttagtatctg

SEQ ID NO: 133204 - DNA, 430 bp, Glycine max
  unsure (1)..(430): unsure at all n locations
ttttactaattactcctctaattgaagaatgctaccaagtactaacatagtaacatgcccttagtccaagttattcagtaatatccatcgtaaaactatatccaataatatttgaaaagtgatcaaaactagaagtagttctgatgctgccctagatttttaagcataggaaggtagtaatttaagccaaaactcattatgccttttaacatgctatcctatcaaattatgacaagtttataaatttataatcattactctcaaaattcttgcaaaccataaaatgttcgtctagatttctttctttttggatatcctttggccgagagtcanaaactatatttttaaagtactaatatccatttaaggaattgatctctcccagcatatggtattccatacacacacacttgaggatcgaatatctggc

SEQ ID NO: 133205 - DNA, 277 bp, Glycine max
aatgtcaaacacccttgtaagtataatgtaatgcgaacatcactttcgcctataaatgctcgatatcctgacctccttgtaactgacctaaatcaacactttgaaaacagatcaaattctttaccttggctggaattggatccaatgacttcggccagttttgagacatgccctggttggtatctcaacatggacctatgctgaaacatgtgattttctttataatagggagtttcttgcccaaatgagcactaggtttgtgatgccctcattactt

SEQ ID NO: 133206 - DNA, 189 bp, Glycine max
tttcaatttgtcatttttgttgctaaaacatcaatccatttattggctttactcgatttatagtcgcttacattagctcttagattaaataacttacaggcattgtactttattcgatttataaaaatatatggatgcagttaaacatattttctttaaagaggaataatatttgatttattgagcctt

SEQ ID NO: 133207 - DNA, 322 bp, Glycine max
atgctactcttaaaacaaaaatggcatacaacctcctacaataaatacaaacactaatgtaaatttagagcaagcttatgcgcatacttctatactaacgttcacttgcacaagacattcttattactaagaaaaatgcacccatatacaagtgtggcgccttcgatacctattatatatatatgtacttccaaggggagtttgacacctacatctaatgcacttacttggctaaaattacatacatgcgtactcaaagcatttggggtaccaaaaaatgcacatgtgcacaatccgggagttctaatacttatgcatatac

SEQ ID NO: 133208 - DNA, 311 bp, Glycine max
  unsure (1)..(311): unsure at all n locations
agctatggaagcggaaccagtgcttcattccgcaataaacttgggccgagatagaaacatgacangtttcaatcgaaggtatagtcctcaagcctacccttatggtttgcttgcggacttcactccccgtaccgctccagacgattggagccaagcccctaccatcgagggacagcatcctcctcatgttgactatcctctgcaagaagatgatgaaggagatgcccatttatgccctctgcttcctctcaaggaaccaaccgcgcatgagttgtcccatccaaacatagtgtgccatgtccggtctcatc

SEQ ID NO: 133209 - DNA, 439 bp, Glycine max
  unsure (1)..(439): unsure at all n locations
tatttctaagtgaaagtgagatagtgtatctgtgtaactcgtggtggggttgtcaagaaccttaaaatagttagattatatctacgatatagtggccacgttaaccaaatctttttnttttataccaagaagagtgctagcaacattttctctgtcattctctttccaacactttccttgtgaaatattntcaaaccatgaacatgaagtgagatgtatctcacttttattgttgtggcgtttcttgtatatatattgtgtaggagttttacagtctataatcttaaaaaaatctaaagactatgagcgaaacaacctcatccaatggatcacgcattactcatgaatctctaaggacctagaatgtacctttgttgcggttattcaagttgatgggtggcttctgatcaccaagtaatcaaaatttccattgcattta

SEQ ID NO: 133210 - DNA, 391 bp, Glycine max
  unsure (1)..(391): unsure at all n locations
tcacaaacatattttaacccaagttaaattattatacacaatgaagattgcagaaatatatgaggtacaactaagtatatagaactaacttgtgtgaggtttgtttaaagttcaactgtctctggtgctagccttaggtcatgtctggaggtgtgatggcacatggcccacgactaanaggaacttaaaataaaaattaaaaaaattatatggatgcaaaanattttttatattattttgntattctataactaaattgaagatattatgttattttattggtaaagtagaagacatttgtattttaagatgaaatcgaatttctaataatttgatacatataaataatacaaaggtaaaaagtgtgtctattcatatcaaatatgctcat

SEQ ID NO: 133211 - DNA, 383 bp, Glycine max
  unsure (1)..(383): unsure at all n locations
tcactcgaagatgacatgatgtgctntgagtgtctatgatttcatctccacccatgcttcgagggcattgcctaaatgggaagttaacagagttccttgacatagccgatgcatatgaagatgaaagtttgtatttcaagatggaggctttcgccaactaaaagaactttctctcggacccttgtataagttgaaatccatcattatcgacaaaagagcactntgttctttgaaaacacaccaatttttggcaatacatagactcaagacagtaccacctggcattccacgcttgaaaaaacttgaagttctccacatatttcatatgtcaatgataattggttcttacattttggttgtgagcatttantcctagttttata

SEQ ID NO: 133212 - DNA, 397 bp, Glycine max
  unsure (1)..(397): unsure at all n locations
ttctctagatattctattacttagatttcaatgagacttatctctagaaaatcgcttgcgatcattaagattttatgagattgaggattcatggaatgtgcatccacagtcaagcataataaggattttgcaagacatagtgaagctggttgggctctacactatgccacataatggtgattgtaagttgtgccatgctgattaagagttaccttagcacgtgtcacaaccaggctggggcaggtaccccactcccatatatgatgctagatatcaccactcatcatatcccattaactttctaaaggatcatgactgactaatgcccaaacatttttctattataggatctaatttagttctctattggnatattcttcactgtggaactgataca

SEQ ID NO: 133213 - DNA, 406 bp, Glycine max
ccccttaagcgcttctctctctctcgaaattgtcgaggaaaattagttccgtgaagaaaatccaagctgtagcgcttctgtgacggttccgtgagatatttcgcgaagaatctcgacccgtcttcaagaatcatcgttcgttcttcgttttcttcagtcttcaacgggtaagtacctcaaaccaagcttttcaatttattctatgtacccgcggtggtccacattttggtcatgtatttgtattctcgtttccatttaccttttataccccctttcgacgtgcttgagccatttatctaagtcaattctcgctttatcttaaagatacattaatctttcccgatcgtttgaattgttcatccgctgattcggttaaatgaatttgaccgttcgtcttgccgaacca

SEQ ID NO: 133214 - DNA, 487 bp, Glycine max
  unsure (1)..(487): unsure at all n locations
ccgctgcagcttaaataaccttaacctaacaactttgtaagtcactagcacatctctttcttcatgaaacttcaacctgagaagttggagcgatgaagtcgacctcgtccatttcaatggaagaaagctacaatgtcgaagagcaaaggttcaatgttgaatgtcaaagaaaggaccaagcagaaaggtgaagaaacatgcgctatggttcaaataaaggacacgcagaaacacaggctagggttcaaagaaaggagttcgtagcagagaggtgaacaagctatgacgaggttgcgcggttttgtttttttttttttgaaaattacgacggttatttactaaaaatcggcgtaaattataagaaacataacattctaaggcggttttcaataaccgccttataatgtgcgtnctataatgccatctgtaacacaataatatcaaaaatgccaccgcaccacttatataagcggttccttgtacaatc

SEQ ID NO: 133215 - DNA, 484 bp, Glycine max
  unsure (1)..(484): unsure at all n locations
acacttagatctcaagcttaaattgaattaaacgttcagaaagtgttggttatctattaccatatatagagaatcgattacacagtgcaaatnttgaattcaaattttaatagctgctgtaaatcagttttggccactggtgatcgattacatcctctagtaatcgattaccagagagtaaatttgtttgagaaagactttttaacttaaatttcttggccaaacctttcgctacttcaattggaattcccttcctatttaatataccctttctaagactctagagactgtctcgatcatccatcttgaatatctntaaattctttgtcttgaataaaggctttagatgcatgtgaacctctggcattatctaaacattcagcttgattctttgctacaatctcccctttttgttgatacaatcctcgagataaacaagcttattcaaatgattgatgttccacatcccttctccccatttttg

SEQ ID NO: 133216 - DNA, 213 bp, Glycine max
tcaacgagtcacccccttatgaaatataatgtgatacctgttaatcaggatcctactatatggagcgcgaaaacaattaagaacgaatcatctgtgggggcctatcaatcctggtgagggttgtctactcatagcacattgtgccgacctctattggggctacgctcttacttaaggctaagcggtaactccgcaaacgtcatgaaattctct

SEQ ID NO: 133217 - DNA, 255 bp, Glycine max
tatcatcctgtaggcagcttggcttatttttatgcaccttacattcaagaatgtaaatctgtaaaattcccccatgcaattgctatggcagatataaaagaagaaaggactaaacggaaaaccatttcatttgtgtgtgaagccgattaaaaccctaggattaaatcgcagtcatttaaacaggtggacatacgcaaaatgagttgcaaccagtgaatacttgctacccctgggtgcgtttgattaaaaatgttt

SEQ ID NO: 133218 - DNA, 415 bp, Glycine max
  unsure (1)..(415): unsure at all n locations
gagctatcccataactgganacatggaagtgtcttctttaccggatttaaagctcaatctcagtcagagtcatatcctttttaatactggtttacattgatataagaacacattntctcttgacagtcactaacacattctataatattctctcacatatgcatattaagtgtccttaacttcattcttcttttatcattactgataatgatgaagattctgatggtgagattctcttcttgatttgattactattgttactattattatacaacttatttgcacctgttatcatctttgtttcagaatttgatgaagatattccagttagtgctgccaatggtaaacatgtccatcttttgtagctataatgccataatacagtttatctagtggatattggtaacatttaaat

SEQ ID NO: 133219 - DNA, 355 bp, Glycine max
  unsure (1)..(355): unsure at all n locations
gactctactctcaactaatgttattgggggtaagaggttagagtttctatagacccaagcatgggaattttagttgacaaagagtttctataaacccttacatatggttttctgcttatcacttccatcgggttgactagagtactaattggaatctggatggaaataaaaaaaatggtagagaaagctagaaatccaaataagagagttatctctctnttctttgattatatttgntaaagttgagccataaaagtggtacgagccatttcaaagtaaatatttaataagagtaagttttctctttgtcatgccaacctatcatctgatccttatatcttatntataactggat

SEQ ID NO: 133220 - DNA, 438 bp, Glycine max
  unsure (1)..(438): unsure at all n locations
tggtaaccatggctggaaatagtgagagccttgagcttaggatagtaagtattgtcttcaactatcctaagagctagttctcgggtaatttcaaaccactgagagccttttcgccagtcactcatgttgatntcaattattntgtttgttattagaagcatattcccccaatgagtcagaaaagtgtacaaaacctattaaaacatgcacacctcactgaaaaatgatacaataaacaaacaatttataaagactaaggataagatcatgaacaaagcatgagccagaaacccaaggatcaagagggaataaaggatcatcaagaaacaatatggagtggcttccatttcaagaagatggatttcttctttctttggctgtgttcatctaatatcaataatattaggatccataatcaaattccattcaatcatatag

SEQ ID NO: 133221 - DNA, 385 bp, Glycine max
agatagcgtgaaatgaagagccaatgtgtgatacatggacagagatgaataagatcatgaggaagcgatgtgtgccggctagttactcaatggacttgaaattcaagctccataaactagacccaaggcaacaaggtggttgaggagcatttcaaggaaatggatgtggtcatgattcaagcaaagattgaagaagatgacgatggttctatggctggatatcttactgcacagacttatgaaatacgtgaagctgaggttctatgcgatagcaaagtacataatagtctatcttcaatagagaagcacaataggaacaaacacacaggagtcgcagcaatagcaaatacattacaaagactatcctaagcaagtactcctaact

SEQ ID NO: 133222 - DNA, 338 bp, Glycine max
  unsure (1)..(338): unsure at all n locations
ttcaatcatcagcgggctgttcttctgtgtccaacatcttgggatggtccccagctttgatgacagctatccaggttctgctatccagcgatatgagaaatgccaccattcttgctttccaatattcatagatgcttccatcaagaattcggggactgttcactggtccgccatatttctgcatgttcatcacaaaatatcttcctagatctcactctgtgattgctaacgttggctcttgatccaactgaaactatgatgccagnggacacatgtcgtacactgatgtacgacatactactatagaacatgagagttatgagtgggaggactatcag

SEQ ID NO: 133223 - DNA, 404 bp, Glycine max
tgccctactttggtatgccaagtaggaaacaatacatctatgtcacaattacatgtgacacctaattgcatgttttgtattgacaattatgaattatgataagaagatgaagttgaactacagggaatattattacacacgtacagtatgaacaaatggagaatttgcaatgtaaatatacatattataaaggagaaagaagaaacaatggtgagagaaagaggacaatagggtctatgagtttagagaaaccataatgaatgtactttcttctttttgcataacatggcatcagtatgaagtatccactatcggaagcaatgactaatctccgttatagatcataagtgtacatgatatgggtattcttcttccaacatagtctatttcatagataatggcca

SEQ ID NO: 133224 - DNA, 423 bp, Glycine max
  unsure (1)..(423): unsure at all n locations
atgataacaaaagatgatgacttaggagatgacaaaaagctcaaagattaatcaaagaactactcaagtgaatcaaagatcaatcaaagaacaactcaagtgaatcaaagatcaatcaaagaacaactcaagtgaatcaagaatagttcaagagttcaagataagaatcaagaagaattcaagactcaagaagaaagtttagagtcaagaatcaagattaaagattcaagatctcaagaatcaagatcaagattcaagactcaagattcaagaatcaagagaaggcttaatcaagataagtatgaaaagggtttctcaaaaattgaatagcacatggtttttctcaaaacatgtttaccanagaagttttactctctggtaatcngataccataatgttgtaatcgattaccagtagcaaaat

SEQ ID NO: 133225 - DNA, 354 bp, Glycine max
  unsure (1)..(354): unsure at all n locations
cactgatatacaaaacttgtatatataaaggagggaaagcagggaaatggaaattatgaatgaattcaacaatgaatgtttcaaatgagaggaactattccttcctataaattataaaataggtattagaatatcaatctcgtatacctcctccaaatttctggaccaaagagatttctttgtcaagctcctcacaagcttcctttgatgctttatttcaatctgaagagctgtgagactgtcccctacaattataaagaaactgacctgtcaaaaatcagttaaataatgcagattataatttgcagataatgtgtaagactaanaatctaaaatataactctcgggctgact

SEQ ID NO: 133226 - DNA, 401 bp, Glycine max
atggtgctcttaaagagtgtatgcgtcagataagaaagctgaaggaagaacatgagcagaaaatacaggaagttgctctgataaaaactaagcaattggacaagactaagggtgagttcgaggctaacatagagaatattgaacaggagcttctcacgtctgctgctgacaatgccgctctgtcaaggtccttgcaagagcgctctaacatgataatcaatttaagtgaagaaaaagctcatgctgaggctgaaattgagcttctcaagggtaacattgaatcatgcgaaagagaaatcaattcactcacatatgagcttcatgttatttcaaagagcttgagattccaatgaagaaaagatatgagtataggtctgcaaagctgctacaagcccacatga

SEQ ID NO: 133227 - DNA, 242 bp, Glycine max
tgagccttgactacctttccttggtttgaagctcactacaagccttaaatgaaaaaccatgatatcaccatattcttaatgaactttggagctttggaatagttttgggaataagtgtggggcggtttgtttcattggataatactgttgatggctatgcttcatgatgaaatttagggccatacttgatgcacattgtatattggtttaacggtggacatgctgaatgaaatagtggtctc

SEQ ID NO: 133228 - DNA, 390 bp, Glycine max
  unsure (1)..(390): unsure at all n locations
attaatgagtgaccattatttgaccagaggatnttctctaactatccttattctttctagactttacgttaaagatctaacatcttaaccattgatgcaatcctaccccgcaagggcattggatagaagacaccaaatagattgcgctagagatccaagggaaggccctagggttctcatgagccttanggtagatatcgagcccatgggttaagtataagcccgcttatctttgaaatattataaataggttttccttcgtttgngccttgtattttggcattctgtagtatagggtttagccttgatttcgggcattagagtatctttgtgtaggacttttttttgatttcatgttgtttgatacggaaacctactatatattgagtc

SEQ ID NO: 133229 - DNA, 417 bp, Glycine max
agactatatccgcgaagcttgaatgcgtgtaacccaccattttcatagtagaatactggtaatgtgcctactatcattgtcatcattattttttcgccattgaggtgccacttgagctgccagggctctccacctttgggcatattctgttgaaagattcgtgccccccttttgcacatgtcctatagttgcatcctatccgaagacattatactggcactgcctaacgaaggcaaccactatgtcctttcaagaatggactcgggaaggttccaagttagtgtaccatgtaacagctaccccagtaagactttcttggaaggcatgtatcagcaattcctcatctttcgtgtatgcctccatcttccgataatacatctttagatggttcttgtagcatgtagtccccttgtactt

SEQ ID NO: 133230 - DNA, 463 bp, Glycine max
  unsure (1)..(463): unsure at all n locations
gacttctatggaggctggatctttgagcttttatgatgtcttcaatggnngattttcaccatggagatgcagcggaaggcaaaggagaagaggagaanggaggcgccatccactanggaataagccatggaagaaggagcttcaccaccaagatgagccttggataaaaagcttggaaggatgcttcaatggaggaaaagaaagagggagagaaagagagagaggggagcacgaaattgaaggaataaaagagggggagaagtagaactttgaagtgtgtctcataagactttcattcatcanagttacaacaagtgttacacatgcttctatttatagactaggtagcttccttgagaagctttcttgagaaaacttccttgagaaagcttcttgagaaaacttccttgagaagctagagcttagctacacacacacctctcatactaagctcacctccttg

SEQ ID NO: 133231 - DNA, 392 bp, Glycine max
  unsure (1)..(392): unsure at all n locations
catgcaagctcgaaactctatgagacatttccatgttgtactctanatgttctttgtccgntatacttcatggaaaataaagagttgtagcaatggacttgtctctgccttatcaattttttgaaaagaatgtctttattaatcaaggaaatctttaacattggtgatcccttcagacactacacccctcaaggcttctagaataccacacttaatgatcattagactcatgcgatttgagcaatcccacttctcaaagtgtctccgttcttcaaaggaacttgcatcattaactcgaagagggtgtttagtttataatgcaaggtttagatccatgcaacccacatcaatctaaatgttatctttatattccttgaaattactctcattca

SEQ ID NO: 133232 - DNA, 365 bp, Glycine max
ctgagcacttcattgagaggtgcttgcaatgtgctaaaatccgtatataaaaacttgctaagccatgaaaactcctcacctcggtcacagacttaggtgtaggccattcttgaatagccctaaccttctcctcatcaacttgcactccttgtgaactcacaacaaaaccaagaaacacaacatggttagtacaaaagatgcatgtttcaagattggcatacaattgttcttctctaagcacagtcaagacagaatttaaatgatcaatatgcaaatcaagtgaagtgctatagataagaatatcatcaaagtacaccacaacgaacttccctatgaactctctcaagatatcgttcattaatctc

SEQ ID NO: 133233 - DNA, 371 bp, Glycine max
  unsure (1)..(371): unsure at all n locations
attcacatgtacttccaaggtgtatttggtacctacatcacacacatttcctttgctaaattcacatacatgcatactctaaacactttggctatcaaaaattgcatacgtgcacatcttggtatttctcatacctatacatacacaaacttcatgatgaatcttgactatctacacaataaggtgctacatttcatgcttttttcaagtgtttttactacctanagccgcatgccaaatgaagtatattttcttttgcttactaaaantgtattcaaattaaaagggtattttgtaatgtatttttttacataacatgcaacatatttatagaattttgtgagacattttgactacaaaaaattatatgt

SEQ ID NO: 133234 - DNA, 427 bp, Glycine max
  unsure (1)..(427): unsure at all n locations
agcttgtcatatgcaatatatgcaactattttgttggttattcctggtttaagaatgaggtgataagtcacatanatggttgtgttgtgtcctctctttctgtcgcagcaacaggtaaaagaggattgatggaactttaggaatggaggcacctacttatatagtgctggaagggctctcagacaatcctacatgcaatcttctctggtggctcaataatgtgcatttcttattgaagaggacaggtcctcaaaatcatacccatttgaaacctctcacgttagtcactaatatgttgacagtggtgaagatataaaaatgaaatcaatgagatttatatagagtttaatcttcgtgcattaatagatagaaaatcctgttatctaattacaaagtatggctaatataatttttaaaatattatcat

SEQ ID NO: 133235 - DNA, 309 bp, Glycine max
  unsure (1)..(309): unsure at all n locations
acccccgtccggtgatcaataaagaatgatacaaagtaagcactacttttagtggcaaaaggatttcttggtcaaccaaatcaaagcttttaaatgtctttcgtagaatcttaacatcgaatcgtttctctttttccaatggaaggaactctaagttattttttatggattgtaggagaaatgagagtattggattgcagacttgagcaccanataacgctactaaaaaagatatgagaaaattctaagttactgattaaaatataatgaattntctcttatcatattacttttaanatgatcatatca

SEQ ID NO: 133236 - DNA, 308 bp, Glycine max
caggggcatatgagagagggcgaaacggagggataaaccgatgctgtgaccagcattcctatactgtctatttttcaaaccatttcgttactctgtggatagcaagccttctgcttacctaccacctatctattcagacatgtcttacctgaatgaaccacaaaacggtgttatcacacaatctattctaacaccatgtgttgcctaaactcagacatcaacctttaatgaattcggcacttaatgagcatgtccaatctaccccaatgttgttcctatactgcttgctccatatctcttgatattca

SEQ ID NO: 133237 - DNA, 374 bp, Glycine max
tcataagcatcttaaggaggtccatattgtttgttacaccatgaagcccctaacgtccaagaggatcatatcttactaaagacttgttctcattctctggagggagtggccaaagattggctataccttgctcctaggtccattttcagctgggatgaccttaagagggtgttcttggagaaattcttccctgtatctaggaccactgccatcagaaaagacatttcatgcatcatgaaaattagtggagaaagctcgtatgagtagagggaaagattcaagaaatgtgtgcaagctgacctaccaccagattctaagcaacttcttctcatatattgttgacggattagcacatggagaacatatgattgtgc

SEQ ID NO: 133238 - DNA, 423 bp, Glycine max
cgattttgaccattgttcttccttcccgcgatgcttcttttcatgtacacctgagtgggcttatagcctaaaccatactttccacgaattacctgggtatttatcatgctagttatgccgccgttgtttttttctatacccatcctcgggtcataaccgttccccaacataactcgggccatcattaccgctgcatctgacagacaaggctgcccaaagagggagtccactgaggaaatgctgaccacctcataagactggaaagcagtttctaacgattcttctgcggcttccacataaggcatggaggatgggcagcttaccaagatatctttctcgcctgacacgatgaccaagtgcccctccactactaatgtcacgtgtaggtggagtgtacaaggcacaactcccactgagtggatc

SEQ ID NO: 133239 - DNA, 300 bp, Glycine max
gactatccggaccatcttaatgaggagatgtcggatttgtgttctacttatttatactcagggaaatacttgagcaagaaaatttctatcacacggtaccaaggttgaaaactatggcctgttaatgaatgttaccagctgtatgcatctgcggacagtgaatatgacatcaaactcaaccgcacaacatttctcggtacacctgctatcatgattggattgggactatctatgtatgtggctatgtgtgcataccggattttatcttgtcggctatgaaagtaagtcctctatatcagg

SEQ ID NO: 133240 - DNA, 411 bp, Glycine max
  unsure (1)..(411): unsure at all n locations
tgcatcttttattcngtataagagttgagcaactactatgccacgtgactaatgttgtcaatacgggccggtccggctcgcttttggcccgctataaacgggccagtttagcccgtcctgctaaacaaaacagcctacctttcttagtctggcccatttcaagttggcccacgggccacccatcaatttatttatttatgtttttcagattttgtattgtcgtttatcgttgttggtaatatcaattttgaatctaactctcgtctttttataattttttataactaaaaataataatatactaatagtaaacaataaaagaataatacctatcacaaacttcaatatctagaatctagatgaccttgtcaccttgtgtgtctctaatacctccatttcaaacgatctata

SEQ ID NO: 133241 - DNA, 348 bp, Glycine max
  unsure (1)..(348): unsure at all n locations
ataatccctttcaaagtgttgtgcaagggtataccaccaactgcttgccctttagtggcatatacgaggcaaggctcgaagtccgctaaattgtggtggggaatatcatgtgtctcccccatggtttgagagacatatgcatgatcagtttgaggtttgccgctttcaatgagtatgggaacggagttattgacatcctcactgggagtgtgtgccacattaggtggtgtatagttggaaggcaagccatatggtctgggaaggcgtacttgttnttcgcactaagtgagggccaaccgtacctcacaactctttgccttctagacctaccatatatgaagatggatg

SEQ ID NO: 133242 - DNA, 327 bp, Glycine max
aagtacgaaccgtatcataagatcacccagtgacgttaaagcgtcaagctaatgacgttaaacaagcgcttcctgggaggctacccatttttaaattctgttatatatttttttcttgttttttgcatttaaatcatttggaacttgctatatcagttgtacataggagtatatcagcaaatatttggatgtataacataacggtttcagtttcttggaaaaaggactgaaaaataacttcgaaaaatattttctaaaaaaaacagtcctttctcttagcgtaagcctcgcgcttagcacatctatgttcatgcgctaagctgcgag

SEQ ID NO: 133243 - DNA, 428 bp, Glycine max
  unsure (1)..(428): unsure at all n locations
agtctcatacttttgtccttgcacaattgtcatattcaaactattcctgcactggacgagtccaaccaaccaatcctaaacagggtatattccatcgacttttttggtcatttaaggcatgcattgatgcgtgtgcattttgtaaacccattgtgaaaatcaatggaacatggctatatggaagacacacagggacactattagttacagttgcacaagatggcgctaacaacatatttccattggcatttggtattgtcgagggtgaaataacagatgggtgacactnttttttgcaaaacttgagaacacatgtgacaccataatatggtatatgcttaatctctgacaggcacgagttaatcaaaagtgcatacaacttgtcacatgtgggtggacagcagacaactcgtcacatgtgttttgta

SEQ ID NO: 133244 - DNA, 410 bp, Glycine max
  unsure (1)..(410): unsure at all n locations
ataaagaatgaatatgttaaatctaacattctttatggatggtgtgcattcataataataagaatgaaagagtcactaccttactgcattaatcctattctgcacttcattttctgtgtcaaagatatacaatngtgcaaattgaggttctntcccaggcattggtaacatgcttcctattctatgacatggttgaccttgaattcttattgtaggaggtcctcttgaatgattaattgatttgtcgaacttaatactagtagaagtaaagggaaacataatgttatatgtccttatgttgtgttggtaatttttactatcagatgtatcatgatcatacaaaagttggtggagatatttaggttggatttgaacaatggaagttcaactttgccacctccacaacataa

SEQ ID NO: 133245 - DNA, 377 bp, Glycine max
  unsure (1)..(377): unsure at all n locations
gctgtgttgtatgatcactccgctagcgataaaaacttgaaccattgagatggtttgtcatgagcgaaagcgcgcaagtattattctagggtacgattgaggatctccgtctgagggtggtaagaggtgttcatccggagtttggttccactcaaccggaatagttctctctagaaactaatgatgaatatgggatcttgatcagataccaagcttcgaggaaatccatggtgtgtgtagaccaagtcgaggaaaaggagggcgaccttgtacaccgtgtagttggagggaacagtgctgaaatgggcacacttctaatattgntcgatgatgatagaatagtggtgaagccctgtgaagatggtaacctagtgata

SEQ ID NO: 133246 - DNA, 332 bp, Glycine max
gactttattcattgatgttataacactattggggtttaggatcgccctctttccaaatgtagatgggctagtggatctaacaacaatcgatgcctttcttgcttatcagcacaacaaggaaagcccgatcgttgctattttggccgatgcctatgacatgttcgaccggagatgcgagaagagtaggcgagaattgtctgttgcacacccgctctttatgtatggctggtctcccactcttttcgtcatgaaagtagacccgtctgtcccctacaaggtcatcacatgtgtgccaagaaagggaaaatgaattgggagaaactcttggcggg

SEQ ID NO: 133247 - DNA, 424 bp, Glycine max
  unsure (1)..(424): unsure at all n locations
atgatgaagatgttggccttgtgcaattttataaagctcgccccangcatnttgttaaacatgagcttgaagtgctcaaacacaagtttgggcgcacgactctcgatggccatgccatacaaacattctatagatngcagtagtattgctttggcttggaacctaaaaagaagccacctattggttcttatcatcattaaattgagtgttgttatcagactttgaaccacttcacttctgcttcactcaagaaactcccttccatgatctattcatggcaatgggatgtctatgctacgtctaatcacaccttctcttttatgatgataatttcattctctcgcttcttcttcacccatcatgtagaccccatcattgaagatgttgatcttgacactgatgctatgttggctccatggtattc

SEQ ID NO: 133248 - DNA, 382 bp, Glycine max
  unsure (1)..(382): unsure at all n locations
acactgtcngacgtgatcacattatatacctctcatcttcgccttggatcctgggaatctcatattatttttttgtcgtgactatctgatgaccatattattacaaggaaaataaataactatcttatctttggttaatcctctgtttattaacatttattcttcacatcttctgatttatgcgatagccccctttctatcacattttatcattntaccgagccaataaaacaactgaaaattgatattttttataatccatgagatcggaccaatcttgtctaaccatgtttacgaaattcaactaatccaaaccaacttaatactcttaagagaaaagcaaaatgtgtactataatataatttatacaatcatttaatat

SEQ ID NO: 133249 - DNA, 454 bp, Glycine max
atatctctcacaacaacctgagaggaacatccttgtttctcttagtgaaaaggagagttcgtcagccatcaacctctcctgacaaaaattagagggcccagatcctgaaagtggcgtattcaattcttctcattctctgcatgtgagcaacaacagataattatgcgggaataatcaatgattgcgtacatgtgatgttcctctcactaaacctaatggcggatcaagtaacaaaaagaaggtactgatcccaatagcttattccttgggaggagcatccacaatatatatggtaggcggagggaatggttacttatgccacacaagaaagtcatgaacctcacgaccgacaagttcaacttaaatacgcaaggcattacaaattggtctttaaggcagagttgatatggtgacacaatcaatctaccagtaccttgacaacaatactgcattg

SEQ ID NO: 133250 - DNA, 431 bp, Glycine max
  unsure (1)..(431): unsure at all n locations
agcttcaacatcaattctgagtaatactcttcttccttgttgacatcaatgaaggtataaccttcattagtacttgcactgtcttcaacttcttcacccaatgacaaaagtgatggagatccccactntnttgactttgaagcaacggagctcggaccatctgcaataaaaaatcacatgttaaggtaggtaaaattaaaattaaagaagctacaagagcaggtgaagaatgcataatgttgccactttagaagcttaaaggacctgtttattgtacaaatctaaacaaaatgcaatctgantttttaagggataaaacttacgtgcagctntatagatgtgtttggcgactaanattagactntaatctcggtaattcgaataatanaaaattactttcaagtcaacatagattaatgatgtcaaactct

SEQ ID NO: 133251 - DNA, 377 bp, Glycine max
  unsure (1)..(377): unsure at all n locations
tgatagcctcaaaagtngattatcatgactgaaaatgaatggttgcaccattacattgtcataccatntaaccacaacagaaaatttgatacaaagtcacactaaacttgagttacactacatctacttaagacactaagtataaacattgcatgaagtatacatgcattcagtgtaaaactgaaaccttgtgttgataagcatgatgcatcaaaatattagtgaaatgtacttagtcatacaacactcaagtatttattcaatgagtaacaccaaactcttacattgtcaatataattttgcacacaattactaacatacacatgtagtcttaaactaaagcntgcataattaaccatatctaaagaactcatgtt

SEQ ID NO: 133252 - DNA, 222 bp, Glycine max
gaatattttatatattatatatatatatatatctagtatatacatatatatatatatatatagataaaaattagtggtggtacgagaagaaagaagggtttactttcgcttgacgttcgtgttagaccaatggcgttcattagccaagatcatgttaaaattttgctgagtcatgacttatgcaggtgaatataggtagctatgctgagtgaacgaaataat

SEQ ID NO: 133253 - DNA, 441 bp, Glycine max
  unsure (1)..(441): unsure at all n locations
tgccgcatgcaagcttatgactgaacttagaatgaagcgattattgataagacttgatcctttgatgagttgaattgatccgacgttcaatattttatccactaaatattaatataatctatggcgtaaatacttgagttgagaatcaattatttgagagatgaagtagtcagacaatccatataattaagagacattatttttctggcatgagcatctttaatgctaaacattagtatatcttcgctattaaacatcattagaccaatagagttgcctaactntatttttatgagctctattatataacatctttaataagattaacaacttttttcactttttaataatgtaactcttcatatctaacttaaaatagatctaatanattattggagatgtttatattctcttaataaggaatacatttatattaaaaac

SEQ ID NO: 133254 - DNA, 415 bp, Glycine max
  unsure (1)..(415): unsure at all n locations
taagtattaaaaattttattttgcaattatactttatgtattcatttttctaatgaaaatatatatttgcaattattatgttatcatgcataacatggagatgtgtactatatagaaatcaagaaagaagaanagtcgattgtgtaggaaaattacctttgtttatgtttgatcttgtagagattgttgaacaacacatgtcagcaccaataatatgctataaatataaagattattatgacatctattntattttagtaactacttaaactttaagttntcatatgatgattgatatggctatatatntttaacatttattgccaacttagtatatagtaaatatttaataaccacatccaatataacaacatagtaattaattcccctttccataananaataattataatat

SEQ ID NO: 133255 - DNA, 276 bp, Glycine max
aaatcatatttatataacattgggctcatttcaccgagcacttggtggacgcacgtttagacataaatcgcatgagaatgggagcactgcggcatgcctcatcgcttcagaatacaacctatgcctaaagccttttattcaaatgtttatttaagaaaacaagcaccaaagcagaccacaactgccttacatatataagcatgttctcacaattctaggcaccaaaagatgaagaatgcacatcaatgttaaggcaaaacatcaaggacggaatat

SEQ ID NO: 133256 - DNA, 379 bp, Glycine max
  unsure (1)..(379): unsure at all n locations
ttcatttattattagtcattcgataagaaagagatatcccaagagaaacttccgattgatttttttgctttaatttactgatcgaggccgtacccgaatcaaataaacatgaaaatgcagtaactaggaagtgatcctaggtcgtttcccaacgagcagtgacacaccaaatgttcataatatacttgcagtaacagtaacaattgggggggtttgtttgttttgcgantaaagatcataacaagtaaactggaatacgaaactactaatattaaaaacgggtcgtttcctctgactcataagccattctcttatcctgcgttatggagaatttgtcttaacagttaaccgcttaatccaaccgtatttaaatttacta

SEQ ID NO: 133257 - DNA, 401 bp, Glycine max
aagatgatgacagaggtgatgactaaaagcttcaagatctatcatagaacaactcatgtggtccagaacaattcaagagttctagatacgaatcaagaagaattcatgactcatgaagaaggtctagagtcaagaatcaagattcaaggttcaagatcttacgaatcatgatcacgattctagagtcaagagaaggcttaatcaagataagtatgacagttttttctcagaaattgagtagcacatgattcttctcacaacatgttggccagagagttattactctctggtaatcgattaccagaatggtgtaatcgattactagtagcaaaattgttttgaagaagttttcatattgaattacaacgttccaattaatttctaacagctgtaatcgatta

SEQ ID NO: 133258 - DNA, 424 bp, Glycine max
atcattccctatatatgattggcactttctaaagagaggaattctggcttacatgcacctttaccatagcctatgtttataggattacgaataagagaagacaaagacaaagaagtcaaactggactcaatgaggcccagcagaccagaacaaaaaaagaggaaaataactgatggaatagattgaagccaatgactgcagtagagcaatgactgcaacagagcaactataaaagtggcccatttgtgatcaggaatagattgatcatgtcacaatgccaaaaggactcttgacctagaagaatgtatgttctatatttagaatatcttgacctcgacaaaaacagatggcattgataaataaaatcaatattagaagcttttcattacacagtagcaagtagctcatatcatttcactttata

SEQ ID NO: 133259 - DNA, 389 bp, Glycine max
  unsure (1)..(389): unsure at all n locations
aagatgttgacaaaaagcccaaattatgagttcaagattaaatcaagaacaaattctagaatcaagagaagtttgatctcaagattcaagaaaagatgaattcaagttccaagagaagaaatcaagaagacttcacaagggacgtattgaaaagaattttcaaaaaacaaacatagcatagttttgtttttcaaaagaagttccacaaaantttctaagttaccagagtttttactctctggtaatcgattaccaattttctgtaattgattaccagtggcaaagtttgatttcaaaagttttcaattgaatttgcaatgttctaatcgatttcaaaatggtgtaatcgattacaagtnttcggcaatcgattaccagtgcatctgaac

SEQ ID NO: 133260 - DNA, 367 bp, Glycine max
ggaccattattcaatcgactgatgattctcttgattttttgcgcagtgagaggaatctcgttaaagagacaacatgtgataggatagatgaagttatataaaataacaacaagtcatagatgtggtgacaataaataaaaaatactgctcaagtgataaatatatttctctctcaatattccgctaaaccagacgtagcagaatggcacaagtctccggatgatttgcagactctttattgatggatttgaaattgatcatgcaaattgcgcgtggtaggatccctccttatctaaagccgcgttgtttcatgctaaaaacacgcccctaaaatattcatagaaaggagaattctacctgaattacc

SEQ ID NO: 133261 - DNA, 404 bp, Glycine max
caaaatgtatctaattcttataatttctcacaactttgatcataaattcttcaaggaatcactgtaattgatactcgctttggcattgaaataataataaatgcttctgctacaagacaagatgatgagaaatttattttagcggtatgcggaaaaagtctgtcaattctctggataattgtatgttatgcagaaacagaagatgcaccctgctatgtatgaggatcatgttgctcttggtcgccctgctacaggaaaattgagatgcagtgaaaggctgccttcctttgttaaatctcggtcgtgctcgtgctgcaatccatgttcccccaacggatatagattggcaggtcaccaatatggaggcataaaatgcctccggagaaacatctgaacactagatg

SEQ ID NO: 133262 - DNA, 433 bp, Glycine max
  unsure (1)..(433): unsure at all n locations
gaacaactagacactctcttaaagaattatgcaataatatggcttttgtatccatgattgaacctaaaaatataaaagaagccataatagatgataattggatcattgccatgcaagaagaactaaaccaatttgaaagaaacaatgtgtggaaattagtagaaaaacctgaaaattatcctgtcataggaacaaaatgggtttttagaaataaattagatgaacatggtataattattagaaataaagcaaggttagtagcacaagggtataatcaagaagagggaatagactatgaagaaacatatgctcctgttgcaagattagaagccattagaatgcttttggcatatgcatccataatggactttaaactctatcaaatggatggtaagagtgcctttctanatggttaattcaagaaaaggatatg

SEQ ID NO: 133263 - DNA, 431 bp, Glycine max
  unsure (1)..(431): unsure at all n locations
attcaagcttcaagcctaaagggatttcatgtatgaagccaatagatattgtaggaaagccactttaactgcagtcacccttaacccgccttagttgcaacctcttttggggcatgccttaattacagcctcaagggtaatggtttagtcccacatccactaaaaatatgtcttaagtagagcttatatagcttaccaatcctcaccttacaagctagttntgtggagttgagttatgtcccaagtccaaattctaagtgatatacacgaaatagaagcctttcttgcttatttactactaacatgtacttgtaactacaagttccccgtttatttgaatgaccaaatggatgacacaacatagaaaatacggctaaaagtgaaagacggtgaaacaagatgaacatcccaaggatcataatatactacat

SEQ ID NO: 133264 - DNA, 249 bp, Glycine max
  unsure (1)..(249): unsure at all n locations
ctgatacttctacctgagaagatgaaactatgaagtagacctctctcatttcagtggaccatggcttcactgtctaagagcacaggattgatgttgaatgtccaagagaggaccaagcataatggggaagaaacatgcgctatggttanataaaggacagcagaacactggctagggttcaaagaaaggagttcgtaacagagatgtgaacaaactacgacgaggctgcgctggtttgttctttcatat

SEQ ID NO: 133265 - DNA, 365 bp, Glycine max
  unsure (1)..(365): unsure at all n locations
gattaatcatgaagcaatgcttaacctttgaatggttgttgaagtaatcctgaaagcaaccttgtttgattattctttggcatcaccaaaatcatgtattcatacattcacacttggtagggtctatcttcaggtttccaattcttctacacattgacaggggcatcaaattgatgcttgcccctgagtcaatgagagnccttccttctaactcattccctatggcgcaagggattgtcccgctcccaggatctttaaatttcttgggtagcatcctctatatcaccatactgcagttgcctcccaccacaatgctttcattgtcaatgtacttcgccttcttggtgaggatgtccttcatgaat

SEQ ID NO: 133266 - DNA, 410 bp, Glycine max
  unsure (1)..(410): unsure at all n locations
cattgaaatgcagaataaagtccttgtttgtctntccaagagttccaaaactcaataaacttccgataaagccaacatatgagattcaaagttgaaaattaacatattcaaacaataaaactaaactagtattttggtgttcttgtacataagtttagtcttgtttttaattcattttacttgattntgttggcaaaactcatggaattttgtgaagtgtgacaaagttaggacaagggtggaaaaatgtggaaaccttgcataaaaaggttgaaaaagcgttagatgagtgcttcaatgaagagtaccaccatgctcctaggagaacagttgtgcttattccataacaccatggttggctacaggaagggcgttctcaattttttcattaaaatcccatcaacatcatc

SEQ ID NO: 133267 - DNA, 417 bp, Glycine max
  unsure (1)..(417): unsure at all n locations
atctgctgctgttacatgcacgattttggtagctgcaggacctcaacgatctcgagttcttgccactctgnacaaggtgaatgtttactcattaaacaatatacagattttagaatccttgttgcanaggtcaaatctcatcatatataatgcttgtgggcttggattacgatgagcggtgctcaaagttgaagatctatccaatattgcagaaggtatctccctctccctcccctctcatatggccttccacacggatcacataacatctcttgaatatcaggtgtattcggagagaattctcataaaaccagacattgatcctttgcagaagaattgaaccacatcaggttattctagttatactgtatctcatattttggaagcatagtccgtaggctcactttttctttccac

SEQ ID NO: 133268 - DNA, 419 bp, Glycine max
tttcatctttgagactttatttttatacattttaattctgaaggttgaactataacctacatattgatcatcttaagtcttaacataaaaaaaccatttaaggcgaatctaacaaaataaacaaaccaacaaataaggcaaaaagtaaagacatatatgtatatgaattatttagaagaaatgataatcactttagtcattgtatttgaaagtttttgaaattaagaaaatgtaaaaaaaaatccctaaaagtaaaaatctacaagcacattagtttagaaatttaaaaaaatgatttgagtgataatattcacatatatttatgaatcacaagtagtagatagttaaaattaaggacttatatgggcttttaatttacaaactaatatacagattcgtctaatttaagcaaagtacta

SEQ ID NO: 133269 - DNA, 454 bp, Glycine max
agccctgactctcggcgattgctttaattctagtcacttaaaaagtcgggacttttgaaagaatcttcaaaaacaagtcacttgaagaattgagactttcggaaatgtatttctcgaaatcagtcactggtaatcaattaccattaaggtgtaatcgattacacatcaacagatctgactcttcattttgaattgtgaaaattaacatgtttagaagctctggtaatcgattaaaagtgttgtgtaatcgattacacaagtttaaaatactgtaaaactgtttaaacataagttgtaactcttgaaatttgaaatcttaacgtttaataacactggtaatcaattactaccttctggtaatcgattaccagagagtaaaactctttggtaatgaattttgtgaaacttcgtgtgctactcaatgcttcaagaactctttagtacttatcttgat

SEQ ID NO: 133270 - DNA, 385 bp, Glycine max
gctaaatgaatatacacaacttctattaactcttcatgcaaaaatggcattttaaccacaaggtgatgtatatgccaagctttggagacaacaatattgatgacaatatgaataagtgctggtttgaccaccagactaaaggtttcgtcacaatccacgccaacctgttgagttttaccatcacctacaagtcaagctttatgcctctcaaaagaaccatcaaatttttctttatgtccaaaaatccacataaaccaaataatattcacatcaatcagatggggcaccaactcccacatcttattttaataagagcattatattcatcatccatagccattttccaatttgggttcttaagggtcgacacgagattacgaggaag

SEQ ID NO: 133271 - DNA, 393 bp, Glycine max
  unsure (1)..(393): unsure at all n locations
ctgcagcaataactgcctttatttgatcaactgtcacagttcttgctgactaaaagggtataaacaatcaatgtaatgtatcatcaaacagacacttgagaatataaagaaccttactatgataacataatgtaggctcaccttcaatatgtaggtgggaatctgagatccagagaacggattaaacttgctaataatattcaaatgggctgctcggagatctggctcgataaaagctttatacataggatacacctacagaaggaaacacaataatagttaagaattatagcacgtgccttggtcttaaagatgccaagtttcataactcctaaagacaacanatctaacatgggatcagtgaananaccgttcagagatttgatgaattat

SEQ ID NO: 133272 - DNA, 434 bp, Glycine max
  unsure (1)..(434): unsure at all n locations
cattataggatgagaatctcttttgagtgcatgctatagtctaagcccaagcatttattagacaaagtgaaggcgatccaaggttttcatccctgcgataggtttaatcctatcgtgggagagccaattaaatgacatacgatggaaaatagattgtagtcgtggaaaactagtgtttcttgggataagtgatgcaacgaccggagcaaggttgttgatggaaaactttgttgtcggtgttataaaagtcgttattaatgtagagtttgaagccaaaagataaggtgcatgcaaattangaattagattttgattactaaggtttangtgacttaaatgcanagtgaaagattacattntattatatgaaccttagttgaatgaatacattataagnntgtttatttcaacttctaaaagaacttaattattat

SEQ ID NO: 133273 - DNA, 426 bp, Glycine max
tctctacctacaagtccttgcaatggttgaacaattcatcaccatccaacctggtgtgcagcaactaggtcaacacacaaccaacttttgaagacaccttacggtctcagcaaaggcaatggttgcattatccatcttaaggcgctgcactctctaaacggtgcaagtaatagccctccatttggagacctctgccgccaaggactctaccttgtgcaaagcctcttagtaccattgtccattctcctccagaatcgccaaacttctctggagaaagggcttggcagaatccgtagcgttctacaccctagccgattaaaacaattttttgtcaaaggctgacataaatccagtcaaggtcttctgctccatcctataacttgcaccccacaatgaattatcatcgctggaggtgtcaagtgatct

SEQ ID NO: 133274 - DNA, 230 bp, Glycine max
agctgaagacaagcttctcatcatactcaccaacgacttcaccacccgcttttaatacccaaatactatcgaaggaaaaacgttctccagaatctcatcaaccaactatgtggtcgcatcacgacttaacatctcacatgaaccgtaacgtgtgcatattattggatgctacactgacacaatgtgcatggtgacatggatcactactcacgtgaccgactttgatgctt

SEQ ID NO: 133275 - DNA, 435 bp, Glycine max
  unsure (1)..(435): unsure at all n locations
gatgataacaaaagatgatgacataggtgatgacaaaaagctcaaagatcaatcaaagaacaactcaagtgaatcaagaacaattcaagagttcatgataagaatcaagaagaattcaagactcaagaagaaagtttagagtcaagaatcaagattcaaggttcaagatctcaagaatcaagatcaagattcaagaatcaagagaaggcttaatcaagataagtatgaaattttcttctcaaaaattgagtagcacatgatttttctcaaaacatgtttgccagagagtttttactctctggtaatcgattaccagattggtgtaatcgattactagtagcaaaatggttttgaataagttttcanattgaattaccacgttccaattaatttccaaagctgtaatcgattacaatggtgtggtnatcgattacc

SEQ ID NO: 133276 - DNA, 444 bp, Glycine max
  unsure (1)..(444): unsure at all n locations
agcctttattcaggctcatcttggtgttttaatctccttcttccatggcttattccttaatggatggcgcctactttcacctgctttcctttgtcttccgctgcatctccatggtggaaaatcaccattaaagaaccccattgaagctcaaagatccagcctccatagaagccccacaagcaagcttccatcaagtgcggaccctcaaggaaatccaccattctccccatttttcggagccccataaatgttattgcctagcgctattcatgtgtcctccaccttcgagtctggagctatgtttcatgattgcctaagtgcggaccctcaaggaaatcctccattctcctcctgtttcggagccccatgaatgatattgcctaacgctgntcatgtgtccttcaccttcgagtctgtgagctatgttcatgattgactaagtgc

SEQ ID NO: 133277 - DNA, 407 bp, Glycine max
  unsure (1)..(407): unsure at all n locations
gctgacaatagccgagaagtccgtggatctcctcggnggaagagtaagtgtccgccatcgctttggccttggctagcaatcggggaagttcttgactcccgttcaaggtaagagcaaatcggtccatccacattgtttcctcttgatgtaacgagtcgatcacccttcctctagcctccttttccgcgtacgcttgggcatattcgtccgccactctatgctcgtgggccgnggctagatttagttcttcttggtacttgctgacgatagctaacatgttgctctctgtctcgcttaaccgctgagacaagtttcttttggaccttgagcaagccttcaactcatctttcaagatcagactatctactcgtgatcggtccctttcctctctccggagcttaagctcg

SEQ ID NO: 133278 - DNA, 281 bp, Glycine max
ctcactccccctcattaagaactagctcctttcttcctctattgtcttttgtagcatacacctttgtttggttctctatttggttcctaaccctctcatgcaacttctatacatactctaacctagattaccccttcttatgtataaaagaaatgtcaagtggggggggaattaagtctaagggtgttagaggattgaacctatacacaatcccaaaggggattgttggtggtttatgaaccccttattataggcacatctacatgagtaagaactcatcc

SEQ ID NO: 133279 - DNA, 445 bp, Glycine max
  unsure (1)..(445): unsure at all n locations
gggatggaccttttcaggttggagagtatcaataacaatgcctataggttggacctcccagaagagtatggagtcagcaccacttttaacatttctgatttaactccttttgcaggtggagctgatattgaggaggaggaactaacagatttgaggtcaaatcctcttcaaggggaaggggatgatgcaatcctccctangaagggaccaatcactagaaccatgagcaagaggctccaagaagactgggctagagctgctgaagaaggccctagggttctcatgaaccttanggtagatttctgagcccatgggccaaggttgngtccaattatctttgtacatattagactaggatgtcattatatntggtccttgtatatagggctccatattgtangtagggtaccctaaaaatatatgaaattttcagcccttgtatttt

SEQ ID NO: 133280 - DNA, 355 bp, Glycine max
tatctaacttgacacacaaccttctggcactctacatacaaaccttacaatgatcagtctcttgtaggataacaggttacgacacttatcttacacgacgattattattagtttctataacagccttatgatttatttattgtcatcaaaacttgagggctggatcgtctcatatctcacaatcctttctcttctaagactacaaacacatataagatgataagtaccaagctctctgataacaaggctttcaaataacaaatgaaactacctccttacatgagagaaccatttcagtgtaatctcaagttcaaacaaaccataaatggaatacttcggttatccatgcttttaa

SEQ ID NO: 133281 - DNA, 416 bp, Glycine max
  unsure (1)..(416): unsure at all n locations
ggaactacttcttatggacttgatggggcctatgcaagttgaaagccttggaggaaagaagtatgcctatgtcatccacaacagagtcacacttagaagagggactccaaccactctgtatgaaatctggaaagggaggaagccaactgtcaagcacttccacatctttggaagtccatgttacattntggcagatagagagcaaaggagaaagatggatcccaagagtgatgcaggaatattcctgggatactctacaaacagcagagcatatagagtattcaattccagaaccagaacagtgatggaatccatcaatgtggttggtgatgatctgtctccagcaagaaagaaggatgtcgaagaagatgtcagaacatcgggagacaatgtagcagatgcagctaatagtggag

SEQ ID NO: 133282 - DNA, 317 bp, Glycine max
tccaaactccccctctaaaatttgatttcaagcttaaataagggggcctgttcatgctcgtgcgcttagcgcaattatcgaccgcttagcgcacattaattgaacttggcttaacgcgtgcctttctcgcttaacggatgaactgaaggtgtgtgcttagtgagatgaaacggtgcacttagtgaacctgtaagctcatcttcttcagagtcttctcgcgcttacccatgagtgatgcgcttacggatgctgctaacccacagatggcttacgagaagggaaaaaaacacttttcaagcttgctaattacctgaaat

SEQ ID NO: 133283 - DNA, 298 bp, Glycine max
agatgatggttcagcgggtgaaccaggagcgggagtttctttttggtgagggaagcacatgtgaaaaacagtagcgtctcggaatgaatgtcgtatatctcacaatactattgtgaaatgctggagaaaacacgaatgctcagcagatataaatttgaatgaagaatgtagaggggcgtgagaagcaacggtcgaatttgctttgtggtgaacgtgctattaatgttaagcgattcgtttgggcacgttcagattgctggagctgctataattcctctagcagacaaatgcccagctt

SEQ ID NO: 133284 - DNA, 389 bp, Glycine max
  unsure (1)..(389): unsure at all n locations
caaacttgtatgattcacattctcccgcattgttatgatgacgatcattatcaagtgaattcttttcgacatcatcaaaacctacatgtttcacattctgcccctttttgatgatggcaaccatctgtatgttaggagtaaaaaaaatatctatttgtatagttcattcccccttgattttgtaatgattgcttatatgaaacagttgaagattgcatatatttcatatataagaagttgtctcataaacccttactatcttatcttttgtctatctctccccctttatcaacatcaaanagaaatcatgaacagagaggagaaaaatatttagcaatttataatgaattaaaagagtagagcatgtcataccattcanagtatcattt

SEQ ID NO: 133285 - DNA, 369 bp, Glycine max
  unsure (1)..(369): unsure at all n locations
attaatctatgatgatcactgggatagtggcttcaccacttgccatggtagctaagagaactgggcaaactgtgcctcagctaagtgttatcaaagccatccctgatgntgcatttgttcctggagctaccattttggctctcattgctattaagctcacaaaaagaatggcattcaagaatatcccatcccttcctcaaaaagaggaggagtacccttcctagctttcccttttgatggaaatgtgcattattaaacggttcatgttattcccacatgcacattaattgttacttgactctatgaaccacaggagcttcattgcacttggcctgataatcccgtgttgtgctctccttcattattctc

SEQ ID NO: 133286 - DNA, 484 bp, Glycine max
  unsure (1)..(484): unsure at all n locations
caagctntaccggaaagcttggcacaatacttttttntcttgcagacaccgttttcattttcncttattcgccaccaacgccagtcaataatttgtttagtacgagcaagctaattntccttgttgatttccctcaatgataggtttaccatcgaggtcgcctctggttattcgtgggaactcaaccgccgttgtgtttcggtcgacattggcctgcgctggtaaaagaggcaaagaaaaatatagccgactttggcagcaaaaacaaatccctctacaaacttggataaaaaacaactctagccgacatcggccaagaaagattaactgtcgctgtatcccacaaagaatcaccggatgaagactatcgaagaattccttatcgacatcatccganatatattctgcgattgaacagaatagcaatagcccataacggttgttaactacacccaactgacatttcgtcacagacctcaccgga

SEQ ID NO: 133287 - DNA, 352 bp, Glycine max
  unsure (1)..(352): unsure at all n locations
attggtcttcagcttcataagatacttttccacgatcttgaccgttgggatctttgagaatatgtctggagtgtgctagaaagcttcgattctgagagcatttcttatttaagcacttcagctnttgctttcgtgtagcttaagaanaatgtcatttcttcttctttctttcttccaaagtcatttctaaagttccaagcactttctccatcacccacagccaccattagccaccacaaaccatcgttgttctccacaccgagaggaacccttcaaccgaagtggaatcttccaacttggcttgcggtttcggtagagaacgaaaccctaatctgacctttcgttttctttc

SEQ ID NO: 133288 - DNA, 413 bp, Glycine max
ttgagaagagaaacagagaatgggataaaattgaagcaaactctcacttcgcacaaatgtataacatcgatctaaacttgttcaaactggagttacacctaaaatttcaccgaatcaaaatttgactcctaaacacccaaatttaccctagaaatggctctttgttcactttggtcatttgtatttctctctagcacagcccaaactttctcataagtcctaaatggcgattcaagctaggattaactcactctaacctccaaataccactaaatccagatttggccttccaactctcatagtctcactctttttccactcacaacaccatactctcaccttctaaccctagggtaactctacccttcatctctaacagtttttcataagcaagttcagcacataaacatcac

SEQ ID NO: 133289 - DNA, 440 bp, Glycine max
  unsure (1)..(440): unsure at all n locations
agtacgaagaagagttaggtgtagccacggcccacgagcatagaatcgcggatgagtatgctcaagtatatgcggaaaaagaggctagaggaagggtgatcgactctttacaccaagaggcaaccatgtggatggatcggtttgctcttaccttgaacgggagtcaagaacttccccgattgttagccaaggccaaggcgatggcagacacctactccacccccgaagagattcatgggcttctcggctattgtcagcatatgatagacttaatggcccacataattagaaatcgttaggaaacttgtatggtctcttagaccttgactggatatgactatctttttgaaataaaatgaagtggtcccatgttcctactccaaaaaaaaacttgtgcanatcanatcactcctacatctcatctctagcataacaccata

SEQ ID NO: 133290 - DNA, 421 bp, Glycine max
  unsure (1)..(421): unsure at all n locations
gcaagctntacatgagtcttattaatcatgagttctaatcaactcaacgactacgaatcatatgtttgagaatgtgtaaaatacatttgattagtcttaatatattctctggaaaataaatatgctcacgtttgattacattgtaactntcgtgagtatataagaattttttacaaatatatcattcattataaaaaacttgctactaattgaatcatttcctcaacaactttgatgtttgtgtgtgtgatatatataagagaacaagtttgaaactttgactagtcaaaatctagattagggactaacaacataaatccaanaaaattataaactaaaaaataataaacctttttcttttatatgggtgcataaatcattggcaacaacacctaattggtctttaatcaattgaagcaca

SEQ ID NO: 133291 - DNA, 421 bp, Glycine max
  unsure (1)..(421): unsure at all n locations
aagttttccacattcacaatgcgcgcataaacccaccatcccctgttggccacctccaactgagctcacgtactcccacgtagcccatattctcgtttctctcaacaccggggccccatcaatcctcccaagcttccacaacatccaagcagaacaacattcacacagcacaagctatcacagccaagcaaaacagagcanaggcagaaaactctgccaaaacaccaaccaaaaatcacagcttttcccactcaaagaccccagtaacaattccttcgatccaattcgttaaccggtggatcgactccaaaattntactggaagtctacagtgcataagcctacantttgaccgttgggatctactagcanacatccagaactcattctacattactctttccacaaccagcanatacatg

SEQ ID NO: 133292 - DNA, 427 bp, Glycine max
  unsure (1)..(427): unsure at all n locations
tcaagactgcaagatcaagcatcaagaatctcatccaagattcaagattcaagagaagaaatcaagaagcaataagtcaggacttcatataggataagtattaaaagattttttcagaaaccaaatagcacaggtttggtttacaaaagagttttctcanatgttctaaggtaccagagttgttactttctggttatcaattaccagttggcaataatcaattaccagtgaccagtttggttttcaaaatattttcaaatgatgtgcaacgctccaaaatgattttcaaatagtggaatcgattacacaatattagtaatcgattacaagtgaatctgaacgttggaattcaaatccaactgtgaagagtcacaactcttcataatatacattggtgtaatcgattacaccttgtggtagtcgatta

SEQ ID NO: 133293 - DNA, 419 bp, Glycine max
  unsure (1)..(419): unsure at all n locations
ctctgatagcccttttgttccttgcttgcctttccttggtntgaagctcactacaagccttaagtgaaaaaccatgatattaccatatccttaaggaattttggagctttggaattgttttgggaataagtgtggagggtttatgtttcattggacaacctgctttgagggctatagcatatgatgcattttgggccatacttgatgcacattgtatattggctaaatgttggacatgctgaatgaaatgttggttctcaaagtctaaaaaaaaaaagataaaaaaatattctttaaagaattcggaaagaacaaaanaaaaaaaaaagcaataagtgttgagtgaataacatcttaaatggcacacgaatgatgaaactcttggctctactctacatgatgaagacatatccctactt

SEQ ID NO: 133294 - DNA, 438 bp, Glycine max
tcctcctttcgcagccttgaccctcacaacttgattttcttagtctcacagctctttgattaccatgctacccttgcagaagaacatatcattgttgtgcctctcttgaccttgactaatcaacattagtatggtaccaatggatgtatcacaatgggcagatccactcatgactgtagttcctccaggctttggagtctcgttttgccccaactgcttttggtgatctcgacgacaagcttttcaaacttatccaagcctcctttattattgattatttaagcaattttgaggctttagttaactgctgtgtggggctaaacccctctttcttgctaagctgttttatctcgaaattgaaataaaaaattaagcatgaagtcctagctcactagcccaccatgctttccaaagcggtaggccttgcgtgattgcatg

SEQ ID NO: 133295 - DNA, 238 bp, Glycine max
ctttgttttgaagctcactacaagcctaaagtgaaacaccatgatatcaccttacccttaaggaatcttgaactttggaattgtctgcgaataagctgtgaataagtgtaagggggtatgtctcattggaagatatgatttttggccatgcttaatgttttattttggccatgcttgatgaatatatatattgcctatgtctttctttaatcctcaattgcgtactggtcaataaaaa

SEQ ID NO: 133296 - DNA, 307 bp, Glycine max
tttcctttagcacattgaggcatggacatatgcagatatactgggttttccctcaaatttaatctagcatatatgcattataaatctaaactattaaagtctgaaacaaatgccatcacataagcttataagaggttagtcgaataaagcataatacacatgatctcagatagggatgtgcatatgaactagatcataccaactcggctacaactgaactaaatcgactaacctctcatatgatacgataaaaattcgagacttcacatgtctatttgatggtggtaggatgagatacatgatacta

SEQ ID NO: 133297 - DNA, 290 bp, Glycine max
  unsure (1)..(290): unsure at all n locations
tttttaatcactcatgcgcccaataaatgagcaatgaatgggtcagcatcatcatcatgcagatgatagtttggcncaatgagacaaagaggttggcctacactggaccacgtagcttctgcaaaataaataaaagtagcgctagatttggacttatcctacgaaaaggcagtgttatatttttcccactacaacgaatggaacgtacctggtcttaaaaaattatgaataaataaataaatcaagtagtacgtatgaacgttggaataaaacattacgtatctattatt

SEQ ID NO: 133298 - DNA, 389 bp, Glycine max
caacccaactgcctgctccagatatttgaaagttttctgatatttttaatacacccattaaccagaaatcataattgtccactgtgttggcttctaaacattattctcactctggttcacacacttgatcttcttcagcggaatgacaacctgtacatgattgaatataactttcacaacttcaacatattctggatcttgagaaacgatgaaatattaagagggtttgaagttaaatgtaattttaaaaagtaattgtgcaaaagttgattctaacttatgggagaatttcattcatttactttatattgtggcctataagacttgtgagaagttatgcaatttgctactattatacttatactgacttatacgatcctacattggct

SEQ ID NO: 133299 - DNA, 411 bp, Glycine max
  unsure (1)..(411): unsure at all n locations
cattcaagggagaagctagtatgctaacatctttaacaaaccgcctatagaaactagctagcccatgaaaacttctcacctcactcacatatttaggtgtaggccaatctctaatagctattactttttcctcatcaacttgcacacctttagaactcacaacaaaccctaggaacactacttgattagtgcataatgtgtatttttccctattggcatacaaactttctttcctaagcacttccaaaacacttctaagatgttctagatggccatcgagtgtcttgctatatatcaaaatatcatcaaagtagacaagcacaaattctccaatgaagtgtcttataacatgattcataagtagtgctaggtgcatnggttatcccaaaaggcatcacaatccactcatat

SEQ ID NO: 133300 - DNA, 461 bp, Glycine max
agcaatcaacgacataatgttactcgttgtttattgatccgaaatatcagacgctgaatggatactgaacatctgagcaaattcaaacgacaataatatttttactcggatgtctgatagagtcccgttatatatcgaaaagctcgaaattgaatgttgaagctctgagcacattcaaacgacaataactttttactcggatgtctgattgagtcccgtaatatatcgaaaaccttgaaattgaatgtagaagctctgagcaaattcaaacgacaataactttttactcggatgtctgattgagtcccgtaatatattgagatgctcgaaatggaataccgaagccctgagcatattcagacgacaataactctttactctgatgtctgattgagtcccgctatatatcgagatgctccaaattgaatgttgatgctctgatcaaattcaaccgacataac

SEQ ID NO: 133301 - DNA, 315 bp, Glycine max
acagatactacaaactcttgcagtttgtgactctgaccaaaatcaatttaagccaaagatgttttgcctaagctaattttcctctgcaactttctttttcatcttctccaaaaaagaactgtaatctgggacctctaatcccaacttaagcacatctgagttgaaattgtcacttcaagctttcattgaaccttggtccataaaattgctattcaatccaattcataaatcctacaaaaaggtccatcagtaagcatgtgaacctatagaatataagaagtttaagagaacacagtacaacttatcaatctacat

SEQ ID NO: 133302 - DNA, 432 bp, Glycine max
ttattccttaatggatggttccttctctcacctctattccttttcttccgctgcatctccatggtggaaaatcaccattaaaggaccccattgaagctcaaagatccagcctccatagaagcccccacaagcaagtttccatcaatatggataacatatagatatgacaataatcactgaaataaacttcatgaaacaggacctcaacatcgggcaacatgtcgagcacaatgttgatgaaacttaagtcacttgagcatttcagaacaactgaatttttatactttggttggaccttgattttaaaggcaagcacattacccacgaacttatcaagtgcttcagacgatgcatttaaattgagatcaccatccttgaacaaagataatcaatttctgcatcaaacacgtgtgatgatagcagataacatac

SEQ ID NO: 133303 - DNA, 414 bp, Glycine max
  unsure (1)..(414): unsure at all n locations
ttccagttgtgtggctgcgccttataaccttgatgatagccaacaatggctcgtagttacaatgggtgttcaattgtgaatacaacatgccctgtggcggaaagaggtggttccagtgtgatgctcgtcgagaatgcgccacgagtcgtgtggataaacttccctacaatgatgtgttgatttggttgtgcatggggacgacatgggattttggaaaggttggtgacgtagactaacaagagggcaacacactatttgcaggccatgaaacacaacgaaacaaggccaaccaaaacctaaatgttgccaaacaacaaccaaatggtgccaaacaaagtgaaatanggtcaacggagaaacaatagcatgactagtagagaggtccatcatgtcatcganagtatgatgacaagt

SEQ ID NO: 133304 - DNA, 342 bp, Glycine max
  unsure (1)..(342): unsure at all n locations
attcacatatgatagggctagtctgaatttgacgatgtccgttaacaacagaatttacgcgacatagacacgtatatcttggttgaatttgtatggttcttcacttccatataactcaactttgtacaaaatatgaacgaatcgtngcatttaacggacaaagtaagatactcttctttctttttttgttaatttgcgattatgatttctacaccagactgaaattgagacgtgctctgataaaaatgaaaacaagacagagatagaatgtggatatctgaacaaaagatatgtacacgtcttattttttatacattttactgtgaatcaataaagcactac

SEQ ID NO: 133305 - DNA, 408 bp, Glycine max
  unsure (1)..(408): unsure at all n locations
taataaaacattaatcttattattaaaatttcattctaaaataaataatcaatgtgattattttgtgctacttgtggtaattntaaaccactataataagagtaatttattaatttttctacgaattatntaattgttattatttctctcaatccttgtaaaattcattttttgtggacaatagttgcactgaaattagaatatatgaactcaaacaaattactcaaagttatacaaatgtaattctaataaattattacattattcaataacttttaattgaataccatctttttaaattcttgcattggatttgaaagtttgtttcacattatcatatataccaaatttcatattaatacaaaattatttactacaccattcatatacattaaaattgacataata

SEQ ID NO: 133306 - DNA, 407 bp, Glycine max
  unsure (1)..(407): unsure at all n locations
gctggaaactttctgaataacatgattgcctctaatataacctcttcagcaagccgtaataattttgcggtcactatgccattcatctgtattgctattgatagcgtccaagagttgcatattttgaaaattatattcaaggcacaaagttgcaagttccaagaaagtgttattggcattaattnttttcacacctcagattctccttgcatttaaatatatagttttagctgtgatcttcagttctaaactaaagaattnttcaaaanaccttttctaggagcaatattgtacacgagtaatctttattcaatagtcatttttaattntgaataataaatggtaactctccatttctaatctttnttaagcccttcctaaaaattcctatatcttaagtttctttt

SEQ ID NO: 133307 - DNA, 382 bp, Glycine max
ggggagggcattacagcttaaccattacttccaatattctcttgatgatacaaattgttggacaaccgatgagtttaaactctaagaagatcttcatcaatagtccacaagcacactacacaagggaacttgacaacaccttcaatcccaaaccttaagacattaagtttgtgggtctttatcacatatatgttacttaacttgtccatttctacccaatatggaacttcactctcacacttgaagttcaacaggcaagagaaaccattaggttgttccaatgcaagtgacctatgggacattctcaattatgagggaaatatgataagggcaaatttaatcgaccaacttggtaagggtggtgccatcaagttgatactag

SEQ ID NO: 133308 - DNA, 436 bp, Glycine max
  unsure (1)..(436): unsure at all n locations
ctggaccactgtctgatcaaaacgaccttttaaggtttgggntgtgctcctctgctgaccaccatacagacctttgccctttcatgcagcaacctggagccaatgagcagcctgaaagctatgctgcacatatttacaatagaactcctcaacctcagcagcaaaatcaaccacagcagaacaattatgacctttccagcaacagatacaaccctggatggaggaatcaccctaacctcagatggtccagccctcagtaacaacagcagcctgctccttccttccaaaatgctactggcccaagcagaccatacattcctccaccaatccaacaacagcaacaaccccagaaacagccaacagtngaggcccctncacaaccttccctcgaagaacttgtgaggcanatgactatgcagaacatgcagnttcagca

SEQ ID NO: 133309 - DNA, 442 bp, Glycine max
  unsure (1)..(442): unsure at all n locations
caagcaanntagacctagaaaagccgtttttcttttcaaaccccgattgttgctcgcgactgggaccttgattacctccttaacatgagtacattattgcgaccccatagagctccgcgaaatgaggaccgggcgtactcttcctggcgagccctctgggtatcgaagacacaggctctcgcgggaagtgcattctcttcccgcaaactggcacactccttccgagagtgtgtaacaggcaacttgaacttctacctgacgagttacggctttcctaactcgctaaagagagcctggacttactaggccactggcggggcctcaaaatgctactcgctgacgacttttaacttggcgagccaatctaatcctggatgctaactgtacccattcgaggacccaccaatgatgccatactaatgcctctaatctctagaactat

SEQ ID NO: 133310 - DNA, 420 bp, Glycine max
  unsure (1)..(420): unsure at all n locations
gcacttacccaatactacgaccagcccttgagatgcttcacattcggggacttccaattagtaccaaccattgaagaatttgaggaaattctaggatgtcctctcgggggaaggaaaccatatctttcctccgggtgtctcccctctttgagcagaattgcaactgtggtcaaggattcagccagaggtttggaccgcataaaacagactcggaacggcatagcgggcctgccacagaagtacctagaagacaaggcgaggggtatggccaatcaaggagactgggtcccgtntatggatgtgttagctttgctaatatttggggtcatcctctttccaaacgtggagggtttggtagacctagcagcaatcgacgctttccttgcctaccaccatagcaaggaaagtccggtggtagct

SEQ ID NO: 133311 - DNA, 449 bp, Glycine max
  unsure (1)..(449): unsure at all n locations
agcttcggattatgtccacatgatagagttatctaatttaatcagtgagagaagatgnctctaacctaaattacantttttaagctcaagctatgttcctcaaatttggaatgattgaagaanaacaatggttgagttggttcactgcgagacgcgtgttcatcccttagcttcactatactacactttcttgaattgtttttctgaaaagaatcttttctaagcattttgacggcaagtgcaaaacatcacggggtctgatatgaggataaaaaaagccaatggtttgattatcatttacaaacaattttcataaactgaagntttgaatgcttttcatttttctgatagttngatatcagatgttttagcaaggatatacttttgcctgtcaatgtgatagaanatgtgaaagtcaatttaagtaatctcaccatgggtgatctaat

SEQ ID NO: 133312 - DNA, 430 bp, Glycine max
  unsure (1)..(430): unsure at all n locations
cacaacaagttttttcacatccacaatgcgcgcataaacccaccaatcccttgttgccacctccaactgagctcacgtactcccacgtagcccatatcctcgtttctctcaacaccgggtccccatcaatcctcccaagcttccacaacatccaagcaaaacaacattcacacagcacaagctatcacagccaagcaaaacagagcaaaggcagaaaactctgccaaaacaccaaccaaaaatcacagcttttcccactcaaagaccccagtaacaattccttcgatccaattcgttaaccgttggatcgactccaaaattntactggaagtctacagcgcataagcctacattntgaccgttgtgatctactatcanacatccagaactcattctacattactctttccacaaccagcaaatacatgga

SEQ ID NO: 133313 - DNA, 218 bp, Glycine max
tattatatacttgacttgatattcacccttataagttacaaagtgacttgacatttctatagcataaggtttgcaaatattatccacttaataaacattttgtcttgactactggaggatatatatcaacatatgtgtgcacgccatatatgtgctactgagtctgaagtcaaatcaagaacgcaagctactctctgcctttggaataagtgagtaac

SEQ ID NO: 133314 - DNA, 334 bp, Glycine max
  unsure (1)..(334): unsure at all n locations
gaaatggataaagtacgcataggaaataatggtatatactactttcccaaaactgggaagcgtatctttaacatctagatgaatgcgcgtacatcagccagtattgtgctaaccttagtaggaatacatgtactcagagaaaatctggcacaaagtgtacttacttagagacaaataacactgctactaatgcgcatgcattattgacagatggaacctagctaaacaatgtctctntcctgcaagcttactaacccatcatatctacgtcatccgtctttacaacctcctacaacctatattgaatatatatcactaatggtcaatatataac

SEQ ID NO: 133315 - DNA, 301 bp, Glycine max
aacataatcctccatatgctcaattggaagtgtgttcacaatagctttctgtcataccctaatgttattcggggaccattgtttggtgggatgcaacctttgtttgaccgcatcgaggtacttgacactcttcgtatgcaatccgtgagattcacaacatttctaaagcgaaaagggcattgtgctgatccataaagttcgcgaatttggaagaaataatgtgtactaatcctaagtttggcattctgaatgaacactaagggcacagggtgtttttaaagggtggcaataattagccctt

SEQ ID NO: 133316 - DNA, 445 bp, Glycine max
  unsure (1)..(445): unsure at all n locations
agccttccttaagcttcaagctnntagcttantgttgttcaccatggtgctcatgttgctccccctatctctaacaactattttcacacttagagaaanaaatggaaagaaatacatcaaatggtatagtaatgaacccaagggagataccaaatttactagattatgtccaaaaaaacattcccattcttccaaaatcttgttttagcttaagtaaaggtcttcgaaatccttcctgagttcgataattactcccttttaccactatttatagacttgaaaatgctccccctgctcacaaagctacttttgccaaaatntatcttggtgactatcaaaaatacccctaaatagttattcttgaggaataggtggattgagaaacaataacactagatagtgaatntcttttatcaaatggttatttctaatcaatcctaactta

SEQ ID NO: 133317 - DNA, 462 bp, Glycine max
  unsure (1)..(462): unsure at all n locations
ctatttctagaccaaaatccacttattatcttctatgtcattaataagttgaccattatttagctagagaattntctcttattatccttattctttctagactgtagcatagaaacttaagagtttaaccatgcctaggaatcctatgataacatctcatttcttaaccatttgaatagtctaataacaccacccaatcgcataacaaagaaataacactgtctaccacaaacacatgaaaaattgggatgttacacttggtgtttcctttttgcatggacttgtcatgaagcttaatgagggaaggggaaaatccaaacattntaataaaaatgttattaggaataggaagagaagagtggaagtcgggtagcatgggatttagagaaacatggaggtcaatcttgatgcttggttgttggctctagaagtggagcttcaatctgaatacatggagattct

SEQ ID NO: 133318 - DNA, 296 bp, Glycine max
aactaacgccactaacctattggatataaaacaaacctaacggctgagtgaacctgaattgttggcaaccaaaagttacccgccacagccaacaagtcagccaccatctggtctcccaaaaggctgatgcctacgctgccaattgggcccttattacaacttagaactaaagccctattagttgatgaacccaatacactattttgggcagccaactatacaaggattgcgccattatttatacaaacctaacactctaaaattgaaatatagggtgtcatttagtcctccttcat

SEQ ID NO: 133319 - DNA, 443 bp, Glycine max
  unsure (1)..(443): unsure at all n locations
agcttctatggaagctggatctttgagcttcattggngtcctttaatggnngatttccaccatggagatgcagcagaagacaaaggagaagaggtgagaggaggcgccatctcctatggaataagccatggaagaaggagcttcaccaccaagatgagccttggataagaagcttgagaagaatgcttttaaaagaaagagggagagaaagagagaggggggagcacgaaattgaaggaataaaagagggagagaagtggaactttgaagtatgtctcacaagactctcattcatcaaagttacaacaagtgttacacatgcttctatttattgactaggtagcttccttgagaaagtttcttgagaaaacttccttgagaagcttctttgagaaaacttcccttgggaagtagagcttagctacacacacncctctcataac

SEQ ID NO: 133320 - DNA, 442 bp, Glycine max
ttacctttggctctatcagatatgaattgtgtttctagctggatgtaaaactccttgctctctgagttgttgattggaattaaactcaccttggcatgcctacatatcaacgaatagagggcaaatgccccacctaattaatgcaagggaatcatgttatatttatttagaactgagttgtcatttacctagcttgaaaaagaaaccgcgttatgattatataggttaaggacatatttcaatcccatatctgaaaacgtaggaaaatgtacatagcattggcagctttttaaggaaatagaaagtagttgggtccacctttgactggagggtatgtattatttataattagaaatattcaacatcatttctttgtaaaagaaaaaagtcattgccctttaaccacaattaaaaagaaaacaaaagagttgagtaaaatatt

SEQ ID NO: 133321 - DNA, 405 bp, Glycine max
cgatgtatgcaagcttggagctaggtcatgaattgagggctttctatgagagagggcttcctagtttcggacaacgacgacgagtagctcagcagtccagcacgacaacgatgacgacgaccactgcgatgcgagtagcttatcgagagtcattatcggcggttagtagcttgaacatggcggagtgagtgagtatagagtcccgagagtcattctcgggagatattttacgatgccgactacgattctcggaaactcgtggactcggagtagactcgtgagtctacccaaactcatcagtcggacgagtctactctagtttcgattctacttccgatataaatcgcaacccttagtagaatcgtaaatcgaacaatttacgatttaatccgagtttataaccat

SEQ ID NO: 133322 - DNA, 415 bp, Glycine max
ctgatagattatggcatctaggtacactaaccattacatggaacaaaaggacaaaagttaaacgtcattcatttcttcacatggacgtttttttctctatatattacatatataattcacatgagacaattgtattgaggtgatttaagattattatggatagcaaaattttcttcacaaatatttcactttctagaactcatccattttaattctgattctaaaactgaaactgattcgatacaaaaattgaaattgatctttatgtaaatctgaaaaataattttttaaaatctggtagaccaaaaagaattagagataataaaaagaaaaaaaacttttatttgaaaagaatattcaaagaacaaaaatagtgcgggatagaaaaatgcaatagctaaacatactattaacc

SEQ ID NO: 133323 - DNA, 379 bp, Glycine max
  unsure (1)..(379): unsure at all n locations
gctataatactaccatcttcccttcaaggctccaactgctatcaatatttctatcaatactcttttatttagtattattgatcaattgctatcaaaaaaaattgatgcttatctatgtgttgtttgttgaggttttactctatctntggttgtaaatgagctgaattatgtaatgcaaggtgcaaggttcaaataaaagtgccaagaccaagaaagaggctcctgctagaaccagcgtctcaaaatcaacaatttctgggaacagatcttcccagttaaaatctgttaactcaagctccgttgctattccaaggctaattctatatcacacaagaaagatgctgttccacaattgccacatttgctgtgcctgttcgta

SEQ ID NO: 133324 - DNA, 452 bp, Glycine max
  unsure (1)..(452): unsure at all n locations
catttattgaaaaaaanaagcttgcaaaagctcattataatgagaaaacaagcacacacgcaccttgtaatgatgtcattccaatggaggatgctcaacctcgcaacgatggcaaaccccaacggaagtcacgaaccccaacggtgacgatggtgacgaggagacgacggtgacaggtcgcagatgacgctcacaagtcttgcgggtgagggagaagagaaaggctttgtttgagagactgagcgcacggcaaaaaagggttttgggttntaatatatgtataacacaacatcggttatttaaaaaactgatgttaacatcaattggttaacatcggttttataaaaaatcgatgttaacaatctcatgttaacattggttttganaaaatcaatgttaaccagttggcgttaacatcaattttttaataactgctgttaaggatctcatgt

SEQ ID NO: 133325 - DNA, 426 bp, Glycine max
  unsure (1)..(426): unsure at all n locations
ataaacaaatgtatgaattgatacattataataataataatattaaaatgattataatttatacttagttaaattggttggcctgctagatctaacaagactntntgaatggcctacaacttgatcttttctaatcaaagacttttataaaagtctaagtctcacctatttntgaaaaagtttgtgcctaatgtaggttaggccacaggtccctgtcgaaggcctaagcctattcttacccctaatcacaacacatacatgcaatccataatcaatctaaaatgagatagaattttcttcctttcacattctcttctcataatngagaccaccattgacaagcaaggaagaagttattgatacttatgcatatagcacatgaatatgcttattcaactcaataacacaattaataacatcatccac

SEQ ID NO: 133326 - DNA, 425 bp, Glycine max
  unsure (1)..(425): unsure at all n locations
tcacataacttcatttcattcaaaatcaaaccactggatatcatattcaatcagttcactggtcaatcatgcttttgcacaagctactactacaaacaaaataacataaatttaaaactaaaatttaaagactgaaatttaaataactgaaacataaagcataaactatataaactgataaaaataaactgttcaaaatgcaaaaaagataaagatcctgtcaatcctcatgtgggtgatcctctacatgctcattaagatccaacattggagcagctggtggatcctgtgaaatgggctgctcttgctccaatgctggtgtagatgactagtaatcatcagtaatgggtgctggagagacanggaatggaacttgtgatgctaccttttnctgagcactaactggatcagtctcataaacaaat

SEQ ID NO: 133327 - DNA, 406 bp, Glycine max
gcagctcgacacaagtatagtgctgtttttttagcgcaagattttgtgcccaagttgctgagcatgaggaagattattatatgtttgctacaacatgttattcgatgaggagtagttctaaatgttggttgattgataatggtcttaccaaccacatgacatatgataagactctattcaaggatttgaagccaactaatgtcttaaaggtcagaattgggaatggtggctatattccagtaaaaggaaaatgaattgttgcaatttcaacgtgtttaggtatcaaattaatatcatatgttctttatgtacctaacattgaccataacttgctaagtgtacgtcacgtgattaaatagggattacagtgtcctttgacatcacatttctttatctatgacattgt

SEQ ID NO: 133328 - DNA, 366 bp, Glycine max
  unsure (1)..(366): unsure at all n locations
cctctaaatctttcaacaacaaagctcttacatttttttgatattgtacccatactcgtggtagattagtacagaatttttcctttaacatggctctacatctaaggtagagatatagtaactcaagtgagccttcttcctagcaatntggagaaagctttatgtgtcgaaacatgtactctccaaggagaattattgtttagtatttctatccttctgaggagtattttcctaacaaactgagatgtagattagcagactctctctctctcactctatattctgcttataaatactatcttgaaacctctgctattggtgcgcttatcaacttgagtcctttgacctgctaaagtctcttgcttg

SEQ ID NO: 133329 - DNA, 440 bp, Glycine max
  unsure (1)..(440): unsure at all n locations
catgcaagctctactgccatactgtgattctaatattaatttgactaatcaagaatcaagagtaaactcagctaatagtggcaattaaatagttctcatacaatgcattatgcaacatattcaatataatagctacaatnttatcacacttaattgattntagcggcctcaaaatagcttcttctttttggtatcacctaatagattgctctnttaagctcttgtgttgttctggcagggtactcatgagccccacaatttaactaaaaagacacctcctgaaaaatcaaagggaagaaagcacacaaatgccgtcatcaagtcacagaattcacaaaagacacaatctcatcaacaggcaacaccaacaagttcagcagctactcaatttggttaactggtattcatcacttatcatatgcatggcagatttcattaat

SEQ ID NO: 133330 - DNA, 294 bp, Glycine max
  unsure (1)..(294): unsure at all n locations
tcaattctttctaatattggtgatagntcggaatagctcttaanacacctctaacaccgtgagagataaggctaagtgctgagattgcatattcaccttgaagaatataagagttagtcattgtgcanacaaacaacanatatgttctcatggctaggagactccatgaagattgggccacagatgcaggagaaggccttatggttctcatgagccttagggtagattatgggcccatgggctaagtattgttggatcaagtggcctcggaaaaattaagaagggggggggggg

SEQ ID NO: 133331 - DNA, 280 bp, Glycine max
  unsure (1)..(280): unsure at all n locations
agctctgaagctccccagcatagacaagttgngttcaggctatatttgctaagttgtctaaggtggtcgtacaactgccctaattaatgaggaccttggacaccatgaaattggcgaccacaatggagataatcatggngtcttcctcgtggatagggttgatgcccttgaagtncttatcaatggaaatggtgggagggagacttcatattgatggtatggaacacaggtgatgcacattttctagatgcaatggaactgccccctatgatacttcatt

SEQ ID NO: 133332 - DNA, 159 bp, Glycine max
ggatttaatatgtcctgagaccggatcttaagcacccagatgcagctggaaaacatttttctttatattaagagcagccggctcaatctgttgaattacctccgcaagaaaaagatcacctcttccggtaagggactgtaccttagcatgacacaatga

SEQ ID NO: 133333 - DNA, 161 bp, Glycine max
cctcacgtttatttggcaaacatttgtcatacaagtgggacttatgctctttcgagcatgatctccaggcaaaggtcgctccttgctctgcacacgatttgcttctcagaacaatgcctcctgtgtttgagaagcaccctctacctcttcggacctggatc

SEQ ID NO: 133334 - DNA, 376 bp, Glycine max
aatatgatgactctgatatttctatctgtggccttattcatgattcgttccgtagccacacacaaacacttaaactatactggccgcatgtattatctcacaaggccccaacccttgtgtttagtagggttggcgcgtaattagtacagttaaaacctgtctcacttaaagtgtaatgccaacctttgattcctggaattcaaaatcgatggcttttcgattctgtggaacaaaacataattatggcatacgataattcatctaaatgaaaatctaattgagtgggagtattctctaagacaatatcaaaaggatcttttgtttattctctgtacgaatagaatacttgaatatgttatttctttcttttatgcct

SEQ ID NO: 133335 - DNA, 468 bp, Glycine max
  unsure (1)..(468): unsure at all n locations
tggaaactacaagttctggaatttttcttncaagtgggatctcaatatgaggtcctncagagaatgacactgattccttagcagctaatacaataatatctgcacaagaaacctggcccggacattcttcttctaatattgacttaatgtagctgatcgtttcccgctttctgataccaaagttccttgaagatttcatttcagagctgtgactgtgagctaggtagttggaatccaacagaattgaggcatcacatccttgcatgaaaataaacacaacaacaacaacaacaacaagtgaggcttttgtataaaccttgaatgaaacaagaacactgtttgtctgtgaggaacaaagtaagggaaagaaagagagaagctagaaacacattatattacttgaacttggcagtcatgaaacatgagcctgagaaatgcagctggtgcagtagcatctgtcaagaatat

SEQ ID NO: 133336 - DNA, 392 bp, Glycine max
gtactgacagaaagcctcttatgttaattactgagtatctgagacgagtatgtgaatgcatataactagacacctaggttctgatgctctgaacttatgcaatcttatgctttaagattaaactctactaaatctctatttcatgccattttgtagggtgatcttcataagtacctgaaggacaaaggtgcacttagtccttcaacagccatcaaatttggcttggatattgctaggtatggtgtgtcataccttaagttgcctttatttttctttttaaattgtttatgaagagaacacacagaactccatcagacaagagaatcattagctcatacatctcttctacctctcataaatctgttatattatataaaccacttctaaataat

SEQ ID NO: 133337 - DNA, 457 bp, Glycine max
  unsure (1)..(457): unsure at all n locations
ctcacttatcttatatttattgcctttaacacacatttatatatacacaatacaaggcttgatgagaagacagcttgatgggacatcacaatgctgtcttctgaaacaagctaaacaggaaatagaagcaagcatgtatacacataatttaacactccccctcaagctggagcatataaatcatatgcaccaagcttggaacatataaactgaatcctagttccccttaaggacttagtcaaaatgtctgctagctgatcattagaattgatgaactcagtgacaatctccttggacaataatttctctcgaatgaagtgacgatcaatctctatgtgcttggtcctctcatgaaagactggattggacgcaatgtggagggctgcctgattatcacanagtaacttcattcgtgcaactntacacaacttcaattcttgaaaaagttgctaatcca

SEQ ID NO: 133338 - DNA, 404 bp, Glycine max
tatgacccaacttatataccaggatatatttatatatggagctctattgatatcgcatgaatggtgtgatattccttgccgaaatcctttaaattgatgaggacatgttcatataggtaaaaggatcaaaacattgggaaatacctctccgaaacattaagttagggttccactcatcttggctaaacatatggtgtaaaatgctccacacattatatgttaacgattgccctcattcgacaacatatataactgtcccaacttggtgtaattgtttaagtctttagtagtacataatttattgaaacttatggcgaacacagtcctaactagtcgatcactgatagatataatggaagaggaaacaaagaacttttgagacttcaaatttagacttttatcat

SEQ ID NO: 133339 - DNA, 439 bp, Glycine max
taattggagaaacagtatccgccctcatgttgaattaagtataacccatattgatggctttggtggctttacttcgtcgcacattgaaagtctgagactgagagccaacaaggccaagatgttgaaatttcgaacttaacaaattctgagagctggaaagggtcccccaagtaacaaaggccaagtctaatcttaaactttttataaatatttttcgttgtagaatagtcaacattttccatccctgacttcttccttttccccctctctatataaacaaacgctcaccatacccttaattctcattctcattctcatatccattctttccaatcgcttccagccgccaatttgatctcctcaccacaaaacacacaaagagtagagagacccttcagttcgttaatctcatggcttctttacaaaccacggctacact

SEQ ID NO: 133340 - DNA, 293 bp, Glycine max
  unsure (1)..(293): unsure at all n locations
tcatgtatgtggaaaacactcacaatctacggggagattggtggattacgaatgtaaggtgaagtcccacaatattgagtagagatgagaacagtaaaagttaagggaaggacaatanacatgacctttaacgtttagggttaaagagtggtgtcaagtttacatatgtggtgtgctcaaggcacggcccattggtgtaaatcttctcagtgtttatccccctcgtatgcacaacaattggttttatagccaagttcgacttggtgactatctcacaccaataagatggaggt

SEQ ID NO: 133341 - DNA, 470 bp, Glycine max
  unsure (1)..(470): unsure at all n locations
tatgatatttctctctggtattctattaccaaaggatgtaatcgattttcagtggctaaatggatttctggaacacttttancaaatttgaatttgattntaaaatggtgtaatcaattacacacagtatgtaatcgattactagaagttaaaattgtttgtaacagcttttggaaatttgaatttaaattntaaaagcttgtaatcgattacaacatttgtgtaatcgattaccagacataaaaattcaaatttcaagtctcaagagtcacaactcttcagaaactaattgtgtaatcgattaccacatttatgtaatcgattaccaataaggaattttcgaaaagtacacccaagagtcacaattgttcaagaagtttttgaatggccatcanaggcctataaataggtgacttgngatacgaaattctttagaagttnttctgaacaacattgtcttatcctctcaa

SEQ ID NO: 133342 - DNA, 468 bp, Glycine max
gttgacatcaaacttacttcactattctgggtgcatgtatatcaagtgggcaagcgtggtcttacccaacccgcccatgcccacgatagaaagtattgacagcttggtatcagtgtcagaagtgagccagttaatgatgatttctttatcaccatctctgccacaaatatcactttcaaccactgaagatgttgattgtggcactttaccaccagatcctgatcctgatcctgatcctgctacaagaccactagcctttttcaaacctagattatccatccggcttgcaagatcatctaggtcatcaagcacgtttttcatgctggaattaatttccttgttaaaggaactaacaggggaagaattaaagaaattaggtaccttgcaagtacaggtttgagattcagattgaggttgaacttgaagtctggagtgttgtatttcatccaagacatcttcaacgtcaag

SEQ ID NO: 133343 - DNA, 248 bp, Glycine max
  unsure (1)..(248): unsure at all n locations
atattccttttattttcttgggtattctagtgggtgcgaaatccacgagacaagagacttggaattcgatgatcgataagttgaaagctaacctttttagacgaagctctaaattcctttcctttggcggccacatttgtcttcttaagtcgatactctctntcttacccttattcttcctttcttattttaagatccatgttagtgtgaagaaaaagatgatttatttgcaaagaaacttttttggg

SEQ ID NO: 133344 - DNA, 153 bp, Glycine max
tcttaatatagtctttcataaattatactctggtggaatggaaccaaaagttctgcatgacggcacaaaggttgatgagcagaaaattgtgtttatataagaattttaggggtgcacttttaattttttttttttgtaatagatattaaaaaa

SEQ ID NO: 133345 - DNA, 257 bp, Glycine max
ggaaaatcaccattaaaggaccccattgatactcacatatccaacctccatataagccccacaagcccacaatcaagctttcatcaacctcaaatccaaaggttcttgaaactcatggattctttcctcatcacctgtaaaatgaattaaaacatatgtattagtgatgttgggtatgttagaatatgttaacgactcaaaaccacctttctggccatttttccatgagataacataatccctcatcaactcaatga

SEQ ID NO: 133346 - DNA, 407 bp, Glycine max
  unsure (1)..(407): unsure at all n locations
tcaagaaacacacacacactttttcctagtcgatcactctcataaattctccccctttggtgttgaatttatgcttatcctaaaaataagttgattactcatgtgaattcttgagataatcccatttctctccgcctttggcatcaacaaaaagccgaagtgcgtatcaaataaatttaatttaagcatccatacaatggtcataaaaatatcaaccagatcatgaagcatgaagcaagaaccatgagaccatgaagcaaacaaccatgcatagattaatttaaactccacatagccaaataacatacttaatatttgttcagacataccatgcgaatagggaaatagttaatggttcacataacataatcatatagagaaattatttgatgangcactaacatcta

SEQ ID NO: 133347 - DNA, 290 bp, Glycine max
ggcatgaagagatgataaaattcaccaaactcgcattaatatttaattgccttgaagctcgacttaataaactcacacacatgggaggattcattacaaatcactatactgattctagatccaataatgtattctatgggtaaattatctactggaaaacattctctgattcaatcagtgaacgacaacgccaatttgcaattgcaacaccaatgtgtttgtccaattgatttaagaatgatccaatttattttgaccataaattcaatattgtagcttctaaaataaat

SEQ ID NO: 133348 - DNA, 164 bp, Glycine max
cactttagttagagatgagatgggtttgtactacttatgcactctttatacatggataatttgcctaacgtggattgaaccattttaataattttgctcagagaagatgttcaggttccccttgcggatattatctttctcattacggccttaaaaatatgaaa

SEQ ID NO: 133349 - DNA, 299 bp, Glycine max
gcttctatggaggctggatctttgagcttcaatgaagtcctttaatggtgattctccaccatggagatgcatcggaagacaaatgagaataggtgagaagatgcgccatccactatggaattagccatggtagaatgagcttcaccaccaagatgagcctcggagaaaaagcctggaaggatgcttcaatggaggaaaagaaagacggagagaaagagagaggggggagcacgaaattgaaggaattaaatagggagagaagtggtacttttgagtatgtctcacaagactctcattca

SEQ ID NO: 133350 - DNA, 433 bp, Glycine max
tgagtgccttggataagaagcttagacatgacgcttcaatggaggaagagaatgagagagagagaggagggggggcatgggatttgaaggagattatggagagaagttgaactttgaagtgtgtctcacaagtttcttattcatcaaagttatgacaagtgttacacatgtttctatttatagcctatcacatgggaagcttccttgagaagctagaggggggctactcacacccctccaatagctaatctcacccccatgccaaaatacatgataatacaatgggaagcttccttgagacgcaagggatgtagcttccttatgaagcaaggaagaaagcttccttgataagctagaggggggctactcacaccccttcaatatcttatctcaccccattgccaaatacatgataatacaaaaatagtcctac

SEQ ID NO: 133351 - DNA, 291 bp, Glycine max
  unsure (1)..(291): unsure at all n locations
agcttcaattcttcaactgtagtcacagttgtaagtttccagggattctgtttctctgctaagttcccttcattatcaagaattgctgccttctcaagaaatctaatcgaacaaatcactccatcaattagtttttaatatataacantggtcgtatattagctaaaaaaaagtactctaaagaaggaaggttatttctcgccaaaaaattattgtataaaaaacataaaaaaatgttcgaagattattttttaaaataattggaagtatttagtaataagcataaatatc

SEQ ID NO: 133352 - DNA, 382 bp, Glycine max
  unsure (1)..(382): unsure at all n locations
acccatcacatgtggtactatgtggcggtcgggcgatggtgcacaacaagttttccacatccncaaagcgcgcataaacccaccatcccctgttgcccacctccaattgagcttacgtactcccacgtagcccatatcctcgtttctctcaacaccgggtccccatcaatcctcccaagcttccccaacatccaggtgaaacaacattcaaacataacaaactatcacagcgaagaaaacagggcaaaggcagaagctctgcccaaaacacaactcataatcacagctttttctcacttaaagaccccagtaacatttccctcgttccaattcgttaaccatgggatgcgactcgaaaatttactggaagtctctagtacat

SEQ ID NO: 133353 - DNA, 365 bp, Glycine max
acttttgtttctcggctatttgtttctacagaacttagatgtagtaccttaagtactcttggtgcttgtttttaaaaatcaaaattagagtttcataattgatgttttttatagctcaatatagtagattagattaggatggcgaaaaccctgaattttgattgaacaacagcttaaaaaaacaccctagtaactatatcaagttttgtctggtttcactttatttatttttccattaaagaaaaggaaattgattgtggaatttgtttattgggtgtgtcacagttctgctgtcagaaaattttcccttcttttgcaaatggcaagtgactattatgcgtctcaatttttggtagcttttctat

SEQ ID NO: 133354 - DNA, 415 bp, Glycine max
  unsure (1)..(415): unsure at all n locations
agctgtcgctggagccgacccatcaattgtcctaactntttcagactggtgattcctatgctcttgaccttgacttgatagaacctctttttaagtgaaggcgcctgactcgatcccatgttttactaaagtgaaacaaaacccagtgtgaatcaaaactctgacatctatcatgggtggaatggatgaatgcatgaagaaatgcatatgacacanatgcattttatgaatacgggagcccggtgaattgtctncttcttagatacaacattcggacagcatggtgcccgacgtatgcatttaagaaggcaacatggacccaccatcggtttgacaaagtgagaggatcaagacgcaatccgtgcatgatgcagatgcaaaaggcacaacacggngatgtacatagtacgacaat

SEQ ID NO: 133355 - DNA, 205 bp, Glycine max
  unsure (1)..(205): unsure at all n locations
agctttatgtgcggatattatgtggngcatattgaataatcacgactgatgagagtcgagctggctgctgntaggaaatgcattgcacagcaacactgcgttctattataactgtcatggggaatggatagaccatggaggttttttttattntccattttgggaattaagatcttattgttctgaacaggaggttaatttcccc

SEQ ID NO: 133356 - DNA, 338 bp, Glycine max
aacggtctttcccgaaaagggagtgtcttcgctcgggaggcttctgttgggtgggaattacttgctgggagggatacctcgacccttgttagcgctgaaacgcgattctgcgaacgtgagtttggttggtaactgcttatacaagtgccctcatagtttctttttctgccagggtggtcaacagaaatccttggcacagtgtaatagaattagccctccctcaacttaacttcgtacacgaaacctctttgatgttcacttctagattctctcttttgtaaaatttttttgctgtttatggtagggatcttgtctaaatcttaaatgcgaacaatcat

SEQ ID NO: 133357 - DNA, 482 bp, Glycine max
  unsure (1)..(482): unsure at all n locations
agctttcaaccacagcatcacataatctatgtatccaaaacccctcaatttgatggattttcaaggtttgagaagtgaaattgagaataaggtaagtttgaagcatactctcacctcacacaagtctataacatcaatttaaacttgttcaaactggatttacgcctaaaatttcaccgaatcaaaatttgactcttcaatacccaaatttaccctagaaatgactctttgttcactttggtcattttttttctctctagcacagcccaaactttctcacatgtcctaaatggcatttcaagctaggattaactcattntaacctccattaccacaaaatccagatttaaccttccaactctcanagcctcactcttttttcactcataacaccacattctcactttctaaccctagggtaattctacccttcatctctaacaagtttccataagcaatttcagcacatatacatcacaagc

SEQ ID NO: 133358 - DNA, 466 bp, Glycine max
  unsure (1)..(466): unsure at all n locations
cgcttgacgatntagatagattataagattaatttttagtccgtattttaatcaaatttaaagctttcaaattggtttcttattgtctttattgtacacaaaaatattattaagatataaatgtatgatataacctcgcatgaaaacttattaaataagtatttaattaaatttagggttggccaacattattccaatgcaaactttggagtgagcttttacaaaagttttatattttgatttaggcttaaatgtaattttaatcatcttatcttatttaatatgtaatcttgattcctttattttaaaatagatatttggtctccttattttaaaaaataactaattgtaatctctctattctaatatataaacatgtggtcctcttactttaaaatttttataatgttttgtcaaatctttaattntacatatattctatttatttaatttgatccattaattc

SEQ ID NO: 133359 - DNA, 394 bp, Glycine max
  unsure (1)..(394): unsure at all n locations
gctatccttatggcctgcctncggactttattctccgtgccaccccggaagagttaagccaagcccctacttgtgaggggcaactcccaccttatgaagactatcccgggcaagacgatggggaaggagatacccatcttggccccctgctccacctcaaagatccgtccgcacatgaactaccccaaccgaacatagtccatcataccccagcctcacccacacccgtaaaagaatttgttccctttgtggaagataagggaaagattgaggcgcttgaagagaggttgagagcaatcgagggcctcggcaattacccattctcggatttagcggatntatgtctcgtgcccaacatcgtcatccctcccaagttcaaagtaccggactttga

SEQ ID NO: 133360 - DNA, 350 bp, Glycine max
  unsure (1)..(350): unsure at all n locations
cacttctctctctgtcagaattgcttggaaaaattgtttccgtaaagaaaatccaagccgaggcgcttccgaaatgttttcgtaacatttccgtgaggaatttcgcgaaggtttcgaccgttcttcgacgttcttcattcgttcttcatcgttcttcgatcttcaaaagggtaagtacctcgaaccaagcttttcgattcattctatgtatccgtggtggtccacattgtgtttcgtgtattattattctctcttcatttactttntatacccccttttgacgtgcttaagccattttatttaagtcatttctcgcttaacctaacaataaaataaatntccaccgatcg

SEQ ID NO: 133361 - DNA, 451 bp, Glycine max
  unsure (1)..(451): unsure at all n locations
cgagtgttattccactatgaggagctcatacctcttacaaggaagctgtaacagtgcacagttaaggtagacagcagcagaattgcaccattcctcaggttgacctataacaccaaactgactctgtgcgaaattaattctcaatccagagaccatatgaaatcttctgagaatgaccttcacagctctgatattctccatggaagcttctccaaagaacacagtatcatcagcatactgcagaacatccacaggaaccttgttcttccccaccaggaggcgttctgaagcagtntgagatactgcttccctcattagcccggncagtccttcagccactaagtcgaagaagaatggagccaaagggtcttctagtctcaacccttatgatacacacagaccctcatgatacacacacacacacatatacgcagctacaataataaagcat

SEQ ID NO: 133362 - DNA, 452 bp, Glycine max
  unsure (1)..(452): unsure at all n locations
tttctctcttgatcaaangtcacactcgagctactcataggggtggtggggtcactgaaatatcccaccctatctagatggaaagagacagaataatttaggtccctagttttcccattggatgagtctgagcaccctaacggaagcagataaggtttcttactactactattcttgttattattaacttggcgttctcctcctatgcttagaggcaaatccacttccatgtcttcatcataaccatcatcattggtgctgcttattttgcatctctctagtgcagtgtaagagctaagtcctgcctcatgttcatcacagccgccataaaaaatgtttctcttagcatgcctttctaagtaaaacccctttgccttttatggtctatcagaacagattcacttctttcctttgacataagtnctctctcaaacttggcataaagagaaata

SEQ ID NO: 133363 - DNA, 423 bp, Glycine max
ctctcacttccgatctttgattcgtgtgaagacacttttactttaaactgtgtctgaaagtgatgctttgacaaatgggtcactgtcaaaatatcttcttcacattcaaacacttgataattctctggatccgattattgtctccattactctctaagaacatctcgatgttatcctctaatgacttcctaaggagtttgagtctacaatgtctctgatctgcaacaagtttgaacctctcactattgttgaggttgaaacattgctactaagacatgaatctagtcttgacaaggttcacacgaagaaatcattggtttctgttaatctaactgtaggtgtatcattatccaattcttctattggccatatagttcaaatccgttatgctcttccaaattttcttattcttcaatatgcatt

SEQ ID NO: 133364 - DNA, 407 bp, Glycine max
  unsure (1)..(407): unsure at all n locations
tctatcttccgtttgaaattctgtatctttcatttggaagacttcctttggaatcttgattagtattgccggaagatgaaatcgtatgtaaaaaaataatgatccacaaatcaccttttgttttaaccactccactaatcacatcataaactctatcttacttacaatttttattctttntttatgttagctttttttaaaattaaacagcaagcatgggtcttgactttntctgggagggggtccacagaccaacatgagtcttgacttaatggatgggccttgaatgtgttctgtccgtagtcccatcaaacactccctagatggcccaataataatatgtatgaaaatatatcagtaaacagttgtccattatggtgcatanatgtgacagatcaatagcattt

SEQ ID NO: 133365 - DNA, 470 bp, Glycine max
  unsure (1)..(470): unsure at all n locations
gaactggagatnntcattgtggggcctgaacaattatactgtttctgctgctgcgtcgtcaagggtggcctccatggatcatctcatttggctaaacataactgggatcagattgcatagaacgttgcacaatatgacttgaaaggagtcctcatggtatgtgcacaggctgtgtctgatgatgatgttccaacagcaagaggctggatggataatgtattggggaaaatggtatcagtctctggtgatccaatccatatgctgggtgcttacttattggaggggcttatagcaaggttggaatcatcagggaatctcatctacaaatccttgaattgtgaacaaccaacatgcaaataactaatgagtttcatgcacattttgtaccattattgcccgtactggaaagttgcatcataattgcaatgctgtatttgataatcaatggcatatgagtccagattcacata

SEQ ID NO: 133366 - DNA, 492 bp, Glycine max
  unsure (1)..(492): unsure at all n locations
acccanaccggccctatttactatattatgatattacttatggtatgaattgatctagaaattttatgcaatagttctgacaaaatttatttcaaaactccatttcctcttatgcttactgggatcatggatctctagcataaccccattttaaaagtaagatgtcacatacacgtatgagctcagaaagatatttctctgcttaagatacaatacaactttcaaattcccaggagacactaaatcttatcaacatcacgaccacaagtgctatactatgaatccaatgaacgatttgttntttatatgcaagttgtccatatatccaaataaaagaatttaccagggacagttagacaattcagcctatattcatatagagaaaaaaacaatntttaaatgactatctaagcattatcatacaattcaaaaccttggccanattcagaagaattatgtctacagctcagcatagatgtattaaatgataat

SEQ ID NO: 133367 - DNA, 488 bp, Glycine max
  unsure (1)..(488): unsure at all n locations
tgacaatgagatagattagaggtacgttgaatatctccatttccatccatgcaaaagataggacatgtttaggtttaaaatagatagatttatattttttaaaccatttcccatcctgattgagttttatcatatttgggtaaacctatgaggaacccatcacatttttctataattgtaatttacttatatattgtaaaatattaattttatatttacaattgaaatttattttatattttgtttcttgaaaaaatatctaatttggttgctatcatccaccattgataaaatatcatttaatattaaaatttacatatttttgttctttattaatatacaaacatttagttttatgttctttataatctgaatatttgtttatgtttcttattgtggtaaaaaaacaaaactgtaaaatcatgttttanagaatatgttaaatctatgatcatagatctaatacatgtttatgtcaatggtgagta

SEQ ID NO: 133368 - DNA, 269 bp, Glycine max
  unsure (1)..(269): unsure at all n locations
ctctcgttaaactcanatggtcatgacttatcacacggacgttcgattcacgcgcataatatatcgagacgcatcgaattgaacaacgtatggtgtcgagaaattaatatggtcataacctgtcacacggatgtccgattcatgcacataatatatctagatgctcgaaattgaacatcggaagctctagagaaattccatggtcataacttttcacacggaagtccgattctgcgcataatatatctagaagctcgaaatngaacaac

SEQ ID NO: 133369 - DNA, 408 bp, Glycine max
caacggaagctctcgagaaattcttatgtgtataacttatcacacggaagtccgattcatgcgcataatatatcttgacagtcgaaattgaacaacggaagctctcgagattttcaaatggtcataacttatcacacggatgtgcgattcatgcgcataatatatcgagacgctcgaaattgtacaacggacgctctcgagaaattgtgatggtcataacttatcacacggaagttcgattcagacgcataatatatcgagacgctcgaaattgaacaacggaagctgtcgataaattcaaatggtcataacttatcacacggaagtccgattcatgtgcataatatatcgagaagcttgtaattgacaacggaagcctcgagaaatcaaatggcataacttatacac

SEQ ID NO: 133370 - DNA, 230 bp, Glycine max
cttaacttatgatctttaactagtttggagtaagtagcttacttgaatgaaagaattaatcagtgtaggttcgttgaaaatactctaattatataattcatatcctgaacactgctgatgctttaactcttttatgggctaagtcatttttacggtggggggtaatgtactgatcatcaaaagaaatttttaagtgcgttgacttggtaatcttctaaaaatgtactttg

SEQ ID NO: 133371 - DNA, 404 bp, Glycine max
tggcatgaggaaaactttacacatacacttatctgttttaaatggaacaaactaattctagtcgatgcaaaaaaataaaaagataatacacgattacatggcagataaggtggatatcctgcatgaaactctcagccgaacagatcagattagatattataggttgctggttattactgggtaaattggtaagtacagtttcatcataaactgtgctaattgccagggtgattaacctcttcttggatttggattcacgttaacatcttggttgtctaattctattgtgctgagaacaattatttacaaaactaccatatgcatgacaccatcttatccttctggatctattacaagtaggaggaatggagaaaggaatgacaatgtaacacaaccactactat

SEQ ID NO: 133372 - DNA, 476 bp, Glycine max
tgcggcatgcaagctcgagccacttactatttatcaatggtttactatcaaacgcatgcatgatatttatcttctatgcatcttaactttcaagtacaaaagacaatagtcaattacatacaatggggaatattagatggttatcaacattccagttataaagtttactcagcacagtacatgtttttcgtttctatgcagaggtcattgatttgactagataagtttttccttatgtgctctgaaacatgctgagccagcctgaactttaattaggagttttcaaaagctttaatttcttaataagggttgcatgtctgatcagtttaactatacatcctttatccaaagccagtttttcttgtgaagtacttctaataatttcttatattcattgattagttgctctattctcgtataattctgtgtagagcttttttgttacatataatggtttgtgcaggtattcatatcta

SEQ ID NO: 133373 - DNA, 471 bp, Glycine max
  unsure (1)..(471): unsure at all n locations
gctcgatctagccgtcttttcacccattattcaatacataatcatactcggttggacctcttctgtcaccaaatctttcatattgattatatccgcaatgctagcaaaaatataacaatattccacattccttaaatcaattaatcattctatcatattaaatcctctaatctaattaatcatcaaatattaaaataatttctttaatagagattagaacacttgtttgcgtataaccccgtaggttcaatactaatcggatgatatattaatcaaattaatatactaatcaaggtaggcgtctagcaacactccttaacgtccggatagcatgaagtaacatgttactttcaagaaccattagaagagtagagaataatttcttccattttacagcttngggttaactctagagtatgatattactgtcaaaccctcttgagttaactcataatgacttaagaaactcat

SEQ ID NO: 133374 - DNA, 427 bp, Glycine max
  unsure (1)..(427): unsure at all n locations
ntgtggagtagaaacatgggaccaactcattntatttcttatagtcgtatctagacaagggctgagagaccatacaagttttctagcgatttctaattatgtgggccattaagtctatcatatgctgacaatagccaagaagcccatgaatttcttcgggggcggagtatgtgtccgccattgccttggccttggctaacaatcggggaagttcttgactcccgttcaaggtaagagcaaaccgatccatccacatggttgcctcttggtgtaaagagtcgatcacccttcctctatcctctttttccgcgtatacttgggcatactcgtccgcgaccctaagttcgtgggccgtggctagacctaactcttcttggtacttggcgatgatagctagcatgttggtctctgtctcgcataaacgctg

SEQ ID NO: 133375 - DNA, 476 bp, Glycine max
  unsure (1)..(476): unsure at all n locations
ctgcagcttatgagacatcttgtatgngcttgttctatctacacactatcgttgacgatgtctcaaaccccaagttagaaacaaagtaatactagagactgcgatttaaatcattgcaagaggagacccacaaatattctaattttgaaaatagaaaacaaagatntggtngcgtttgatctagggtgttggcggctcctgaattggaaaagagtagaagatgaacaatgcagaaacgctttgtgatccatcgaaagtgagcttgaacagattctagtgtacattgttggctcgaagatagaacaatttaagtggtcatctctgcagctggattgagtgattattggcttatccactaagctacaaattcgtaggggatggaattgatggtcctcttccctctgatttgcccttgtattgcaaacagatcggatacttanattgaaacacactgtatatgttctttatggtgaaca

SEQ ID NO: 133376 - DNA, 326 bp, Glycine max
tatactaaacactacccttgatgtgggctctatttaatgctgcaattaacgcatccacatagaggctgctactaacatggattatgggtgaccacaattaagatgactcctctatataagagaataggaaaaacagaataattgtgttggttgttttcaccatattgtattgtgctgctgctgatatgttacttaagtggagtttcacttacgatgttgttaatgctatttgactaatcgggccacatattgatgttggtttatcacttgaatagttgtgactcgacttgattgtactggaggagaaaatatttctatgggaataa

SEQ ID NO: 133377 - DNA, 443 bp, Glycine max
agctagtgaaagacgtattgtggaaactttatgtagttggcagctttcataaccacaaagtcagtgaaacattgctgggtcatgcatatgctagtcgtttaagcaatgaaaataaaatctacttaaccaaatgaccaaaaacatggtgaagcctgatcacattttgttgatgatcaaagatcaagatcagataaatgtcaccaccatcaagaccatataaaatgaacgacaaaattatctctacaaacaaagggagccaagaatgaaagtacaacatctaatgaagttgatagaatgtgatgatatatattagttcaaaagggtggacactcaagatgctgtcaaagatatgttgcggtcacattcatattccatcaagctactgaagtcattcccaacaatggtgatatttgatattacttacaagatgaacaaatatattc

SEQ ID NO: 133378 - DNA, 408 bp, Glycine max
tgccgctggagctgacccatcaactaccctatctctcttatactggtgatccctaggctcttgaccttgacttgatagaacctctttttaagtgaaggcttttgacttgatcccatgttttactaaagtgaaacaaaacccagtgcgaatcaaaactctgacatctatcatgggtggaatggatgaatgcatgaagaaatgcatatgatacagatgtaatttatgaatacggtggcccgggaaatggtctccttcttatatacaacgtcttgtggtagcaaagtgcccgacgtatgtatttaataatgtgacaaggacccttcgttggtttccaaagagaggggatcaagaatgaacccgcgcatgatgcatatgcgataggcataacacggggatgtacataacacg

SEQ ID NO: 133379 - DNA, 458 bp, Glycine max
  unsure (1)..(458): unsure at all n locations
agcttcttatccaaggttcattcttggttgttaagctccttcttccatggcttattccctagtggatggtgcctcccctctcctcttctccttttccttccactgcatctccatggtggaaaatcaccattgaaggacctcattgaagctcaaagatccagcctccatagaatctccacaagcaagcttccatcaggagggagttacggtgcacgacagggcggcctcgacacttactgcatagttttcctatgtgaggtgtcgtggggacatgcttaagctatttccttggggatggtacggtaccacattgcatctaagagttgaggttaggtgcatgtatcatactaagcaatgattgatangatccatggatggataatgactgattcttgagtgtgtgttgatcaatgaatgttngtgtattcttatgataactggtaatgccgttcttttaa

SEQ ID NO: 133380 - DNA, 385 bp, Glycine max
  unsure (1)..(385): unsure at all n locations
tgttgatgagaaggcctatcatcattatggtcaagtttattgtagttcagatcaaccacgtgaaatttgcgttactttgagtgaatgaaattagtgattgaatttgcggtactcatttgcagatcatggttaggaccagatgattatgtcgtgccttatgtcacgttactggcagatgtgttggtagaggagatcgtgatgattccgattatgctccgcagcgtcgacggcttaccgcatccgcacggaggcagcgagtcgttgtgactgcggtgcacgatgatccaatggtccctgcgccagatgttgatgctgatgtatntccggatgacccgatggcaccagttgattctaatgacattgtgtcagacattcttgtggacac

SEQ ID NO: 133381 - DNA, 418 bp, Glycine max
  unsure (1)..(418): unsure at all n locations
cttaagcaccgcagctgcagcatgtgcattcaaacacactatgtttcctaaatgaagactaaacattcatttgctatttatttggattcattatgcgatataattcgatgtaacccgtcactaaccaattaatattatcaactactcgttnggttaagcaaggaaattgttggtccaacaaaaatcatttacgcgtacagcatacatcattgtcataatcgacgacacataatgacattcatagtttacctgtgagaaaattggcacgtaaatggaaatggttcttcatctatttcgtagacagagctccaacccataagtggctgagactccatgatcatgctccagacacgaagatatataatgacgttgaagtattgaagaaggattataagtcccttccttgctgaaacagtag

SEQ ID NO: 133382 - DNA, 471 bp, Glycine max
  unsure (1)..(471): unsure at all n locations
aagaattaaactaatcagtaataagtgtgtttacattattagtgataagttctttctttctgaatgataaaaaaaaatcagtgataagtttaaaaataagaactaactacgtaaaattttacaagatatgaatacataaatgtatgaaaatgtaagtggtgagatgaaactgattgtaacttctgtaccaaaaaataatataaactctatgttcanggacagatctatgattcaatttatgggaagccaaaaagtcaaatgctaaatgttaaataaatgttaaataaacagaaaattataataaataaaatacattatacattgtatcaaagtcgtgcatgatgtnttttcatatcataaaattcatcaatgatagaatttatatcaaatttttcagtaatgtttctctcaatgtacgtaatcaaacaaccagctagaaattcgtgctccatttattttctgagttgtttt

SEQ ID NO: 133383 - DNA, 500 bp, Glycine max
  unsure (1)..(500): unsure at all n locations
tgcaagctagtacgaatgtaagaaacatcttctactaccttggtgattcttgactccatctcattgaatcgcatgtccacttgtaactccaaagtatcaaacctttcaccaacaaaggtttgaagaccatcgaacctgtccaaaatcttttgaagaagagaggaatcttctccaccatgtaaatgtccttcttcatcaatgggatgagcaccctttttcacccaagagccatcatgctctttacggtaaccaaaggatgcaatcacatcagcgcctattagaaaggatctcttgattggaacataaggttcacaatcaagaggaatgttgaagtgttgaacgaagagggtgactacgtgtggatatggcaatggagcatttaatcgcaatgccttatgcatgtgatatcgaactaagtgtgcccaatcaatttgttggctttatgacaacccacatacaataaatattcntagaaactgtgcaaggttgatatcttgaac

SEQ ID NO: 133384 - DNA, 403 bp, Glycine max
acattccttatctatctaacttattcccataaatgtcttttcatatttgcatcacatggcgagtataagttcactattatcactttttccacaatcagcaacccatatttcttctggtaaatgaaaccacatccaatcaacttcttgtccaagttaaatgtttcctcactccaaaggcacaatattcctccaacactattactgttagatttcaacttataaccaatttgcactaagtgaagttgcctaacagatatataagttgcaccccaagaattgaggcatgcaatgtgggacttcctaacaccctcctccacatatgtctgccaatacatgcgagcctactataataggcaacaactaagataggctatacgctctgataccatgttagatctcaact

SEQ ID NO: 133385 - DNA, 401 bp, Glycine max
  unsure (1)..(401): unsure at all n locations
gcatgcaatgctttacatgcatgttcacaccatatntttctatacattcgatcatactgatagcatatctatntagatgtgaaaagataactaagatcactcttctgatgtagacgaccactaagaatacatcttactgataggaatgactaggcgaatctaatggagtcatcttgaagctcgtcattactatcatgccttgtaaagagaatgagaatcatgcattctgatacatagcacaacacaaccttaaaagaagacatgccttccaaagccaaccgaggttaaaactgattcatatttggtgaaatttctctaaatgataacacatatgtataaacatggtggaacaatctgaccacatgcacaacacattccacacattatatctgaaaatgagt

SEQ ID NO: 133386 - DNA, 399 bp, Glycine max
  unsure (1)..(399): unsure at all n locations
aaagctatctttgattgtgatggcattcaatgccctataatctgtgcaaaatctccaagtgccatccttcttcttgataagaatgattggaggtgaaaaagggcttctgctaagggcaataatcccttccttgagcatgtcagctatcattaattacttcaatctgatcctttcgtaccttcaaccaatgggattgaatgattgtgagttcttctanggggtaaacctgatggcacatcaaagactgttcaataaatgtaaagtatcatggccagttctggttccatatcatccggtatatctaataactgatcctgtggaccatccaaccttgagtattgtaaagtaaatagttctgcaatggcacgcgtatgctgcattcttctcgtgtgattaaat

SEQ ID NO: 133387 - DNA, 421 bp, Glycine max
  unsure (1)..(421): unsure at all n locations
ttctctcaagcggcgagtcatctccacacatattatgtcaagaccaacattaactgtctctgctccgttgtgactaacactagtgatatgtctcccttatgctcttgaacgaccccgaactggtatatcaccatccatatatggtaccagaatgcttatatcaacacataatcctaggacgtgggggaaaaaattattccagccactctctctcattgtgcccaaccgagctttgcaacatcaactaattccatggcattcacaatattaagatcttttctttgcaatatatttgaaagctcatttgtgataccaaacaacttttacattaacctcaggataaagcaaattaaagctctctatttttctatcaacctgctggngagaggtcacgtcatcttattaacatgctagcactttt

SEQ ID NO: 133388 - DNA, 416 bp, Glycine max
  unsure (1)..(416): unsure at all n locations
tttctattgctctntntgttaataaaattacctatatatgtttttagtcactgctacatatatatactgtataaaacaataaaatccctctagcagcctccaagtccgatcaaccaaaaacatgcagtgaccaaaactaactgaaaagcatacattgcaactgtaccgtgtgttatattacgtagagtagaaattatataattaaattttctttaacactttaaatatatgttataattatgtatatatgtaaacttgaaaaaagtttgggggggccatggctcccccctgtcataatcaagctccgccactggtaccaccaccgatttgaaaagtacttccttgcaaactttaacccagttcaaaataatcaactgtagatgcaccctgtctcactctacatatcacctcacttt

SEQ ID NO: 133389 - DNA, 398 bp, Glycine max
  unsure (1)..(398): unsure at all n locations
tatctctaacaacaaggatatttgcaagtacacaatgagattaactcatcaccatattaatcaatggaacgaaagtattacatctattgaagcgtatgtcatgtttatgttattttaaatacataacaaagatgacacacaatgatatttcaagatatcaataactcttaactaataacttgcagctactcatatctatagcttttcaatatcaataaataatattaacaaacactcataattgaacaacttatttaacaactttcagtcattatctagtntatcaacttggtcttaacacttataaagaatcagtttcatttcgcgcgttcaatgtagtattagtatagcagtgaactacttgtcttttacttatattccttacaatggttatgatg

SEQ ID NO: 133390 - DNA, 434 bp, Glycine max
  unsure (1)..(434): unsure at all n locations
tagacatggcttgtgttctgtatttatatntctcttatgcaggaattgaagctcgatgttttattttaggtcctcccattgcgctggctatatgaacaaagtttgtaccattgatgaaaccaaagaagttgcctggtataatttaacaactgttgttctaaaaaatactcattaattagtatgctaattgtatcacacttataattcttcgaataatatgttcttggcagacggttaactgtttatatttattcattacctatattttatgaattcatactctatgtgtattttattattagtttttcaatgggtatactgcagtatggcattgttaccttaaaaatacaaattagaatgtcatagtctctcatggtaaactgggtttttatattttaataaatggttatcaacgtctcttccatattctcagc

SEQ ID NO: 133391 - DNA, 302 bp, Glycine max
  unsure (1)..(302): unsure at all n locations
ttggaattgcgaaagcacctctctatcattatgtattagtacctgacatctcannaaaacaaatcaaacgtaacaagacaattatagttgctgtttgaatacctcacccactcaagtgtatcacacaattatggcttttctctaatgaaacactcttgccttttaccactctaattccccttgagttcttaggtaattcaagagattatggccacaacatagaacaattcaccaatatgtgtaaggtaaggctagagagacaaggaaaaggttaaccaagaaaaaggctaacaatgttttta

SEQ ID NO: 133392 - DNA, 451 bp, Glycine max
  unsure (1)..(451): unsure at all n locations
tactagctgctgataattctctcttttaagcttattttttgatttcataaaatcttcatgatttacattctccccctttgtgatgatgacaaccacctgtatgttatgagcaaaaacaaagaaaatatctatttgcatatagtttactcccccttgattntacaatgattgcttatatgagacaattgaagatttccaacttttcatatataaaaagttgtctcataaagaatagataatttttccttactattttatcttttatctttctctccccctttgtcaacatccaaaacaaatgatgaatagagaggagaaaaatgttaccacttgttgtaatgtatgagaatcaagtgatnaccaaaggcattaaaacaatcattcaatattaatcaagcaaaaacaagtacaattacacatcaatcaaacataatcaatcatcaaatatttc

SEQ ID NO: 133393 - DNA, 288 bp, Glycine max
attctcattttggttactttttataccccctggtgacctgcttaagccattttacttaaatcatttctcgcttaacttaaaaataaaataaacttccaccgaatgtttgaattgtattatccggtaacttcggagaaaataaattcccaacgttcggtcgtgcccgaaccacgttggaaattcaaaagagggtaaaaaattatattataatccaaaaaacatcttttagccaaataaagccggaaatcaatcggaccgtgtctctttgggatttctcattcttaatcg

SEQ ID NO: 133394 - DNA, 463 bp, Glycine max
  unsure (1)..(463): unsure at all n locations
ctttgtcatcacctataaaagccattcttaaggttcaactctcttgaaatggtcttttctgctgttattggttaaacgtagatttctaagaaaggcctaaagtcaacatgtatctttactacctctttcaaaaactaagcgatcattaatggtccaattccttaatgttttctctcctttcaaaaagaaccgaaagattctttaatggttcaacgccttanatggcctttcattcaatcaaaatatatcttgcaaaaaggataaaaacaacttaaccaattcttagttctcaaagaactacataggtctaatttccttatcacaattgaggaatatgtatgagcaagggaaacaccctcgtcgaccactaaatgataatatatacaattagcacatatagcatataaaacacanaatgacataaaaaggggaagataacatatatggaagtcatatttgcaca

SEQ ID NO: 133395 - DNA, 456 bp, Glycine max
  unsure (1)..(456): unsure at all n locations
gcttaagcgtgggttgatcagcgcttaattgatactaagcttaagcatnaggtgagccagactaaaacgccaggatgaagatgtacatgatgtgttatgaatgactcccaaatgaatttcaattggaattcccttattgtataagcttaatgaaatggcataaacaagttttaatgttatgttaggagaaattacttttactaagcattgataagttaggaattgaatcaaattaagtatgaattatttgcactttaaccactattattaaattgttattgaaataagtctagagatcattatactntaccatgattgaataagtctacaccaaagggagaccattatactttaacatgagttattgattattgtgaatgaaattcttttaatttctactattgaatangagaccaggaggaattgtgatccttgggcaaatngcatacttataca

SEQ ID NO: 133396 - DNA, 252 bp, Glycine max
gagtggacttgtctgatgaaatcttttctttatcttgttagatattatcaaggtgcatatgatctttggacaacctcccgaaatcattttgcaagtttttgtaagctaatgaaataacgtatgagtttgatggtaattcatgataagcacttttaagagattcaaggtcatcgatatttaccttatactctggatttgattcatattcttgaaaaatagtgtctaccattggacatagattggcttattctt

SEQ ID NO: 133397 - DNA, 381 bp, Glycine max
  unsure (1)..(381): unsure at all n locations
acctgcggcatgcaagcttgagcccatgctgtatcatagtctatctctattatatgggaattaaataagtggggtcttatcagaatatgtgaataataacgttaataaaaaatttgcatggaaaaaaatcgtcttggaacgggagaaggtttcattaagtgagtaaagtatttgacggtgaatgaatccatgataatggaagcttaattctatcttattcttagaattacttccgtttataatctacaatactggttgacttttaatttgtntaaataactgtgtagttaaatgtagcttttcgcctttttaattagtcacataaatatcttaaatagatagttagttagttatgggaaataagttaaaagatgggcatga

SEQ ID NO: 133398 - DNA, 291 bp, Glycine max
ttttcaaaataacagacctgtcgagattaatggagctagcatctttagtaagtgatccaggtgattttcaagctcatcatgggaagttgctcacaattcttatagtagatgttgaggaaggatgcctatagaccctggttcagttctttgacccgctctaccattgcttcacatttcccgatttacatctttgtcccacactagataagtactcctacctagtgggtttacctgtgccagacaagatacctttccatggttttgagcctaacccttaaccctctgacatct

SEQ ID NO: 133399 - DNA, 242 bp, Glycine max
  unsure (1)..(242): unsure at all n locations
aaataagcantattttcatcaagaaataaactctaataattcaattttaattcatacacattaagtacgtgaatcacttggaccgacactatcttaatcgagctcactcgcatcccgcaaaattagaggagcatacttatcattaaacactttttaaacctctttgaaacaaatcacaatattaaattcgccaacattctaaattaaactctgtagacaaaaggttcaaatcttaataaaaa

SEQ ID NO: 133400 - DNA, 336 bp, Glycine max
  unsure (1)..(336): unsure at all n locations
tacgctttcttcacaattgcatgtttctctattccaangttttgctttactttaagattctaaattaatgcaattgaatagtgagttgtagtgcttctgaagcagttgaattttcccatttgtattttttttcttttccttagagttaattgagacctgatggacctcaataaaacattaattattgttttgcaaattacaaaaaccttccctaagatttgctctattaatacatgtctcttctccttttaaaatcattacattagcaccccctgctataatggtgttaagttctcgtttgaaaatttaaagatatttatattaatgtttaattca

SEQ ID NO: 133401 - DNA, 352 bp, Glycine max
caacgagatgatgcgctccatgagaggttggatcaaatggagaatagagatcataatgaagaagaaaggaggagaagatggaatgatggtgttcctagacaaaaccgaattgatggtattaaactcaacattcctccatttaaaggaaagaatgatctggaggcctacttggagtgggagatgaaaatagagcatgttttctcatgcaacaactatgacgaggaccaaatggtgaagcttgccgccacggagttttccgactatgctcttgtgtggtggaacaagctacaaaaggagagagcaagaaatgaagagccaatggttgatacatggacggagatgaaaaagatca

SEQ ID NO: 133402 - DNA, 362 bp, Glycine max
  unsure (1)..(362): unsure at all n locations
taagcataaatgttagtcatcacgcatatttcatcatctttataatttgcattggtaatggtttgccataattaaaatcaggtatatgaattcaatatctatgtccaagaaagtgccagctttttcaatttgattgtaagttgttttcctttatgcgatatggacttaatgggcttgatattttatttagcatggactatatggcaacacaaaaattgatttttttttttacctttttggatttttccccaaacaaaataccataatgggtggtcaaacaaactatttatctgtcacaagttattttctccatgtaagatgttggaagtatcatcctatgtggcgcgatgatctntaacatc

SEQ ID NO: 133403 - DNA, 394 bp, Glycine max
ctcactcattcgaagagttcttcaatcaagcaatctgagatgtggatggatttggcatttgaaacttggaaagatctcaaggatcgttttttgcattctgacgagtttcgcattgctgatcttcaagatcaaatccagagttgtgagcaaggtaattccaacatttctgagtattatactcatctgaatattctgtggaaagaactggaattgtatcgatgctctttgctatgtacatgttctagtatctgttcttgtgggcttattcctaaacttaagagagaacgtgaagatgactgtgtaattcgttgttagtgtggtcttaatgatatgtatgcacgtagtaggtctcaagtcatgcttatggaacccatgccttctctagttaaaacct

SEQ ID NO: 133404 - DNA, 432 bp, Glycine max
  unsure (1)..(432): unsure at all n locations
ctagcttataatttatctttatctatttaggttttttttatttttttatttaaaaattttatgtttatatcttataatatatacttgttagactaaattaatacttatgttagtttttttaatatttttttaaaataaatgattaatttaattcttaagtttgtattcaataatattttagtggctaaaatatgtttttgtgtctttgtgaaattagcaagtctatattgtgtgtttggaaattcttcaattctctgttctcataagaatataatatatgtaattaatgttagactaaaatatgtttgtgtgtctttgtgaaattaacaagtttatattttngtgtgttggaaaatatattcttcaatttttattctggtaagatataatatatgtactaatgtaatataatatttacatataatgaatgca

SEQ ID NO: 133405 - DNA, 359 bp, Glycine max
  unsure (1)..(359): unsure at all n locations
aagttgatggaacttggtggttngtcaataactaaatgcaatcttggatggttgaaacaaatcagtataaatttcctgtttcttattccttgtatttcctcttctgttatttgaattaacctacgggttgaatgtgatattcgcttttgaaaactctatttgatttacaaagaatttaaatcattgtcttattcatctagcaaaaatgtgatacctattttcttaaatcttacttcatcagataataactttggtgttttcgaaaagatttaaatttaataaaaatcacaacttaatctctcatgcctgaatatttatctctacaagttaatntacctttagatcaacctacacgtcac

SEQ ID NO: 133406 - DNA, 355 bp, Glycine max
gggaggctaagagatggttgcattcattcaagggcaacagtctaaagacctgtgatgaagctgctgagaagtttctaaaacaatatttcccagagtctataaaaatatcttgagtgaggcattagacagatttcgtagcttgctgtggaaaactcccactcatggtttttcagagcctatacagctggacatcctcattgatgggttacgactgcagtcaaagcaattactcgacacttgtgcaggaggaaaaattaatttgaaaacacctgaagaagccatggtaacctttacttacttgacactaagtaagatgccaactcaattgcatgctagttaacctttaccttcatct

SEQ ID NO: 133407 - DNA, 481 bp, Glycine max
  unsure (1)..(481): unsure at all n locations
actaagcttccattcccgagagcatttcttatntaagcacttcagcctttgctttcgtgtatggtaagaaaaaagtcatttcttcttctttctttcttccaaagccatttctaaagttccaagcactttctacatcacccacagccaccattatccaccacaaaccatcgttattctccattgaaaccccacaccgagaggaacccttcaaccaaagcggaatcttccaacttggcttgtggtttcggtagataacgaaaccctaatctgacctttcattttctttcgaggtaaccatggttctacgcttgtttcttgatagtttcatcttggctttgcatattttctgacttcggaaccgtcattgcatgtcttatgcttcctttgaaaaaccttagagaaagagactttgtaaacattatcctgtcatgaaatgcatgttattttcgtaacctacactgaaccccagtcacatnggcat

SEQ ID NO: 133408 - DNA, 423 bp, Glycine max
  unsure (1)..(423): unsure at all n locations
actggtctccttagaggtgtttatcttgtcataccattttgtactgngagtgagctttcttccttagttgggataacagtgagaatctgctaactctcactgattntgtcgnttatattacatgttgctattatatgtggataaggtcacttttcccccaatgttctcacttttaataacaaaatattaaagcaatactttgaaggacctttgcgttggttcattcttttccctaaattatgtttgcatgttaaattaactctcgatggttcaattgcagggcatccatggatatagttctacaccgagcgcacattatagatgtgccctttaaatcaaaatagaagctcccaaatgcagctgcttctgcaccttgatctgggttaggaggaaacaagatacatgatgagtggtcccttgatg

SEQ ID NO: 133409 - DNA, 467 bp, Glycine max
cgcataatacacaagtgacatgctcctgttattctctatttgatctcgcaagcaattaacttatactatcggttgtttaccatattccagtgtaaacagtgacatacctaatcaaaatgatagagttcagttaaagtggagtatcaattataactcaattaacaatttatctctcattaagctaatagataaagccataaaggtgatcctgagaaaaacgttgaaatgaaatcatatatcaaagaagttaactcaaaacaatcaaaattttaattttacctgaaaattatatatatatatatatatataacactggatacgtactcacgaatttatttaaaaacttaaataaaacactaataaaatcgtggatacataatgcttcagttttaggatttcttaaaatatacacattgtggctaataataatttgtttaagaataagatcacgtgtctctcagtatatc

SEQ ID NO: 133410 - DNA, 272 bp, Glycine max
gcgtggcagtgcaccacggcctccatatactcgttgatgaggctggcggcgtgtggctccgtcaaggggccttgggcggtgatgctagtcaaaaaggtgtgtggctggcatagctccactactatggagcatgagtcggcgtcctcgaatgcgtccatgtattgtaagatgcttgggtgtggagagaggaagctcatggccctggcctccatctcgatgcagagcctgtcctcgtttaagagtctgcgcttctagatgagtttaaccgcgta

SEQ ID NO: 133411 - DNA, 303 bp, Glycine max
  unsure (1)..(303): unsure at all n locations
aatcacttatgcatgcatatgtcttacttttcaatttcatttaattgcacttattaacttctgcttatacctttaccattttgcaaaggtttaatccattaacataattataaattctaccaaactattaatataagatagtatgaaactctgaaggtcatcatatctctaatttatttatttatttaaataaaacaagtaagaagaataatggaagacaatcatcagatgggaatggtagattacttcacttatccgcttttccccatctctctatatagcaccaaccatnttcttctgtta

SEQ ID NO: 133412 - DNA, 462 bp, Glycine max
  unsure (1)..(462): unsure at all n locations
taataaagtccttggtgatccatattatgtgtgtgtgtgttcgcgcgcgtgtgtgtgattgcattgaataagatgatgtgcaaagttggggattataacttcagacgaaataaatgaaatacacataactgaaacacttgtgtgcttgatagaaacactatccttgggaggagtgaagcatagttgatttttctttgatacctgtcatgggggagtntgataatttctatgcttacgtaatttgaatatttaaatcacatagcaattatctaattttcctcttttntattgcttcttttgtgttataacattaggaatttagcttcttctgaagttttgtctagtagatactaaagttagttaattcacagtgttttggggtgtatctcttttttgtagaattacataatacgaggtctgatagagggttgaaaactgagcattgcactaacgcgtaacaac

SEQ ID NO: 133413 - DNA, 370 bp, Glycine max
agcttgctacccacggtttctcttaatatttaccatacatttaggggagggccatgcatggatggccttgattgtcttacggtacacttggaccacatttctaccaactacggaccctaagaaaactatattatctacacaaaacgtacacttcgtctatatttgcatagagggtgtcattcctcacgactgaatgaactcgcccgagatgtactaagtgatcatgtaggctcctactgtacactaaaatatcatcaaaataaacaactacaaatctacctatgacatgccttatgacatgatgcatcagcctcataaaggtgcttggagcattatgtgagctcatatatgcatcactagccattcatac

SEQ ID NO: 133414 - DNA, 288 bp, Glycine max
atgctgacaaaatcgatggagcaaattttatgcataagggaccacacaatgcatacacatatttatactggtttggcaaagtgcgtgcctacgttcaatacgtaagcaacccacttgagacttccatgtcttctgtaaaaatatgtttacaaagtttgaaccacacagggacaacccatcccttgtggacaggaatgcttacatcttaaaagacactcagtcccttaatcaatctctctgaatgagaagaaagaaagaagaattctctcttgaagagatagatattac

SEQ ID NO: 133415 - DNA, 348 bp, Glycine max
  unsure (1)..(348): unsure at all n locations
ctgcagctgatanattatacgacaatagttttttcgatgccaataagtcccgcaaatatcgagacctccaattgaaatggaactcgatcaaatcaaacgacttaacttttgactggatgccgattgactccgtatatatcgagacctcaaattgaaacagaagctctagaaattcaaacgacctaactttaattcggatgtcgattgagcccgaatatatcgagagctccatattgaaaacggagctcgtatcaatcaaccacaatactttactcgattccgatgatccatataatcgaacgctcaatgaaaggatgctcgacaattaaacacaaactttactcgatg

SEQ ID NO: 133416 - DNA, 351 bp, Glycine max
  unsure (1)..(351): unsure at all n locations
attggagcgtctcgatatatttctgtgttcaatnggacatccgaatataaagttttcttcgtttgtaattgctcagagcttccgttctcaattccgtgcgtctcgatatattacgggactcaatcggacatccgagtaaaaagttattgccgttcgaatatgctcagagcttctgttttcaaattggagcgtcttcatatattacgggactcattcgcacatccgaatataaagttattttggtttgattatggtcagagcttctgttctcaatgtctcgctcctcaatatattaccgtactctatcatacatccgattaaaagttattggcggttgaattcgctcataac

SEQ ID NO: 133417 - DNA, 446 bp, Glycine max
agcttatcaaatgtgcttctattctgacgttccaagaccttgttgcttgctataagccatacaaggccgttttcagccgatagactttctcctcctgtccatgaactacaaatccttaaggctgctctacaaaaatttcttcttccaagtgcccattcaaaaaggctgatataacatccatgtgatgaataatccaatctttatgagtagcaagagctaacaacaaccttatggtatccaacctatcaaccagagaaaaagtttctgagaagtctaccccgaacatctgcgcatatcccttcacgacaagcctcgccttatgtttgtttacagaaccatcagcattaagcttggttctataaatccatttcactccaatgacatctttatctttaggtttctccgtgagcatccatgtctgatgttgatcaatcatatcaagcttc

SEQ ID NO: 133418 - DNA, 462 bp, Glycine max
  unsure (1)..(462): unsure at all n locations
tctagaggaagcctcttaatgaagcttctagagaaagcttcatgaagctgcctcggtaaaaacgatgcccagcgttcgttaaccgttggatcttctcgaaatttggtctgcaacttcacaagacacttttccatgatctgaccgttgggatctttgagaagatgtctggagtattctagaatcttcctttcccgagagcatctcttatttaagcatttcagcctttgctttcgtgtagcttatgaaaaacgccatttcttcttctttctttcttccaaagccatttctaaagttccaagtactttctccatcacccatagctaccattatccaccacaaaccatcgttgttctccacatcgagaggaacccttcaaccgaagcggaatcttccaacttggcttgtagttcagttagaacgaaaccctatctgaccttcgtntcttcgaggaacatggtctac

SEQ ID NO: 133419 - DNA, 414 bp, Glycine max
  unsure (1)..(414): unsure at all n locations
cacctgcggcatgcagcttgattaatctattctaaaagggttcttgtttanttctttatactacagcatagaacacaaaagcatgattgagtagagaaatatccttatatgcattaccttgtttgttaaaaagacccaacacttttacctactgttgtcaatcttacttacttgcattcttactattttagtccagacttagtttaattctgttctaaaccatcgattatcaatgtttctttcaacaatgccctatttcttaatataaccttgtccaaagctagttccctgacgttgatactcggattcatccattataattttaaatacttgaacataattgaacatacttgttaaaggaaaaatagaaccaaatagtaactgcgggagaaatcccacatagttattataaca

SEQ ID NO: 133420 - DNA, 404 bp, Glycine max
  unsure (1)..(404): unsure at all n locations
tgaatgtgtgtaacccaccattttccataatagaacactttttatatgtctactatcattggtattatttctttcttcgtcattgagggaaacacttatgctgccagatccctccacctttgggcgtattctttgaaagattcatgcccctttttgcacatgttctgtatttgcatcctatctggagccatatcagaattgtactgacactgcctaatgaatgcaaccattatgtcctttcgagaatggactcgggaaggttccaagttagtataccaggtgacagctgccccagtaagactctcttggaagaaatgtatcagcagtttcccatcttttgcgtatgcccccatcttccgacaatatatctttagatggttctcggngcaagtagtccccttata

SEQ ID NO: 133421 - DNA, 338 bp, Glycine max
ggatccttaagtcacctgaggcatgcaagctataatggacagattttctattattcctattgcataaatcgccaaaaatgaaaaggagaatatgatcagaattacgatcaacgaaaagagcttttaccagacaaaactcgaaattcaatgctggcttctgaagaggtcacgataaatggggtctcatgcatcatcaccaaaaaattaaaggttttgccaaaacacagtccccactgtaagctacttttaatctagataagtaatgaattccatgggccaaagcttgttagacatataggacaaaaccaccgaaataatgaggtccacaacgtgcacat

SEQ ID NO: 133422 - DNA, 381 bp, Glycine max
  unsure (1)..(381): unsure at all n locations
tcattngactctgtagctctgttgcatatttttatacatatgcaggagaacatcttgcgaatagctggtggtgggattttagaataattgaagtctttagactatgataggtcaaagtttttatagcgaactttcgttgtcaaacttatattatatattgaagttcataaaaattgataggcaaaatagtcaatttgatccttgagagtgtttacggatntcaagttatgctctaaattcagggactaattaacttgaaattatcatatatgttaataatgggaatgtctaattaagagattgaggagagttttggtcttcaagctaaaataaaacttattgtgaaacttattttgtcgttttacatgacagttaattatg

SEQ ID NO: 133423 - DNA, 91 bp, Glycine max
ggatcttaagcatctgggctgcagctcttttagactcgacggcattttctgccgctgcactgtattttttgagcctatcggaatatttttt

SEQ ID NO: 133424 - DNA, 425 bp, Glycine max
ttcgaggtacttacccgttgaagatcgaagaacgatgatgaacgaatgaataacgtcgaagaacgggtgaaacctttgcgagattcctcacggaaaacgttacggaaacgtttcggaagcgcctcggcttagattttcttcacggaaacaatgtttccaagcgaattcgaaagagagagaagtgccaaaggggctgaacccctttcttcttcacttcctcccctatttatagcaaaataagggaggtggttgccgcccagctcgcccaggcgagccaagttgcttcctccagaagcaacagccttctggaggaatattctggagggcccaagtgggcctgggtgctatttgacccacattttactaatacacccccctctgctgtttttggtgattctttttcgaaagtacggaacttacaattt

SEQ ID NO: 133425 - DNA, 353 bp, Glycine max
gcaagctagttcaagtgcttcctattaatcttcctatactattatatataaagataactgtctgcctatgagccatagcattccagataaatgtaatatatatgctaaacataaaccacattggacacatgccaaagatattacaaatatgagcttattcctggccagaggaccagccaaattgaaggcccatgttcatgatatgtataacaattagcatcatgtggccctcactcacatattaagttcttctataggtttaataaattctgagataccacatttaaaacacagaatgtcaattacaagatgtagatattgcctcccaatggactgagaaagtaatactgttt

SEQ ID NO: 133426 - DNA, 359 bp, Glycine max
acaccagctactactccctgcccccaccccccactctctcacaaaatgtgccatggcctctccagcccatcgccgccgtgttcggcgcttctctccttcacgctcctcctactactcctctcggtggtgggcccggtttcggcatggcggccttggccccagagcaacaaaatgaacatcagcgattatgccttcggggactccaagaaatacgatgggtcctcggagttcgtgaagctgatgtaccacatgggaccggtcctgactaccaacatcaccgttcacaccatatggtactgaagtgtgagcggagccagaagaagatcatgcgcgagttcataaattcaatctcccgcgcg

SEQ ID NO: 133427 - DNA, 388 bp, Glycine max
tggttaagcctgaaattctgcagcattggcaaagcagattcaaattaattgaagttatgtacgagcactgcagcttttacaaaaataagcactacagcttatttaagacacaaattctgcagcatttgcagtatgtgggtggaaaaagggtgggagtggaaatttaaatggagaagacacttgtttgacagagagcttgagatggcagattgtttccgtaatgatgttgctggcagctgtattcagattcacaaaaaagatgagtggatctggaaaatagaccctactggacaatattcggtaattaaaggagagactacaaacaaagaccaatttgggaggagaagggtggcaattatgacacattatgcccattctgtgggaattc

SEQ ID NO: 133428 - DNA, 100 bp, Glycine max
  unsure (1)..(100): unsure at all n locations
acttatacaagaatgaagctctgataccactggttggtcttgtggcctctgatatnctaagaaagggggggggggtgaatttacacatcacaactcctat

SEQ ID NO: 133429 - DNA, 465 bp, Glycine max
gcaagcttgcatggctgaactcggcgctccactatctttgaaattgctttcaccaggtctgttctctcctcaccctgcttctgtaatccgtactgtctcatgcattaattcactgctgtcataggatttgtggtgttaatattaatatatcttggtgcgggagatggagaaaggacataacaactacgcttccttttccttttctgcattggagggagacgtgctgactctcccataaagaacaagagacctttccatttttacttgttgtggcaattgccagcttctccgtaactattttccccctcgacatcagtgaaccgtgtgggtggtaataaagataaaaagttttttttttattgttattaaaatacaatgatgatagataaatatttaccacaatgaatacttttacttcttttttctattcttttcaataatattacattattggacattatatat

SEQ ID NO: 133430 - DNA, 366 bp, Glycine max
aactgcaaatgcccattccttttctcttacaacatacagcaaggtatagtttagaagtatgcctcttatcatcaaaaaaactaaatgagtgaaaagattcaaacgcaaaccgtgtgattattgaccttctacattttagacattgagcctcaagatatcagtgacttttagatctgaacatgtctatctccggagagaacttgaatacccaaactattgtaacagatttatatatagattatattgcagtaatatgtctgccaatgtggggtgtgttggtcatgatctacccataatctaaccatgaaaattacatgcttacatgcaatattaatagatgacttatgtcataacaaacaatcagtc

SEQ ID NO: 133431 - DNA, 388 bp, Glycine max
  unsure (1)..(388): unsure at all n locations
cttatttatttgtctntatgtttatgaccctatctttatcggcaataacccaaatttggttaaagacttcaaggagtccatgtctcgtgaatttgagatgacagatatgggactcatgccatattacctaggaagggaagcgaagccaatggaaaatgggatctttgtctcacatgaaagctacacaaaagatgcgttgaagaaatgtaatatgcttgattgcaatcccgtgaacacacctatggaaggtggcttgaagttatcaaagtttgatgaaggagagaaggttgaccccacggtcttcaagagtctagtggggagtgtgatgtatctaaaccatacaaggcccgatattctatatgcggcgggagatgtgtgtcgctttatg

SEQ ID NO: 133432 - DNA, 454 bp, Glycine max
  unsure (1)..(454): unsure at all n locations
cggaatcacacaatcactcactctttcttttaatcganggtaaatgttgtgaaaaaaaatgacaataagtaataacgtcaattaacataattaataataataaaataaaaataattaatcaaatttgcatgcgtgaagaagcatttctattacacgaaattatccaaaaaattgtgataaacaaaagctctcggctcccacgacactacttcaacctactgctgccccctctcatcgccaccgtcggaactgaagagaagaataaacataagacaaccaaatcaaagaataaataatatcaataataagacaatagaattgattatgatgtgaggtgacgtatgtgtggatcgtgttgtgagtgatggattcaacttcaacttccaacctaatatgattgccatatacctcatggctacacatattgaacactatcattattcactaacacaac

SEQ ID NO: 133433 - DNA, 220 bp, Glycine max
tcaatttgggattgtcaaacttccatatccgagataggagcactgaactctgtgactgacaaatgacgagtctcatacccaactctggttctttttcagactttgatctgaataaaatttcaccaggttatgttatatgccgaggctgcttaaaaaatgcccagcatctgacgtgaaaagactcaactaaatataaaactgaaccactttatccctttct

SEQ ID NO: 133434 - DNA, 389 bp, Glycine max
gctctgctcctgttgtactgagtcataaaattcttttatcactgaaagcatctgctataacattagcactgtggaatactgtgtctgtttgggtggagtattggcctttcacatctgtatataaagggattccagctttgggtcaaagtatccagatgagaatggcaagactcttagaaagtgatcaagataggagcaatcctacatcggagggagatagattgcttcctgttactgatggcagctcataattggtagatagaaaatgcagtaaaaaactttatgagaagatttcagagaatccttatattgctgcatggagagcatatttacagcaagaagttgtccttcctggactatctctggctttgctatattttactgtactc

SEQ ID NO: 133435 - DNA, 312 bp, Glycine max
  unsure (1)..(312): unsure at all n locations
gcttttcgcanagattactgtaaaatatgttgacttaccatggtagaagactctacatattgcctcccttgcccagtattatgatcagccgatgaggtgcttcacctttgggaacttccagctatcacccatggtagaagaatttgaagagatcctagggtgtcctctaggggggaggaaaccatacctcttcacaaggttctatccctcattagctagaatttccaagatagtccaaatcttggcgcaggaattagaccacaggaagcaagtcgaaaatggtgtggttggaatgccgagaaaatatttgga

SEQ ID NO: 133436 - DNA, 481 bp, Glycine max
cactatagcttcactcataacagattctacaaatattaccaagtaggagtcatgttattaatcataaaagagaatgttatcacttgatatgaatgcactgtagaagctgaaagtcaagaaggaactatgaatccatttataattattaaacaaatctgtcctgaaaaaaatagagaaattatatactttcaattaaccctatatgaccaactatgcaatcattataatggtatacccttatccctctgcatgaggtttaagtccaagaacaagatgagggtgctaaaagatttccattcaacttgatgaaccttatccgaaagtgagcttgatgttccctgataattgcctctgcctaatatcaagatacaccagcacgagaaggctatagtatagttcaagttcctttccaagttcataaagcttggccactggcttatctcttagaatttgtgtgatagatatgcttgaaagaaaaatt

SEQ ID NO: 133437 - DNA, 422 bp, Glycine max
  unsure (1)..(422): unsure at all n locations
tgctgcataagttggaggcattcttcgttccttctcttatcttggaatgcaaacatgcatgttttcaacatttcaattctacgcttcccttaggtggctcagtagggggactccacgtgtcaattttgccgcaacttggcattatcatctgaaaccttagagcaacacccaaagcctcgaatgcagtttggacaagagcaccccatatactgcatgtttcatttgttatagaaactgttacgatacatatttcaatacagatccaacggattaaaataaaaacaaagtcttaatcctcttgagaatattctgtctanaaagagattttatcttattttcaacatattcgtaccgcttatattctacgcagagtccatacctatactactcacttctttatcctactcataatcactctatat

SEQ ID NO: 133438 - DNA, 471 bp, Glycine max
cgcttaagcagctaatacaaagggacagggactattcattattctgtctttagatgagtcaaagtaacagtaatgacatacagtcatacaacacaatacccataaacccaatttgcacaaccccattttttaaatcaccaacatcacaagttcacaacacaacacagctatgcagaattagaaaggagaatcgcagagatcaatgcaaatcaatttagaacacataaacacagagaacttatcattatgcactaaaccaattgaaactgaagttcaagttctccttataatcacattcttcgacgcaaacgaaccatacgcgaccaatgcaaatcataactcataagggtcttcgaacaatataaaaacacaatcagaataagggtcttcgaacattaccatcgtgaattcataataaagggtcaatatctggtggaggcttgaatacatcacacgaacattacgaaatca

SEQ ID NO: 133439 - DNA, 454 bp, Glycine max
  unsure (1)..(454): unsure at all n locations
agctngagcaaatcgtatcactcctacatctcatctgtagcatgcatcttctttctttacccactcctcacgtttggttttttagggaaaacaccataactaaacgcgccgcaagggatccctatcgcaccagatccaaatctataacgatgggtgatcaagaggagacacaggaacagatgaaagccgacatgtctgctctgaaagaacaaatggcctccatgatggaggccatgttatgtatgaagcagctcatggagaagaacgcggccactgccgctgctgtcagttcggctgccgaagcatacccgactctcttgtgaactacgcaccatcctccctcaaacatattangacggtgaagggacgcactgtggcacgatggcagccctcacctgtgatacaaccgagcggcttacccttatggatagccgcccaactattcaccacccat

SEQ ID NO: 133440 - DNA, 453 bp, Glycine max
  unsure (1)..(453): unsure at all n locations
tctcccncaattttctataaatagggggagaagtgaagtttataatggttcagcccctttggcacttctctctctttcgaatttgcttatgaaaattgtttccgtgaagaaaatccaagccttggcacttccgtaacgtttccgtgagtgatttcgcgaaggttttcgaccgttcttcgacgttcttcattcgttcttcatcgttcttcagtcttcaacgggtaagtacctcataccaagcttttcaattcattctatgtacccgtggtggtccacatttggtttcatgtattnttattctcgtttcattcaccttttatacccccttgtgacgtgcttatagccatttatgtaagtcatttctcgcttaacctaaaaataaaataaanttccaccgattggttgaatggtattatccggtaactctggttgaaatgaattccgaccgatcgg

SEQ ID NO: 133441 - DNA, 175 bp, Glycine max
agcttcctccagaaggctgttgcttctgtattaagcatcctggctcgcctgagcgagctgggcggcacgcatcttccctattttgctattactaggggaggaagtggagaagaaaacggttcagaccctgaagcactcctctctctatccatgttgcttggcaaaatggtatgcg

SEQ ID NO: 133442 - DNA, 426 bp, Glycine max
  unsure (1)..(426): unsure at all n locations
aaaataatatcttgatttctaaaatacccattttctctcccttcttgtaaacatcaaaaaggccaaagtgcgcaaaacatgaataatttaatcatacacaaagcataatttgtaaaacaaacataaaagattctgaaacatacataaagaaaaacatgaataataccaaattgaaatgcataccacttagtcatataacacaaaccataaatatcatgttcagtcatactaagcaaatattaaaagaaatactaagttttcaaatgtcataataatatagccaaatacacggctagaaaacaaaatactaataataatagtaatgtctaaactgatagtggtggtggagggtaaataanggtagcacgaatgatggtgaaatcttcttcaacctttgtgatccttgagtccatttcgtcgaatcgc

SEQ ID NO: 133443 - DNA, 373 bp, Glycine max
agtcttgttattccttatgcgtagggagtaatacttagaaaaacttcttgagtaactcttccaattgatataacttcctctgaaaaaatgtaacgaaattaattcagacccacaataagaagctttgttcactgcagattcaaatttctgctttattagtcttctttgtttttatcagcgaagataaattatatatatataacctggaagtaccagaggtactgattacagagttagtcaccataaaaatggttcctcagtcagacatcataagtctgattgggaaccaaaatatgggaagcaaagtatacatatattgatccctactccctaatgaaacccctactgctgcaaaaatgatgtctcaagtact

SEQ ID NO: 133444 - DNA, 311 bp, Glycine max
tgcattatatcatataggggagcacggttgctagcagtttgcgatcataaacaagttgggtggaatgggtcgggtgtacatttcatgtactacatttggaatattgcatcaatctttaataatgagtataaaaatgttgacttaaaaaagcaagtcatcaacatggacaaagttttaagttcttcatgcctttatatattaaataatgtggttatttcatgttcaacttagaattaagtcattatggtttgtctttagtcatatgatgagatgagaaaactgcaatttctggaacagatacttacaatgag

SEQ ID NO: 133445 - DNA, 363 bp, Glycine max
  unsure (1)..(363): unsure at all n locations
atcctcagagtcacctgccgcatgcaagctatgcctatagggcttgtacctcatctctttcttgcgaagctctaacctcatcgtctctcacagtctntacagttgggagccaatccaatccttgtgtccggactctcatccacttatgatagccgtcgatgatcccattactgcttcgcctaagctctctgtcctttcttcacgccgcatcccatgccttgcgaactccttggagtaccctcgcgttgcggtcactgaaaccccatgcgatgaatggcgtgatgctttcgtctgatggcactcctctcatggngtagccaagctgtcttatggcgaggacggctgtataattaatacaacccc

SEQ ID NO: 133446 - DNA, 295 bp, Glycine max
  unsure (1)..(295): unsure at all n locations
gcgacataccgaaagtcgggatttctcggggcggagagtgccgcatgctnggcttctgttcttctggaagncnngatcccgtcaagaagacaaattggccatccacatggtgctctggtgtacagttatcacccttctctacctcttttcggtcactggcatactcgtcgcacctagctgggtcgggtaacttattcttggactgctgagaggaacagtggcctgctcataaccgaacaactttggactgacaccttaacatctaaacaatgcaccacatgtcttctctcaacta

SEQ ID NO: 133447 - DNA, 391 bp, Glycine max
ggcttattttattgcctattttctaagcctgacctgtgaagtagatgactggaaatacgctctattatattgtgtcactggagatgattttcctcctcttttttgacatcatgggcactaattgtcatttggtcagagaaatcaatgttgtggcctatttattgtagtggatgtacccggcgagcgatacatgaagatcttaaagggatacaaagaattacatcatccaaacatctattgggaaggacattgcaaaaaccattgattttgtagagacattgaaaacaaacctgtggcttccgagctgacagataaaagtgaaggtagggtcaagagactgctgtataactcaggtaaagattgcacagctcttatatgtttgatacagtat

SEQ ID NO: 133448 - DNA, 358 bp, Glycine max
tactaagcttaaattgattaaatgtcaaaacactgtaatctttttctatatgtgtacgatacacagcaaatttaaataaatttatactgtgaaaatgttttggcatggtaatgatacatcttggtatcgataccaaaataattgttgaaaaacttttaattaattctggcaaactttggactaattgaatctttctttatatacccttctaaacttaaactgcttgacattcatctgaatatttgtttgaaaatttgaaacatggattgaaacttggatatcaaaatatctgatccttgttcacctcacttgaaagagacccccctcgaacaaatgcttatatgggccttcccttctg

SEQ ID NO: 133449 - DNA, 255 bp, Glycine max
  unsure (1)..(255): unsure at all n locations
catgatgccgagcacagtccagatagcgatagctcacctgtgctttttcttgcatgctatatgancaaagtcagtgagccggccaagctcggtgaatcggacattgaggccgccattattctgtgccctctggagactgtatttgcccctgctttgtttgacatcatgattcacttgaacgtgcatctgatctgagaaatcatatgatgagtgcatgtttatctaagacggattgtccgggttgagcgatacatg

SEQ ID NO: 133450 - DNA, 443 bp, Glycine max
attatgtcaaggactaaattaactcgtcaatatatggactaaaaaaaatatttttaacatttaaggattaaaaaaaatacatcctacaaattcaaggattaaaacagtaattaagtctatcttataaaactggaagtgaattgtcaaggtggataacatatgacttatatcaatatgttgcaataaaaaatattaacaagtgattatctctttctaggttagatcggctaacattttttcttatttattttatattttatatttataatttatattgaatacattaactactttatccattgattgtgaaatattataattacttgattataaaacattgttagtttttttctcttcagataaaagaattagtagattaatataaaaactaataaataatattttattggctttttttttttataattttttgtatgcccaat

SEQ ID NO: 133451 - DNA, 414 bp, Glycine max
  unsure (1)..(414): unsure at all n locations
tgcggcatgcaagcttcagcgaagaagcatatccagcagattgtggtgaaatgtccgaaagcattaaacctgcacgcaaatataaaaggttgcggaaagctgaagatactgaaagaaatatgaatcagaaaaacaataaactttntgcttcaacagcaaactttctcaaaccatcttctgcctccaatcctgcacaatataagcatggccaaggtgattttagtttgtttagtgcatctttcgtttctttctttattaaaaatattctggatcatatctcgtttctttgaagtcaaagtggaaggatatttagcaaaattctattctataaggatgtattagagaaaacttaaggctatgctgtttcatttctactttttaggtaaaaggaaatcaacacacaatgtgagagac

SEQ ID NO: 133452 - DNA, 436 bp, Glycine max
  unsure (1)..(436): unsure at all n locations
atgtttccaacacaaagntttatgttttttaattgtatncagatcactttcaagcaagttattggctgaataatattatacaaatgatcttttatattctcaaagatcaacttattcctgcacatacagaggttatccagtataaccacaaaaataatataccgatctgttccatcaacaacaatatcaaaatttaaatgagaaatcaaccaataattaacattatgattataaaactaactctacaaatccatcacaattaaatttgtagtgactgctgaaggaatgcgaaatattttttttttgaagaaaagaatangaaaagtgagtggcacgaagaaattatatattcttatttttaataaaaaatacacaattctactctacaaaataaaaaaattaagataaaataattgggcacataatatgagcatat

SEQ ID NO: 133453 - DNA, 296 bp, Glycine max
acagggaaaacgtacaggggggacgacgccaagcaaaccggtcgagtgaataactaatttctcccttatagtaaagtgaccagatgctcctgtctggaatgaaactgtccgtatttgttgcatactacctgagccagatagtaactagcactctgattctcgactatccctgttggtggctaatccaatagaatgtgaagatgactgcaaggtatcatgctgaataaagggatagaaaagtttgccctatttataaacttcataaatcaggctgtcaggattactgtgatattttt

SEQ ID NO: 133454 - DNA, 442 bp, Glycine max
  unsure (1)..(442): unsure at all n locations
tctgatggcagnggacctagatgcatggaagaatttctccaagaacaccctcttaaggtcatcccagctgacaacggacctgtgagcaaggtagtatagccaatcttttgtcactccctccagagaatgaggaaaagcctttaaaaagatatgatcttcttggacatcacggggcttcatggtggaacaaaaaatatggaactccttaagatgcttatgaggatcttcacctgcatgaccatgaaactttggcagcaaatgtattagtccagtcttgagaacatatgacacaccctcatcacgatattgaatgcacaaactctcataagtgaaatcatgtgtagccatctccctaagagtcctcttacgaggtggatgttgagccatgttctcagtatgacaattattagtggaatggtcancagcagaatattcggaatca

SEQ ID NO: 133455 - DNA, 394 bp, Glycine max
  unsure (1)..(394): unsure at all n locations
cttgcctttagcgacttgcacctcatctttaacctcattgtctctcacagtctttagatttgggagccaatccaatccttgtgttcggactctcagccacttatgatagccgccgatgatcccattactgcttcccctaagctatctgtcctttcttcacgctgcatcccacgccttgcgaactccttggagtactctcgcgttgtggtcactaaaaccccgtgcgatgaaaggcgtgatgcttttgtctaatggcgctcctctcatggggtagccaagttgtcttatggcgagaacgggattataattaatacaaccacttgttcccatcaagggaacattnggacatccttcgcatgaagatagaatcctgattcttccttccttctagcga

SEQ ID NO: 133456 - DNA, 459 bp, Glycine max
agcttcaagttataatctatcaactactattgtgtcttcttacaaccttaaatatgcaagaaaaaagtttcccttgtctcaaaatatgggtgagtagtagtgactcactttgtacaccttttgggtttctcttcgtttatggaatctatggagagggagtgaaccttagacagctcatggaatccatgtggagattcacatgtgactgtactggaaaggccttctttctttattttctttaacaaaataatattaaaatctagctacaaatcaaatacacctaatattgttgcgtttcttaaatatatattatgcattggaaacagaaatattacaaggagaaatattccttagtaatcccagagcctagctccactaaagaatgcacagaagttctacgcacattattcaataacataacatagtcgcaaaatgtccatcacatactcccatgtctac

SEQ ID NO: 133457 - DNA, 398 bp, Glycine max
  unsure (1)..(398): unsure at all n locations
atgcctcaatcatcgccaaatatgcatgtgaattaggacacatcaacaagaatcaagccaaggatatggtgcaagcaatcaatggggcaaaacacaccaaangaatacctcgctggatggctcaaanncncacaaagggaaactcatcactttcaaattgagctttcaaaactatcatgacatgtagagaagaatcaaggatttcaagtcacaaaatgtcaagaacttgtattttcaaaacaattacccatttcttgaacatatcctataattcaaagaaaaacatgcaaaatcgtacgtgcacacaaaattgacccaaaatattaaactaaaaatccgacgaaactaacaacattaacaaattaacacaacttacatattatcataaccaacaaaac

SEQ ID NO: 133458 - DNA, 347 bp, Glycine max
  unsure (1)..(347): unsure at all n locations
agcttcanaattgttgtatgatggcttattatctcggtgcattttatacgcacagagacccaagaataagactagcaaggatggtagcaagaagggtgccatatgtggttgaatttttgtattattatcattattagtatcttttgattattatgcacaatattgggtgtttttacatttttttttagtttatgttgtggttgaattactcttttttatgtccatcaattgtttaaacaacatgcgcctagtaacaacgattgttacttatttgatttataaaacaaacatccacttcaacacctaaagaaacactaataatacaaagttttttataaaaacacaac

SEQ ID NO: 133459 - DNA, 337 bp, Glycine max
  unsure (1)..(337): unsure at all n locations
tctctttcttactcgnannngtntttgttatttatttaatacggataccatattaaaaaaagggcacaatgggtaccccaacccatatacaaatcagggaaaaaaaaagatagaatagcagaccaaggttacaacatattaaaatgcaagcacatcaatataaaataaccaaggctaaagctgaaacaaaattaaaatatgcatttatacattaactctgctattggccaaaaattatttttcatcacactcaaatcactcttattgtggatgttttatttatattggattttcttaattttctggccaactcttttgcagaaaataacaatttaat

SEQ ID NO: 133460 - DNA, 412 bp, Glycine max
  unsure (1)..(412): unsure at all n locations
agcttatgaactcgttatggtcctttagttagagtagactcgacaataggcttaagacttgtgaccatcttgtacatttagctgagaacagtagccacctggtgtatcatcctcaacatcatatcatgattctcttttcccatttgttgcttaatcatagccacctcttggttggtaattcttgcaggtgccacagtagaaaggaagggggttggtggagaggaatgactcaatcttcctgagtagcttgtagaatggccttgccttctttataagctttatgaggaatctggacagagacgcgagtctatcgttcagcttctgaacttcttagacattaatagggttgtgcatttcaagtatcgncgcgcacttgtcanggttgacttctattccccaatggataatcatg

SEQ ID NO: 133461 - DNA, 381 bp, Glycine max
  unsure (1)..(381): unsure at all n locations
ntanagtgaatggtggtcatatcatatcaatctcttcttaacattaatcatcagaagaccggttgatgttntgtttaatangtttaattgatataatgctcctaattaattatgcattgcgatgtttggttactctaattcttattgtacttggtagtgaatctcaatgttctctctttcttggtaatgcatcactgttctattgcttacaaaatctctaattttttggcagcaacaatgtcaaaaattattaaagagatgttacccccggatgtacgtgttgcaagagatgcccaagatctattgattgagtgttgtgaggtcagaattatatttccattatatgtgatttgctggactaattcttttatttgagctata

SEQ ID NO: 133462 - DNA, 357 bp, Glycine max
  unsure (1)..(357): unsure at all n locations
agcttaactaatcagatgggacaattggctacacaattagatcaacaatagtcccagaattctgactagctgccttctcaagctgtgcaaaatcccanaaatgtcagtgccatttcattgaggtcgggaaagcaatgtctatgacctcaatccttaacacctttctcatctgcaattgaacctgccaaacttcactctactccagacaaaggtgatgacaaaaatttacctaacaatttctgtgcacgtgaatcttgcactggtaattctgatttgcagaagcagcacatccctcctcttccattctctccaagagcagtttccaacaaagaaatggaagaggcagagaaagagatc

SEQ ID NO: 133463 - DNA, 410 bp, Glycine max
  unsure (1)..(410): unsure at all n locations
nttacgaattggtcttcgctggcgaaatgatcgaagtgtttctaaaaagagcaaatctgatcatcacgctttgataaatgcaaaaaaaactggggcaaatgaagatggtgatattgatgtataaacccatgctgtgactgccatttctatacagccaagtttcccaccaacccaacaatgtcattactcatccaataacaaaccttcttcttacccaccacccagttatccacatatgccatccctatatcaaccgcaaagcctgtctaccgcacttccaatgacgaacaccaccttttcacataccatatcaccaaccaagatatgaattctgcagtgaaaaagcctgtataattcaacccaattcctgtgtcctatgctgacttgctcccatgtctacttgataattc

SEQ ID NO: 133464 - DNA, 475 bp, Glycine max
  unsure (1)..(475): unsure at all n locations
tacccatcacatgtggtactacgtgtcggtcgggcgatggtgcataacaattctccacatccacaaatcacatataaacccaccatcccctgttgcccactttcaactgagctcacgtactcccacgtagcccttatcctcgtttctttcaacactgggtccgcatcaatcctcccaagcttccacaacatccaagtaattccacatccaatcatcatgaactaacaaaaccaagcaaaataggcaaaggcagaaaactctgcccacaacacaaaccaatatcacagcttttcacatacaaataccccagtaacattctcttcgttccaattcgttaacccgtggatcgactcgaagaatttactggaagtctctagcacataaatctacattatgaaccgggggatctgctagaaacgtccagagcccaatctgtactactctnttcacaaccagcanatacataacattttct

SEQ ID NO: 133465 - DNA, 427 bp, Glycine max
  unsure (1)..(427): unsure at all n locations
tcagactgatggccattctgatcggaccattcagtcgttggaggacactttgatggcgtgtgtcttatagcaaaatatgagttgggagagttttctgccattgatagagttcacttataaaaatagttttcactctaccattggcatggctccctatgaagctctgtatggtagaaagtgtatgacacctctatgttggctatagcccggagaagacctcaccttatgatctgaagtggtacaacaaaccaccgagaaggtaaagttgatccaagaaaggatgaggactgcttagagtatgcagaaaggttatcaggataagatgaggaaagaactggaattcgaggttagtgatcctgtattcttgagagtcactctgtggactggnggtggtcgagcattgatatcccgaatactcacacctcgc

SEQ ID NO: 133466 - DNA, 204 bp, Glycine max
  unsure (1)..(204): unsure at all n locations
tgatgtcagaagaaatcacatgtttgtcatcatctattanggggagaatgcgaatgcatgtatacatgatnttgatgatgccaaagaagactcaaacaaagttgcttcaaaggataagcatggcttcacgatcaatacaagtattattcaacaaccaaagccttgcttaaggattaactcagaatcaagccttgccttaaaaca

SEQ ID NO: 133467 - DNA, 380 bp, Glycine max
  unsure (1)..(380): unsure at all n locations
cttattgttggggagtattctacagaacactcttaatgtaaacctctaactatctatttaatgtntatttttggtgttctttgcttctatctgcacttattttacatactaatggcttgatcacccatntgtatgtttagttaggcttttgagtgttggaaaatgatttaaatccttagaacttgatagagcaagctaagggcctgtgtatctaggaatataatgcagtaatctagtatgttgtgtacaatgtgcatattgcaactcttttagaacgagtttgttgaggaatcaagaacaaaagctaagagagttatgctcattcttgtgaggaatcatggtctgagtatatactcggtgcacgagcgctagaataacat

SEQ ID NO: 133468 - DNA, 104 bp, Glycine max
ctatccttttacacggtatgaaattaccatttttataaagtgcagctagaattaaagcttaaataacatagtgcttgtgtcttgctgtgaattctagaaatctg

SEQ ID NO: 133469 - DNA, 419 bp, Glycine max
ttctccaaattaaaatagggcgcactaagttattgggtatatctatttgcattgaataattgttctttggtctttatccaattcttgagttactttctttatgaccaaagaaatttggtgcatcgagtctacattatcgctggataaaacttaaaaaagttgtggggactaactattgcagtaccattactgttattggcactacccatgtgggcttcaatctttttccccaaatatattcctccaatggaaacacgatctcaccaatcaagtctataattgaaattgtaaacattacacacatgacgagtgataaaaaataaagttacaaaatacgatcttgttgttagtgataacaaaacatattcgattccacctgatgatgaaaaataaacaccaaaacaatcttttacatggat

SEQ ID NO: 133470 - DNA, 439 bp, Glycine max
gatggaatactctacttgtggttatgaacaaaagctcataacggaatcaaaaaatgcgaaaaaggatgaccctagggctgcaaattcgtcaatcccgtgggtatggcttttgaaaggggggaaaagaagtttttgaatgtaaaaacgccccccctttcgtcatttttataatttggtgcaggggtggctcgcctaatcgagctaacctgcactctttatcttcatctacaacaacaacaacagcccctgaaacaacatacagttgaggctcctccgcatccttcccttgaataacttgtgaggcatatgactatgactaacatgcagtttcaacaagagacctgagccttcattcatagcttaactaatcagatgggataattggctacacagttaaatcaacaacagctctagaattctgacagattacctttctaat

SEQ ID NO: 133471 - DNA, 202 bp, Glycine max
actgaaataacttactaattattttattttagagattgatgcaaaagaaaactataaaacattaataatatactcataccttatataatataatggaaaccaatgcaaacattgtacaacaactgaggtgaaggttaaaaagtaaaaagccgggatatggaaaaaactaaatttaagtcaaaaaaaggaaaaaataaaccat

SEQ ID NO: 133472 - DNA, 389 bp, Glycine max
actaagcttgccaacagtctagaatttagattactgtatttgaacctgtctgtattttcctaataaatgtaatgtgttctgctcagactgtatgctgagttgagtctacatagccacaacgtggtgaagttttatttatattatttccaactgaattgcttgatagtttgttttccaactatgtcgtatctttgctgatcatgctttgtgcttgatacaaaattgtcccatctcatggtgcccttttaattttcacattctgataagatttccttcagcgtcatggatacatgttatgttacaccacgagttgatattttacatttattggtaacttgttgaagttaatggtgatctactggcaacagcgaataaatttgatattggtg

SEQ ID NO: 133473 - DNA, 321 bp, Glycine max
  unsure (1)..(321): unsure at all n locations
tgtaggattatggngtacccatcacatgtgggactatgtgtcggacgggcgaaggggcacaacaagtttccacattcataaagcgcgcataaacccaccatcccctgttgcccacctccaactgagctcacgtactcccacgtagcccatatcctcgtttctctcaacaccgggtgcccatcaatactcccaagcttccccaacatcaaagtgatacaacattcacacagcacaagctatcacagtcaagcaaaacagggctaaggcagaatactctgccctaaacaccaaccataatcacagctgttctcacttaaagac

SEQ ID NO: 133474 - DNA, 449 bp, Glycine max
  unsure (1)..(449): unsure at all n locations
ngtaggattatatggtacccgtcatatgtggttctatgtggcgatcgggcgatggtgcaagtcgactctccacatccacaaatcacacataaatccaccatccccagttgcccaccttcaactaagctcacgtacttccacgtagcccttatcctcgttcctctcaactccgggtccccatcaatccctccaagcttccacaacatccaagcaattcaacatctaacatcatgaactatcaaaaaccaagaaaacagggcagatgcagataactctgcccaaaacacaaccaataccacaactgtccttactcaaataccccagtaacattctcttcggtccaattcgttcaccgttggatcgactcataaatattactggaggtgcctagtgcatcaagtatacatttgaccagtgggatctgctagaaaatgtactgaacccaatat

SEQ ID NO: 133475 - DNA, 289 bp, Glycine max
tatcaggaaggacattgctcaatttagaatattgttggggcttatgaaaagatctaaacaaaacgggagtaaactaatctaggatatttctcttggacgattgatatggataaataggcgtttatatactgaagatttacactcttataccgttggatatgtacgaggacatttcctatatctttttccaattgtatctacatttttactactatctcaactgaatggatccctcccatatgatgtggatattgtctcttccaaaatctcattacatccctaagttcta

SEQ ID NO: 133476 - DNA, 419 bp, Glycine max
  unsure (1)..(419): unsure at all n locations
ctcagcttnttcacattccaaatcgatattgaaggggttttattgttatagaaaaaagagagaaacggagtgatttcagaattatgacacaatggaccaatcacaactcttacatgacccaaatttccctctcttcaaaacccctcgcaaaaccccttcttcacccgccgtaaccaccaccgccactaacaaacccccttcatccgccgcaaaccccacctccaacggcgagcgcatcgaagaccaccccgacgataccgccaccgacaccgatgccgacgccgagacgttcggcgaccttgggctcgcggaatgggcggtgaagacgtgccgggagctcgggatgctgatgccgcggtgcgtgcatcggctgttgcatccgcgcgtgctggatggnccgcacgtgcttggcgtcgatg

SEQ ID NO: 133477 - DNA, 452 bp, Glycine max
  unsure (1)..(452): unsure at all n locations
tcctcagagccacctgcggcgtgcaagctcggagctatgtcttgaaatgagggctttcgatgagtgagggctctcaagtttcatacaatgacgacgagtagctcagcagtccagcacgacaacgatgacgacgaccactacgatgcgagtagcttatcgagagtcattttcgggggttagtagcttgaacaaggcggagtgagtgagtatagagtctcgagagtcattctcgggagttattttacgatgccagatatgatcttcgtaaactcgtggactcggagtagactcgtgagtctacccaaactcatcaatcggacgagtctactctagtttcgattctacttccgatgtacatcgtcaacccttagtagaattgtaaatcgtacaatttacgattaaatcacgagttaataacaatgatntttagactcttccaaacttaacttttg

SEQ ID NO: 133478 - DNA, 326 bp, Glycine max
  unsure (1)..(326): unsure at all n locations
tagactatggcatctagttacactaaccatttcatggaacaaaatgactaaagctaaacgtccttcatttcttcacatggacgttacattctctatataccacatctattattcacatgatacaatttcattgaggtgatgtaagactattactgtatgcacaattttcatcacaaatatattacctgtttgaacacatccatctgaagtttgattttaaaactgcaactgactcgatacanaaactgaaatngtatcttaagttgagtcgaaaataatcctctaaaatgtgtcgacattaagcaataaagaaattaaagaataaa

SEQ ID NO: 133479 - DNA, 397 bp, Glycine max
  unsure (1)..(397): unsure at all n locations
acaacatgtgcctctcttctataaaccatgtcaaaactactctgtcctagaaatgcttcaccatgtttctcagattcagcggtgaggaactctgaccttggagaccctgcctcatgagtttggattcccacaagagaagcactgctaaatctcttgagtgagtccttatatctattgaagaccttcacctcatcaactcgatgatctgtttcagaagagaattccttgtcatgatctggcgaagactctaacttatgcccacattttctcaagattctcgggcataagaacttcagttcttctctaaagtgcaacctgcaacattngtgatgttgctccatgtggagcttgaggcctaatggagtcattgcttcttgaagataatgacatggaatga

SEQ ID NO: 133480 - DNA, 388 bp, Glycine max
tctatgatgaattcccttaattcctgtcacacaaaaagtaatgggggcccattttgtgagagataatgacaggaattatttaaatcttctcttgaaaatgaaaaaaatacaccgtgcaatatgatgggttagttgttagaaaatcaatttcaggtgttagacacatctcaatctaatcattctctcataacacagtgaacaacattgtatgtcaaaacacagtgacacaaacattcgaagaatcgcggcagagacatacctcaatcatagtgactgagagtgaatggaaagacacacaacttcaatggcagtgataccttcagcagagcttcaatggaagtggttgcaagaagaaagaggacaaatgagaaagggcaatgtgtttgat

SEQ ID NO: 133481 - DNA, 264 bp, Glycine max
acaatcatcccatgccatctaactcccagcgggatcaatagactcgtggcgtcactctatgaccttaaatcaagaaaagttcacttggtcatataccacaatgcaacgatccattgccatccttcaatggtgcatgcgattggtcccaatgccttatatttctcttgctgtgcagagtaattgatgttttaaacaaaaagggggggggggggcttgcccgctgtcaactcctctgagaacgacgtgtcataactgaatggatct

SEQ ID NO: 133482 - DNA, 393 bp, Glycine max
tcataacaccatgaatgatggctctttcttttctcgtgattgtaccaacagtaacttaaacaaactcctgcatgatatatgagagtcataaaattcagcaggaggcagccaaagaagcgataaacaggtatacatatataagacaattacttcaccaaggttgtttatctcaaaaatggtctttgcctctgacttcaaaatgaatgtttcctttgatgataactgaggagaactcgaatgctgtgaactccactgagaacgacgtgtcaaaactgaatggatctcaatgcccaattctgaaagcctatacatactatatcaataacagactgaaggaaagaataacaaacatatattaataacaacatcacgaaaatacttcagattaattct

SEQ ID NO: 133483 - DNA, 510 bp, Glycine max
  unsure (1)..(510): unsure at all n locations
agcttagtatgcatattagattaccagggatgantatacatacatccaaggatctaaagcatgatgagaagcaagagacaacccactttcaaagctagataaataacatatcccaatttaagataagaaggaattatgaagcatccacataaatgatcaaacgaaaaggcataaagatttcattctgaagcatttcagaaaggcaaaaaccatacataagaatattaaactaggaacaggataagaactgtaccataacatggaatgaggcaaccaagctaagtagttctttctagttggcccaaactaatctttatatcataaaacaatgaaagcaaggaagttcataacacacattgaagtctaatcatcgtgcaagaatccaacacactggatgaccagctggtcaagtcttttctaataacattcaaaataaaaaagtcaagtaggcagctttgagacantggtgcacaactaggataatacatgcactaaaacattatatacata

SEQ ID NO: 133484 - DNA, 492 bp, Glycine max
  unsure (1)..(492): unsure at all n locations
ttacgtgacacttagatactaagcttaatatcttcttccaactatgttgttctaattatgtgctttatatatactggacaaaattaaaatcccaacagaatgtttctataatggacattntgctgtctttgttggagtttgctgcttcatataactcatccaccaatcttagaactcgtatgcaccaaattcctgatgaaaggtaagacaatactcagtatctaattgtcttaattttgttctgttggaatttctttacaattggaatgtaggactgtaaggttcactaaactattcttggacatgccaccaataaatcttcttcgccaggaattagctggtactggcatatatctggacatcttacaaaaagcaacttatggttttgaaacaaaanaagaaaaaagtccagagtctgtttatttcaagatgtggactctacagaagttaatggctcgagtattactcaagattctgattcagaagtgaaat

SEQ ID NO: 133485 - DNA, 413 bp, Glycine max
tggcaatcccatattaaagtcattccctttatgtaacctacttttgcgacacaatactcagcacttggaatgctatataggtttataggtgctactaatcttgtggatagattatatactatctttgctatgacaggttaaagagagaataactactctcattggtattaatatagctttaattatactaagttgcaacccggattgatagattgttttattcagcaagtacttgaatcttttatagatgattccattaggcctctttcttgaaggtataagcatttgagtcataaagatgttttttgaccaataggtcattacacattagattttgccttatggttgaaatagatatgatggctgactcatataggaacatatgctatgcaagataatattgatcccataca

SEQ ID NO: 133486 - DNA, 438 bp, Glycine max
ctaagcttctatccatgcatttcttggtggtgaagactcctctttcttgtcttattccctagtggatggtgcactccctatcctcttctcctttgccttccgctgcatctccatggtgaaaaatcaccattgaaggacctcattgaagctcaaagatccagcctccatagaagctccacaagcaagcttccatcaagtggtaatcagagcacaagagcttcaagtatgtgctccttatacctccattaattttgtttctttaccttctcttccatggttgagtcttcatttttctccatgtatctcctcacatgtcttgttctatatgtcgttaacatgattctttagagtgtccaccgactaaactcgctatagaagttagaatcgatcttctatggttcaaatttcttgttcttgttcttaaccatgaattgtgtt

SEQ ID NO: 133487 - DNA, 370 bp, Glycine max
  unsure (1)..(370): unsure at all n locations
catgagtattgcgtatgacattggtgatgaatctatgaaaaagaatttggtgaatgcacttgtaaataccttgactgggtcagggaaacggaaaagagccatcaaagtaagttgttagtatagtcgtattattctaaaaaaatgttttttgtgggataaggcttgatggattattattatttgctctgtataattttgttgattaaaattacattcctgaagttatgttgtgcagctagttgaagacactgaagtatttacggatggagctctggttgaaagtgctagtggagggaaactgaacacttacaatgagttgtgtaacttatcaaatgagatgggacaaccggacttaatctatanagtcatg

SEQ ID NO: 133488 - DNA, 468 bp, Glycine max
  unsure (1)..(468): unsure at all n locations
tactcaagcttgcttacacttttcctcttacattgactgcaagagctttatcattaccagataactgggagtaactgtgacgattctatcatggcattataaaatagatagttagaagtaatgccaagaagatcatatatatgacaaaaggggaagagtcaacatcacacaccccaacagtatgaaaataaatagaggatcaagctcaagagctaattcttcacccccaaccatgccaaataaactgaactcctttacgtgaaaaggtatgctgggttgcagttntcaataatatcaaatataattgcatacttataatgcacacacacaaacaccaccttacacgtctcaatgcttgaataactttgcagccagtgtgaatattacaacttataaacttncaatgcatttatctttgagtaccatatactacagttgcagaaaagactgaacttgatacatcatgct

SEQ ID NO: 133489 - DNA, 131 bp, Glycine max
gcttctacactaagaagcactctatattggtgaatcatcatatagagaacaaccaccacaattgaggaccgcttgtgtattgtgtaatttacaatatacttaccttcatttctttcaagttgtgtaacaaa

SEQ ID NO: 133490 - DNA, 460 bp, Glycine max
  unsure (1)..(460): unsure at all n locations
tctggaaggagatcaacttgatgttctatgcttcttgattgtggttgtccatgangaatctccttggaaaagacatctttaaattcctgcaataagggttgaacactaggataaacataaatagtgaattggttagaattatcactctctctcttgtgtatcactccatctctcaagtgtatcactcttcctttttctattcctctgtggtgcctcactattgtctttctcttgttctctcttttcgctctttctgatttgatcatcacacacttctctgagggatagaggtttatgaataattctctggtcatggtgctggaaagaaatcttgttggtgaagccatcatgcactactttggtgtcctcttcaatgttggccctcactagtgccatctacatctccttgtcctcaacaatcaaactttcctgtgataacctttggagtttgtgtcgcatg

SEQ ID NO: 133491 - DNA, 451 bp, Glycine max
  unsure (1)..(451): unsure at all n locations
gtcacctgcggcatgcaagcttgttaaaacctctgcctaaaagggataatataaatgattntttctcttgacaggagaccatgactaaatttaagaaataaaatatgggacagggtctaaagagaatgccaaaattntngggctcattgcaaacctgataaggatttgttcgaaagaaagagttggctgatatttggaatgtaagccctcttaaggtctctgtactgctagatttcccatacaaagtgtattcttcctccccaacagatgtgttgccaacagaagtattcacattattaatgacacttacctatcattcatgcagagaagaaacttcaatggtattaaaatcaatatgtgcatacagcttggaaagtgaggaagagcacattatagaaaaaaagtaataaaaacttaataccaccactcangaatacggaacttataacta

SEQ ID NO: 133492 - DNA, 409 bp, Glycine max
aatgataagaaatattgatctttactgttaaaaagcctaaaatactggctttaaaaaaatacataataatttcatattcaaatttggcacaataaagttaattaagtacaagttatatatatataaaaaaaaaacatacaatgttgcatacaactttcatatttcataataaagacgcaaaaaaaagtaaattaaaagaagacaacttttatcaaagatcttttacattttttttacagcaatactataaaaaaaaaactacttattttactcttgttttttacaaaaaaataaacttcttatttgtttaagagaattaatatattgaaagtagaaatcaacttaattcaagattaattgtgtgagaatattttgtatctcatcattattttgtaatgataataataag

SEQ ID NO: 133493 - DNA, 140 bp, Glycine max
tggaaaaaatgtgcctatgctttaagcattaagctgtattactattcttcacaattgaaacaagttattctaaagcaatatgcaatctgtcagtgctttggtgggtaatacaaaaaatagaaattagaaatgagtcatgg

SEQ ID NO: 133494 - DNA, 365 bp, Glycine max
  unsure (1)..(365): unsure at all n locations
ctaagcttgacttacgacaattcaggggcaggctctcttttattcaactcataagtgaggaaggggataagcctgtgattcgattcgccaaagcttcaaactgcgtaaggtaatcgcgcactgagccctgttgcattaattngaataactggcctgtgggatcctcgtaaggagaatgagcaaacctagcttcaatggcttgcaggaatcctgtccatgtgggtagctgatgatttcttgccatccactggaaccaggcaagcgcgggtccgtccatataaaatgacgcgatcgttatgcgttctaaatcatggacggaatggtattcaaagaactgtgaaatcttgaatacccagcctgatgga

SEQ ID NO: 133495 - DNA, 483 bp, Glycine max
  unsure (1)..(483): unsure at all n locations
agncttgtacatttatattatgacatttatcatgannatgtctctatgttttacatcaacaatacccttttatttcanaagattctaatgaaatgtgtgatgcttgccacttagcaaaacaaaagaaattaccttattctcttagtacaaacaaaagttctaaaattgcacaaaggtattttcaggttgaaggaatagactactttgagactttctctctagtagttaagatgaccacagtttgtactggtctcgcttttgctcaatcaatcagtggcaccttcaacaattagacatcaataacgattttcttcatggtgatctttcagaatatgtatacatggacatnccacctggctttgcttgttattctttccaattagagtacanactatgcaagtcgctctatggtctgaagtangcaagcanaanatggtatgagaagatctctcaattatattggcttggtgtacaacatgtcat

SEQ ID NO: 133496 - DNA, 397 bp, Glycine max
  unsure (1)..(397): unsure at all n locations
agatgaatgaagggagaggtatangtgatcacgataatttgtgctgtaaaagaactctaaaatctgaagtttaattgtcaaatgatcaaagttggaaaactacacacatatagtctttatttatagcctaagtgtcacacaaaatgggaggaaaatttgaatttttattcaaacttcacgtgatattgaaattgaatttgtggagccgaattgtggagccaaaatttcactatttatgattagtgaatgtcagatatgattcaggccactaattcaagatcaagttcaagattctccacttagtgtgcttaggtattatgagacatgtaaaacatgaatgacatgcacatagtgtgactatatgatgtggcattgggtgtagcaagaaatgctcact

SEQ ID NO: 133497 - DNA, 398 bp, Glycine max
  unsure (1)..(398): unsure at all n locations
agctttggaaatgattttatacaaaattatttgataaagcgactaacagtcgacaagggtgttgccctcgctcctacgtatcctcgggtgcgatgaggaaatcagacctacgtagttctttaagtttgaaattttgttggttaaattgtttttatcttttttgaaagattgattttaaccgagcaaaagtcgtttaaggtgttggacctcaaaatgatcttttgattnttgaaaagaggagagagtcgttaaggcattggaccttgaaatgacatcttggttnttgaaaggagaganattgtaaggcattggaccttgaaacgacctctttgattttcttgatgaaatgaagaacgttatgagttggtcttatttggttttctttgttattaaccttc

SEQ ID NO: 133498 - DNA, 349 bp, Glycine max
gtgcgggttcgggagacttatgtatatcgttctttatatgcgaagatgatattccgggtactttggatttggtacgaccatgctctcctgatttccagctgggaaattggcgagtggatgaacgccccggcatttacgcaacatgcataatgttaacctttacggttttaaaagctctataattgggcctacgctttacagttttcattttgttaaagctttgtgtcttttgtgtttgaatatataatacaaggatctttcttcatctgttcctggtctctacccattctcattcatctgcatgtttacttctttttctaaaacggcatattcgatgacgagtcccccg

SEQ ID NO: 133499 - DNA, 449 bp, Glycine max
  unsure (1)..(449): unsure at all n locations
agcttaaatctcagatttttctctaaagttgtctttagctttcattaatatttctattttcagatatggggtggaacatcccatttttcataaaataaatttaaaaatatctttatttaaaaatcaaaagagttttagaagaatgatgaggtttttataattaaataaagaagaaaaaatacatttattaattaaaataatggtttgaaagaaaacaaaaaatatatattntatttatgtatttattcgacaggaaataaaatagagttttttttataaaataaataaatagagtaccctaactatatacactcaaacgtaactcagtaactcgttaaccggtggattgtcgtgaaatttaaacataacggttgaaacttatttcctcatatagccactattgagattnntccgataatgtctatagtgcaagaaatatctcatgcact

SEQ ID NO: 133500 - DNA, 319 bp, Glycine max
tcttgcctaacctcattccggctcatacccatccactaacataactcgggccaccatctatggtgcaccaataaatgtgggtgcacttgatgagcccccacataagcattgttcacaattttcaaggcttggaaaaatgtttccgatgaatctttcgtagcttccacatatggtgttaaggatggacaactcactattatatcttcttcactcgacactataaacagctgttttttaacgacaaaacttcaattttggtgcaacgttgtaaagaccaccccaacagaatggattcaagaccaacctatcatgcaactgt

SEQ ID NO: 133501 - DNA, 452 bp, Glycine max
agcttgtctatcgtctttatatcaatgtctcaacattggcattgactatggaaagttattatcttgcaactctttcaaacaaagcagagaattttcctttgcgagcaagcttgtgtaatgtcttaagattaacttcgtcccaagactaatcaacagcctctagaataaaaacatctgattcttcaacaaattctctcctttccaaaggtttggtgacatggaggctgtcatgaacaaccaaacccttataaacatcctttggtgtagccttataagctactcttgcatttgctagccttcttcttttgcttagatttcaaccttttaagcatgatctcctttagacgcactaacacttgcatctttaaaatattacaacattagaggcagcttaacgatcagattctcttctgacagatttgagcaacaaaagcacatcttgacttatatgt

SEQ ID NO: 133502 - DNA, 397 bp, Glycine max
  unsure (1)..(397): unsure at all n locations
tagacatgttccttntagcacatttattatttgctccctctgatattccaggagaaaaaataaataatagaaaataatcttcatcataaaaaaagaaagcaaaataaaaaaaacagaaacaatgataaaatcattgattctgatttgcttccaactccatagcctgcacattggaagattcatgaggatcacttatattcttcctatgtactgtgaccaattcatcataccgagttacttgggattgagatcttggaataatatgttttgcagctttcgcgacattagttattaattgctcaatcggggtgaaagtctggtgaagtgaagactccactgttgacaccgagcttgactcattaattcctccttctcttctttttattcacagtttttt

SEQ ID NO: 133503 - DNA, 471 bp, Glycine max
  unsure (1)..(471): unsure at all n locations
actaagcttctcaggaagctacctagtctataaatagaagcatgtgtaacacttgttgtaactntgatgaatgagagtcttaagagacacaactcanaggtcaacttctctccctttttcttccttcaatttcgtgctcccccctctctctttctttccctctttcttttcctccattgaagcatcctttccaagcttcttatccaaggctcatcttggtggtggagctccttcttccatggcttattccctagtggatggcgcctcctctctcctcttctcctttgtcttccgctacatctccatggtggaaaatcaccattaaaggacctcaatgatgctcaaagatccagcctccatagaagccacacaagcaaagcttcatcactaagatcctttaaattcccagtaattattactggtgtgtcttcaaagtaaatattggatgcctaatctaccctaagggggttc

SEQ ID NO: 133504 - DNA, 367 bp, Glycine max
  unsure (1)..(367): unsure at all n locations
cttcctggcctaatcccctaggggttggtgcttcccttctcttcttctcctttcccttccgctgcatctacatggtaaaaaatcaccattgaaggacctcattgaagctcatagatccagcctccatagaagctccacaagatagcttccatcaagtggtaatcagagcacaagagcttcaagtaggtgctccttaaacctccattaattgttttgctttaccttctcttccattgttttttcttcatttttctccatgtatctcctcacatgtcttgttctaaatgttgttaacatgattctttagagttcgcaccgattaaacttgttatagaaagtagatttgattntctatgggtcaaatttc

SEQ ID NO: 133505 - DNA, 436 bp, Glycine max
  unsure (1)..(436): unsure at all n locations
gctctcaaataccttgaacacattgagagaaaaagactaaggactaatttgtatatttatctgtaagacgattctagctttagtctctcagcaatcttcaaccacaaatctattctgatttgtttatggccagtagtggcttgttaggacaaagatcactgggtgttaatcaagcttagggtagagctagaagtggttgtaacacaataattgtaacttgtgagaagtcaattcaacttggtggtttgccaagaactagacgtaatctcaatggtagagatgaattagtataactccctgtgtcccgatatttcttgttctctctttggttnntaactaacccagggtctgaatggttnttaggtttttgaanacttattgtgctttacaaacctgtctttntcatcatttgagtgtgttctcataaaatcttata

SEQ ID NO: 133506 - DNA, 300 bp, Glycine max
agcttataatatatcgatacgctcgaaatttttcattggaaactctcgggaaattcaaatagtcataacttttcacacggatgtccgattcgggcgcataatatgtcgagaggctcgaaattgaacaacgcaagctcttgagaaattaaaactggattaactttcacaccggaagtctcgtgaaagtcatatggtcataactctgcacactgatgaacagattaagcttataatatatcgatacgctcgaaactaaacatcggaaactctctataaatccaaatggtcataacgtttcac

SEQ ID NO: 133507 - DNA, 120 bp, Glycine max
tcccttttttggtttgaacctcatccaaaccttatggaaaaacattgtatcaacctaaccctaaaggattttggaaccttggaatttgtttaggaataaatgtgtgtgtggggggggggg

SEQ ID NO: 133508 - DNA, 452 bp, Glycine max
  unsure (1)..(452): unsure at all n locations
gctcattgactccagaatgctgcanagaatgacatatatctgtatggtgatctgcagaagaacatagaccacaaactcttgcaacatgtgcagatttctgattcttggcaagctgagttactaggttgaccaaggcatcaagttttccctcaagctttttattttcagcagatgaagatggatccgtggccacctcatggactcctctaaggacaataacatcatttcttgcactgaattattgggagtgggaagccatcttctcaatcaaattcctagcctcaacaggattcatatcaccaagggctccaccactggcagcatcaatcatacttctctccatgtttctaagtcccttatagaaatattgcagaaggagttgctcaaaaatctggtggtgagggcagcttgcacataatttcttgaatcttntctagtactcatacaagctc

SEQ ID NO: 133509 - DNA, 317 bp, Glycine max
aacttatctgcatgggacacaatcgaagtgttatactatgccattatatactcttctgcactgaattcttgaatgtatgccaatgtggagcctcaagatagcaagagacctgttaacaaaatgcctcagagaaacattgtttcttggaacattctgattaatgcatactttcaatatgagacacactggaggcactagatctcttttttgatatgtggactagtggcattcatcctgataaggctacctttctgaatgtgttgagtgtttgtgcccatttgtgtgctctggcattgggacaaactgttcatgcctat

SEQ ID NO: 133510 - DNA, 410 bp, Glycine max
gcaaagatatcaaactccagctaagcatagatgctgcatgaaacatagaaaaggcatcaattgcaacgttgacaatgaaaacaacttcggtcatacaagggacttcatcaagctatcccactcatacataaaatcgaataagctttaaaactacaggctcagacagttgtaacggttagatttcagcttacaattggcaaacagatatataagctaacagatgtacctcacaaactaacatgtatgttaagcttgttgactattacaacaattatcttaatcatataccaatgcctttctgatcgtttctgattgatcgacatgtataatcttctacactctgtatatgaaaattatctatcgcttggctcaaatgaaggtcaaattcatataaagctagtgactagtat

SEQ ID NO: 133511 - DNA, 412 bp, Glycine max
  unsure (1)..(412): unsure at all n locations
ggatccttaatcaccgcggctgcagctatgatgtgtttgtangagtatttctatatattatgaaaangatgatggttaatgaaaaatggatttcccggattaaaggattcccggaatctacttctatttcggtctggtcaatgggaagtccttctgaggagttccatcctgggagatgtcttaaataaggagatcctattgctccctttctctntcttattgcggctaagggtttaagttgtctcatgaggaaagctttgaggagtggcatgtattctggttataaagttggaagacaacaggtggaggccacattactccaattcgcaaatgatatgcttttatttgcagatgaatctataaagaatattatgtgcgtgaaagctattatgagatgctntgagttggtgtc

SEQ ID NO: 133512 - DNA, 433 bp, Glycine max
  unsure (1)..(433): unsure at all n locations
nttagaacacttgntctttntctttgggttatgagtggttgaatattaagaattcagaggatatataacaagaaagtttaagataatgcaaatactttgtctttggcaactataagtttttcttttgggcttttggccttctctaattcctattgttgttggtgtacttgataaccaactaaccatgataaaccaaaatgataaactaaccttgcaggtcaaagcagaaaaagaaaataaaccttacgaattgaaaccatacaaaactatttttcatttataatgtctattntactatttagaatttttgtaattcatacatgntattaattttagctactaatgtcctattctctcccccttcaggcaagctcgtctaccagtttggctaattccaaggtacttgaccacttcgtcaacatgggaatttcta

SEQ ID NO: 133513 - DNA, 428 bp, Glycine max
  unsure (1)..(428): unsure at all n locations
cgatccttaatcaccgcggctgcgctgttagaaaatttgcttcttgcttttcttcaaatgcttttatttgtgaaatgatgttacctattgggttgggttttgtttttgcaagatgctttgtactacaatgttgtattgtcttcctcactttgattcctctatgttaaagttcgtttgtttaaaatttaaaataaattattttgttgttgattctgtaatatatgtttgtgtttttgaaatttagtcttgcgcggaaggaatcttagattgaagaatttcttcgagcctacctcagaaagaagtaaggacttctggtatatggtttagttntgttttagcccggtagtttgataagctatttttttctttttttgtgttgcagaaaggaaaaataatttcaagtaataatgggtgagacgtgtacaatt

SEQ ID NO: 133514 - DNA, 478 bp, Glycine max
  unsure (1)..(478): unsure at all n locations
ggacctatgaaactcaagcttaaaggtactagactntatagtttgaagacgttggcttatctattggcatacacaatttttaggaaaacgtataaaacttctcaacaaaaccagaaacattgaacgagtctaaatttaacgaagtctatggttttgctgttcgaatttttgtacaaaacgagcaattgctatatgatatcacaagaaggctctcattaatttaaaccgtctttaaataaagaataagaaagctacaaaagatcgtaataagaagaaattaaaatctacattttcacttaccatttccatcacaatcagaacaaacaatgctcctaatcgttatgctgagggtagatgtatcttctgtagcctgtattaaaatcaaaatcagagagggattcaaaatatatgcaactatgcattgtcgaacacaataatagaaaccagctacattttacgcatgtgcaagttacatgtg

SEQ ID NO: 133515 - DNA, 411 bp, Glycine max
  unsure (1)..(411): unsure at all n locations
agcttcttatccaaggctcatcttgtgtttattctccttcttccatggcttattccctagtggatggcgcctcctctcccctcttctcctttgtcttccgctgcatctccatggtggaaaaccaccattaaaggacctcattgaagctcaaagatccagcctccatagaagctccacaagcaagcttccatcaagtggtaatcagagcacaagagcttcaagtaggtgttccttaaacctccattaattgtttttctttaccttctcttccattgttggttcttcatttttctccatgtatctcctcacatgtcttgttctaaatgttgntaacatgattctttagaagttccaccgattaaacctgctatagaaagtaaaattgattttctatgggtcaaatttcctggt

SEQ ID NO: 133516 - DNA, 439 bp, Glycine max
tgagcttagctacacatacctctctaatagctaatctcatctccttgatatgagaagctagagcttagctacacaccccctataatagctaagctcacccccatgacaaaaaacattgtcataccctaatttcgtccggggacctttgcttgatgacatgcgacctttctttggtccttgtgaggtgcttggcatccatcattaggcaatttgtgaaattccaggacatgccggaaaaccaaaaaatattgatgcacaatccgtaagtttccgtgacacaccggaaatcaaatggaagcatcgttgcataattaagtgagattccgtaacattccgtatgtcaaaaaggggatgattatgtaatccgcaaggttccgtaacattactgaaagaaaacaagtatggttacgagaatcgtaagttccgtaacttacgaaaa

SEQ ID NO: 133517 - DNA, 435 bp, Glycine max
  unsure (1)..(435): unsure at all n locations
gggaagaagagaaagcacaactctgaactccactccctctatttngaatttgngcaaaatgaagggatgaaggctccaaaagaatttttttctcacaaagaccaataagctatgatgtaagcttaaattgacagggttttgtgacactngaataacctccttgacttccattttgaacatgtcaatctataccacaaatgggtagttttgctttttgctnaactaccatatatgaaatatatgatatttgccaaaaatgaatatttttgctattaccaaaatgaaataagattatttgaactgcctaggaatatgtagacataaagcgattcttacacagtgaacattctcacacgaagttaaattatacttatcatttgtctcgctattcaactatataataatgacattcttatctatgccgatgccaatttg

SEQ ID NO: 133518 - DNA, 415 bp, Glycine max
  unsure (1)..(415): unsure at all n locations
agctntacagcagattntagtaatgaccttctatcctagaattaaaataacttaatgccattaaccctaggaattaaaacaaactaaatgactgaatgtaactgaaattgttggcaaccaaaagtcacccccaacagccaacaagtcagccaccatttggtctcccaaaaggctgatgcctatgttgccaattgtgcccttattacaacttgaactaaagcccttttagttgattaacccaaaacatatttttggtcagccaactttacaaggattgggccattatttagacaaactaaacactctaaaattgaaataaagtggtgtcatttagtcctccatttgggccatgatacaactcacaacattggactgttctccttgaaacttgngcttgtattcaaatagtatggac

SEQ ID NO: 133519 - DNA, 426 bp, Glycine max
aggcatgcgaagtgggtggaattcctatagcatttcccttatgttatcaaacataaaaagggaaaaggtaatattgtagccgatgctctttctcggcgtcatgcattactttctatgcttgaaacaaaattgattggtcttgaatgtttgaaaagcatgtatgaaaatgatgaaacttttggagaaatttttaaaaattgtgaaaaattttcagaaaatggtttctttagacatgaaggctttcttttcaaagaaaacaaattgtgtgtgcctaaatgttctactagaaatttgcttgtttgtgaagcacatgaggaggtttaatggggcattttggggtccaaaagactctataaacattacaagaacatttttatttgcctcatatgaaaaggatgtgcagaaatttgtgacattgcattgatg

SEQ ID NO: 133520 - DNA, 398 bp, Glycine max
  unsure (1)..(398): unsure at all n locations
aaatctccttacttttattataaatatgggatgatggaatttgagttaaggaattattaattatattactattaatttacatattggttcaaggtaatatttaatttaatatattcatggaaatcttaaattaaatcggtaccaaaaaaaaaaaggggtaaaaatttaatttgaattcatatcaacttattaataaaaaaaaatattcatcaatttttcacatgatattaatttattagtaaaaattattttttttacaataaatagtggcttttttagaaaaaatgatcgaatatagtaataatgcttnggttaggatttagaaattgagtaaggttgtttataaaaatgatagagttcctgttctattntaaaaaaattctaagcttttcgtatca

SEQ ID NO: 133521 - DNA, 457 bp, Glycine max
  unsure (1)..(457): unsure at all n locations
aaaaactaagcttaggctgaagtaatagctcgcctgngcgagcaangnttcttttatattgaacaagcagctcgcttgggcaagctattgtgcaaccttcacccttcatttatataaatangcatgagggggctgaggagaagggtccaatatcatatattaagaggtttcacttgaattaatgagaagaaggagaaagaagaagaaaaatcaaggccgaggcatttccgtaacgcttccttaacatttccgcgatcgattctgtggtcgttcttcatcgttcttctttcttcgaccgtttagttcttatttctgaagttgtgaattcattctattagtgattntcacatcttgtttttcacatcttcatcttcattcttctactatcagtgatttcatttccttgtgtaaagcgaagttcgaccgattaattgtgtcgtattctcacttaatcatt

SEQ ID NO: 133522 - DNA, 384 bp, Glycine max
  unsure (1)..(384): unsure at all n locations
actatgttcttttccanctgaagaaaacgaccaggaaaagaaagggatttgacttaaagccctcatcttcttcattcaagaaaaaagtgaaaaagaggacttgaatganattgaagaagatgatgattttagtttcttcgtaaagagattcaataagtttctaaggaacaaaggaaatcgaagaagaacaaacttcaattcaaagaaaaaaggagaagattcatcttctgttccaaagtgctatgaatgtaatcaacttggacatctaagagttgattgccctagtttcaagagaagaatggaaaaatatgacaagaaaatcttcaaagataagaaagcaaagaaagctaacatcactggggaagataacaatatggattcatc

SEQ ID NO: 133523 - DNA, 455 bp, Glycine max
  unsure (1)..(455): unsure at all n locations
tatcatatntggattctccccaacttccccctgataatgatgaatttaccttaccaggttctcaaacctagttgcatactctgccaccgtcacgctcccctgttttagctcgaggaacttcatcttcttcctattcttcacgtcttctagaaaatacttctccataaaagtctgtttgaaagtctcccatgggacaacaacacctgctccctccagacttgggtgagtgttcttccaccagtactatgcctcatctgccagcatgggagtagcaaacaacaccttctgttggtcctgacacttcctcactcagaagatcttcttaatctccctcaaccaagcctcagcgccttcaagatcataaccgcccttgaaggtaggtgggttattcctctaaaagcgatctanaccatggtacacagctgcttctccatttgcctccttgatggccataa

SEQ ID NO: 133524 - DNA, 246 bp, Glycine max
  unsure (1)..(246): unsure at all n locations
ctcttggatggcctngattttctcaaggtccacatggaccccatttttgctaaccacaaaacctaagactacactattcacacaaaaggtgaaattatctatattagcaaaagagagtgtgtttactaagaaccataaagaacttgccttagatgtcctaagtgatcatctaggtccctactatagactaagatatgatcaaaataaacaactacaaacctacctatgaactcccttaggacatga

SEQ ID NO: 133525 - DNA, 390 bp, Glycine max
  unsure (1)..(390): unsure at all n locations
tcatgatgaatcaagaatgattcaaagaacggttgatgatgaatattgtgatgacaaaaagctcaaagatcaagaacaattcatgataacaaagatgatgatctcaagaaacaaagaatgagttcaagattgaatcaagaacacttcaaggttcaaaaggaaatttgatttcaagaatcaagaatcaagtttcaagaatcaagttccaagaatcaaaatcaagattcaagactcaagattcaagaatcaagagaatgctcaatttagataagtattacaactttttttcaaaaactgtgtagcacatgaatttttctcacaaccttataccanagagttttgactctctggtaattgattaccatattagtcggactcgattaccagtag

SEQ ID NO: 133526 - DNA, 321 bp, Glycine max
caatcttgtaggccagatgcatataggtctacattttttccacatataaaacataaactaccgagctcgagttctttggtgcgcaatcccacttggattctacaaggtcacccattattcttgcttcacgatgtctgcagacctcccgttcgagaaaacaaatttgcacttgcatcctacagaacaatgcactgactgaaaataattcatattatgagaggatcacagacttcaaggaacaatcctattcttttcatctattacacttccactcaaataaggcaagtgactagtgccctcagcgaacaggttaaggaacca

SEQ ID NO: 133527 - DNA, 386 bp, Glycine max
  unsure (1)..(386): unsure at all n locations
gacctataaaactaagcttaatcatgattctctntcaccaagacgtaggtctttttctctatctcaagcttcaaaccattctctcgagaaaagaagccactaactcaaaccttggtgagaacctaacacaggttgggcctcacaatgtgttatgttctatgaagaacaaaaaaatcttaagcaatggaactagaaaaatgagggatatcaagagtttgtcaaaccttgaatttgaggagctaaaagagttcatggatttggggcttcttttctaagagaaataaagactcaagtttggattcaattattcatgggttgcaaaggctacggaagaaggaagagaaagtcaatggtggaagcctcacttgtcagtggcgaaagcttgc

SEQ ID NO: 133528 - DNA, 372 bp, Glycine max
cctgaccataaacgatgattcttacatactgcacactattctcatccatcctttccaacacatagtgccccaaattcccatttgcctccaataaattctcattgcacagaaactcactcccacaaaccttctccacttccccagagaagtcatgcaagaagacatgagtcttaaggttcccaccctttttgctcctggcgagaacaccaacggtgaatatcgctgacattctgccaggagcatcgggccagtccccgcgtggcccgtcaaccaatatgacgtcccagtcaacctcgtacacatggttggggaggtcattgaggcccagcttgcactcggagaaaagaagattctgcaccggcttgcactcat

SEQ ID NO: 133529 - DNA, 455 bp, Glycine max
  unsure (1)..(455): unsure at all n locations
tcctcaagtggtaatcagagcacaagagcttcaagttgtgtttcttacacctccatatattttctgctttaccttctcttctattgatgtttcttcatttttctccatgtatctcctcacatgtattgtgctaaatgtttntaacatgattctttagagtttccactgattaaacttgctatagaagctagatttgattttctatggttcaaatttcttgttcttgttcttgaaccatgaattgtgttgagtttaggttcctttgagttttgtcttgttattttttgtggctgaaacctaaaccataaaattcttacaaaaatattaaagtagaagaaaacctcaaaaatctagactgacttgttcacctattgtagntntgtcatagaagtcatgtctagtcatgaaacttgtcacataagatctcttatngtgtgctgaattttatnntcttg

SEQ ID NO: 133530 - DNA, 356 bp, Glycine max
cctctctggatccactgtgtgtctcggaggcataatccctacaaactgatagatagcatctgaaatcagctgggcgacatggacactcacctaagtcatgatggcatagactagatgacacttcgacagggggaggtctgaattatggttattggggagaatgttgctaagaagcaacgtcatccagatttgcataagggtggtcatgctagtgcgcatgatccgcacccgtctccccactacgctctatgcaaagtcttgccccggaatgcacagcaactggctgatagcctcctcgtgaagccagaggcgttgactccgcctttggctgaacttgcagcattggccctcctcta

SEQ ID NO: 133531 - DNA, 423 bp, Glycine max
  unsure (1)..(423): unsure at all n locations
ntaagggccaccataganatactcgcggatgaatatggttttcacttgagggggagactaccatgtggatgacagtcacacttgaacggcaaaatattggagtacaagtgtatgaagagagctctcattgggtaataactgggaagatgatcaccatataagtgaagcggttatgggttaaagtgtggagtgcgaatcacttatgcggtcgctcatcacccattgatgtaaatcttcctagaggctactcgcttaaattcacaataattgcgtataaagtccatggtcaacttggtgaccgactcatacgaataagatagtggctttatatccatggacatggagatcccttgtatcagaagtcgtcctggtgagtgagtccatgcatggaggtcaggcacagagatccctacgtgttgtggt

SEQ ID NO: 133532 - DNA, 433 bp, Glycine max
atcctcttatatcacctgctgcatgcaagcttcaagttgcttgaacaacaacttagtgtgttccaacaaagcatcctgtgatgaaagctccaataaactcttcttggtagggatatgaactctatcacacaagattgtgtggtcaccgatagccatattttcaattaagtccatggcttcttcaggagtcttcaacttaatttttcctcttggcctccatcatggaggtcatttggtccttcatggcctctatgtcgaccttcatctgatcttgcacttcctctatttcactcatgattttggttttggcacatgtttggtaggagtgtcgtaaggcgcattcattattgttggttattgtgtttactttttggctatgattgctaaataaacaaaatgcaatgagtaatgcaacaacgaaataacatgaatg

SEQ ID NO: 133533 - DNA, 309 bp, Glycine max
  unsure (1)..(309): unsure at all n locations
aaaagaataaaagggaaatttccaatcaaaaaaaagagaaggaaaatttccagtgaaagagaanaaagaaaagaaaggaaattcccaatcaaagaatgggagaaagaaaaaagaaaagaaagaaaattcccaaccaaagaatgggagaaagtaaaaaaaggaaggaagctcctggtcaaagaaaccagaagaaatgtgcagagaggtctttggaccatacaatatctgaacagtacagaattgtcaccaaatgaacaaaaaggaaggaaaggaaaccacgacctaaaatggtcttcttcctttaattac

SEQ ID NO: 133534 - DNA, 416 bp, Glycine max
cccatcacatgtggtactatgtgttgttcgggcgatggtgcaagacaattctccacatcctcaaatcacgtataaacccaccatcccctgttgcccacctccaactgagctcacatactcccacgtagcccttatccacgttcctctcaacaccgggtccccatcaatcctcccaagcttccacaacatccaagaaattcaacatccaatcatcacaaactaacacagccaagaaaatagagcaaaggcagataactctgcccaaaacacaaaccaatatcacagcttttcacattcaaataccccaagaacattctcttcgtccaattcgtaaccgctgatcgactcaaatatttactggaagtcttatgacatagtctacatttgaccgtgggatctgtaaaacgtcaaaccaa

SEQ ID NO: 133535 - DNA, 413 bp, Glycine max
agcttgtgcattcaatatcctgatgagggtgttccatatgttctcaagactggactaatactttgctgccaagttcatggctatagtgaaatcctataacatctcaggagttcatattgttgttccaccatgaatgccccctgatgtccaaagaagatcatatctttctaaaggcttttcctcattctctggaatggcaaaagattgactatactaccttgctcccatgtccattttcagctaggatgaccttaagattggctatactaccttgctcccatgaatcagaaatctacacctattgcaagagtctgtggtctatgttcttatgcagatcaccatacaaatctatgtccttctttgcagcaatctggggtcaatgagcaacctgaagcttatgctacaaacattga

SEQ ID NO: 133536 - DNA, 461 bp, Glycine max
  unsure (1)..(461): unsure at all n locations
tatgagaacaaaattgcctcaatcattttcaaatgtgcatgtgaattacgaagcattaacaagaatcaagccaatgctattgtgcaagcaatcaatggggcaaaacacaccaaatgattatgatgatggatggctcaaattctcacaaaggtaaactcatcactttcaaattgagctttcaaaactatcatgacatgtagaggagaatcaaggatttaaagtcacaaaatgtcaagaacttttattttcaaaacaattacccatttcttgaacatatcctataattcaaagaaaaacaagccaagtcgtacatgcacacagaattgacccaaaatattaaactagaaatccgacgaaactaacaacattaacaagataacacaactaacaaattaacaaaaccaacaaaactagcagaaccaaagaacacttcnccctatacttaaacaacacatttgtct

SEQ ID NO: 133537 - DNA, 299 bp, Glycine max
ttgaaccgaaaatcttggttggtgatggatggatggtcgatggcttgaattgagtgaattggcgatgattaggatcattatggctttgaataagtatgcagtaattaaaagagatagaacatgaattaggggcatgactaaaaatgttagttggtttgacaaataaattgtgaaggtaatcattagccacaactcggtgagttgtgtgatctttaattgtgagagaacgactagcattgagtactgatctttgcatgaatctcttaattattgaatgaatgcatgaatttgaagatgat

SEQ ID NO: 133538 - DNA, 458 bp, Glycine max
  unsure (1)..(458): unsure at all n locations
cctttggcatcatcaaaacattcaacttgatcctttgtctacaaactcctcctttttgatgatgacaatcccttgaatcaagaccagctatatacaagatgatagcacgttcacacaacccttactccccctatcttttggcatgtatgcctaactntacttaatgataaatttctaattgatttctaacccaagttctctcccaagttctctcccnctttggcaacataaaaaagaactaagcaacacaattaaaatccaaacagagccaaacaatcaaccaaaataaatccatacattgtcataaccaatccaaaacagagtcgagagatataataatacttaataatagtgcaagattaccgatactagagcaacaganagcccaatacacggtgatnaaccaaagtactaataatacttaatcactaataatacttagtcataatacttaagct

SEQ ID NO: 133539 - DNA, 384 bp, Glycine max
ggttaaaaatgggttattcactcccatgtgtggttattgttggatcatgtgatgatcttaaaccttgtgtttgtgaaagcaaatgactatgtgaattactttaagaaaccttgtgatgaatgactccgagacacaatattttgataggatgtaacattggaacaagagtttttattttaattgcatgatgtatcaaacatgtcattttactttatttgataaacttgaacagtcttgttttaagtcataaatatttctaagaaattttatttggtaacagtgaagcgaatgtgaacattatccacgtgaacttatttacgatattattgaataaaattgatttaattagattccgcattgtatatatgggtttttcatttatat

SEQ ID NO: 133540 - DNA, 429 bp, Glycine max
  unsure (1)..(429): unsure at all n locations
tcctacatttaaagactggtattataataaccgtcgcaattactgtatttgtnnttaacgacatttaaacaatgacggttgataaccgtcgttaaatgcacttattaaccgtcgtaaaaagccttttttttagtaatatcataagaccccacaagaaagcttccatggtgacccctacaaatntctctaaaccctgcctaagatgggttttccaaaagtcgacttagaatctatagaatttaagataatttttctaattacaatcttagaattttaaaaaaattaaaaatacctacagtaatatttttntatcaaataaaaactcaccataattgactatagaatttacatatcgtatttgataaaaatcgcctgtatgaacaacaaatcatcaatcagagtatctgagactaattatagttcaatagt

SEQ ID NO: 133541 - DNA, 347 bp, Glycine max
cccacactataggtatcaacttccatatgcgtaaaaagaactttctgctctatgaggtatccaactaattcattcgaagtaactaatttgatctttccgtgacatcactaatggaaaaagtggagacaaaaggctaatgtatatcaaactagagtaatataaagaattggataattggattgcagaagcaaaagtcttacacaattgtcattggttgaagcactgttgcaggagcataaaaacttactatatcagaaaaactgaaagcaactacttgtaacagcatgcaacttgatttgagatacttcaacaaataccgctacacatttacactcactgaaaaaaat

SEQ ID NO: 133542 - DNA, 313 bp, Glycine max
tgcttgtgggacttctatggaggctggatcgttgagctttctttttgttctctcatggagatattacaccactgtagatacaacggaatgaggagctacaccaccaatattcgctttgaatcagatttgtgaagaggatgctttaatggaggtcatgaatgatagcacggcgagcatcaatttgattgtttaaaatatggttacacagggagatctccacgtggtcacatcataccttgtgttcataaaggatcaccaactgatacacacgcattcacttatatactctgctttgttcctggagaagcatctc

SEQ ID NO: 133543 - DNA, 98 bp, Glycine max
ctatcgtattttcatgtattctgcgcccggggcgagcttagctattggaggcgtgttactacacctcctctacctcctgaatgaagcactcttgctct

SEQ ID NO: 133544 - DNA, 344 bp, Glycine max
  unsure (1)..(344): unsure at all n locations
ttaatcaccgcagctgcaactgaacagttacaaaagtgagaagtgttctgttttgtttattcaattagcccccagttagtattaagtaaggaaccttaattcttgaacctaattaagtgagcgttatgagtcaaatataccaaagtgagaatcatgaaactcatnttttttttcttgaaccgtctcatgtttgaaaaagagtcaaccatgtagtcagtcatgttttcttgtgtatgtttgttcgttacaaatgtcatcaatgtctcctacgaaaatgccctactccaaatagtatatcattcacattctattgttgttgagatgtcactctcatacaaaaacat

SEQ ID NO: 133545 - DNA, 461 bp, Glycine max
  unsure (1)..(461): unsure at all n locations
agcttgcaactctgtaggaattcggtcatggttgacataagttctcttaaaaattaataataataataataataaaacattaaaaaaatatatcctaatagatataaaataataatgcttgtaatgataaaaaaaataaaaaaaaaatagtaatgcttgcttttgggtagtttagtcactgtctgacagaaattgatatattaacacagtgaatttatgtttgagaaatagtatttggacatgaatattgttggaaaagagttatgaagggaagagaatataatggggaaaatattgtcataacaaatgtttcatgaataatacaactctttacgttaatggtatgatcatgatgcactngcaagtatttctatactaacattaacataaacataatcattgatggcaaatttctttagtaccaagaactcgtattattaaatatcagacaataatctatt

SEQ ID NO: 133546 - DNA, 422 bp, Glycine max
  unsure (1)..(422): unsure at all n locations
gatccttaagtcaccgctgctgcagctgacaaataaatgaaatgttttatttccttgtccgangaatggctntcttgaacagttcttctagcttccacgctctgttctataggctatgccgaaccctaaaatgtccttcccagttagcagccaactttccttctgatgaatctttctaggcttcaccttgggctctttagatgatatctccttcattaaactacctaagcgtcaactttgagttaaaacgtcaagccatacgctacttgcaagcttctatcatgatgacaacatcctctcatacttattttataaggtctaaatgtacctacaatgcttcattgttcttagcctctatgaagttcactcttcttagtgatattctccccacttctaccaataacatagcattagtttcatat

SEQ ID NO: 133547 - DNA, 452 bp, Glycine max
  unsure (1)..(452): unsure at all n locations
ggtgcatccaataccctgatgaggatgtcccatatgttttttatcangactgatacatttgcttccaaagtttcatggccttgcangtgaagacccgcacaaacatctgaaagaattccatattgtctactccaccatgaaatccccagatgtccaggaggatcacatatttctgaaggctcttcctcattctttagagggagtgacaaaggactggctatattaccttactccaaggtctatcacgagctgggatgacctcaagagagtattcttagataaaattttccttgcttctatgaccacgaccatcagaaaggatatttcaggcattaggcaactcagtggagagagcctatatgaatattgtgagagattaaaaaactatgtgccagttgccctcactaccagaattctgagcagcttctcctccatatttttatgaacgactc

SEQ ID NO: 133548 - DNA, 373 bp, Glycine max
  unsure (1)..(373): unsure at all n locations
cacgatgtgtgtcactattngttatattatcgtccttgggcacgggaagttgttatgggaatggaaatggagttaaattgcttcttcagagtccctgctcggagattatgcgtcttgaagggtgtggtgtggttcataaacagatagaggaggaagaagccttttgtgagtattataagtgtgtcaagtgggaagaaaagtcatcgatgaccatgaccatcaaggacgctgtggctgatcttacattccattcttgatgactgaggctcaacttcgttttctcaatgttcaacacgctttaatacataaaatatgttttgtttttgggcctgcatggaaagggaatgcactacaaacattctgaccaagccta

SEQ ID NO: 133549 - DNA, 415 bp, Glycine max
  unsure (1)..(415): unsure at all n locations
gggcaatgatgggttggactatgaccggatgtgtttgtgttttgtgtctcanatgagcttcatgttaacctaataaatcaattcatggttataacttatgcaaaaatagtatctggtacacttacattaatgcttatctaaatgtctttaaacatttgtaattctaatcattgtatcactggattccccctcatttccttgagctaggagtaaagatacgcgcttcctttatttgtaagaagcttcatctcaaaatggctatctgtttaaaacatgtattggattttattgcagtatcaacaagatgacccaattaccctctgggtgaacaaagatggtccttataacaatccacaacatacgtacaattatnacagcctaccattttgccgtccatctggaaatactgcacaca

SEQ ID NO: 133550 - DNA, 404 bp, Glycine max
  unsure (1)..(404): unsure at all n locations
ttaatcacgagctgcgctgctccagaacctattttcatactttgggggccatcttgatggcttattttctaaggtcactngacccattttacactacaaccctaagaaactatattatctacacataatgtacacttctctatatttgcatagagggtgtttttcctaaagactgaaagaacttgcctgagatgtcctaagtgatcatctangctcctactgtacactaaaatatcatcaaaataaacaactacaaatctacctatgaaatcccttaagacatgatgcataagcctcataaaggtgcttggtgcattagtgagcccaaaaggcatcactagccattcatacaaaccaaacttggttntgaaagcggttttccactcatcaccttctttcatctt

SEQ ID NO: 133551 - DNA, 447 bp, Glycine max
  unsure (1)..(447): unsure at all n locations
tagaatgcagaagaagcaacaatcaatntaataatgttctttaaacatgcaagacaaaattgattgcaacaaaataaatgagataagggaagagagaatgcaaacacaattttatactggtttggcaaagtccgtgcctacgtccaatactcaagcaacccacttgagaatttccattccttttgtaaaaatctgtttacaaagtttgaaccacacagggacaacccatcccttgtgttcaggaatccttacaacttaagagaccctcagtcccttaatcaatctctttgaatgagaagaaagaaagaagaattctctcttgaagagaaagatattacaattgaagtccatggagaaactcttaatggatttgcaagtgtttgtccaagagtttcttttgagagagcatntggcaatgaagttctcttggaatatctctctcataca

SEQ ID NO: 133552 - DNA, 363 bp, Glycine max
  unsure (1)..(363): unsure at all n locations
aagcttcattaatatgcttctatcacactccagacatcttctcaaaaattccaatggtcagatcatggaaaagtgtcctgtgtaagttcagaccatattgttagaaaatccaatggttaatgatggctgggcatngattttaccgatgcatcttcttgtatctttctctataagcttcattaaaatgcttcctccaaaagtcttctcgtggtttctttgaaaactttctctaatgcttcttttgaaagctaaatcctttctatccaccccctttattactaaatttactccctaaatatattctggttataatacgttacaattatcaacatcaaactaattcaattattattgattatattc

SEQ ID NO: 133553 - DNA, 451 bp, Glycine max
  unsure (1)..(451): unsure at all n locations
tctaaggaagttntctcanagaagcttctcaaggaagttttctcaagaaagcttctcaaggaagctacctagtctataaatagaagcatgtgtaacacttgttgtaactttgatagccaccgtgtctggagcgccgagcaccagcagcgcttcgaggccatcaaaggatggttgttccacagagagaggcacgtccagctcagggaggatgagtatacagattttcaggaggagatagctcgcagacattggacgtcgctggtgactcccatggctaagtttgaccctgaggtagtcctggagttttatgctaatgcttggcccatagaggagggagtgcgagacatgcattcattggtgaggggtcagtggattcttttgacgcagatgccctcatccagttcttgggtgacccgctagtgttggaggaaggccaggagttcgagttcag

SEQ ID NO: 133554 - DNA, 454 bp, Glycine max
ctagacaatcgccaactgtatataacgactgttgtttttgaaacttcatctccatagataaaatcgttgtccgcgagaaactggtaccaaagctgaataatgtatctgtcaccaatgctagtgtcgaggacaatgtcattccattgcagaggaagatcaacatcttccttgaacttgtcatatacaaaagtcaagtatgtcttcaccaccagtgagtgaaataaaactaacccgcgctatgccagttgatattccttctctgattatttttggctggttccagctcgcatgatcagcaaagaatccccatcaatgacatccactatacgtaaacaatggccaatcaatgaaacaaattcacagagatttgatcttcaatatctatccatgttgacaataaactgagaaacatgattccatctcagacccacactttcataattgcactattttt

SEQ ID NO: 133555 - DNA, 390 bp, Glycine max
agcttgagatgaggaagtgttgaatggtgtttcttcctgcttttattggtgaccacttagtggtacctggagatatgtcgcgggggtcatgagaccttggggacgtcaggtggggtgctattgcccaaaaccaagcttgaccaatcccgacccaacccgggcatattcggtcagtgagaacctgtgatgtacctaaacaggcgagctcctggcagtcaacatataaaaggaaaacaagaccacaaagcaaggaggcttgtggtggctggccagctgtgaaacttgattgatatgtgagatatggtctctggtaatcgattaccaagggtgggtaatcgattacaaggcttaataatgaagacagggggctaagatggtctctggtaatcg

SEQ ID NO: 133556 - DNA, 426 bp, Glycine max
  unsure (1)..(426): unsure at all n locations
nttcctctggttgctctgccagggtttccaagcattagttaggaggagaagagattgaagccttcattccattgtctgcgtgcgatgagtatttcgccctctctagantattaattgaaaatcccaacggtgaagatgtgtgtaaatgaattgtgaacttggtgtccagatgtcacaaagatccaacagttaatgagtctgagagccgtcaaaatgggttccggcccgtgggccagcccgacccactgtgggctagagatgggctgggctcaattnttntaaaaaaaaatcggtatcggcaacttttcagtccgacccacttagcccgtgggttggtgggccagcccngtcaatccaccaaattaaataatatattatnttattntattatttatataaatttataatggttaagaaattaaattt

SEQ ID NO: 133557 - DNA, 415 bp, Glycine max
agcttgatggcaaattatatgaaacatgtttacttgaaggaaggccttgaagaattcagatttaggaaatggtcttttagttttctttagaaaaagatattcatattagactcaagaaaaatgtgtgaaggtaagtgataagtcatatgatcaccacaagttgtcttataaaaacaaattcagttttttgtccaagaaccaatggaagctctcacaaaaagaaaaaaactcatatttcatttaaactcaatctacctaaaaactacaaagtttttcttatttataagctaggcttccctttaaatctcccactaagaattaattctcattaagaattaaattctcacattaaatgttcgctaaaataaaatctcattaaccagtataatagttggggaagcctaaataatataat

SEQ ID NO: 133558 - DNA, 423 bp, Glycine max
  unsure (1)..(423): unsure at all n locations
ntntgaanaaccatttgctactggtaatcgattacaatattctggtaatcgattaccaaagagtaaaaactctttggtaaaaggttttgagaaaaattcatgtgctactcaatttttgaaaaacctttttaatacttatcttgattaagtcttctcttgattcttgaatgaatcttgatcttaattcttggaagcttgaatcttgaaacttgattcttgaaatcaaatttcctcttgaaccttgaagtgttcttgattcaatcttgaactcattctttgattcttgagatcatcatctttgttatcatgaattgttcttgatctttgagctnttttgtcatcacctctgtcatcatcaaaaacttctttgaatcaatcttgattcatcatgaaggcttgcttctacacgtaatgcattggata

SEQ ID NO: 133559 - DNA, 332 bp, Glycine max
acattgtattcgattacaacattttgaaattaattggaacgttgtaaattcaatgtgaaaactttgtcaataacaatttgctactggtaatcgattacagctatctggtaatcgattaccagagagtaaaaactctttggtaaacatgtgttgagaaaaatcatgtgctactcaatttttgagaaaaaattttcatacttatcttgattaaaccttctcttgatccttgaatcttgatcttgattcttgagatcttgaaccttgaatcttgattcttgaatctaaactttcttcttgagtcttgaattcttcttgattcttatcttgaactc

SEQ ID NO: 133560 - DNA, 486 bp, Glycine max
acctataaaactcagctatagaacaaaatgcttaatcatttgcaatatgcatgtatttacgaagcatcaacaagaatcaagccaaggctattgtgcaagcaatcaatggggcaaaacacaccaaatgattatgatgatggatggctcaaattctcacaaaggtaaactcatcactttcaaattgagctttcaaaactatcatgacatgtagaggagaatcaaggatttcaagtcacaaaatgtcaagaacttttattttcaaaacaattacccatttcttgaacatatcctataattcaaagaaaaacatgcaaagttatacatgcacacagaattgacccaaaatattaaactagaaatccgacgaaactaacaacattaacaaattaacacaactaacaaattaacaaaaccaacaaaactagcaaaaccaaagaacacttcctcttccctcccacatacttaaacaacacatttgtctcaatg

SEQ ID NO: 133561 - DNA, 267 bp, Glycine max
atctgcaaaagacaaaaatgttaaaagaatatcaatcgattgcaagggggggaaaaatgaaaaatcccgtttgttgtgagtttcttacatcaaagaaaactgtgttcctgttggcataacgatcatgtgtatcaataccatcaaatctctgaggaaactggacatatcagaccttcttcccagtttgtgggtccatcaagaaacacatggcctctctggcaaccttgctgttattgacatagtgatcacaatccaagttcaacatga

SEQ ID NO: 133562 - DNA, 450 bp, Glycine max
  unsure (1)..(450): unsure at all n locations
ngctaacccatggaagctcctaatatctccacactntttgggtgggccattcttggatggccttgattttctcagggtccacttggaccccatttctaccaactacaaaccctaagaaaactatattatctacacaaaaagtacacttctctatatttgtagagagggtgtttttcctaaagactgaaagaacttgcctgagatgtccttaatgatcatctaggctcctactatacactaaaatatcatcaaaataaacaactacaaatctacctatgaaatcccttaagacatgatgcataagcctcataaaggtgtttggtgcattagtgagcccaaaaggcatcactagccattcatacaaaccaaacttggtcttgaaatccgttttccactcatcaccctttttcatcctgatttggtgataaccactttaaaatcaattttgaa

SEQ ID NO: 133563 - DNA, 419 bp, Glycine max
gatccttaagtcaccgctgctgcagcttttatccaggcactctcttggtggtttatcttctctttccatggcttattctctggtggatggtgcctcctctcacctcttcttctttatggctgaaaatcaccatttaaggaccttattgaagctcaaagatctagcctccatagaagcttctcaagcaagcttccatcaggtcaagacatttatagtagtcaagaggagactacttttttcccttcttctagtgggagtgaagatgaagcaaggggtgaagactctagtgaggaagtctacctcaatgaagaaggtgacgtcctaatggttagaatgctccttggatgccaaacttgtgatctatcccaatcccaaaaagagaacatcttttatacaagatgcaaaattgtagataaaaa

SEQ ID NO: 133564 - DNA, 428 bp, Glycine max
  unsure (1)..(428): unsure at all n locations
tctaaactttgtacaagaatgaagctctgataccacttgttatactagtggcctcagatatcttaagaagggggggggttgaattaagatatccgaaactttttcccctaattaaaaatctatcttactctttacttaagttatgaattcccttaatgacaatcttcttaaatattaattcaaatgaagcaacttgaatatgaatataaagcaataataaataaaggagattaagggaagagaaaatgcaaactcagttttatactggttcggccacacccttgtgcctacgttcagtccccaagcaacccgcttgagagttccactaacttgtaaattccttttacaagttctaaacacacaatgacaacccttcctttgtgntagagatttttacaacaagagactacagtctcttatcccttata

SEQ ID NO: 133565 - DNA, 391 bp, Glycine max
  unsure (1)..(391): unsure at all n locations
atcctcttagtcacctgctgcatgcatagctanccctataggggatggaccttntcttttttggagangatcaataacaatgcctatatgttggacctcccataagagtatggagtcagcaccacttttaacatttctgatttaactccttttgcaggtggagctgatattgaggaggaggaactaacaagatttgatgtcaaatcctcttcaaggggaaggtgatgatgcaatcctccctatgaagggacccatcactaaaaccatgagcaagatgctccaagaagattgggctagagctgttgaagaatgccctatggttctcatgaaccttagggtagatttctaatcccatgggccaatgttgggtccaattatctctgtacatatt

SEQ ID NO: 133566 - DNA, 464 bp, Glycine max
  unsure (1)..(464): unsure at all n locations
ggacctatgaatctcaagctggcatncataccctgatgaggatgtcccatatgttcttatttctggactgattcatttgcttccaaagattcatggccttgcaggtgaagacccgcacaaacatttgaaagaatttcacattgtctgctccaccatgaaacccccagatgtccaaaagaagtcacatattctgaaggcttttcctcattcattagagggagtggcaaaggactggctgtattaccttgctccaaggtccatcacgagctgggatgaccttaagagagtattcttagaaacattnttcccttgcttcaggaccacagtcatcatgaaggatatctcaggtattagacaactcagtggagagagcctgtatgagtactgcgagagatttaagaaactatgtgccagttgccctcaccatcagatttcagaaccagctcttcttcaatatttttatg

SEQ ID NO: 133567 - DNA, 432 bp, Glycine max
gatccttaattcacctgctgcatgcaagcttatggtataatctgggacctagccattgtagatttctccgcaaaggccattgcctccctatcccattattatgatcagccgttgagatgctttacctttggggacttccagttgtcacccatggtggaagaatttgaagagatccgaggatgtcctctatggggaaagagaccatacctcttctcagggttctatccctcattagctagaatttcaaaggtagtccaaatctcggcacaggaattagaccatggaaagcaagtcagaaatggggtggttggaataccaagaaaatgtgtggaggtaaaagcaagaaccttggtaggtagatgtgaatgggccccgttcatagacattctcgcactgttgatcttcggaagagtcctctttacaaatgtcaat

SEQ ID NO: 133568 - DNA, 445 bp, Glycine max
  unsure (1)..(445): unsure at all n locations
tactcagctaacanattggtcagctaaaaacaaaatgaaacatgtaagccaaaaacataagtagcagactatattactgctttgactagaaataatctgaatgaaataacaatatgatgtccaactcattatcatgattcatgctgaaaaccttgaagcagtgaaataacaattttgttcatggagtaaacataggccaaatcaagccaaattattcagccatccagagaaacaaaggtccataagatattatatttcatcaagttctagagatgtgaattagtcaaataaaaattgtaaagtatccttagtatatttagatgtacctttactgttntgtcattaacaattnttcatgcattagataaaaatgtgtatgcagactgcacacacagtgcagacaagcttctaatgactgatcataatcatgtacctcattggttca

SEQ ID NO: 133569 - DNA, 452 bp, Glycine max
ctgcagctgccctgcgcagtgagtgatcttttgtagtgttattaactaataagatttcctgcatgttattaacaaataagatttcggtactgctttcagccctttgatgatgattatcgtaaccatcatgggtgccttcatccttgcagaaaaaatatatcttggagggtaagtactcaatactcatattcactcccaatgaacatatctttgtttatgcacaaagaaagaagcttaaacgttttaattgactcactcttgtatcataaactaaaagtttggtgtttcttacataaatagtgaaacatgacattcttaaaaagctatagtcattatagctatagctttgacacaagtggattatctgtagctgatttcaggggtcattagaagtattctcatatgaatgtgacctcactctttcacggtggagttgtatatgtgcatatatt

SEQ ID NO: 133570 - DNA, 298 bp, Glycine max
acaagacaatggacaccggctgaaaccattcctcacttttctctacttagtggatgtagcggtggaggatacctccctacttctcttccgccatgacttacgaagattacttttactgtctacttctttacttatcttgcactgtgtcaaacatattgatagctttgaatgttcttgaccttatgattgtgctacattgaggacaatgtgtcgtttaagtgtgagggggacggcgagaagatcgtgcttacaatctctgatgtattctagtatacaaccattaagctatctagtaaaa

SEQ ID NO: 133571 - DNA, 384 bp, Glycine max
gtcgtatctagtcaaggtctgagagaccatacaagtttcctaacgatttctaattatgtgggccattaagtctatcatatgctgacaatagccgagaagcccatgaatctcttcgggggcggagtatgtgtctgccatcgccttggccttggctaacaatcggggaagttcttgactcccgttcaaggtaagagcaaactgatccatccacatggttgcctcttggtgtaaagagtcgatcacccttcctctatcctctttttccgcgtatacttgtgcatattcgtccgcaatcctatgctcgtgggccgcggctagacctaactcttcttggtacttggcgatgatagctagcatgttggtctccgtctcacataaatgctg

SEQ ID NO: 133572 - DNA, 457 bp, Glycine max
  unsure (1)..(457): unsure at all n locations
tgccactgtacaactcgatctggaaaattgatatcatttattttacttgatcgagtgactttcttaattattctagtctatgtatatccttgtagccctctcaagtttcataagattacataaaagttaaaactcctattctttatatgttaatgggtttaaaatattacaataacactcttgatcatactattttttctatgttaattatttgaaaatattatattatatcctctatctatcctgtgcccttaacaccagaggatgttcttatatatttttatataatcacgtattttgtttatcttgatgtgttaattgtgcaaaccaaataaaatcatgactttgaggngtacaataaatcaagaagccatagcaattccatcaatcagcagataaattccctagtgcgatagatcattccttgtaactatactgaaacacactagccaatacc

SEQ ID NO: 133573 - DNA, 435 bp, Glycine max
  unsure (1)..(435): unsure at all n locations
gatcttaatcaccgctgctgcagcttctatccaggcacattcttggtgttttagctccttcttccgtggcttattccctagtggatagcacctcctctcacctcttctcctttgtcttccgctgcatctccatggtggaaaatcaccattgaaggacctcattgaagctcaaaggtccagcctccataaaagctccacaagcaagcttccatcacatttactcttcctccaacttccaaaggtacttttgtccaccataatgtctttttttctgtcttcttttctgtaggtgggaccatgtcattgtctactgctactccgtttgctagaaaaaggggtcaacctgctagcaagggtggtcttactgctattgctgctgaggttatcctcagcattctntcctatgttntaaacaaagaagaagaaggatgatgt

SEQ ID NO: 133574 - DNA, 408 bp, Glycine max
  unsure (1)..(408): unsure at all n locations
ggaccttgaatctcagcttcttagaagattcgntcctaatttctctacaattgctttttctcttaatgagctggtgaagaagaatgtggcatttacctgtggtgagaaacaagagcaagcctttgcattgctcaaagaaaagcttactaaggcacttgttgtagctcttcctgacttttctaaaacttttgagctagaatgtaatgcctctggagggggagtaggagctgttttgttacaaggtgggcaccctattgcttattttagtgaaaaacttcatggtgccaccctcaactaccccacctatgataaagagctttatgccttaataagagccctacgaacttgtgaacattaccttatttccaaggaatatgtcattcatagcgatcatcaatcacttatgtc

SEQ ID NO: 133575 - DNA, 392 bp, Glycine max
  unsure (1)..(392): unsure at all n locations
cctangaagatattgatgggggccgcttttgattatgtctgttctcgaaaaattcgaatcaatcgtctgggtatgaaacataagatcgactattataatgatttaatcaatattgggtgtatgttatacctatcttcgtggttctgaaaaaactccgcataattgtttctcaccgtcccttgccgttttgcgaatgtcgaaatctgtaggcaacatttccatgccatattatggacaaacaaaacaatgtgtccagccggaaatttgtaggcaacattattattattattattattattattactattactattattatactattctgaaaagttatctcatcaatcgatataaataatgaatggatggaaatatatgatataagtgtgaca

SEQ ID NO: 133576 - DNA, 444 bp, Glycine max
  unsure (1)..(444): unsure at all n locations
cgcttgaggtanataaattccacgtggtggggaccagctatgtctgtatgtgtggccaagatgttgggtaaagagagggtgcaaaaagtagttattgctatctccggtgttaacatgacgatgatctcatgttgcctactaaaccgcaccaattgcgaaaatagatgtccctcttcgtctacaagcctagtgtccttcttagatgtaagttccatctctttttcttctttctcacttttttaatttccaatgtgcatggatattctttatttttcaaaacactataccgtgtttagaaactatttgtgacagaggaagtatatatgagatctatgtggaagctattacaagtaacttctaaaaatcacattcgactcgtgaaactcgttgaacaagagagtaactgttgagatattcaaactacaacattagcggtggcagatc

SEQ ID NO: 133577 - DNA, 441 bp, Glycine max
taaaggagttgagggaaagattcttgttgtgatgaatttcacactttctggatacgttttctcaccacttgaacgaattgaagagagcttccgtagtgggacatactcgattatttgcagataacaatgatgtgattcatagaaaagataacattatttgattcaaaagaatgaagaaatttaaattttggcctactaaatgtgtcttgcgacaaatttaaaatcaacgacataatctagtttggtcaaacctcaccaacatttgatatagcacaatcttaattaataaaaaagacaacctcccttaactagattaaaaataatttaaacaatcaaagactgttctcgatgcttatataatgaagttattaattaaagaaaacgtgcctcttttttctttctgtaatttctcctgaacaaaaagatgatgtctccgacatc

SEQ ID NO: 133578 - DNA, 448 bp, Glycine max
cgccttggctcctgtaatacattccttgttgtaggtatgtctttatgatgatatgaacaagaacatttgtttgtgcttgtgattcaactattgtttgtaattagtccaagatctagatagtaagacagtttttcggtcaggagctcacaaacaattttgctaggtaggactgtgctttgtgccggtgcaaatcactcctttatgctattactttttattggtattttgattcttctttttcttcattgttttcctttccaagaatcttcttataacaataggtttacatactgaaagaagcaggataaatcattattcccttaatttaatggtcttaaaacatatctgtatttgtttggatgaaaatttgttatattataatattcataaattataagattgtagaataattacatataaaaacaattattataagtgcaaatatcat

SEQ ID NO: 133579 - DNA, 290 bp, Glycine max
tcttgtcacctacgcctttccaaaacaacatacaaaacaacatataaaacagctgtatggaaaatcttgtcacctacctatggagttggaacataaagcatattgggcattaaaatttctgaacttcaactcaaatcttgtcacctacgcctttccatgaattggaggaactgaggtttcaagcttatgagaattccaagctttataagcaaagagtaaaaatctatcatgacaaaaagttgtcaaaaaggaattttcagcctggtcaacaggtattggtatttaattct

SEQ ID NO: 133580 - DNA, 424 bp, Glycine max
  unsure (1)..(424): unsure at all n locations
tgattgacaacagttgccgcaacatcaaattcagcttatgttgtagatcgagcaacattctcttgttttctcattgttctagaacttggactatcttgtttggacaaataaggcccaaaatcaagtttatatttcaacaccccctcgtaaacttgattttgttactccaatcaaacttctcaacttgatgaaatcttctatcttaagtggtttggtgaagatatcagctactcaatcatgagtcttcatgtactccaaatgcaagcatcctttcttgcgatgcactctctaatgtagtggtagcacgtatcaatgtgtttactttagttaaggtaaactgggttcttagccaatgctattgctaactngttgttaatgacaatcattgtcgactcttcttgtgacaaacccaacttttttagta

SEQ ID NO: 133581 - DNA, 424 bp, Glycine max
  unsure (1)..(424): unsure at all n locations
agcttgtataatcataaggccagctatggttgttaatgtggattttgaaaaggcctatgactcagtctcatgggtttttttggattatatgctgcaaagaatgggtttttgccacaaatggaaacactggatgtctgcctgtctcaagtcagcaagcatttctattcttatcaatggcagtcctacaaaggaatttgctcctactagaggtttgaggcaaggggatcctttatcccccttactctttaatatagttggagaaggcatcacaggattgatgagggaagcagttcagaagaacttatatagaagctatatggctggaaagaaaaaggaacccattaatattttgcagtatgcggatgacacagttnttgtgggtgaagctgagtgggagaatgttatttgtttgaaggctatgctc

SEQ ID NO: 133582 - DNA, 349 bp, Glycine max
  unsure (1)..(349): unsure at all n locations
tctgattcatggcaagctgagttactatgttgaccaaggcatcaagttttccttcaagctntttatttttagtagatgaagatgaatccgtggccacctcatggaatcctctaagaacaatagcatcatttcttgcactgaattgttgggagttggaagtcatcttcccaatcaaattcctagcttcagtaggggtcatatcacctagagctccaccactggcagcatcaatcatactcctctccatgttgctaagtccctcatagaaatattgaagaaggagttgctcagaaatctggtggcgaggacagcttgcacacaattcttgaatctttcccaatactcatac

SEQ ID NO: 133583 - DNA, 472 bp, Glycine max
  unsure (1)..(472): unsure at all n locations
actaagctgtgcatccataccctgatgaggatgtcccatatgttcttaatactggactgattcatttgcttccaaagtttcatggccttgcaggtgaagacccacacaaacatttgaaagaatttcacattgtctgctccaccatgaaacccccagatgtccaagaggatcacatatttctgaaggcttttcctcattcattagagggagtggcaaaggactggctgtattaccttgctccaaggtccatcacgagctgtgatgaccttaagagagtattcttagaaaaatttttcccttgcttcaggaccacagccatcaggaaggatatctcangtattagacaactcagtggagagagcctgtatgagtactgggagagatttaagaaactatgtgccagttgccctcaccatcagatttcagaacaacttcttctnncaatattttatgaaggactcagtaatatgga

SEQ ID NO: 133584 - DNA, 352 bp, Glycine max
aaaacaaaattcattggcctgaagaagagctgcccatgaagtgatgaatccattccggaacatccactgaaaccagcttaatgctgcgccgtcgatgtaaaaagaagctaccatgatacgatcctcttccggagtaccatagtaataaaaaaactgtgagattttgaagatccagccaagtggatcatggccgtcgaaccgcgggacatcaagtttaaccggtggtcacggcgcggaaggtggtggcggagcataagatgtcatgtgggagaggcgttcacagatggcttcgaacttattagccaaatcggaatgttcggtgagggcggctatggcttcctcgagatggtct

SEQ ID NO: 133585 - DNA, 449 bp, Glycine max
  unsure (1)..(449): unsure at all n locations
tatctcatgttagacaccctaatatcagcatttgcaaacaatcttattntacttggtgccaacttatagtggaattaaacaacgaatatacttaaagtgcataaaaaagttaaataatgctcaaaataggcaatcctagcttaaatcttaccctttccttgatgtcacccaaagtcggcaagtacaacttatagaattcctctctgaatgcaaccacaaacctaaataaagtttagaaaccaacaagaataagacaattagaatctgtgtgatttgtataaatttaagggacaacaagatacatgtactatattatagtattttcacttttaaaggactaaagacgaattattgaccataattgatatattagcatttgtatatcactaactcgctcttacttagtatgtctctcaacttgcaattacaaattcattgcaactcagcat

SEQ ID NO: 133586 - DNA, 438 bp, Glycine max
  unsure (1)..(438): unsure at all n locations
agctngtangattatggtgtacccgtcatatgttgttctatgtggcgatcaggcgatggtgcaagtcgactctccacatccacaaatcacacataaatccaccatccccagttgcccaccttcaactgagctcacgtactcccatgtagccctcatcctcgttcctctcaacaccgggtccccatcaatccctccaagcttccacaacatccaagaaattcaacatccaaacatcatgaactatcaaaaaccaagaaaacagggcagaggcagaaaactctgcctaaaacacaaaccaataccacagttttccttactcaaataccccagtaacattctcttcgttccaattcgttcaccgttggatcgactcgaanatttactggaggtccctagtacataagtatacattgtgatcgttgggatctactagaaaac

SEQ ID NO: 133587 - DNA, 435 bp, Glycine max
  unsure (1)..(435): unsure at all n locations
tggagatcaaagaaaggaaaagcacaatctgtgtgtgntgttatatcatagaaaagtgttgtattattttgaacatggagaaagaaagaaagagagaaagtcgaggtcgacatgtatgttgagtcgttcagcctttgaaggaattttttggaattactattccaacccacattntttattntcaatctcacgtgctcattttttccaaatattattgttgaatgtcgttaaaggatttaaagtttatgccctgcaatcaaattaacgtgaatgctttgaaattgtcagtagcaataaatatgtataagttacatatttgcttgaacgtgtttgaatacaaaagacaaataaatgtgaatattattntatggcctggaatgaattaataagatggatatgaattgtaatagcaataagtatgtggagccatatatt

SEQ ID NO: 133588 - DNA, 441 bp, Glycine max
  unsure (1)..(441): unsure at all n locations
agctntcatctagccaagactatacaaaggtgtttcatgagaacctaacgattcctaattatatgggccatcaaatctatcatgtgttgacagtaattgattagcccatgaatctcctcgggggccgtacacacttcggccatggctgttgctttggctaatagacgcgggaggtcttgacttccattcaaggtcaaggcgaacctatctgtaacgacctgcctcgtcgctacggtatccacactctaatattcgataatttcaatttttataaaaagaactcccttaattttttgattatgaaaatagaagtgattgtgtcacaacatatattcatccaacaacacaccattacttaagtgaatatgcataattacatagaaacaatgattcagtacatgtcatacacataacgaanantaaatatgttcatatatatat

SEQ ID NO: 133589 - DNA, 473 bp, Glycine max
  unsure (1)..(473): unsure at all n locations
tactaagctnttatgatgctntatctcctttntctttggttcaacgtatctttaattnttttagcttctttattattgattaactgtctttccctctatattagttatgtgttcttcaacccaattgatataaatcatgtcaagataccaatgttatcaaaacacaataagccaagagaaattattaggtagttcaatgtctattagacacatttaagttttaaatttaagaaaaaataattaatagtattttatactttattacgtgtcatatagagattggttaagatcataaattaaatagtggtctatgaccatctaataatttctcaaaaaccaggggcaaaatgttcatcctgaaaatttgccattgtggaaagtaatggaagaaagacagagaatcgatggaagtaggcagcgattatgtgcaagtctacctcgaatttattctaaaagactatctttgtcctctc

SEQ ID NO: 133590 - DNA, 461 bp, Glycine max
  unsure (1)..(461): unsure at all n locations
atcctcttagtcacctgcggcatgcaagcttgcagagtctaatggataccaatctctttcttacatgatcaatcgctttcttcccgatgccactgctttggctgcatcatctgctttgcatttttctactaacttagaagagaaagattgtgatacttgtagctatccagggtgttacacaaggcattcatatgcttcttctccaaagggttgtggcttggaactactcttcccgtggcgtatgaagcataaactttgttctatagagagccctgtgttgccatgttctactaatctgcacaagcataagcgcaactccaaacagaagatacaccgttcttcaacaacctacattccttgtacaaacatgaaagatattngatgggtgagaaatgctagaaacatactctctgtcacacccttttaaacaccatctctcttggtggttgaaattattaaaa

SEQ ID NO: 133591 - DNA, 457 bp, Glycine max
  unsure (1)..(457): unsure at all n locations
tatgattccatttcctgggaattcttggattggatgcttaagttcattggcttcccagcccagttntgtacttggatcatggaatgtgtttcttccacttcctttagtgtggcagtcaatggattcatttatggtcacttcaaagggcagcggtgtcttagacaaggggatcctctctccccttatctatttgtgctctatttggagtacttttccagagatatgagtagcctcaaggatgatgccaattttaaatttcatcccaactgtgcaagtattcagctatctcatttggcttttgcagatgatattatgcttctatctagaggagatatccctcttgtgtcaactatgtttgccaagcttcaacacttctgtagggtttcaaggctttccatcagctctgataaatctgccatatactcagccggtattacgcctcatgagctctctcata

SEQ ID NO: 133592 - DNA, 395 bp, Glycine max
tatgcatgtgaattaggaagcatcaacaagaatcaagccaaggctattgtgcaagcaatcaatggggcaaaacacaccaaaagattatgatgatggatggctcaaattctcacaaaggtaaacttatcactttcaaattgagctttcaaaactatcatgacatgtagaggaaaaacaaggatttcaaatcacaaaatgtccagagacttttattttcagaataattacccattacttaaacatatcccataattcatagacaaacatgctaatttaacacaacataactaacaaaattaaactagaccccaacaaaactaataaaattaaactaatttaacacaactaacaaaactaataccaaagaacactcccgcccatacttaaacaacaca

SEQ ID NO: 133593 - DNA, 466 bp, Glycine max
  unsure (1)..(466): unsure at all n locations
ntntgagtgaattctcttctaaatattggtcactttcatctccactgtgcttgctttctatgagctagcctatagctnttagtgcctgattcaatttgtagggagaaatgttgcaagatattatgtctctatatgtatatattgggttaaatatgatgtttgtattctgagtgtcatgttttacttcctaatcccaaaaagaaaaaattaatgcattgaaaattctgctgttgatgtttttaggaagcaatagatctgaagaacaaagtagatatgataaaaaagttaatggagaacggttactgagtgaaggtaatttcgttctattggttggttttgaactacaatttttcatctatattgtctctacagtgtctcgggagcaatcttgttagtaattgtgtttccactatgttctatcccgagacaatattgtcgtttctctaaagatgtttgattcgtttct

SEQ ID NO: 133594 - DNA, 383 bp, Glycine max
  unsure (1)..(383): unsure at all n locations
aaggggaaaccaaaaaaccatatccggaatttaaaaacagaagtaaatgatcgtaattattntctaaacatgtaaatattatacgtcacttaacatgtgtggctggaaaattcaacccgagtgataaacatgtttatcattaattggtgtaataatctgagagaataaaatgctctaacccaattattttttaccatccaaaatagtaattagaagggaattttatggtggataagcgtgttacctagacattcacttgtgtgaaaataatcggatgaatgtgcaacggattacgaatgagaacagagacgtattcacatcttcaatattgctactgaatgctggttgctgcatgtgcatgtactgaatgtagctaatgaatg

SEQ ID NO: 133595 - DNA, 443 bp, Glycine max
cctcatgcatgcagctgaaccaccacctctactttacctccttcagctgcagtaacagccccaccaaacgcaccaaccacttcaccacccgcttctcctccaccaaatactaaccgcagttcagaaggttctcgagatcctcatcaaccaactctgtggtcgcatcaggacttaatatctcacatgaaccgaaccttctgcatatttttggctgctacatcatcaaagttgcatggtgacatggatcactactcacgtgaccgactttgttgctttcgttcgatcgatgtagcagcttctttgttttttttttttttggatcggatcttgagagatgattgccttgatgtttattctgtgtttcggcttatacgcactgtcttgttaattcggttactgcaccgatgttactgttgaactgtttttcccctgaatctgggtta

SEQ ID NO: 133596 - DNA, 436 bp, Glycine max
  unsure (1)..(436): unsure at all n locations
agcttgccgctggagctgaccattaactgtcctaactcctttagattggtggtccttaggctcttgaccttgacttgatagaacctcattntaagtgaaggcatttgacatgatccaatgttttacggttgaacaaaaatcggtgcgaatcataactccgacatctatcctgtgtggaatggatgaatgcatgaagaaatgcatatgacacagatgcaatttatgaatatgggagcccgagaaattgtctccttcttagatacaacgtcttggggtagcaaagtgtccgacgtatgtatttaagaaggtggcatggaccctccgttggtttgacaaagagaggggaccgaaacagaatccgtgcgtgatgcatatgcgaaaggcgcaacacgggagtgtatagtatgacaatattcacaaaatataagcaaaaggg

SEQ ID NO: 133597 - DNA, 484 bp, Glycine max
  unsure (1)..(484): unsure at all n locations
gacactataaaactacgcttatcaagcattcattagtccaacacacactcaacaaattgtcatcatccatccataattccaatcaatcatgcatagtatgatgcatgcacttaaccttaactctcaaatgcaatatggtaccattcatcaaggaaatagcctaagtgtgtccacacgacactctcacttaggaaaactagccaataagtgtcgaggtcaccctgtcgtgaaaaggcaactcccccccccccggtgattagcttgagtctcaagggagttccaaaccgagtgatatgcccccaagtacaagtattcctcctcatgagaaactacaagtacttactacttattgacaaagtttatactatttccatgcaatatgaagtatgaaacatgggatccatcaatgcactggctcttanaactatntaaccattctatttcccccactagggatatccaacaaggtcactgcacccccatg

SEQ ID NO: 133598 - DNA, 428 bp, Glycine max
agcttctaaggaagtttctcaagaaagcttcctaagctataaatagaagcatgtgtaacactggctgtaactttgatgaataagagtcttgtgagacacactccagagttcaacttctctccctcttttcctccttcaatgtcgtgctcccccctccccctctctctttgttttcctccattgaagcttgctctctaagcttcttatccaaggcactctctgggtggtgaagctccttcttccatggcttattccctagtggatggcgcctcctctcatctcttattctttatcttccgctccatctccatggtggaaaatcaccatcgaaggacctcattgaagctcatagatccagcctgcatagaagcttcacaagcaagcttccatcaggttggctaagaacaagcttacaacaatggacaatc

SEQ ID NO: 133599 - DNA, 471 bp, Glycine max
  unsure (1)..(471): unsure at all n locations
ctcagcttgtcatcaatgtcttctctatcactntcttcatgtgcgtaagatgaaactttgagtgcaattccaatcttctttttgtcatttccttcatgttgactaagtcttgtaagttctaattcatgttcttgaagttttccaaagagaatgacaagagtcatagtggttaaatcctttgattctacaatagtcgtcacttttagttgtcattacttgtttaaacatctcaacactttgttaacaagatccttatttggaactgtctttcccaataaggcaagatgattaacaatatgagtaaacctcttttgcatgtattgaatactttcattttgattcattctaaagagttcttattcatgagtgagagttnttattctatatctcttgacatcacttgttccttcatgtgtaacttctaaggtgtcccacatttcttttcacactctgacattcgatactctaaag

SEQ ID NO: 133600 - DNA, 373 bp, Glycine max
  unsure (1)..(373): unsure at all n locations
agcttccacttgtgtattgcatcagtaagtattactttctgtttttcctcccgtggatgtagccttactcaagggtgaaccacgtaaaattatgtgtgttgttcctcatctttctctctttctttcaccttgctgcaaaactctgtgtgtatgatatagttttctgctgcatttgttgttgcggttcttgtttgttcttcatcacttccataacatctangatggttagacctctcttcaaacatgctcatgggtgagattccaaaggcattgaccagtcttcaattcctctcggtcttaaacctttgaaaaaaccatctggtggggatatcaataggtaaacagttcgacacattccataatgattcctatg

SEQ ID NO: 133601 - DNA, 435 bp, Glycine max
  unsure (1)..(435): unsure at all n locations
ggctctntcaccagtttctctacacatgaaaaaatcaattatgcatggccatattacgatcaaaatttccgacacaatcttcgctcaggaggaaaatcggaaaatcgatatgaaattcggttcaacacctgcggtgagcttcaggtttgcgaaactccccgacgaaacggaatccgcagaaggacgcgaagataatggcttccgtgttgccgaaattgaaccgtacagcgatttgaattggtcgaggcttttggagattgggaatcctagattcttctgcattgcaaagatcgaaatggaaccctagaaaatgagagtgaagtgttcgagcgtttttcttctctgtcgcgctacgcttcaagagacgaatcagttcagagtgtaattgaaacttagtcacccgccatggtgatgcagtagtatttatactatcgc

SEQ ID NO: 133602 - DNA, 468 bp, Glycine max
  unsure (1)..(468): unsure at all n locations
atccttaagtcacctgctgcatgcaagcttgagtctatagctgatgaagttatgtttgttgccactagnganggangtgcctttgtaaaatgacaaccaaatataacgtcattgggggttttgaagtcaaagaggaagagataaaggaaggaaaggaaagctctcttggagtctgcaaggttgtggaagcctacctgctggagaatcccacaagttatgcttaattattcatttgttgttgtcaagtatacagatactgtttcaagattaaattcaaacttaattcaattttgaatgatatatatagtgtgcaagcaaatataggcacaattagaatgtttgcaatgtattgaactccttaatatgtccttacccttcaagggctgctttgtggtttggcaaagtatttgtacttttgtagtaacaaagaagactctgatggaataantcctgctaattaatcattct

SEQ ID NO: 133603 - DNA, 434 bp, Glycine max
aacccaggggctcagagagtagaagatcagctttctctttgtattcaacaccctcaacgatgcctgtaataacctagatagatataaatactacacggcatggccaccggaaagatcagaccatgaacaatgaccactgaagaaaactaagaaaaaattcttactgtaattcgtcgacccagtattgggtccccagctacaagaaaccgtgcatattctgccattacagatgcttccacggcataaacatgttttgcaccagcctggacaacgaacgacagaatgataatgaaacagacgcttcttaccaaaaagaaaagacaagaaaaagagaccaagcagagatcccgagtcaccccctcgcagatcaacagaaaaccgagattcacgctactgagtagctgccttcgcagaaaaaatcctacaagacccca

SEQ ID NO: 133604 - DNA, 440 bp, Glycine max
agcttatgaaaaggtttagccaaagactgtattttcatttgtctatggtccaaggagttaattcacatataaaggaaaaggaaaatatctgaatggaaacatcattgaaacaagtttagaagtattaataagatattttcactgctagattagcaaacctaactaatgacatgattttccttttacttgcttcacgctgaacttgaagctgtatgaaaaccatgacttattagtcagtataatgctataaaacctacaataaattaaaactattatggtttataactatttgaggctttctctcagtcatgcaatcttgttgaacctaataggatgattgtgccctaatgggaaaaaaaggtgaagaaaacaaatagatgaactttgtaggaacaactattaatctatgtgaatatcaaagtaaaatactagatacactt

SEQ ID NO: 133605 - DNA, 454 bp, Glycine max
  unsure (1)..(454): unsure at all n locations
tacaaatatgttntanatccaagcccataagttaaatcttatcanatctagataagataagataagataagatctagatgaaataatatctagatgagatcaaatctaaataatatctagataagataagatttaattttatagaataaattagtctgccctcttcaagtccaagcccaattctagattcaagcccaatgctagattcaagcccaatgcttcattaattccctgaaattagattaaaaacatcaaattagctgaatgggcccaaataataaaactgcctaattaattgacaattaagaccaatcaataattaaaatggtgcacaaagggtttagaaaatagaagaaaatgatggcacatcaacaatgaagatgttgagttaggaggaggggagcttggttgtgaaccatatgcctattagaaaacaacattaattaaagtcaac

SEQ ID NO: 133606 - DNA, 291 bp, Glycine max
ggttctccttccagtttgggtttggatgatttttataactattcaaaaattaggttaaattcaaattctaaccctatataagataaaaagagcttttgattctatcccaacacgagaaaatattttgaaattagttcatgttatatataaagaacaaacactactagaatttataaatttaacatcacaggattaacatcggtttttcaaaaaaccgatgtttgtagaagcaagcttcatgatgatgaatcaagttgattcaagtagttttgatgatgacaaatattatga

SEQ ID NO: 133607 - DNA, 298 bp, Glycine max
  unsure (1)..(298): unsure at all n locations
ccccccggaaaggccccgtaaaaaaaggaaaggggtaaataaatttaccccattttcttccataacctccaaaccttgatcccaaaaccaacgagccttcctttctggcacaaactttgaccccttttgtgtatanttgcctcaaatctttngcattcctttcatctcacccaagtaaggatcatcttcagctcaaaatttaattntcttcttgttatgtttgatgatttatgctttctttttaagtagaaatgcaatgtgtatgatnggctgtttggtatttctgtttgtgaaaagt

SEQ ID NO: 133608 - DNA, 401 bp, Glycine max
  unsure (1)..(401): unsure at all n locations
tattattaccatcaacagaagaaacagtgtttatgcaagcctggaaagacatatcagatccaaacttgagaatgggaaactggtactagtcatcagattcaacatctccttgaagaatgatttattggaatcctgagatttaacaaaaccacgattagcatgaaagtcaaagaaaacatgattatctttgacaaatttgcttacactaattaggttcttagtgatttgaggaacaagaagcttgttttaagaataagtttgacattagaactgaaaggggaaacaaaattggaatgaccagaggctgagatattcagaccttgtccattaccaatgaagatctggttnggacccannaaaaggagaagtttgctagatgttctgangtattggtcacatgg

SEQ ID NO: 133609 - DNA, 353 bp, Glycine max
gctaataagcaatttgtgaaattccagatattcttctccataagactcccaccaatttgttggaatcttcttatcaatagtcattctagctaagtgactaccacaaagaccaacttgttaaaattcgaactacattttcctccccaatctcttcatgaacaccatcaagcatgttaaagacttgattggcctattaaaatacatcaatagactttaaagtgtaaaaacaccattcctttagggtttattcacctagaatttcaattttatccttctcttgtcaatacaccatcaatcattatggtgcacccaacttgcttctttcagctctatgttctttcaaaatctctatt

SEQ ID NO: 133610 - DNA, 468 bp, Glycine max
  unsure (1)..(468): unsure at all n locations
cttgaccgatccattttcactccattttcttttattntctttcatttcattccaccttttatatttggaagnttctcatgacattaaaaagttaaaattatccgttgttgggaggtctgcaaaccaaactctctttgatgtaatgattctaaattatctattaatatgatgttgatattattgctctttcctatgctaattcacatgtttgtggtttgatcatccattttcatgtacttttgtaagatttaaacattgaaaatgtttatatgctaagaacttgggaaaaacatttaagtgattcatgtctaggaaaagagtgatattgtctaacctgtctatgcatctttgnttataatgtaaattatttaatataactcttaaggaattaggagtgatattaggttattagactctctcacttgatggatcatgattagagtatattagaagatatgagtaataatc

SEQ ID NO: 133611 - DNA, 368 bp, Glycine max
  unsure (1)..(368): unsure at all n locations
atccttaagcaccgcggctgcagctgatttgtgagttgatttagcctttggtgctctntggttattagncaatggatccaaggaaacttccaaagaaaaacgttcgattgattgttttgattattttattcaaagatattttgattatgttattattatttttcaagatattttgattattttattattattttgctttttttttgtttaaccgatgttacaacgtgaacgatcggttagatttggttttaacagtgattaaacgagattacaacacaaatgatcggttgaaattcattttatcacttattaggtgagaaaacggcttaaacgatcggttaaagctcgttgaaaacggaagaaaagaa

SEQ ID NO: 133612 - DNA, 478 bp, Glycine max
  unsure (1)..(478): unsure at all n locations
tactaagcttaagagccaagcgagccttcttgaacatcctcatcttctcattatctaccatttccatctttcttatagcctcctgcaccacttcagcaattctattgcatgcgtcctgcggagcaatcaacgttccactttctccattttccaggcattttgcagagtccacctcaagctcttcaattaggataatgtattggttagaacaagagaaaagttaaacttacaatcatgcatcaaccccccaaacaacagcctttgccttaaaaagcaaaagtaagaaacaaagagaagtgttaacaacacacacttcactattggttagaatttatagaanattacaaaatcaaaagagagaattattaaataacaagtgggacctacaaaaatatgtgatttccaataaattntagtcaatcaaagagaatgttcaataaagagaacatatcaagctgtagtctaaaagcactgatca

SEQ ID NO: 133613 - DNA, 414 bp, Glycine max
  unsure (1)..(414): unsure at all n locations
cacctgcggcatgcaagcttcctctgaataagggcgcccgttaatttgtggcggtcctctagaacaagcctcccaaatgatgttcctgatgcaggagcagacaaggatctttcaagatttctaggagacaaatccttgtggaacaatacattgtcatctaatttgtgtctataggaacctgtttgtaattcttttttctctttcaaaattctccactggctcttgtcatttgcacactgtgtagtatcctgctntagtctaactctatcattgtaacatgccacttcatgaatgtccaaatgcagttcaccatttacaatatttcttagcctctctgacaagaatcttctggtatctatgttgaanagttctggagaaactggtccattgaactgcaatttacttttatatgat

SEQ ID NO: 133614 - DNA, 444 bp, Glycine max
tagagaggaagtttcaatggaggaagagaatgagagagatatttatatatagtggcatacaaaattgaaggaagaaaaggagagaagttaaactttgaagtgtgtctcacaagtttctcatttatcaaagttatgacaagtgttacacataattctatttacagcctagtacataggaagcttccctgagaagcaaggaatgtagcttccttgggaagctataggaagaaaacttccttgagaagctagagggaggctactcacacccttccaatagctaatctcacccccattccaaaatacatgaaaatacaaaaatttcttactacgaagactacttaaaatgccctgaaatacaacactaaaaccctaaactactagggtacccttaacttgtacccttaatttgtaggtaccctacaaacctataatggccaaaataaa

SEQ ID NO: 133615 - DNA, 300 bp, Glycine max
atggcttattcctagtggatggcgcctcttctcacctcttctcctttgtcttccgctgcatctccatggtggaaaatcaccattaaaggacctcattgaagctcaaagatccaacctccatagaagccccccaagcaagcttccatcaagtgttaatcagagcacaagagcttcaagtaggtgctccttaaacctccattaattttttgctttaccttctcttccatttttgtttcttcattgttttctccatgtatctccccacatgtcttgtgataaatgctttgaacattattcttt

SEQ ID NO: 133616 - DNA, 438 bp, Glycine max
  unsure (1)..(438): unsure at all n locations
cgaaggtaaactagacgccttggtaacctggtacctatctgttcatgaatgacaaatatgtacctgtcacaagactctgtggtttatgctcctctgccgaccaccatacaaacctttccctttctgtgcagcaatctggagcaattgaatagcctaaagcttatgctgcaaacatctacaatagacctcctcaacctcagcagcaaaatcaaccacagtagaataattatgacctctccagcaacagatacaatcccagatggaggaatcacctgttagacaaatggcctaagttatcttaagaagggggggttgaattaagataacaagaactattccccaattaaaattttactctctctttttagattaacaatgcacccttaacatgaattactcaagagacaattcaaataaacttctttcagccanagataa

SEQ ID NO: 133617 - DNA, 382 bp, Glycine max
tagcaactatttctataacgacctcgcccggcgctattgttatatttaatttcgcccggggattattacttgatgacatgccacctttggttagccgctttgagatacttggcggtctttggtgcacaataagtgaagttccgtaatgtggcggaaatcgaaaacaggagtttttgtgcaatctgtgagtttctgtaacttcttcgaaagctaaaaaagagtaaatacataatcccgtaggattcgtaaccttgcgaaaggaaaataagtatcgttacgaaattcgtaaagttcgaacgttacggaaaaagaataccaaaaaaagtagaagggggtgcatttagtaaaaagggggtacaaatagcaatcaggcccacttgga

SEQ ID NO: 133618 - DNA, 416 bp, Glycine max
  unsure (1)..(416): unsure at all n locations
atgcttctctatattgagcgccagttttgatctctatatggaaatacattctacccaatatgaaagcacagagtaagaacttgtaactngtgtaaaaagtttgtctgaaattctccacgctggatcatctccagtactatttcaccgagtgacaggcactgtaatgttggatgtaggctaccaatagaaaccgataaccaagcaaaagcaggttagggaggttgtaaaagagatgaacctgcaggctaactagctattaataaggtggaagggattttgatacggtatgtgcctaaacaaatatatttatttgcagtttaaaaatttagatgaaaaacgcgataaaggagaccttaagggaggtagtagtggttccaacggagaagaaaatgatgaaaaattcgatcctttatatg

SEQ ID NO: 133619 - DNA, 443 bp, Glycine max
  unsure (1)..(443): unsure at all n locations
ggaccttaaatctcagcttacaagcagcgcttcaaacagcgaagatttaatttgagaatgcagagaggcaaatataaagaagaaaagaaatgggaaaatagagtacttgctgaagaacaggagctctcctcattcttagttcgtctcacaacanaggtaagatccttaatatccttatcggttacttgcgcccagtgttttaatttatccattgctgaaatgaatgcctgtaaataaatatatctgcatgataccaatatgtctgttcctaactctttttttttttttaattatcaatttgatacccaaaatatattaaaagatcttggcttgtgggtgctgtttggatgggttaaggtggtgatgatggagttggagcagcgacgttgggggccagagtggtggcgtagctgagtagtggttgtgccttgtttctattgggt

SEQ ID NO: 133620 - DNA, 442 bp, Glycine max
  unsure (1)..(442): unsure at all n locations
agcttgttcttaatttttcctaagttttgttgcttcttanaacaataaacttggccttctcttaattgtctntgggctgggcgaccacgatcaacaaagtactgtcgacacctactatatgttgactagaccaatgctgttataggaatgctgcgacaatctttcaacaccttattcacacattctgataggttggttgtcatgtgaccatatcgtcgtctagatgtatcgtaagccatgctccatttttcctttgaaatgcgatcaatccatcttgctatggctggactcaatagacgaaattgttctaagttctgatcaaacacatgcttgcaaggagtgtacgctgcatcaaatgtgttatcatcaatagttatacgtagacatgaaactcatagtaaattaatgtataaaataaaccttacccaatttcttgaacatc

SEQ ID NO: 133621 - DNA, 473 bp, Glycine max
  unsure (1)..(473): unsure at all n locations
gacanctatagaaactcaagctggcatgagtgtatntctttggtagagaagcttactttattttataaacaggatcgagaacaaaacaacacacaagatgcttagcattcgacaaaagtaagatcgagtggtttgtgaaatacaaaagagtacatattaacatgggagcagtgtgggataatgacaattttctccacagaaaatggtagatacataatgggaggggattagcaagctggttctgaatgccaagatacacataataagaaccaagctggccccaagaaacataatagaattaccctgcactaattacttaaattaaaccactaccatgctttcctaattacacaaagctattggtatattggcttcaattacagttcccctaccctcaaaagagacaacactaactgaggcanacgatcgatcttaaggctaggggcaagagcanacatacccaaagaaccaca

SEQ ID NO: 133622 - DNA, 420 bp, Glycine max
  unsure (1)..(420): unsure at all n locations
agctnttcacaaagcttacagtaaaatctgttacctagccatggtagaagtctccacagaggccattgcatccctcgcccattattatgatcagccgttgaggtgcttcacctttggggacttccagctatcacgtatggtagaagaatttgaggagatcctaggatgccctccaaggggaaggaaaccatacctcatctcagggttctatccctcattagctagaatttccaagatagtccaaatctcggcgcaggaattagaccacaggaagcaagtcgaaaattgtgtgtttggaataccgagaaaatgtttggaggcaaaagcaagaatcttggcaagtaatggcaaatgggccctgttcatagacattctcacactattgatctttggaggagtcctctttccaaatgtggatgg

SEQ ID NO: 133623 - DNA, 436 bp, Glycine max
  unsure (1)..(436): unsure at all n locations
tatgcatggcgtctgtcatttccctggcgtagggttcatatgtatatgttgntgtcgnttgtcatgaccttgtagcaagaagaaatgaaagaaactatacaggttcttgaaaaagaaatttcaaggacaagaaatatttaaaggattttcaattgacaaattaagtcgaatgactcttcttgacaactcacttttctctcaaaaagaaaacttttaagaatgataaaatgaggtcacatgaatgcttgtacttatttttgatttgaaacacagtcaatcaaacattcttttactctgtcgttacggtaacctcaccaaacgtgtagaacgagcaatttctgattgaacagacttggagaacaactcangagtgcaagtcacttgagcaaacaagccaatgacatacattcacattccaatgaatattaaataaata

SEQ ID NO: 133624 - DNA, 426 bp, Glycine max
  unsure (1)..(426): unsure at all n locations
agcttgtgactctnggcaatttctttattttcttgttacttaaaagttatgacttttgaaaaaatcttcagaaacaagtcacttgaagaattgtgacttttggaaatgtatttttcgaaatcagtcactactaatcgattaccattaaggtgtaatcgattacacatcaacaaatgtgactcttcattgtgaattgtgaaaattaaaatgtttagaagctttggtaattgattacaagtattgtgtaatcgattacacaagtttaaaatactttaaaactgtttaaacataagttataattcttgaaatttgaaatcttaatgttttaaaacactggtaactgattactaccttctggtaatcaattaccagagagtaaaactcttaaatatgatgttgtgaaaacttcttgtgctactcaatatt

SEQ ID NO: 133625 - DNA, 462 bp, Glycine max
  unsure (1)..(462): unsure at all n locations
tgagaatggcataggagatcatggngaagttgtttcttattacttncattaatcggggcttcatggttgttaattgaaaatgatgtacaatgacaactaattctcagtcattgtgccttatctggcttcagccattcatggtttgcaacaagagatatgtaaagtttgtgagccaataaatgcaactagtaggattcgggtcggacccacttgtcacttaaattaatcttacacgtttcgttcttgggcacctcaaacttcgttgggatttcaattcaatcatgaataatgtatggtcttgagcttctntattgcggaaaattaaacgtaatgcgcaaccaaaatatctgataaaaaggttgaagcatgtggtctagtcttaattggaatttcacgttcaattctcaatatattattttatcctcctattaaaatgtttaaaattcatcataanaataaaat

SEQ ID NO: 133626 - DNA, 429 bp, Glycine max
  unsure (1)..(429): unsure at all n locations
agctntgagccaaaatcctgactcatctttttccttgnacccaggtgagaatgtcaatccttaccctcggaagcaaaaagaaaagaaggaaaattcccaatcaaagagtgggagaaagcaaaaagaaaagaaagaaaattcccaatcaaagagtgggagagaaaaaaaaaaagaagaagaaagggaagaaagttcccgatcaaagaaaacaaaagaaatatgcagaaaggtctttggaccggacaatatctgaacaatacagaattgtcaccaaatgaacataatgaagcaaaggaaaccacgacctataatggtcttccccctttaattgccaaccaaaatcttgtgcgctagcgactgtnttgccccgcactatacaaagacagaataggaaaaagccatcaaaaaaatcataggccaataacacac

SEQ ID NO: 133627 - DNA, 460 bp, Glycine max
  unsure (1)..(460): unsure at all n locations
tccaaccagataactcttcattcatctgtgcttgagccttcttatcgagctcctcataacgggtcagatcccttctaactgtcctcaggaagatcacaagaacaataccagcaagaaaagtgatcaccatgagcgaattaaggatagagaaccaatgcactttagctccctccatctttaagtaagcatcccatctagacggccacttgatgtcactctcctcaaaggtgatctcataagtgaaaacaacaggctggccctccttgataggcattgccacagtggccggatcacatcggatagatgacgggtacttgtcatacatcttcaagtnttttgcagaatcagcattatgcataatactacaaggaatcacctcanacccaacaaccatgtatccaggcttctcagaagacccctccttgccaaccgggatcacttctgcaccctctccagtccc

SEQ ID NO: 133628 - DNA, 405 bp, Glycine max
tggttgaaccgaaaaatctggtgttggtggatgaattggattgatcgattgcatgaattgagtgaaatgcgatgattatatcatatgctctgaataagtatgcagtaattagaagagaaagaacatgaattatgggcatgactaaaaatgttagttggtttgacaaataaattgtgaaggttatcattagccacaactcggtgagttgtgtgatctttaattgtgagagaacgactagcattgagtactgatttttgcatgaatctctaattattgaatgaatgcatgagtttgaagatgatgaatgccatgattgactgagatagctacttaaccataaagcttaccttgtatatgaatgaatgatcccttgcacccatgctgagctgaaaattgaatgattga

SEQ ID NO: 133629 - DNA, 468 bp, Glycine max
  unsure (1)..(468): unsure at all n locations
ttgagaaacatgtaaccctatggcatcatcaaaacattctactttattctttgtctacaanctcctcctgtttgatgatgacaatccctgatatcaagacaagctatatacaagatgatagcacgttcacacaacccttactccccctatcttttggcatgtatgcctaactntacttaatgataaatttctaatggatttctaacccaagttctcttccaaggtctctccccctttggcaacataaaaaagaactaagcaacacaattaaaatccaaacagagccaaacaatcaaccaaaatagatccatacattgtcataaccaatccaaaacaaagtcgagagatataataatacttaataatagtgcaagattacgataactagagcaacaaatagccaaatacacggcgataaaccaaagtactaataatacttaatcactaataatacttagtcataatact

SEQ ID NO: 133630 - DNA, 346 bp, Glycine max
atctttctgtcacaatgggaaatatgactatctttcttcaaaaatgtaaaaagacatgtcaatccataaaatgatttatgtttgattctagagagatacaaattaataaaaagtgtttactaagaggtgataatgcgtggagaacatagaattttgtacatatattgtacatattgcataaaattactttaggaggttaaacaatgataacataaaacatctaattatcaatatggttgattgttaaattaatttttttttttaaaaaagcaaaactaatgtaccatgcaatatggaacaaacttatgtacattaaataattacacaaatattaattctatttaaa

SEQ ID NO: 133631 - DNA, 398 bp, Glycine max
taaaataaacagttccatcactatgcttttttttgtttcaataatcagcatgagggctgatgtccaaattctcctactattattgctttttttaaactgcaaaaaatatattattaatcaatataagaaggcctaagattatcacaaaatgtcgctaattgagttttttttggtataaaaaaatttatgaggggatcacatctcacaaaaaatccttaaaaagatatttacatttatctcatttcaaagaaataagtgagagtttaaacttaccatatgttagatacaagacattgtcttattccacttgctcaactccttgggattaaagtaagtaatctcatgctaaaggttagttttcataataattataatttgatactattatactttaaata

SEQ ID NO: 133632 - DNA, 412 bp, Glycine max
  unsure (1)..(412): unsure at all n locations
agcttgagatgaggaagtgttgaagggtgtttcttcctgcttttattggggaccacagagtggtacctggagatatgtcgcggcggtcaggagaccttggggacgtcaggtggggtgctattgcccaaaaccaagcttgaccaatcccgacccaacccgggcatattcggtcagtgagaacctgtgatgtacctaaacaggcgagctcctgacagtcatcagataaaaggaaaacaagaccacatagcaaggatgcttgtggtggctggccagctgtgaatnttgtgtaatatgtggattgtggcctctggtaatcgattaccaagggtgggtaatcgaatacaatgcttaaaattgaggacaggacgctaagatggtctctggtaatcgattaccaatgggtgttatcgat

SEQ ID NO: 133633 - DNA, 450 bp, Glycine max
  unsure (1)..(450): unsure at all n locations
actcagctataagtctttgatcaatatgcatcctaactgtatgctctgatatgaagngcaaggttggaccgatgtaattgtaattattgattaacttaaacacttgagctcgagtgaaacagtgacattgcactggttaggcatccctccttgaaatctgtctgctgaatagtttcattcagttgtggtgcttaataaaaatgctcttgtctctaaaaagctgcatgtcttatgaaaaaccattgattgagtcattgtatagatgtctcatcatatggttaatgtgttggaagcaaacaccctttgtaaataatcactgcattatttttgcacttgaggacaagtgagttgttctttatttgcttaacgacaagcaaaattgtcattctggggagttgttagtcgtttatagactaactttgataaaactctgatattattagattcctc

SEQ ID NO: 133634 - DNA, 376 bp, Glycine max
  unsure (1)..(376): unsure at all n locations
agctntaacctcatcgactctcacagtctttttatttgggagccaatccaatccttgtgttcggactctcagccacttatgatagctgccgatgatcccattactggttcccctaagctctctgtcctttcttcacaccgcatcacatgccctgtgaaccccctagaataccctcgcattggggttactgaaaccccgtgcgatgaaaggcgtgatgcttttgtctgatggcactcctctcatggggtaaccaagctgtcttatggcgaggaccggattattattaatacaaccccttgttgcatcaacggaacatttggacatcctttgcatgaagatagaatcctgattcttccttccttctagcgagggaaaa

SEQ ID NO: 133635 - DNA, 469 bp, Glycine max
  unsure (1)..(469): unsure at all n locations
tgaatgcttcttatggnggtaacctgcattgacaatcctctatttattccattaaaatcattgaagacatgttctccaaccgctataacatttatggggatagaacaatcatgaagaggggcatccaccaaatagagaaagatgaatctctccctgagttaagaaaatagatgcaagcttagacattgaagattgtgacactcatgagagcccaagctcaaatgcccatcaatacacctcatttcccaacctgtgagaaatgcgggattgtatataggttgggagaatgcattatgggtaatgaattatttgcaaccatggatgagatcaactttgttggagaaagcaataattcatataatcgataccctaaaaattacaatcaaggacaaggctctaggcataatcaaaatcaagggatgtataggcctccacccatgcataataagaggcatagacatgaggagag

SEQ ID NO: 133636 - DNA, 318 bp, Glycine max
  unsure (1)..(318): unsure at all n locations
cgtgctgtttttcaccttctcgtttttccaatctaccggcttatcgagcgtccgttgatgtgccatcattttcttctattttctaaaccctgtgtgcaccatnttaattattgattgggcntaatcgtcaattaattaggcaatgttattatgtgggctcatttagctaatgtgatgtgtttactctaatgtcaggaattaatgaaacattgggcttaatccggattttggttgtggacttgaagagggcaaataaagcagcgcttaccttagttaatttctaattaggaaatttcgcaattttattttatgttgttc

SEQ ID NO: 133637 - DNA, 336 bp, Glycine max
  unsure (1)..(336): unsure at all n locations
acacgcagagatcgattctgtgccctttatcatttatgatcaacaagctgagtgggtcaacgcgctgtgatagaatctgcaccctgtatcattcacgagcctcgagatgagagggtcaacggcgcagagacatgattactgatctctttatgactcaatagcagcgaagcacttgattgacccctcaatactgtctctgcaccatttgtctttaaaatgatacaatgtggttgcttgacgcgcagagacaaattcagcgcccttttgcattcanaaacagcttgtttgtatgtgggcggcgacaaattatggtcattccgcacaccttttcaccat

SEQ ID NO: 133638 - DNA, 309 bp, Glycine max
  unsure (1)..(309): unsure at all n locations
atagtggatgcacaaacaacatggcaagggattcaagtttcttcacctctntagacaaagctattaaaaccagagtcaagcttgaaaatggagaaattgttcaagttgaaggaagaggtattgtttccattcaactagcaaaggtcctaaatttattcatgatgttttgttgattaaatatttgaataagaatttgctatgtgttgcttagttagtgagaggaaattctctctcattntaaaagtaatggttgtatcatattggattcaaatgattctaaagttattaaggtcaaaatgtatgataata

SEQ ID NO: 133639 - DNA, 452 bp, Glycine max
  unsure (1)..(452): unsure at all n locations
tcaagaaaaagatggccttagcaaactccttatttccagtanggaattctatcaatagacctccaatctttaatggagagggttaccactactggaaaacccgaatgcaaatttttatcgaggcaatagatctaaatatctgggaagccataaaaatagggccttatatacccaccacagtataaagagtttcaatagatggtagttcatcaagtgaaagcataaccatagaaaaacctagagatagatggtctgaagaggatagaaaacgagtacaatacaacttaaaagccaaaaacataataacatctgctctaggaatggatgaatatttcagggtttcaaattgcaaaagtgctaaggaaatatgggacactctttcaataacacatgaaggaactacagatngtaaaagatctangataaatgcactaactcatgangtatgaata

SEQ ID NO: 133640 - DNA, 325 bp, Glycine max
tctcaacattaaacgtcactggggtcacttcaaattcttgagcattatgagacacttccatacccaaataaaaactaatatcttcaaatcactccaattgccgacgagatgtaaatccccaagcaatgtagcagtaccaatggtgatcgatagtgatgtgcatggcatctggtctactataccaacaccatgtgcatcagattgtgtcacgtgtaaacaaatgtgtgtgtctcccaacatggccaccctctttttgtctgcctactacgccaaactcacaaggtgcgtgactccctcgccatctcctaaccctaaaaagtgaggg

SEQ ID NO: 133641 - DNA, 449 bp, Glycine max
  unsure (1)..(449): unsure at all n locations
ntatatctcttagagccattatgctcctcattcacccgattaacccattngttgtgaaatgccttctttcccataggtaacatatctagntcccatgtttgttaaaaatcaaacatttcatcttgtatttcatggcaagctctacttgctggaatcttcgatatgacatgcttcctcgtagcttttcaggctccctttcattagtcaacaatatataatttaggtatttcctgtttggcatgtgaggttgagaagaccttctcaatacaagacctggagtagaaggttttggcctgtcaagttgntgatcactacaatgttcaattgattcctttggctaaggactctcaattataagagtttctggaacatcatgcacctctacatatacttgcacactttgntctgngttactagtatgtgtgtggttcctatccttgacatcacta

SEQ ID NO: 133642 - DNA, 384 bp, Glycine max
agcttatccaaaaatcctcttgcaacttctttctttcccctgtgtcaacttccaatccatcacttaagcggaggtctatatcatccatcacaaaagtgcccgatgaggctccaagtttatgagtagtcctaacagggagatcctatcaggggttttattgagttgttcaattaccttgaactcactctgctggatgatgcgtaagaactcagttgcttcatcaacggatattccttttttgctaaagtcctattcttccttaaaaattggctcgccttgcttccctcttccacactcacctttgccttgcactttatgtctatagctcgcaccgggagctcgggtgccgcatagattcccccgctacgagttacgccgctcgtg

SEQ ID NO: 133643 - DNA, 466 bp, Glycine max
  unsure (1)..(466): unsure at all n locations
ttcataagtgaaatcaggtgcaaccatctccctattagttctctcacgaggtggaggtagagccatgttctcaatatgtaaattagtagtcgaatgctcaaaatcagaatattcagaatcaccagcaacagaatgctcaaaatgcacagaatgatcgggatgcacaatatgcctaaataatctatgaaaggttctatctatttcagtatcaaagggttgtaaatcacctggattgcccctagtcatgcactatatgcaacaaatcatctgtttctcaaacaagccctaggggagggttaaaactacaactatagtcaaatgatatccaaataagctaaaattttgtgagcaaaaccctaaaatcattaaaagatagcacanaaaatttcaaacaataatacaaagtctaactatataaactacctaagcaaagtatagaaaaatatgacaatatatacttgaaaaa

SEQ ID NO: 133644 - DNA, 439 bp, Glycine max
gatcctcttagtcacctgctgcatgcaagcttacttgtatgtcttgaacaacagtattgttattttgccatacatatttaagcatgaagctttattcaaacagaataatccgaaaatgtcaaagaattgggtgttgaaaaagcataacaagactttctgtgattggtttaaagatacaatctttgcagatgagaatgcttcagaaacattaagaaagctagcagatgggcctaaaagaaatgttataacctggcaaggatacgacataaacatatattcattgtacacataagcacaagatgacatatgttcaatgcagaacatcatggtcaccctaagggctgaatctcaacactgtgcaagtgtcaatgacgccaatccctgtgtagcttccatcccttactttgggttcattgatgaaatttgggagcctaattat

SEQ ID NO: 133645 - DNA, 444 bp, Glycine max
  unsure (1)..(444): unsure at all n locations
tataaaactaagctttaatannttttgtccatgcaaatattataggctatttctctgtccccactaaacaaatttatggatgcacattgcacagtgggtgcacaaaaatgtaatgttgtcattggtatatgatgtatgcacaattggtgcatagggtgcacaattgatgcacaggtatatgagtagacatgtaagttgagagtgtctgggtggccctcaacctagtgctggaggtttcgtggtgactaaatgaaattgacctaaagaataaacgagtgatcaagatccttttaaacatacgattttgaaaaccatagaggtaagacactacccatacttgtctacaaacctcactccctatgtaggggcagcccaaaagactcattgaatggtcagagagagactatgttaaggggtgaagctcatgtgggatcactcatatta

SEQ ID NO: 133646 - DNA, 317 bp, Glycine max
  unsure (1)..(317): unsure at all n locations
agcttgaaattgaacaacggaagctctctgttatattcaaatcgncatcactgggcacacggaagtccgatccatgcgcataatatatggagacggtcgaagttgaacaacgaaagctaccgagatattcaaatggtcataactattcacacggaagtccgattcatgcgcataatatatggagacgaacgaaattgaacaacggacgctctcgagaatttcatatggtcataacttttcatacggaagtccgattaaggcgcataatatatcgagaagcttgaaactgaactacagaagctgttgataaactcaaa

SEQ ID NO: 133647 - DNA, 314 bp, Glycine max
  unsure (1)..(314): unsure at all n locations
ntagatngaacaacggaagcaagcgagatactcatatggttataactcaccacacagacgtccgattcaggcgcctaatatatcgacacactcgaaattgaacaatgtatggtctcgagaaatgcaaaaggtcataactggtcacacggacgcccgattcacgcacacaatataccgagaccctagaaatcgaacataggaagctctcgagaaactacaacggggataacatttcttacagaagaccgatatctgacgcatcacttatcgagatgctctaaattgataccggaagctctccagaaattcgaagg

SEQ ID NO: 133648 - DNA, 407 bp, Glycine max
  unsure (1)..(407): unsure at all n locations
agcttgtatgggatgccaattagcattcttttcattgtaataattgntgggaatgctcagtactaagcgttttgactttttgaatagtggaaagtgtgagctcctccgtaatgccatcaaaggtttcttgactttcttcataaaaaaggggaagtgtaactaaagaaaaaacatttttcacatttcgagatggaatgactaaagctagctaaaattttagtcctttttatttttctaaattggagagcatagtaagaaaaacttagaggggcattggataaaattatgtgttcaattttaaaatatcatctaaatagtcatggatgaatcctctttactggaattaatgcttgttattcatcctctttagtggaattgtggaattatgattccgttgaatctaaaac

SEQ ID NO: 133649 - DNA, 404 bp, Glycine max
  unsure (1)..(404): unsure at all n locations
tgtggtggaggaggcaccattggagctaaactatcattttatctntgagcatgtcctacattaacatcaccagctccttgttggtctacctgtctgaaactgccaggccaaaagaatccaacatcatcatctttcatgaaaaccagtgatccaaattggtttctctcaaattttgcagcagctctcatatcaggagccctcagtgctgtcacggaggatggcacgtgtcttcggtgcattgcagaatgagcttcaaggccaagagacctgaaaggtgaaccatgaagaggtagagatgccaagctngtaaacctctcagtgaacatccccattcgcattgcgcgcttagccatcgtcctctcccttatgtgtgcattttgatgacccactaatgcctgagagct

SEQ ID NO: 133650 - DNA, 436 bp, Glycine max
agcttgagcacaatggttttatcaatatctttgatcacactaccctcatagcgatccaaaagaaagccaaaaatcaaaacaaaactgaggaatcccactaagatgagaaagaaactcgagccagcacccactccaacccccactgtgggccccacataaaccccaccaaactcgaagtcctcagcactaagtaactccatgaagacattgtatgtcaatcagagaaagttctcattcgtcccaagtttgattgaagacctatacaagccaatggtgagcgtttgtacaatggtgaggtgagaagcagtgagagagagtgttgggctacaatggcttacttgtctgtgacgtgggctaacagcggatgtgcaatggaggcacgacagtcgcggaggcacagcgggttcccttatcaagttgcaaaggggagtgacac

SEQ ID NO: 133651 - DNA, 449 bp, Glycine max
  unsure (1)..(449): unsure at all n locations
ttagtgtntagtgtcaagtcttagggtttactgtgtatgttctaatccttacggtttaggatttagggtgtaggggttatggtttagaatttaaaggtaatggtttatggtcaagtcttagcgtttagggtttacgttttacggtttagggttgaaataaaattactccagactcatatgcatctaatgaaataaaattacatttagaagttgaaataaatggagtggatcaagccaggttgagtgactttagttatccataagtaaaccttaataaactgaataccatacattacgtgtgaaattcaaatgagaaatatacaacaaaatatttaaacggagacatgcaaatcattcattttggtgtttgtgaggatgtgccacatggtcgatcccatcttcattctttgcgatcatgatttcttctgcccgatgcctcccgcttcttc

SEQ ID NO: 133652 - DNA, 293 bp, Glycine max
tatcgagatgctcgaaattgaaaacagaagctcggagaaaatgtaaaccacaataacttttaactccgatatccgattgactccccgattatatgaagacgcttgaaattgaaaacagaagctctgagctagtcaaacgaaaataactgttgactcggatgttcgattgtgtcccgtaatatatcgagatgctcggaattgaatacagaacctcgttgcaattgcaaaccacaataatctttaactcggatgtccgattaagtgccgtaatatatcgatacgcttgaaattga

SEQ ID NO: 133653 - DNA, 392 bp, Glycine max
tttacttctttctaaaaatgtaattgcgtgaattgaacttaagtcatctctccttctcactttctcttctacaaacattgttcttccatatcctccattcttttcatgtaatattttgcacctccattgcttcttttccgacagcattccattgtgccacgaataagacaaaaaaactagttcatgttatgtcaactttgttaagatacagaacagtcataacaaatacttccaatgaatattctgataaaattttgacattttcgtcaagggtatttttatcaacaacaaaaaagtgagatgggaagttcgaaatcgtcagtatcatgggccatcccatatatataaacctctataagaactaaacagccatataatatattacagtatcg

SEQ ID NO: 133654 - DNA, 252 bp, Glycine max
agaatcaggggcagacctatccaacgaatgagctgtcgcaagaagcaagctcttttttttatccagatagaactgtagtgtatatgctatgtcgttaccagtatccacttacagcatgtcataaattgtggttggaaataactagacaacaggtaattgtttgaaaaaaaaccatgatctattaaaacagactctaacattggacatgggttcataagcctaagagataacttctcagaacttttctcttga

SEQ ID NO: 133655 - DNA, 143 bp, Glycine max
tcagctgaattactcaaaaacactagacagtgatcagtccatattacttcaggagcgtctcacgtagagagctctcagagttgagagacatctccgaccgttgcacattcctcttccactctgagcgagaacacactccacat

SEQ ID NO: 133656 - DNA, 207 bp, Glycine max
tttttttattcctcgattcatggctttgcactattctgatttaaaggattacttatcttgcccctctgactcttaccattctatcctgaaaaaagaggaacagagtctgcccgagcccaatttcatactgattagaaccttggttatgcaattgaaaggatataagatttaaggacaaataattgtcagttattgctgcatctgttt

SEQ ID NO: 133657 - DNA, 431 bp, Glycine max
ggactcttaaaactaagctagctgataacattctccccctatctcaagcaaagacttaattcttcttgatatcttctatgagacaacaggtttacatatgaataaatatctatttgcatatagtttactcccccttggttttacaatgattgcttatatgagacaattgaagatttcatatctttcatatatcaaaacgtggctcataaaacaatagataatttttcttaccattatatcttgatccttctctccccctttgtcaacatcaaaaacaaatcatgaatagaaaggataaagatgataccacttgttgcaatgtatgagaataagtgataccaaaaggcattaaaacaatcattcaatattaatcaagccataacaagtacaataacacatcaagcatacacaatcgaacacaatctatcgtc

SEQ ID NO: 133658 - DNA, 410 bp, Glycine max
agcttggctccaatcttggaacagtttttatgcctccaataagaccgctatataacgaacttgtccaggtcattccctccattatattgcagttcctgctgaaccttccagctcttcactctactatagtttttgtttgcattaaatatgtccccgtccatgtggttcactcaaaaagaaagatttctatttcgacgagttttccacatagattaacacatattccactatgtcgcccgatatggctacaaagatgttaggaaggaagatcaccatgcattgaaacaacttcttattgagagtcttgagtgtcggaacaagtggcctcgaaataattaagaacgggggagggttgaattaattacgaacgtgtcttgacaaaataaaaaattatcactcttaatgccact

SEQ ID NO: 133659 - DNA, 404 bp, Glycine max
  unsure (1)..(404): unsure at all n locations
ngagatgaggaagtgttgaagggtgaaactttctgcttttattgntgaccacagagtggtacctggagatatgtcgcgggggtcaggagacctaggggacgtcatgtggggtgctattgcccaaaaccaagcttgaccaatcccgacccaacccgggcatagacggctagtgagaacctgtgatgtacctaaacaagcgagctcctggcagtcaacagataaatggaacaaagaccactaagcaaggaggcttgtggtggctggccagctgtgaaacttgattgatatgtgagatatggtctctggcaatccattaccaacggtgggtaatctgattcaacgctctaaaatgaagacagggggctgagatcgtctctggtaatccattaccaggggatgtaatc

SEQ ID NO: 133660 - DNA, 438 bp, Glycine max
  unsure (1)..(438): unsure at all n locations
agcttaacaatggtgagatggaccatttctgttctngaaagantcaatgacaatgactacaaagttgagctgcccggtgagtataatgttagttccaccttcaatgtctttgatttacctctntttgatgcagatgtaaaatccgatttgaggacaaatccttctcaagagggagagaatgatgaggacatgaccaagatcaagggcaaggatccacttgaaggacttggaggacctatgacaagggctagagcaaggaaagccaatgaagctcttcaacaagtgctgtccatactatttgaatacaagcccaagtttcaaggagaaaagtccaaggttgtgagttgtatcatggcccanatggaggaggactaaatgacaccactntgtctcaatttttagagtggttagtttgtctaaataatggcccaatccttg

SEQ ID NO: 133661 - DNA, 338 bp, Glycine max
  unsure (1)..(338): unsure at all n locations
ngagatgaggaagtgtngaagggtgaaacttcctgcttttattgttgaccacagagtggtacctggagatatgtcgcgggggtcacgagaccttggggacgtcaggtggggtgctattgcccaaaaccaagcttgaccaatcccgacccaacccgggcatagtcggtcagtgagaacctgtgatgtacctaaacaggcgagctcctggcagtcaacaaataaaaggaacaaagaccacaaagcaaggaggcttgtggtggctggccagctgtgaactttgattgatatgtcggttatggcctctggtaattgattaccaaaggtaggtaatcgattac

SEQ ID NO: 133662 - DNA, 405 bp, Glycine max
  unsure (1)..(405): unsure at all n locations
gatccaaaattcttgactctatataagtaaataacataatacgtaccataggcatagagcaactaattctctagttgaagacattaagttctttactaccattgaattacaagtttccaacagcaaacaatggagacaaggaattaaagcaaccaaatttgttcaaccatattgctaacatgtgacatacaaaagttgattgtaccagtaatatagaatttgtattacaaaacactaaaataggccttagctgcaatagggagtcaccttctttgaacaaaattcaacaatttaacacataacgaatcaaactcatcaacaattgtagtatcaaactagtgtcaccctgtgttggagtgggagcaactaactcatatgacacaacttanatatatatatatatat

SEQ ID NO: 133663 - DNA, 415 bp, Glycine max
  unsure (1)..(415): unsure at all n locations
ngaacatcanaacacacattanaataattaaggtttaattacccatttaatacttataattacaacatttttttcttttaatctttgtaatttaaatattaaaatattcaaatttagttcttgtaattacaatttttttattctcaccgtcttaagttttcaaactctgtttgagattaacataaattacaggagtcacatgcatcatgttaatttgtttttaacaacattagtcgacacttagtaatgatgactaaaatgtaaaaaaatcatagctagatgaaccataataagatgtttcaatcataagaactggacactattacagaaacaagccttcaacattggtctcaaaggaactttaacatctgtntagaactgatgttgaatcaactgtccttgaaagtggacaact

SEQ ID NO: 133664 - DNA, 380 bp, Glycine max
  unsure (1)..(380): unsure at all n locations
agcttatggatgctgcagttatatcaacgttttatatgacttgtatcactntnttgttactttgtactcatttgaaagcttgtattttgcagtatcctcaatattgtcgatacatacaatgatatggcagcaggagttaagcaccatgtctaaattaattttatgggtcctatttcttttaataacactgcttagactctgcaatattagtataagaactcacattcggaaagttgctaaattttggttagctnttcatccacctgcatagagaattattcatattcatatgcattaaaggtaaggagctatgaataactacggaatctttttgcctacgttattaagccactgaatcaaaccttcttattgntcccctt

SEQ ID NO: 133665 - DNA, 418 bp, Glycine max
  unsure (1)..(418): unsure at all n locations
tgcnattggaattgcgacagcctcactccatcattatgattagtaccttacatctcaaacaaacaaatcaaatgtaacaagacaattatagctgttgtttgaatacctcacccactcaagtgcatcacacaattatggctattctctaatgaaacactcttgccttttaccactctaattccccttgagttcttaggcaattcaagagattatggccacaacaaagaacaattcaccaatatgtgtaaggtaatgctagagagacaaggataaggttaactcagataaaggctcacaatgtttttatgaacaaatgaacgacataaaattcagacttatgaattcaagttacaattcttcatgcaaccaatatattaaccttaaagagaattattttttaaaagtccttcagcatgaa

SEQ ID NO: 133666 - DNA, 387 bp, Glycine max
  unsure (1)..(387): unsure at all n locations
agcttgtaagtcacatgttgaacccattnttatgtttataacaaatcaaggtcttggaagtaggagtggaccaaagagggatgatgtgaagtctggttatctttgtgggtcatcttcaggctatgtgaaaatcatattcatgcctttcatttgaactgcttgatgatcaacaaagttaaagaaggtcttctgtttgagaggataacgtgttagctttagtttagtcacattactattgaagataaggttggtgtttttgtacttactaatccctttcaggggaagcgacattcactaatggctggcatgattntgttaggaataattcaaagttttaaaaagctgtaaactggtagttataaaggttggttaagttgttttcttata

SEQ ID NO: 133667 - DNA, 305 bp, Glycine max
ttagatccctcttgtcggactagacttagcttaaatagcttatgaaagttcagactaatttagcctaagctttatcctcagatccctcttgttggactagacttagaccaaacaacattattgtaacaatatatttaaaaccaaaacttaatccgcagatccctcttgtaagactaagtttcaattctacttcattcaagatctaaggcaacaatacatttcccaatgctaaaatcacctaaccaagcacacaaatggttgattagaccaagagcttacataatttaagcactaaaagggcttta

SEQ ID NO: 133668 - DNA, 285 bp, Glycine max
agtcacctgctgcatgccagcttctcgatatatgacgtgccattttcttgtatccgtgtgaaaaggtacgaccatgcgaatttctctagagcttccatcgttcaattccgagagtctagatgatttatggtcccaaatcggacatccggtgtgaaatggtatgaccattcatatatctcgagtgcttccgttgggcaatttcgagcgtgtcgatttattatgtcccccacttcagacatccgtgggaaacgtttggaccattggaattccttgcgaacttccgtg

SEQ ID NO: 133669 - DNA, 453 bp, Glycine max
  unsure (1)..(453): unsure at all n locations
ntgtttagagcttcaatggagaatgaatgatgtaagaatggcaacgtgagggagagaggaaaggcttctgaaaaatgtggggctgagtgaggagagagagagttgctctttaattttaaaaaggctttttcctcatttcttattattttattataaactatgccacatatctccatttgagtggagcaaaaagggcccactttctcttttgattgtgacccatactcagccacaaaaagtgagaaaaatctgacctttgaaacgctaaaatcctgtctcggtttgcgtgtcgtttcactgattccagttcctcgcgtttctctgcgtctgtcagggccaagtttcgaaagtaggcaatatatatatcaaaacgctcagaataaaaccccgagcgtggttcagagggttgtttccgtatatnntaagtcgcacgcaaaacgataattttaaact

SEQ ID NO: 133670 - DNA, 412 bp, Glycine max
  unsure (1)..(412): unsure at all n locations
agcttgtaggattatggggtacccatctcttgtggtactaagtggcggtcgggcgatggtgcacaacaagtnttccacatccacaatgcgcacataaacccaccatcccctgttgcccacctccaactgagctcacgtactcccacgtagcccatatcctcgtttctctcaacaccgggtccccataaatactgccaagctttcccaacattcaagcaaaacaacattcatacagcacaaattatcacatccaagcaaaacagggcaaaggcagaaaactctgcccaaaacaccaaccaaaatcacagctgttgtcacttaaagatcccaagaacaattccttagatccaatcttgtaaccgttggatcgactacaaaattntactggaagtctctagtacataagcctaca

SEQ ID NO: 133671 - DNA, 415 bp, Glycine max
  unsure (1)..(415): unsure at all n locations
tggatttccttttagtaggtgtcgcaacctatccttctttggagggcgatgcgtgactcgtgggatgcgtgttccaccanaggaatacgcgcggagtcgccaccaacgtttatttgaggaaaacgtctgaataaccggaaaagactcgatctacgaacttttaagtgaaaggttcgggagttgtatttatgcatggggaaggtattagcaccccacacgtccgtcacaagagacagcagcctttaatcgaatgtgcaaatatgactttgattattacagtcccttttatgtccttatatcctttataccctctctatattttttctctttttgtggtcgacaagggtgtttccctttgctctacgttttcctcatttggatgaaaaatcgactacgaatttttcttatcagtgat

SEQ ID NO: 133672 - DNA, 338 bp, Glycine max
  unsure (1)..(338): unsure at all n locations
agcttaagaaatctatatatggtttttatctttcctcccgtcagtggtatcttaagtttcatgggataatttcttcatttggttttgatgaaaaccccatggattaatgtatataccacaaggtcagtggagtaaaatatattttcttgttttatatgtagatgatattntacttgcaaccaataatcggggtttgctagatgaggtgaaacaatttctctccaagaattttgacattaaggatatgggtgatgcatcttatgtcattggcattaagattcatagagatagacatcaagctattttaggtttatcacatgaaacctatattaacaaaa

SEQ ID NO: 133673 - DNA, 479 bp, Glycine max
  unsure (1)..(479): unsure at all n locations
tttaactggaattgcaatgttccaattgtttttaaatggtgtnattgattacaatatatnggtaatcgattaccagtgtatctgaacgttgaaattcaaattcaattttgaagagtcacatcttttcataaaatgctntgtgtaatcgattacatggttttggtaatcgattaccagtgacaagttntgaataaaaatcaagagatgtaactcttccaatggtttttcaggtttttctcaaggttataactcttccaatggtttttcttgaccaaacatgaagagtctataaaagcaagaccttgacttgcatttcgataactttttcatatattcttttacaacctttgaatctctttgaacatcttcttgaacttcttcttcttcttcctttgcaaaagctttctgagttttctggtttccaaaccttgttctttcatagaaaacaaaagtgtgctatatcttttcattctcttctt

SEQ ID NO: 133674 - DNA, 415 bp, Glycine max
  unsure (1)..(415): unsure at all n locations
gatacctaatgatataaactattttcaactggatgattctatttatctatttttaatataacaagaagtttgtttttcctctcatttcaatgcaaaccaaataatgtcttttttcttctctattaaaattgnttctttaatagaaatataaagttggtctaatcgtgaagggagaatacgagaaaaagaaaagatggtgagttcatattcttgttaccaaaaactaacaactaatatttgntcttaatgtttttttatttccttaacctttcaacgaaatagtgttaattgttgtgtggatttcgtgtttccttatngttgggccaccaagcgtcttgngaataatagcaatccatcccttttactttaccttcttcgctttttgaatttattnntattttccaaaagacattct

SEQ ID NO: 133675 - DNA, 435 bp, Glycine max
  unsure (1)..(435): unsure at all n locations
tatacctntcatttcttgcttggattctattatgttgatntttaatgcttttaatctctggttgtctgatgaagagaaatcaaagttctgatcaagcttgtaatcttgcagattaaagccaaacatccaggaggttggtctttgactacatgaatcaccctgaggtatgcatcaatgacatcttctatacgaactgattcttttctgaccttcatcacccatgtccttattccattgttggtgtttgcttcatctgcaacaacccttctatttacatctttgaggaaggcttgaatgctttctagttcatctttaatgtctgaaatatgtttgtggatgtgtcattgcacgcttgtttcttcttttaagatttggagcagttcctccaaggcaaaagatactacaatttctaccatatcattgtantctcatatt

SEQ ID NO: 133676 - DNA, 385 bp, Glycine max
  unsure (1)..(385): unsure at all n locations
atggaacatgggatggtggaaacatatcatatttgatagatttgaaattggtttcattggggcagctggtgatgaatngctaactcatgcctctatggtaacaagtntatctttatcgntattcatattaattnaccactcaatgggtgacttgctgtcttttgatgtctttgatttcctggcccactggcagatttaactctagcactntgtaatctcataaacaattntctctaagactagtttcttttgcaatatggcaatgtagtctcattggacgtgccaatttggttatggtgaaaattcattngagttttcgatctcaattnttcggtaagttagacaatngagtctaaccacaaaaaaaatattntattagtggaaa

SEQ ID NO: 133677 - DNA, 452 bp, Glycine max
  unsure (1)..(452): unsure at all n locations
ctaagcttgaacgtgactgaattgggcacttattgttagtgattttgccctattgtaaaataagtgtgatagttacgtgcttaggatgcgaaagtgttgtttgtttagataaccacacaagatggttacgtaaattgtatgttttggttttgtttgctattacctgttgtttgaggagtggaggactcaccgtatcaaccaccaatttcaggaggaggtcatggagcatttgaggagggtgttcacatggattagtatattcagctacaactatacaatagaggaagcgacagggctccatatgcattntagaagcatctaacgccatantttgctgttagatgaaccccagatgccactgatcaccatagaggcacatgctacataccatttcttgttcgagcgtacccttcaacgtgatatagaccatattatnttctactatttacttt

SEQ ID NO: 133678 - DNA, 434 bp, Glycine max
  unsure (1)..(434): unsure at all n locations
ctcaagcttaggattaggtgacatggcaatattttggtggtactttattgcaaactaatgatgaaggtaagtntcatacgaaggtatagagttcccttcttggtcaactagttccgcatcaaaactcttaattccaacatgaccttttggaaactttatattctcaaatgttgttgttgcaattgatcctggtcccatttcaaaactcccagttacaaaaatagctgtcttgatatgattttcaggcttttgatatagtgaatatgatgtacttggtagcaacaatagtattgagaatgaaagtatcattgcattagagataaactccatgttaacctgaacataaacaagtagtgtcacanaattagtaatgaattgtctatgatgttatcttttttaagggtagctcaattacatataattcacacacatga

SEQ ID NO: 133679 - DNA, 291 bp, Glycine max
cccatcaatgtggtctatgttgggtccgcgatggtgcacacaagtttacacagcacaatgtcgcttaacccaccatcactgttgccaccttctctgagcacacgactccacgtatccatatctcgatctctcacaccgggttccattaaacctccaacattcacacatcctacaaaacacattaaatagctaatttattccagccatcaaacatacaaatgcaaaacttgtaaaaacaacgaaatacagctttccactaagacccatacaatccttggtcaattgtaccgt

SEQ ID NO: 133680 - DNA, 178 bp, Glycine max
atcccgggttcataaccgttccccaacataactcgggccatcattaccgctgcatcggacagacaaggcttgccaaagagggagtccacggaggaaatgctgaccacctcaaaagactggaaagcagtttctaacgattcttctgcggcttccacataaggcatggaggatgggcagc

SEQ ID NO: 133681 - DNA, 363 bp, Glycine max
  unsure (1)..(363): unsure at all n locations
tgtccaagggtttgtggttagtgctcctctgctgaccaccatacagacctttgcccttccatgcagcaacctggagcaatngagcagcctgaagcttatgctgcaaatatttacaatagacctcctcaacctcagcagcaaaatcaaccacagcagagcaattatgacctttccagcaacagatacaaccctggatggaggaatcaccctaacctcagatggtccagccctcagcaacaacaacagcagcctggtccttccttccaaaatgctgctggcccaagcagaccatacattcctccaccaatccaacaacaacaacaaccccagaaacagccaacagttgaggccccttcacaacct

SEQ ID NO: 133682 - DNA, 362 bp, Glycine max
  unsure (1)..(362): unsure at all n locations
taatgacaaagatattgacaaaaagcccaaagaatgatttcaagattaaatcaagaacaaattccagaacccagagaagtttgatttcaagattcaagaagagatgaattncagttcccagagaagaaatcaagaagacttcacangagaagtattgaaanagatttttcaaaaaacaaacatagcacaattttggttttcaaaagagttttcacacaattttctaagctaccagagtttttactctctggtaatcaattaccagtttcctataatcgattaccagcggcaaagtttgatttcaaaagcttttaactgaatttaccatgttccaattgatttcaaaatggtgtaatcgatta

SEQ ID NO: 133683 - DNA, 390 bp, Glycine max
  unsure (1)..(390): unsure at all n locations
tagaacaatatacttgtccttcatttaactgtcnttgggcttangggccacgatcaacaaagtactttcgacacctactgtatgttgatttgaccaacactgttatgggtatgttgtgacaatccttcaaaaccttattgatacattctgagaggttggttgtcatgtggccatatcgacgtgcttctctatcataagtcatcgtccatttttcctttgaaatgtgatcaattcatgttgctatggctagactcagttgacgacaattttctaaattttgataaaaaaatgtgcttgcaaggagtgtagcgtgcataatattatttagcaacaacaattttaagtatatatgaaacttaaaataacgtgaccatcataaatgaaatctta

SEQ ID NO: 133684 - DNA, 357 bp, Glycine max
  unsure (1)..(357): unsure at all n locations
ctataaaactaagctgtacgacatcgncggtgttggattcttccatttgttggaagcagaggaaaccttcaaccctataaggcaacgtggcggacaaaagtgggcagctaacttgaatggtcatcattgtcaatgtagaaggtattctgcgctacactatccatgttcacacattattacagcttgtggttacgtgagcatgaactactaccaatatatagatgttgtttacacaaatgagcacatcttaaaagcttactccgcaaaatggtggcctctatggaatgaagcggctattcctccttctgatgacgcatggacacttattcctgacccaactaatattcgtgcgaaagg

SEQ ID NO: 133685 - DNA, 297 bp, Glycine max
  unsure (1)..(297): unsure at all n locations
tgaatgaggcccgtaatatatcgaaacgccttcgaaattgaatgttgaagctctgagcaaattcaaacgacaataacttnttactcggatgtctgattgagtcccgtaatatatcgaaacgctcgaatgtgaatgtagaagctctgagcaaattcaaacaacaataactttttactcggatgtctgattgagtcccgtaatatatcgagacgctcgaaacggaataccgaagctctgagcaaattcanacgacaataacattttactcggatgtctgattgagtcccgtaatatatc

SEQ ID NO: 133686 - DNA, 353 bp, Glycine max
  unsure (1)..(353): unsure at all n locations
nggcctgtgcactaagtgagttgtagttccaactnntttttaatgttttttctttcagtttttgcatcaattttcctctaaatcacttgaaattttcttcttttaactntgctgctaaaaaattgcaagtatattaatttcttcattatttcattaaaaacaacagtaaagtaaagaaattgcaatcattcttagccaaaattgaccatcaaattaactcaaattttgcagttatcacctatactaattgaaaggaagcttgtgtggggcctagtctcaaacataaatganagatacactacgcattcatgatgatgcttcccccactaataccttgggatattcttcttcta

SEQ ID NO: 133687 - DNA, 426 bp, Glycine max
  unsure (1)..(426): unsure at all n locations
ntacagcagaatttagtaatgacccactaacttagaatttatataacttaatgccattaatctagggaattaaaaaaacttaatggctgagtgtaactgaaattgtggcaaccaaaagtcacccccaacagccaacaagtcagccaccatttggtctcccaaaaggctgatgcctangttgccaattgggcccttattacaacttgaactaaacctactaaagcccttttagttgattaacccaaaacatatttttggtcagccaactttacaaggattgggccattatttagacaaactaaacactctaaaattgagacaaagtggtgccatttagtcctcatccatttgggccatgatacaactcacaaccttggactnttctccttgaaacttgngcttgtattcaaatagtatggacagcac

SEQ ID NO: 133688 - DNA, 447 bp, Glycine max
  unsure (1)..(447): unsure at all n locations
gccccactcgatgcataagatattacctgatatctcanacaaacaaatcagacgtaataagacaattatagttgttgtttgaatacctcacccactcaagtgtatcacacaattatggctnttctctaatgaaacactctcgccttttaccactctaattccccttgagttcttaggcaattcaagagattatggccacaacaaagaacaattcaccaatatgtgtaagggaaggctagagagacaaggaaaaggttaaccaagaaaaaggctaacaatgtttttaggcacaaatgaaggaaataaaattcagaatttatgaattcaagtaacaatccttcatgcaaccaatatattaccttatagaaatttttttaaagtcttcagcatgaccattcacccaatattttttttttaatttngatatacaaaatctgctcttttttt

SEQ ID NO: 133689 - DNA, 409 bp, Glycine max
atcaactcttccacatccacaaatcaaacatgaacccaccatccccagttgcccaccttcaactgagctcacgtacccccacgtagcccttatcctcgctcctctcagcaccgggtccccatcaacccctccaagcttccacaatatccaagaaattcaatatcaaaacatcatgaactaccctaaaccaagaaaacagggcagaggcagaaaactctgcccaaaacacattccaataccacaactttccctactcaaataccccagtaacattctcttcatttcgattcgttaaccggtggatcgactcgagaattttactggagggccctagtacataagtattcatgttggaccgtgggatctgctagaaaatatccagaacccaatatgtactacctttcccata

SEQ ID NO: 133690 - DNA, 469 bp, Glycine max
  unsure (1)..(469): unsure at all n locations
actaagctnccagatatggagagctaaatcctctggtggntcttccttgtaagtacttgatgtatatactngnatatctatttaatgatggtttatgtgttctctgtgctatcagtacgtcatttcaatgtgcttttgccttgataacgtaaatgcatgctttgttaggatcattcaacagtgaaaacaggtttgattcttagaacttgataggacgaggctagcttatcgtattttcacaagacatcggggtacgataacttagtttttggtatgttatgtcttaatgtggttctggttaagagtagtccaacaagagacatctgaggatgatacttgattaggattaggctaaacatgcgcgagacatcanggtttagtagtctatgagacaacatagaacacatgaacattgttaggtagagaatatccttttaacatcaggcacctaataggaagaccaatgtgt

SEQ ID NO: 133691 - DNA, 378 bp, Glycine max
ctagaaagctttgtcttactcacgcacctctcttatagctaagctcacctccttgagatgagaagctagagcttatctacgcacacctctctaatagctaagctcaccttcttgagatgaacagctagagcttagctacacaccctctataagctaagctcacccccatgccaaaatacatgaaaatataaaaaaaaagtccctactacaagactactcaaaatgccttgaaatacaaggctaacaccctatactactagaatgaccgaaatacaaggcccaaaagaaggataaagctattccaatatttacaaagaagagtggacccaaccttggcccatgggctcagatatctatctttgagttcatgagaacctt

SEQ ID NO: 133692 - DNA, 371 bp, Glycine max
cctgaagatatgtcgcgggggtcacgaaagcttgaagacgtcatgtggggtgctattgcccaaaaccaagcttgatcaatgccgacccaacccgggcatagtcagtcagtgagaacctgtgatgtacctaaacaggcgagctcgtggcggtcgaccaataaaagaataaataccacaaagcagggaggcttgtgtggaggctggccaactattgatcttgagtgatatctggaatatggcctctggtaatcgattgccaaggatatgtaatcgattacaaggcttaaaaatgaagacaggaagttaagatggcctctggtaatccattaccaatggtgtgtaatccattaccaagcttagaaatggatata

SEQ ID NO: 133693 - DNA, 375 bp, Glycine max
  unsure (1)..(375): unsure at all n locations
tgcctanagaggtccaggaaggacaaggcggccgaatgatctatttccgtcccggagttctacagtcaccgctttaggagcattgtacaccatcagcgtttcgaagccatcaagggatggtcgcttctccgggagcgacgcgtccagctcatggacgacgagtatactgatttccaggaggaaatatggcgccggcggtgggcaccactggttactcccatggccaagtttgatccagaaatagtccttgagttttacgccaatgcttggccaacagatgaaggcgtgcgtgacatgagatcctgtgttaggggtcagtggatcccgttcgatgccgacgctatcagccagctcctgggatattcgatggtattg

SEQ ID NO: 133694 - DNA, 262 bp, Glycine max
attttggaacctactctcatctgaaacaaaactatgacattcatctagactcgctcaaactggtttacgacaaaactctaccgatcaaatatgactcctaacacccaattaccctgaaatggctctgcttactaggtactcatttgctcttgccagccaactctcccacctaatgacttaaacttgatactactttactctgtccactcccttccgcaccaggccagtacaggcctttcaagagaaatctgagcccacacgt

SEQ ID NO: 133695 - DNA, 390 bp, Glycine max
  unsure (1)..(390): unsure at all n locations
tgcaagagnaagttgggggcggcgacttctagtcgcctatgaagtacgtcggaagaggaaagtgagatccaccttcgatgtatttcgtgaagtcctcgagctgctccggtgagtcagggaagaactgacccacgcacaagagcgcgtcgaatggacctgcagatttgttcacctacaaaaacaatacaacaagcacgtgaaatgaaatggattcagtgccatttcacgcctccgagtgagtaatgataaaaccctaaggaaagagagggtgagtgactcaccgatgagacgcgcttgaagagctggttgaggcgccctaaaacgtcgccgcatagaaggattctgggggccatgacggaacctcttcactctgtcactctatgctcaacg

SEQ ID NO: 133696 - DNA, 423 bp, Glycine max
  unsure (1)..(423): unsure at all n locations
actaagcttgacttaaacatgtaactaacgatttttaaaacttgcattaatcaccttactcattacaaactggtggcttcagaangccttgccatggacccaaaaaacaatggttacaaacacttaatgccataaaaaggacataaaagacaatggcaataactgccaaaaaagacgaggcaataattggagatgtctgagaaatcccttgctaaccaattgcaaatttaaaacctatccaataattgaaactggtttaacacatggttcataagaaaactcataattccttgcaaatgcttatcatattctgagtgaagaattcgtaatgcccttattatgtttatgaaattaaagagttaaaatagagttcaatctgagctggaaccactacagtgaggcctctaatgcatgaaaaaaaaa

SEQ ID NO: 133697 - DNA, 389 bp, Glycine max
tctataagtcagaggttgataatgttactgcacaaaccttttacaaaaagttggctaacatagcaccttgtggtgacaaggagggctgtgtcgaatcaagtgacaatgttatccactctgtcaaactccatcctacctatgggtttatatgggagagggaggaaattgatgctgttccctctgaagatggagtcattccaccaactgggtggaatatatatgaggattaatatgactgaggccactgcatgggccagaattacggcttatatggccgaaaatagactaaatacggcctttgaggctgaatctcaacaaaatatggctgttgacgccaagatcgaagatcatgaccacaaagaaacagaggatcgaagactggattgttt

SEQ ID NO: 133698 - DNA, 371 bp, Glycine max
gcgaatgagaatttatctagagatgaacaaccatcaagtatgagaaatttgagatattctcagcgaagttaagcccttcaatcactctccagctagataagtccaattttgtcattgcatcttatcactgaaattttcttgagagatgaacaatcattcagtctcattgcacaacaatgttttctcctagaagaattaaaattctacttttaatcctgaacacaagtttgagcagtcaagatctcttaactattgatccgttaatactttagtttccgtgcttaattttcacaatcaaatcatgacgctaaataaattctattattattctattatatggtggtgattcggcttttggcggatgaaaacta

SEQ ID NO: 133699 - DNA, 268 bp, Glycine max
  unsure (1)..(268): unsure at all n locations
cacataggagcaacggatacacccgctacgatgattaacactgttcgnactctattaaccagagatagtgacaggtatacgcctgatagcactgcgagactatatttgtcaattagactacatctctctcaaaagctaagctttgcactaatcagaccttttatcgatggacactctgaacatcctaatgtcgagtgcaagaggacactcatatactagaggttgtacaagcaaggtactgcggatttaacatgcatggaaacttaca

SEQ ID NO: 133700 - DNA, 334 bp, Glycine max
ccaaaatcacagctatttctcacttatagaccccagtaacattttcttcgctccaatccgataaccgctggatcgactcgaaagatttactggaagactctagtacataagtatacattattaccgctgggatctactagaaaacatccagaactcattctgtactactctttccacaaccagcaattacatagcattcttctgcacttatgcaaaattctgctgcacatttcaacagcaaaattctgcgtaaagtgcagatttcgaaaaccactctttccctcatccaatattgcccacattggatactacaagtcccaaattatgcgccaat

SEQ ID NO: 133701 - DNA, 408 bp, Glycine max
  unsure (1)..(408): unsure at all n locations
ntacagcagaatttagtaatgacccactatcctagaatttatataacttaatgccattaaactagggaattaaaaaaaacttaatggctgagtgtaactgaaattgtggcaaccaaaagtcacccccaacagccaacaagtcagccaccatttggtctcccaaaaggctgatgcctatgttgccaattgggcccttattacaagttgaactaaacctaactaaagcccttttagttgattaacccaaaacatatttttggtcagccaactttacaaggattgggccattatttatacaaactaaacactctaacattgaaacaaagtggtgtcatttagtcctcctccatttgggccatgatacaactcacaaccttggacttttcttctttgaaccttggcttgtat

SEQ ID NO: 133702 - DNA, 450 bp, Glycine max
  unsure (1)..(450): unsure at all n locations
ctggttaaagctactagggtgaatgcaactctgctactgtatgatcgagnggcctcagaataattaagaagggggttgaattaattattcctaaacctttattaattaaaaatttactcttctaaggattttacttatgttgttaagagaataaggagtagaagagaaacttaacataaactaaaagcgaaaattaaatgcacagtggaaagtaaaagagtagggaagaaggagacaaacacacaagagtttttatactggttcgacaacaacccgtgcctacatctagtccccaagcgacctgcggtccttgagatttctttcaaccttgtaaaaatccttttacaagcaaagatccactanggatgtacccttccttgttctctttgaaatcctagtgggtgtaccctncacctataatgagtcacaagagatataccctctcttttt

SEQ ID NO: 133703 - DNA, 338 bp, Glycine max
tttggttactttttataccccctgttgacgtgcttaaaccattttacttaagtcatttctcgcttaacttaaaaacaaaatcaatttgcaccgaacgtttgaattgtattatccgttaacttcgttaaaatgaattccgaccgttcggtcgtgccgtaaccacgttggaaatcaaaaagaggtaaaaaataatataataatcaaaaaaacatcttttagtaaaataaagcggaaaatcaatcggacatttttttctctctgggatttctcattcttaatcgaatggattaataactaaagtgaaactaaggctaaaatcaactcgcctagtcaagctc

SEQ ID NO: 133704 - DNA, 422 bp, Glycine max
gtcatggtgactcacaggtgtttctttgtgttttgatgataacaaacgatgatgacaaaggtgatgacgaaacgctcaaagatcagatcaagaacaatgctagagttcgtagatagaatcaagaagaattcaagactcaagaggaaagtctggagacaagaatcaagattcaaggttcaagatctcatgactcaagatcaagattcaaggctcactattcaggagtgaagagaagactcaatcaagataagtattaaaaagctttttcaaaacttggaatagcacatgagtatttgacaaaaccttttaccaaagagtttgtactctcttgggatcgattaccatattgttggattcaatttcaggaccaaatgagtttgaaaagctttcatactgacttatcacgtccaatattttcaaat

SEQ ID NO: 133705 - DNA, 474 bp, Glycine max
  unsure (1)..(474): unsure at all n locations
ctcaagcttagacaaagctcagcctaccatcctcaaactgatggccattctgaacggaccatacagtcgctagaggaccttttgagggtgtgtcttagagcaaacgggaagttgggagagttttctgccattgatagagttcacttacaacaatagttttcactctaccattggcatggctccctaagaagctttgtatggtagaaggtgtaggacacctctatgttggctagagcccagagaaaacctcaccttaggacctgaagtggtacagcaaaccaccaagaaggtgaagttgatccaagaaagtatgaggactgcttagagtagacagaaaagttatcaggataagaggaggaaagacctgtgaattgaggttggtgatcatgtattcttgagagtcactccatggactggggtnggtcgagcatttgaatcctcgaaactcacacctcgctttatctgtcctttcca

SEQ ID NO: 133706 - DNA, 437 bp, Glycine max
  unsure (1)..(437): unsure at all n locations
tgtgcaaagactaagatgatacacaaaggacaaacatntttcattctatatgctnggntaatagaaaggggtgttctctaatcattgatggtggaagttttaccaatgttgcaagcactagattagttgagaagcttggtttaaaaaccacccctcaccctaagccttataagttgcaatggttgaatgacaatggtgagttggttatggataaacaagtgttacttacattctccattggaaagtatgttgatgaagtgctntgtgaaatggttcccatggaagtcgaacatgtgttacttgggaaaccttggcaatatgatagagatgttgtccacaatggggtcaccaatcattattctatcttgcataaaggtaaaaaggtagttctctcacctctttctccaagtgagatgtgtganggatcaaataaaatg

SEQ ID NO: 133707 - DNA, 404 bp, Glycine max
  unsure (1)..(404): unsure at all n locations
tgatcatgagggagctaacacaatatttcatgcaggtggaccttcttctagtaattctgacttacagcagcctcctatccctcttccattcccacctagagcacttccacacaaaaagatggaagaagcggaagaggagatcttggagaccttcatgaaagtagaggtgaacatacctctgctagatgccatcaagcagagtccaagatatgccaaatttctaaaggagctgcgcacccacaaaaggaagctcataggcaatgaaaggattagcatgggcagaaatgtatcatcattgatagtgaaatctgttcttcacattcctgagagatgaaggacccacgtactttctgtatatcttacattatcgggaatagtaaatntgagaatgccatgctatatct

SEQ ID NO: 133708 - DNA, 431 bp, Glycine max
  unsure (1)..(431): unsure at all n locations
tataatatcattataaatatataatatntttttgcctattataacaaattnctagatctgccattagcctaaccatgaatgaggcgtagcatggagctcacctttatttatatgaaagtagtttttttcatctttagtccatagtccaataagcaaccaacataaggtacattcagtgtaggagatatcacaacaaatcataatagcatttctcaccattatggtgttataaatcataagcatgacaacatttcaacatgtgtcacaaaaattgcaatnttacttattaaaatatcaatggcataaactcatagcatggtagtcgtgcacaatatcatccaccaatgtatctaactcaacatttagggtntattggatttatgttatatctaaatgaatccaattcaaacttaaagtattattntacataa

SEQ ID NO: 133709 - DNA, 306 bp, Glycine max
taatcattcaaggatagctacagtgcttcctcttgcggttctcatcttttatgagagtttaccgggggcctttctgtgaggaggatactgtgcactccacaggtgctactgtaaccctcattggattctcgcttttcccattgatatggagagatcctgaagctttgatcactgctgagatgggtaccacgttccctgaaaacacaggttatgtggttagggtttcagatgctttgggaccctattgtgggtgtcatcaaagttggatgaaatggctgagtggagtgatagacaacgcattattcc

SEQ ID NO: 133710 - DNA, 416 bp, Glycine max
atatgatgctacgacaacacatggttgtcattatgagatgattaatacactggcttagtacttcaatctattctttagaaccaataaggagactgagtattttaaagtataaatacagaggacttctatattttggaaacatgaatgttgaaacaccgtggacatatcatggtcatgatgaatggcattgcttcttgaacatgttgaaattgtaggtactgggtggaaaactgataagagacaatatactctattttaccaatatgactctatataattgttatattgcgataataaatcactaatgctatgttacaatttgtactaatattctagatcaattaggagggtgatactatgaattaatgcgcactgaagcccaatatcactcctaacataacactactatcttggat

SEQ ID NO: 133711 - DNA, 413 bp, Glycine max
agcccagtcacgcgctaagccattcaacgataaatgctgtctccctgtgggcgtaacctcgtgctaagctgccacaccccttgggccctttgtcagggcttagcgtgcctcctcacgctaagcccaattccttctttgtaccataattgtgcttagcacccaccaacgcgcactatgcccaatttaccctgtttctgttctaacttgtactgagcttagcgagcatctcgcattaagccccataccttcttttgctgacctgtggcactaattgggcttagcatgcaatctcgcgctaagccccaccttctttttgtaagactggcgctaagcgcctagatggcggcttagtgcccaaacctcttttctattctattctcctttcatgttaccctctttacctatgtcattta

SEQ ID NO: 133712 - DNA, 322 bp, Glycine max
  unsure (1)..(322): unsure at all n locations
actatagacatgtgtataagaacagaaatcacttttgtaaatgtaataaacaaaacctcaatgttgtgagagaaacaagcatatctcttgggttacagggctatcaaacattacatgatccactgtatagcagctcatcttaacccttagcatgcagagatactcaactcacatgtgaatttacaaaattccatcccaaagaacaagcttcaatcgttatcttgttattcacatattgcatagtaattccaatttaggaanaaagcttcagatttagtttgtcttgatataaaagaaaaaatcattaaatcattagagctca

SEQ ID NO: 133713 - DNA, 296 bp, Glycine max
acttaatctagcgactactggatagctaatatttctagctctcatcaccatagcacacatgttgaacggaatcgactttttcattggagtcataagctctctgttgagagcgatctacaaccaattggtatcacattgcctctgtaagccctacaaatataagtttcaaaaatttggtcgtcctgcaaccaaacgaaatggaatatagagggtatccacaattcacttgggttgaagaatctgtacatcattcacatagctcttggagtgcttggttgcttacaccacccctggaa

SEQ ID NO: 133714 - DNA, 350 bp, Glycine max
  unsure (1)..(350): unsure at all n locations
gacctctgaaactaagctggcaataaatactctacactatcttagctgcatttctttcttacccactcctcacgtttggtttttagggaaaaacaccataactaaacgcgccgcaagggatccctatcgcaccagatccaaatctagaacgatgggtgatcaagaggagacgcangaacagatgaaagctgacatgtcggctctgaaagaacaaatggcctccatgatggaggccatgttangtatgaagcagctcatggagaagaacgcggccactgccgccgctgtcagttcggctgccgaagcagacccgactctcttggcaactacgcaccatccttcctcaaaca

SEQ ID NO: 133715 - DNA, 400 bp, Glycine max
  unsure (1)..(400): unsure at all n locations
taagctntagttattataccttggacttactctacatatatataactngaatgtgaaaatttaaactatagttgatcattcatatataaatntaataggggtttgttgatgataatctttaaattattagatcatgtatatagggaggattgttattatgggaatggataaaccttacatgcagtttcattggtacttttagcatcgtccatcgattaaaattggagttttagctcagtatcctatgctcttcaaggtgaaatttcaattttgattagagaacaacctcaaaagtgctgatgaaataacatctaagttttgtcatgtaagtatcgttcttatttattattacgagagtaataaatatcgattatacagaggtacatggacgatatggata

SEQ ID NO: 133716 - DNA, 401 bp, Glycine max
ctcccccctatatatatatatacgcattattatctatatcctaatatgaacaaaggcatcagtgtatccttacccccaaaccttaaggattgaaaatcatgacaaatacattaccttatagcaagttgctcagaaactatataactttgagtagcttgcagcaagtccattggtgttacttcatgatatacctacttaccaatgaaatatttaaatcgcaagcactatttacctagttctttgcatcgtgatcacgacattggttcctagacactatactgatcatcatcacagttacgaaagtttgcaatcaattctgatgcttaattttgataaattagattatgatgctcgtgtatgtcattaatgtactgtgctttagtacaacttttgtcataatg

SEQ ID NO: 133717 - DNA, 321 bp, Glycine max
  unsure (1)..(321): unsure at all n locations
agctgcttactcctctatgaaactacagactactgacaagttatactatntncatgtcatatgaatcatgaaacatgggcacatcaatgcactgaccgtgaataattaaagattctaagccatcccccttcagagatgcttaaaactctgtaaccactctatttcccccaccagggatatccaacaaggtcattgcaccccccatgtacatacacaacatacaacgtatgaaacatgtgcaccaccaatgcactgactgtggataattaaagattctaagtcatccccctctagagatgcttaaaactctgtaaccactct

SEQ ID NO: 133718 - DNA, 414 bp, Glycine max
  unsure (1)..(414): unsure at all n locations
tatcctacataccatcttatgatatcagtgatgaacaaagagtntaaggctccaaacgcgagaatctaatatcgtgtgcattaaggtcattcatctaaaaattgtgcgaataggagatatggagctcctaatgggaagtatagatgggttcccacatgagcaacaaaggttactaaccaaaaagaacccanattcactcgggtacctcaatagactctctaaatcgtctagtacgcatgccttgaagccaaggagcttatgtggtatttggacagtggttgttccaggcatattattgtagaaaagagcacatttgtcttattgcaagcacacaagggaagatatataatctatggggacaactacacaggcaaaattcttgatatacgtaatatatggaactcattaactacc

SEQ ID NO: 133719 - DNA, 462 bp, Glycine max
  unsure (1)..(462): unsure at all n locations
ggacctataaaactcagctttgagggtgcgcagcccaccatcttttcatagtggagttccgataatgggtctaccatcacgattatcgtctccctttccattattgggggtaccacctgngccgccagatccctccaccttttgggcgtgttctttgaaagatccgtcctcctttttgcacatgttctgtagttgcatcctattcagaaccatatcaaaattgtactgatactgcctaacacaggcaaccattaggtccttccaagaatggactcgggaaggttccaagttagtgtaccaggtaacagctaccccagtaagactttcttggaaggaatgtatcagccattcctcatcttttgcgtattcccccatcttctgacaatacatctttagatggttcttgagacaagtagtccccttgtacttgtcanagtccagcaccttgaacttgggaatgac

SEQ ID NO: 133720 - DNA, 344 bp, Glycine max
  unsure (1)..(344): unsure at all n locations
acttatcttcttcttcttggacaaagtatggcaggctgggggcaaagaaatattcttcccatcagaccttggatgcaactgtgatcgtatacccatatcagctaaatcttgacgggtattcaagccatccttcgtcctgccttgaatgataagaagcatcccaatcacactgtcacaaacattnttctccacatgcataacatcaatacaatgtctaacgtcaagatcacaccagtacgaaagatcaaagaaaatggacctcttcttccatatgcaactctgacttttatcctttttntgggtcttaccaaatacagtattcatgtgttgaacccgctgatata

SEQ ID NO: 133721 - DNA, 424 bp, Glycine max
  unsure (1)..(424): unsure at all n locations
tcaaagaaaaggccaaactttctttcatacctgannatgagagaaaatgattattaaacacacaaaatggacgtactaagtatttattacctatctttaacaaaaagtaattacaaaaatataaaacaaccataaattgaaggagatttgatacaatttacaaaaatnttatacacaaaagatagtctaattcttcaactaacacccctaacgggcttctaaactacctaaagtcctaaaatacttaaccctaaaactaagtaacttacctaacaacaatactagtcatgagaaccataaatcaactatcctaaggtttgaagcatgaaaagtaaaaatagaaatatgctaacttacttgtgatttcttttgaacgaagcanagatgatgctgagaagcagtacacacaccagcagaaagtaaa

SEQ ID NO: 133722 - DNA, 397 bp, Glycine max
  unsure (1)..(397): unsure at all n locations
gtgtttctattcttanatctcgaactactaattntggcataacaatacttttgaaaatggtagtttaaggtgtaaaatggtgaagaaaaaaattaagagagggtgaggtaaatttgacttttagagtgaatttgggctaatctaagtggttcacgcccaatggtaaatctttttaagtcaccggaataatttgtataatcttttcacttaaatattatttataataaccagcttacttaaaaagctaattaattacttaataaaataaggacttgtttgtttacgcttatttatcgaaataagtatttggtaaacaaaataaacaattctatgatatatttgtctaaactagtttttgtagaatgaataatgtgagagcctaactcatctcaaaact

SEQ ID NO: 133723 - DNA, 480 bp, Glycine max
  unsure (1)..(480): unsure at all n locations
actacgctggggtattccatatcctgatgagggtgttccatatgttcttaagactggtctaatacattngctgccaagtttcatggtcttgcaggtgaagatcctcataagcatcttaaggagttccatactgtttgttccaccatgaagccccctgatgtcccataagatcatatctttctaaaggcttttcctcattctctggagggagtggcaaaatattggttgtactacctcgctcccaagtccattttcagctgggatgaccttaagagggtgttcttggagaaattcttccctgcatctaggaccactgccatcagaaaagacatttcaggaatcangcaacttagtggagagagcttgtatgagtactgggaaagattcaagaaattgtgtgcaagctgctctcaccaccagatttctgatcaactccttcttcaatatttctatgaggaacttagcaacatggagaggagt

SEQ ID NO: 133724 - DNA, 392 bp, Glycine max
  unsure (1)..(392): unsure at all n locations
ctataggatacaatcaagaggaagtctttgactatgatgagacctatccccttgttgcacgggtggaagctattacgttgacgcttgcttttgcttgtattatggatttcaggttatatcaaatggatgtgagaagtgatcttctcaatggatacatngaagaagagctatatgtggaataacctccagtttttgtagactttgatcaccctaatgatgtttataagttgaaaaaggcactatatggtttaaaacaagaacctacatcttggtatgacaaattaagcaagttcttaagtgtgcaatcttttgtagagagtcaagtaacaaaacattatctatcaagagatcacaaaacgagttatcgctggtgtaaatttatagagatgaca

SEQ ID NO: 133725 - DNA, 262 bp, Glycine max
  unsure (1)..(262): unsure at all n locations
atataaatgtttcgatatatatgcaataaaattgtgctcctgttacacatataatgaaatctgacgccatatgtattatctcctttctacaggctataatcgggtcatacttcaaactcttttcacagcatttctatgcctttcgaatcattaagctaatttcacctgcttcgaattttcatagtcacttgtatcctcatcatgttattacatcgtcccttctacttngtcaattgcaaatattccaaatgacatcgtcctc

SEQ ID NO: 133726 - DNA, 300 bp, Glycine max
tcatctaaatcaaccaactcatctgacatcattttccaataatggacgagtggaatgaccatttgttattgtaccctgactgattgcaaatgtatctccaccggaagtacaacatcatgcccataagtcagtcgaaatggggtagtattagttgattccttaagagaatttctacatgcccatataacttgatctaacgtattattccaatttcttggctcttgggcaatgcgttttttaatcaagttaattacaatcttattggctgcttctacctgaccatatgattgcgcgtaatat

SEQ ID NO: 133727 - DNA, 296 bp, Glycine max
  unsure (1)..(296): unsure at all n locations
ttatacggagaanaaaataatgcttattgtggttcttatctgaactttgtaattttaaccaatcttattctcaatgagataatataatatattgtaccttcaactcttagaaacctatgaattttattcttcgttgtttattcattaataaacacaccagttaatagataatattcccaaacaaataaaaagtctagagtgaaattcatccaaacaaggttggatctaaaatttggcctacaaattggagataactaatgtaattatcttatgagtcacatgataaatgatcaaat

SEQ ID NO: 133728 - DNA, 121 bp, Glycine max
gtatgtgtatctcagctcaaccttctttatgaatctcctcaaagaagcttctcaccgaggtgagcttagatatcagaggggtgtgtgtagctaaactctatcttgtcaatgaagtgatctc

SEQ ID NO: 133729 - DNA, 356 bp, Glycine max
acttgatttgaactgcttttttgtaatgtgtgtatatctggattggatgtgtcaatttcattatatattgggcaaactacaagatggtgagtggtcaatgtagatgctaatgtaactgatacaacttgtgggaaaatgataagaaggccaatcctctcgctatgtgtagtgcaggcatcttaaaataacaccaatgcaactttatttatttttatatttaatgtctaatactgttgatcaagtaagaatgtttcactttccttattatactttattcatatcataacttataatgtagcttactactccacctatgtgcattggcatatattaatatcggagagaacatctcgtga

SEQ ID NO: 133730 - DNA, 133 bp, Glycine max
gggactttctactatgactcctggttctgcggaagggaatatgtcctcgctctgaaacattctgaatttgtgtgattttcccagatggactgttctcgggtagtttacgcgctttgctgtacccagctgttcc

SEQ ID NO: 133731 - DNA, 286 bp, Glycine max
ctcatgcttttacaaaaagggtcatcaagacaagcgaaatatggaagtaaccgtcttgcaaatattggggcaaaaagatgaatagagtcacattactgctttctctactgccaaacatagttaggattgttgatgtccttgttacttacagtttcaccttgacaaagatgtcatggaccatgttgaaaatctaaattgattcaaccccatatcctgcacaatacttcaactgtacatcattcgcatacatccatgcttttcattgggtgcattgctcattgcattc

SEQ ID NO: 133732 - DNA, 414 bp, Glycine max
  unsure (1)..(414): unsure at all n locations
aactcagcttctagtctcagctgatgaagatgaattttggctacttcatgcctcctctaangacaatagcatcatttctggcactaaattgctgggagtttgaagccatcttctcaattaaatttctggcttcagcaagggtcatgtctccaagggctccaccactggcagcaccaatcatacttctctccatgttactgagtccttcataaaaatattggagaagaagctgctcacaaatctggtggtgagggcaactggcacatagttctttaaatctctcccagtattcatataggctctctcactgagttgcctaatgcctgaaatatcctttctgatggtctgggtcctggaagcacggaaacttttttctaagaatactctcttcaggtcattccagctcatgatgga

SEQ ID NO: 133733 - DNA, 354 bp, Glycine max
  unsure (1)..(354): unsure at all n locations
ttctatacctatgcatgaccgatttggaatgtaatctgtnatctactgctaatggacgatgcgccattatcttctcctatttcttaaccctgtttgcaccattttaattactgactaatcataattgtcgaataaattatgcacttttatcatttgggcctactggattaagtttgtgtgctgaatctaatttcacgagaattataagcaattgggtttcaatctagaatttggcttggactagaagataacagactatnttattctaccaagatttatcttatctagatattattgagatctgatctcatctagatattatttcatctagatcctatcttatcttatcttatc

SEQ ID NO: 133734 - DNA, 452 bp, Glycine max
  unsure (1)..(452): unsure at all n locations
ntgaattcattctatgcacccttagggggccattcgtgcttgtatgctttcatcttcatctcgtctactttcggtattctttnttcttcgttttaagtgagtttcgaccaatcgtttaagtcgtaacctcacttaatcaatgttaaaatgaatttcgaccgatcattttcatcgtaatctcatttaatcgcctttaaaataaaattcaaccgatcgttcatgctgtaacctcggttaatcatcaaaaaaggcaagtttccaccgaacatttactttgaaagttctctctaaatgagttgagaaataaccaagtgaaattaaggctaaaattaactcataaatcaagcttttgtcccgcgaaaggtcatttgaaattgtntcagggtcagcgccttaatggtccttttacttttatcggttaanacgaaccgcttaaaagtctaaatcaacac

SEQ ID NO: 133735 - DNA, 205 bp, Glycine max
  unsure (1)..(205): unsure at all n locations
atgtcataactattcaagtcacccatgggtggacaagatttcaagaatcattagcaatgaatatgattgccattaccaagttagaagaaagttgtcttaggcaattnttttttatgtaatttgttattgaagagagactttatactcggttttattacatattctaatttgctacttaaagaacaacttagatttagatattgac

SEQ ID NO: 133736 - DNA, 104 bp, Glycine max
ggctttcgaccgttcttcgacgatcttcattcactcttcgacgttctttagtcttgaaccgggtactcctcctcatcccacttttcaattctgtctatgcaccc

SEQ ID NO: 133737 - DNA, 472 bp, Glycine max
  unsure (1)..(472): unsure at all n locations
tcttagtcacctgcggcgtgcaagctttatgatgaatcaagactgattcaatgagtgttgatgataacacttataatgacaaatagctcaaaagtcgagatcacttcatgatgacaaagatgatgacattcaagaatgagttcatgagtgagtcgagaacacttcaaggatcatgaggaaatntgatttcaagaatcaagaatcaggattcaagagtatcaagatcaagattcacgactcaaagattctagaatcaagagaatacttaatcaagataagtattaaaaagtttttcaaaacattgagtagcacaagaagttttcacaaaatcattaccaaagagttttactctctggtgatcgattaccagngggtttaaaatgttaagattttcaaaattcagaatgaaaagtcacatctgttgatgtgtaatcgattacacctttatgggtatcgattaccagtgactggt

SEQ ID NO: 133738 - DNA, 360 bp, Glycine max
  unsure (1)..(360): unsure at all n locations
tcttgccgaccttgacctgtccttgggctacttaatacatttgtacgttgaatataacacaagatgaccaatcacaaatttggctgttagaaaaatccatatggcttttacttctaagtggtacaaagtacaagccaataaaagttttgaaaccaaccagcatgcgaattgaaacttgtatcataaagggcaaccagtgacattagtaacatttttagtttaaattcgtatattaagtacacaaagtacaaaccatatacgtagctctttttttaaagcatcctgaaaccatcgtatgaacatngccaatatttctacataattngtattcaaagaagcatttgaaactaataaacgaaa

SEQ ID NO: 133739 - DNA, 301 bp, Glycine max
  unsure (1)..(301): unsure at all n locations
taatggatgtctaacacagaatcttaagaattcaaagtactttatggagttttcaaccaanaagatgataaatgaattataatcgttgaatgaagaaaatataaacgattgaaattttaaaccttttaataacaaagtcattattgcctaaaaaaataataacaaagtgattctcacttcatgttcgcctaatcatgagcgttcttccggtgacatcttcaagaanaaatccttttttgtttagtattaacaattcagctgtcttgaaacgcgttatgtcattcaaatttgggatttcttt

SEQ ID NO: 133740 - DNA, 402 bp, Glycine max
  unsure (1)..(402): unsure at all n locations
tctagaagactcanacaagaatganttnttactctaatgtctgatngagtcccgtaatatatcgagacgctcgaaattgaatacggaaactttgagaaaattcaaatgataataactttttagtcggatgtccgattgagtcctataatatattgagacgctcgaaactgaatatggaagctttgagcaaattcaaacaacaataacattttactcagatgatcaattgagtctcgtaatatatcgagacgctcaaaattaaatatggaagctccttgcanatgcaaactagaataactttttacccagatgttcgattgtgtccctaaatatatcgagacgcttggaatagaaaacggaagctctgaccacaatcaaatgacnataactggtttctcggat

SEQ ID NO: 133741 - DNA, 437 bp, Glycine max
  unsure (1)..(437): unsure at all n locations
ntgaagacataaggaatattcttatgcactcatattcaatttctttctttanaaatattttagcataaatttctgtaaaatttaaaaaatctctcaacacactttgattatctcgatagaaaaaactaagtgttgaaatcgtttatccatctgtaagatgattgagtgttagtcattgtgcaaacaaacaaacaaatctcctaatttgtgttagagccaataatggcttggtaggataaaaaatattggttgtaacaagcttggtgtagagctcgagttaagaagctagaagtgacagtgataaatacttgtcacttgttgaattagtgaaacttggtgtgtacccagaactagacgtagtctcagtgattgaaatgaactaatataaaattcttgtgcttacttatcctaatttctcctctgttcttaaaccaacc

SEQ ID NO: 133742 - DNA, 299 bp, Glycine max
  unsure (1)..(299): unsure at all n locations
gtacctgaaacttccantggaagcatattttttattaaatataggaaacaataaatgaagaccttctgctgtgtggaactaagactaatagggaattgaggatgacaaaatgatgttggtgaccggacatgtggatattcacaggcagttagacttcaaaaaaatgtgatagagaaatctcttatatcataatggacctctttgaaggtctagtttcttcacttctttatctatatactatgcctaggacatacaatcttttccacaacatcctctacttcaatatttgtatatcctat

SEQ ID NO: 133743 - DNA, 426 bp, Glycine max
  unsure (1)..(426): unsure at all n locations
atactttaagcctgtggcacttatatcaccaattgtggaagangacaagctcaatntgagatccctcctgaagcttatctgataatatctgtgagttctacactctaacctatcaatatcttctatgtttgttaacattttttctgctatcataagtaattgatgcatttcatgtgtgaatgctaacaaactgttctgccagaccctgtgaaatgtacgtcttggcattctaaacagctctgaagtacggttggaggaactgaatctattctgatgtaggaatcttgttgtgttgttaccatctcttttcttctagatcccataccactcgcattacaattcctaactttatcagcagttttcatcaaaatgatgtgtaaactctgctctattgtaaacttggttttatttgttatgcagacatat

SEQ ID NO: 133744 - DNA, 295 bp, Glycine max
aaactaactcacgtgctgatgccctatcgcgagtccatgaaacctcccacgtcaattactatcattgattgctcctcatttcaccttcttgcacgatttgaaagcagagctgtcgaatcaccctacctatcatgaactctgacgaactattgagaccaactcctctactcattcgacctttgtgcttaccccgaacttcatcctacagcaaaatcatatatggctcccacaagggcgtaattttatccctttaatcatgtccgaattccactctacgccgacaggaggacatatg

SEQ ID NO: 133745 - DNA, 462 bp, Glycine max
  unsure (1)..(462): unsure at all n locations
tactaagcttgacagagtacacgccagcnagttccatccgtgctcgtgatggttttcacaacttgaaggtaaattttattttattggtttgggtttgattgggatgattatggttaattatttggtgttaactttgggaacatntttaggagattaagactgtggaacttgtgaagccaactgggtgggtttatccatccttgtctggagttgatcctaggtaagtacagtgctctttttgttttgcaatatgagaatttgtttattgactgttctaccatcgtgtgattntggtctcttttgcctaattatgctctgtctgtagctgattgtggattgtgtttgtttttaatgggagaaactacagtaacaatagtttattgtanggaatgtgaagaaacaaatcctgctactttatgaatntccgtttcatgaatgtagtatagtttgaaactttcaata

SEQ ID NO: 133746 - DNA, 449 bp, Glycine max
gctctcgaactcgtgtgttgcattcatctttcactcgcgcctctagactcctttctcctatcaatgctcctctacggcatgttcctgaatgcccccattgagaatagatgctctagtgctgggggcctagggttatggtttgagagaaatgttcgatgctccatgcattgatgagtcttatcgcaagctgttggaagccattcgagcacagtgacgacgccgttaatgccgccgctggaagagaatgcaaggatgacctcctttggttccgcgacatcggaaagtatgccatcaacgatttctacatggccgtgatccaggccaaccaagtcgtcgaggaccaattttgatgctaagcactctccaatgacaagctgacaagaatggatcactccatttttacctttaccttcttgttcatcttctttattcctttgttctgatgttgc

SEQ ID NO: 133747 - DNA, 427 bp, Glycine max
tttcttgattactcccaaatggaatgatctgtggatgacgctactacttcccattcagaacaattagaggctttataaagagtcttcaatacagctgcagaagctgacacacctactgaggtgtgcatatggctttgatcttataattctatcttcatcaaatcttttatagcggtgcccgggagattaccattttattaatcacacagattgggttgttgagtttataggtgccagattatttgtgctgtagaatcacactcgacatttttcatgatcctgtgatcactccaagtggacttacatatgagagagctgtgattcttgaacatcttcagaagggaacctgatttgcatgtgtcatcttctctattgaatgttttccacttcaatgaagtcaatgtgcaataattcaacttcttaaaca

SEQ ID NO: 133748 - DNA, 236 bp, Glycine max
cgagatcactgagggaacaatcttttaacatgtacgttatatatggaactttttgtatgggcctatgaacgcaatttcattggcattctaaaaactggcctttttgaatgttgagtgctctacaagcatatactgccagctacaagaacattatgtttcaaaggattgaagtcaataggaccagaagtactataaatctgggaagatacattctatttggatgcctttcacataat

SEQ ID NO: 133749 - DNA, 214 bp, Glycine max
gctgcatcccgtatcaagcttcaaacggagacttgtcttttacagacttatttggacatctgtttgtatatgttactagagtgtagactgcttctacgcataatgtgtgaagtagacccttatagtggagcattgatctagcacttgccatcactgtgcgattctttctctctagcacttcattttgttgaggagaatatgcgacatgaagtgg

SEQ ID NO: 133750 - DNA, 350 bp, Glycine max
  unsure (1)..(350): unsure at all n locations
tgacaaacttatcttctctttttgacaaagatggcagctggggcaagtaaatttcttccatcagaccttggatgcaactatgatcgtatccccatatcagctagatcttgacgggtattcaagccatccttcgtcttgccttgaatgttaaggagcgtcccaatcacactgtcacatacatttttctccacatgcttaacatcaatacaatgtctaacatctagatcagaccagtacggaagatcaaagaanatggacctcttcttccatatgcaactcttacttttatctttctttggggtctttccaaatacagtattcaggtggtgaacccgctgatatacctactc

SEQ ID NO: 133751 - DNA, 387 bp, Glycine max
  unsure (1)..(387): unsure at all n locations
cgctataagaacanaagtgcctaaatcatgtgtatatatgcatttgaatnangaagcatcaataagaatcaagccaatgctattgtgcaagcaatcaatgaggcataacgcaccaaatgattatgatgatggatggctcatattctcacaaaggtaaacttatcactttcaaattgagctttcaaaattatcatgacatgtagaggaaaaacaaggatttcaaatcacaaaatgtcaacagatttttattttcacaacaattacccatttcttgaacatattctataattcaaagaataatatacaaagttgttcatgccaacagaattgacctaaaatattaaactagatacccaacaaaactatacaaactaacaaattttacac

SEQ ID NO: 133752 - DNA, 401 bp, Glycine max
gctatgcagctggatcattatctatctcgcagcattggtaatttcgtcagtatccgagaaagccgcctcacgtgataaaaatgaaaaagaggagctgactcctacttcatgtgcaagaacagaccggagagtctgcatcgactataggagactgaaccaggttaccaaaaaggaccatcttcccctgccattcattgaccagatgctagaacgcctggcaagtaaatctcactactgtttccttgatggtttctctggatatatgcaaatcactattgctctcgacgatcaagaaaagaccacattcacctgccccttcggcacttttgcctatatgacgatgccttttgggctgtgcaatgcccctggtaccttccagcggtgcatgatcagtattttca

SEQ ID NO: 133753 - DNA, 382 bp, Glycine max
  unsure (1)..(382): unsure at all n locations
tgggcattatttcaagaactntattgtttctttggnttgtcattttccatttaccattgtctgttttcaataagtaggcatgttattgaattgaattgaattcttaagaatctaggcattgtaatcgattaccagagacagaatacttagaggtttttcaaaaagaagtttgaaatctgaattttaaatactgtaatcgattaccatttaactgtaatcgattcccagtaacgaaagatttagaaatttgaaatgaaaagtcatgacccctcaatgtataactgtgttatcgattaccagtgagggaattctaaaattgttctgaanagtcacatctcttcataagtttttgaaaaaccacaaagggcctatatatatgtga

SEQ ID NO: 133754 - DNA, 372 bp, Glycine max
  unsure (1)..(372): unsure at all n locations
accaatgaagaacgacatagaacgtccacgtaatcgatcatgggaacgtcttggaagtgttatacaagcaccttacctcggattttctccttattnctcttctcttcactaattttaagagaaaactgatgcaatcctaccccgcaagggcattggataaaagactccaagtagattgagccaaagatccaagggaaggccctacggatctcatgagccttaaggtagatnttgagtccatgggctaagtatgagcccacttatctttgtaaatattagaatatgtntgcccttcatttgggccttgtatgttggccattctagtagtataggggtttagccttgtatttcgaggcattttgagtagtcttt

SEQ ID NO: 133755 - DNA, 449 bp, Glycine max
  unsure (1)..(449): unsure at all n locations
tctcaaggaagttttctcattatagcttctcaatgaagctacctagtctataaatagaagcatgtgtaacacttgttgtaactttgatgaatgagagtcttgtgagacataactcanagttcaacttctctccctttttcttccttcaatttcgtgctcccccctccctctttctctccctctttcttttcctccattgaagcatcctctccaagcttcttatccaaggctcatcttggtggtgaagctccttcttccatggcttattccttaatggatggcgcctcctctcacctcctttcctttgtcttccgctgcatctccatggtggaaaatcaccattaaaggaccncattgaagctcaaagatccagcctccatagaagccccacaagcaagcttccatcaagtggtatcagagcacaagagcttcaatttcgtgcttccccc

SEQ ID NO: 133756 - DNA, 363 bp, Glycine max
  unsure (1)..(363): unsure at all n locations
acacatatactgttatctatatgtgtaatcgactaccagagcagantttcagaaaatattctcaacagtcacatctttttatgtgggtcgtgaatggctatcaaaggcctatatatatgtgactngagacacgaatatgctaagagtttttcagaacaaaaaggtcttatcctcttaaaaagcaaaatccgtatatcctcttacaaattccttggccaaaatacttgtgattcaataaggaattatttgagtgctcaaattgctcaatctatctctttcaagagagagttcctcttctcttcttctctattctgaaaagggattaagagaccgagggtctcttgttgtgaaagaattctaaac

SEQ ID NO: 133757 - DNA, 426 bp, Glycine max
  unsure (1)..(426): unsure at all n locations
ttcacgtttgttcccatntgtactccttccacacacaatgcattttgggttttaatttccctgtttttttgcaattattagttggatcggtcttcacggttcaatttccatgccagcatagtagatctaggttcttcaaggttagaaagtttcctttttttcttcctttgattggtgttttattttgtgttaaatgttgaaagatcaaaagactggaagagttacattgtgttgtttattccccccaaattgattagaatttgtgaccctttattaaaattatctttaaaaaatatttttagtgcacaaattactcttacttttatggttngaatttgagccaactgggttttttgtttcatatcgaatggtttctatttcttgccataccccatttatcaacttcttaaatttactcatagatct

SEQ ID NO: 133758 - DNA, 393 bp, Glycine max
  unsure (1)..(393): unsure at all n locations
ttgctcagagagcaaacttattcaaaataatgtgagtgtcattctatgattagtctgaatttctttcaaaggaatgaatctcatcaacctatcactatacattccatatattggtcttgtaggctggggtgaacaaagattctactggggatgtaattgctttacaacatcaaattcgacttttgaaggtggtatcagttatttcttgtagtataagttttatgtgagttgctaatttaactaaaatgataaattnttgggccaggaagagctntctatcctcaaacgacgtcagaatgtctctagggtcttgtcattttctttgtcatcgataagagatataaaacaatcactagaactcgaagactgttgcctataaaatgcaactgacat

SEQ ID NO: 133759 - DNA, 473 bp, Glycine max
  unsure (1)..(473): unsure at all n locations
ggaccttaagtcacctgaggcatcatgctgatggacgcaagcctacatgttatgctaagcgcatattgcagaacattttgtgttgcagaaagcgctaagcgcatactgttgtgctaagccccagatgctcactggactatacaacttcaagttgggcttaccgcgaggctaggctaatcgctcgggtttttaaactcaaacgttatgtagccacgctaagcgcagctgtgcgctaagcgcgccatatgaattatagtttttttaaaaccaaaggctgaggtactttgtgtgataccccaagttacctctacctctgttactgcatttcttgcttccaaatcatacatttcatctgcgtgcctcatttgcttgcttcattctgcattccaaccacaatccaagtaagtgagtacttttccatttccattngttcatgcttcaaatcataggatagatgatctctcgctctctta

SEQ ID NO: 133760 - DNA, 414 bp, Glycine max
  unsure (1)..(414): unsure at all n locations
tacctgctgattacatctcccctttctcaagccaaatcttcttgacatcatcaanatcttcattgatttnaaagataaaaactttgtaagacataaaagattttcataaaacatatttcagaagatgaaaacagatattgctaatcaaacaaagcttttaaataaaatcaaattcaaaccctatgtcagttgaaaatagaagagagatgaaagtagtaagacacatagatttatagtaggtttgtctcaaccactaagactacgtccatttcttagttaaccattaagttccattaactttaataagttacaagtattaatcactaccacttctagctctacaactcaagctctaccccaagcttgatacaacttagtattatttattctaccaagtcattgctggctctatac

SEQ ID NO: 133761 - DNA, 253 bp, Glycine max
aactgactaatatatagcacacatcctaggaccaaatagagagatctctttccttaatgatacacaaacaatctcctacacaatatattttgacttctacccagtaaccacctgttcctgattactttgcccaatcgctagatgactttacagttgtatcaagtgaaatggcgcacttattattattattatcatcagtgaaattccctctctttttctcttaccgtactctgcctccatgatgcttagctca

SEQ ID NO: 133762 - DNA, 368 bp, Glycine max
gctttatggagcacaatatcaactattatgtgtcactgttcatttactagttgaaaaatatcgtatcttaagatcctcagtgcccctcatcactaatctaaactaatgaagaaatccacaggaaaatatgtcacattttcttattttttaccttgtttacaatgattgttttggtagcactatggagaaaatataatatatatatatattatatatatatataatatatatatatcataatctacctttctctttaaatccttttttttattctcaagtgggggagactacacaccaaacttgtattggaacttatgcgcaccaaaatgaccactcctagcacacacaacacagcaagctgaacttct

SEQ ID NO: 133763 - DNA, 416 bp, Glycine max
  unsure (1)..(416): unsure at all n locations
cttggaagaaagtgatgaggtacaagccctanaggcagagtcttanaaagtcttgttagtcgaagagaagttaaagtccatagccatcaaagtctgaaaagagtatgatgaactaagggacgtcaatatggccaccgctgaagccttggaacgagaaaccaagaaggcccgaaaggaagaacacgaccaaaacaaagttttgaggggctttatagggcagcaatagtgagctcaagctccgaagaggtgaaaggaatcatcacgggtcaaaggcatgatcttgaaggacgagctaaaggcttgccttatgtcgaaaagaaatttgtcccacagttaagcgagactgaagggaatatgtgggccatcatcgatgagtgcaaagagaagctaaatctagcggcgactcacgagcaaag

SEQ ID NO: 133764 - DNA, 429 bp, Glycine max
  unsure (1)..(429): unsure at all n locations
cttgatctagctgcgcttcctcaccacacgtcgtgtttgcttgcccagattaaggcgggctgcagcaccggctccgctttcctaactgtactggaggtggttgccgtggctttatcctctatagttttctggagttttaacatgacctccgagatggaagccatttgatcttttaaagccgatagatcggccttcatctgttcctgcatgccctcttcattatccatttttctggatcgagtgttataggggtgccttggtgttttcttagttatgatgaaattcctaaaaaaataaacaacggtgagtatgccaccaaaacatgaatatgcaaatgaatgatcggagcacttggatccaccccaagggttttttagataacatgatgaagtcagaacttctcattntataaaaagaacaaagctttca

SEQ ID NO: 133765 - DNA, 370 bp, Glycine max
  unsure (1)..(370): unsure at all n locations
ggaccttgaaactcagctgcnactccctgttccctgctcatttagattttacagatttcttattttcagaggactcaacagtgagagaacggggatgacagcattttgtgaagaagaggagagcctttgcgtagcaagaagaacagtcttagagagaaaagtaaagaatctcatttaacccagagtagctcttaaaccagtttgctcttagtaaacattttctctttatatctattatatagaatataaaagcacttgttcatttgttatattcgaattctttaagcaaatagatggtattcatgttcttaaatcttaattagaataaagaacatacatgggacttatatattggaagaaatgaacgaac

SEQ ID NO: 133766 - DNA, 281 bp, Glycine max
tcatgaatcctttttttaatcaaagtatatgaaataccgcttattctacagcgtggcatctaataaactaataatcaatcaagactttctttttttaatacgtgttcttcttttttcattttttgttaaaccgacagacaaattaatatatttctaagtaaaaaatctcataatatcgaaagaacgatcgttcttaaagcttcttttctttcgaagactactgattactaatgaacggcagaatttaagttctaaatacacttgtgtctgacaacatgttc

SEQ ID NO: 133767 - DNA, 438 bp, Glycine max
  unsure (1)..(438): unsure at all n locations
tgtgacaagntgatatccncaaaccaaacctcttagactttatcctaagagggtccccagtggccaatctccacaaacacacagccaccctttgcctcacaggaatagcattcctcanagtggtgtcttccttcacaattgcagaattcaattcgtcacaaatcatatcaaaagtttctcttcccatcctaaaagcctttctaaactcttcttcaggaaaatcctctttgttgcatccatcccaccatgcccctgaacgatccttcacccacagccttctctgtgagcctcccacaccagatttcaccccttcagcactaccaccaccacccttctcctctctttcgcacgctaacaccgccaccgcacgtgccatgccgcgtgacttctttctcttcaccctctctgactcctcgacgtggcttgaatactcgtcaa

SEQ ID NO: 133768 - DNA, 355 bp, Glycine max
  unsure (1)..(355): unsure at all n locations
tctcacctnttctcctttgtcttccggtgcatctccatggtgaaaaatcaccattgaaggacctcattgaagctcaaagatccagcctccatagaaactccacaagcaagcttccatcaccttcggcacttttgcctataggaggatgcctttcggtctatgcaatgcccctggtaccttccagcgatgcatgattagtattttcaatgattttttggaaaattggatagaggtgtttacagatgatttcactgtaaatggatcctcttttgatgcttgtttggatagtctgganaaggtttgaatagatgcactgaactaaccttgtctaattttaaaaaggcatttatggtga

SEQ ID NO: 133769 - DNA, 259 bp, Glycine max
actacacaaagctaaaattgtaacaggaaaaggctagcactatacctatgggactttgtgcggcggagacagaccaatcgtgtttatgagatgacatgacacgcatatcgagacaggaacatacggcgttagacagacgtgaatcgtcgaatcccgaaccgaactcagaaagaatacatgagacttcttgccatacatccacgacggttctcactgtcccctgaaattcagaaggagcaacctgcaggaactccgatcc

SEQ ID NO: 133770 - DNA, 365 bp, Glycine max
  unsure (1)..(365): unsure at all n locations
ccccatgaaaaaaacatgaaatacataanaaagttcttactacaaagactactcaaaatgccccaaaatacaaggctaaaaccctatactactagaatggccaaaatacaaggcccaaacgaaggaaaaacctattctaatatttacaaagataagcgggctcacacttagcccatgggctcgaaatctacctaaggctcatgagaaccctagggccttcccttggatctctagcccaatctacttggagtttgctacccaatgcccttgcgggataggattgcatcattccctccaccttggaaaggatttgaccttcaatcccgaggttcttcatactctgggctccttccctcaacacctat

SEQ ID NO: 133771 - DNA, 408 bp, Glycine max
  unsure (1)..(408): unsure at all n locations
tcanaatntatatncattcttataatatntgtgatngttcttcttccttcaatcaagcagaaaaatgggtttccgtttaccttctattcgacgggcatcaaaagcggttcatcattgccatatcatacttgaacctaccttcattccaggacttgttgagtcaagctgaggaagagtttggatatgatcattccatgggtggcctcacaattccttgaagtgaagatgtgttccaacatataacttctcacttgaatggacaataaatctcgcactgttggagacactgacctatttagtagacattttatgcaataggcatcttctcaacctaattgtaaagattaccatttgtttattaatgacatcgaattcaatggctatggggttgtntgtcaattacattgg

SEQ ID NO: 133772 - DNA, 370 bp, Glycine max
  unsure (1)..(370): unsure at all n locations
aagaattctacacaaacttgagtgactgggaagataaatgacccaagcacgtgtgggtcaggggtcatctgattaaatttgatgaagatactttgaatatatttctgaagacccatgtgattgttgaagagggggaganattatgtgcttanttgagatttgcactcctaaggcctgatccttangagttagctgctaagctctacatcccagggaggggatttgagcttaatgaanatggcctccccttgaagatcttaaggaagaacatgactactctcgctcaaacatggagcgttctttcttattgtaacttggtctcgacctcccatacttctgacatcacattggacagggccaagtttatcta

SEQ ID NO: 133773 - DNA, 386 bp, Glycine max
  unsure (1)..(386): unsure at all n locations
tcggaagaaagtgatgaggtacaagccctaaaggcagatcttgaaagagcccgggtagtcgaagagaagttcaagtccatagccatcaaagtctgaaaagagtatgatgaactaagggacgtcaatatggccacagctgaagccttggaatgagaaaccaagaatgcccgaaaggaagaacacgaccaaaacaagttttgaggggctttatagggcagcaatagtgagctcaagctccgaagaggtgaaaggaatcatcacgggtcaaaggcatgatcttgaaggacgagctaaagggttgccttatgtcgaaaagatatttgtcccaacagttaagcgagactgaanggaatatgtgggccatcatcgataaagagaagctaatc

SEQ ID NO: 133774 - DNA, 454 bp, Glycine max
  unsure (1)..(454): unsure at all n locations
taagctgaccatcccgaccaacccggcatagtcggtcagtgtatacctgtgatgtacctaagcaggcgagccctctgcagtcaacagataaaaggaaaacaagaccacaaagcaaggaggcttgtggtggctggccagctgtgaattttgtgtaatatgtggattgtggcctctggtaatcgattaccaaaggtgagtaatcgattacaaggcttaaaattgaggacaggaggctaagatggtctctggtaatcgattaccaaggggtgtaatcgattaccaggcttgaaaacgaagtcaggaaacttatggagcctctggtaatcgattaccagcctgcgtaatcgattacacagaggaatgggtcactggtaatcgattaccaggcatgtgtnatcgattacacagtgtattattgcatatttcatgtnctgaggctgtgtagttcaagttt

SEQ ID NO: 133775 - DNA, 444 bp, Glycine max
  unsure (1)..(444): unsure at all n locations
tgccgccacggagttntccgactatgctcttgtgtggtgtttactagctacaaaaggagagagcaagaaatgaagagccaatggttgatacatggacggagatgaaaaagatcatgaggaagcggtatgtgccggctagttactcaagggacttgaaattcaagctccaaaaactaacccaaggcaacaagggggttgaggagtatttcaaggaaatggatgtgctcatgattcaagcaaatattgaagaagatgaggaggtaactatggctcgatttcttaatggtttgactaatgatatccatgatattgttgagctgcaggagtttgttgaaatggatgatttgcttcacaagatgtccgattcagtagcataatataacgagacactcgaaattgaacaacggaaactctcgagaaattcanatggtcataacttttaac

SEQ ID NO: 133776 - DNA, 405 bp, Glycine max
  unsure (1)..(405): unsure at all n locations
aagctctcgatatattcatatggacataactcttttgnattgagtcacgaccttgcgcatgatatatcgagaaggtggaaattgaacaacagaacctctccaggaatcaaaatggtcataacttggtacacagaaggccgatatatgcgcataatatatcgagactctcgcaattgaacaacagaagctctcgagaaattcaaatggtcataacttgccacacggaggtccgattccggtggatagtgaatcgagaatgacggaatcgaacaatggaatctctcgagaaaatcaaatggtcataacttttccaacggcagttcgagtaaggtgcataatatatcctgaggattttaattgaacaacggatgatgttgagaaaatcagatggtgataacttatcag

SEQ ID NO: 133777 - DNA, 253 bp, Glycine max
aaacctaaacccttggtgatacactttacctagggcactgcttctctaagccccgaattccctcgtcggtatcaggcgttagacttgtttctcttacttacaaaaatagcaacacagtcccatggaagtactccccttcatgcgatatgaatggagaagctaccaacatctgctcactgacagccatagtaaccaacatctctggcttaagtggcataacctgcagcggtcgtgtgttccaccctccgaccta

SEQ ID NO: 133778 - DNA, 414 bp, Glycine max
cgttcgaagcttctacttttcgtttagcctgtgctatcgtgtatctgaggaaaaacatcatttgttctcctttctttcttccaaagccatctctaacatcccaagcactctctccatcacccataaccaccattagcaaccacaaactgtcattgctctccgttgaaaccccacatcgagaggaacccttcaaccgaagcggaatcttccaacttaccttgcggtttcggtagagaacgaaaccctaatctgacctttcattcttccttcgaggtaaccatgattccatgttcgttccttgttagttgtagcttgtcttcgcatctttcctgactttgggaccaccattgcatgtcttacgcttcctttaaaaaccttagagcatagagactttgtaaacattatcttttcatg

SEQ ID NO: 133779 - DNA, 366 bp, Glycine max
  unsure (1)..(366): unsure at all n locations
ctttttgactctcaganggagagaacccaagtctcacatcgactaaagataatgccaagatagactatattagtgaggggctacattcaccctatgagctaacttctggagttgaataatgcccaaacccaaattctaagactactccagtaagaatacattatcctacaatatgtatgcatacaggttctatcctttggattttctaattgagcaagctcaaaactttagattaagaactttgaaaaataatattcctaatcaggaatatacatcagagatcagcaataaaagtaattttctacacagatgcaaatgtccaaaatagatgttccgatgaaacttacactttttatgtaaatagat

SEQ ID NO: 133780 - DNA, 129 bp, Glycine max
caaaccccacattctactagtaggcatatagcatttccggaaactggggtgagagaaagatttcttgcaagatacatcccaaggacctcatatcaaactgcaattataaaatcaatataattatgcaaa

SEQ ID NO: 133781 - DNA, 463 bp, Glycine max
  unsure (1)..(463): unsure at all n locations
tctcagcttcttatgcttgaggcacatgtngttgttatatgttgttgtaataatcagaagttgatatttgtcaatgtttatgctccttgtgatctggttgggaagaaagctttatgggatgagttgaggcagctgaaggcttctaatcctagtggaatgtggtgtttccttggggacttcaatagcattagaagttctcacgaaagaatcagcttatctcaaagaagggcagatccttatgacattgcagcctttaatcagtggattgatgatatggagcttcaggaaattaaatgttctgggaatagctttacttggattaggcctaatggctgtgtgaaaagcaagcttgatagattcttggtctcacagaattggctatctctttggcctgagagctaccaaactgtccttcaaaggaacctctctgatcattgccccgctatattgcanactaacatgg

SEQ ID NO: 133782 - DNA, 274 bp, Glycine max
  unsure (1)..(274): unsure at all n locations
acaacacccacttacatgcttacacnacatgatagacagctgaacctcatctaattcttgtctccctttctaatcctagatatctctatcacgtagatagatacccaatctagcttanagttaagcttttaattccactttattttttgtttgtgtgtgtgtgtgtgcgcgtcaaaatatgcatctaaagcttcctcattggcagacttgttgaagaatgtctctcatatttctcacactgtactatataaatcaacatttatttatgttcatg

SEQ ID NO: 133783 - DNA, 320 bp, Glycine max
  unsure (1)..(320): unsure at all n locations
tataagcgcgggtctgggagacgaatgtctagtggtcttcttatactaagangangtnccgagtacattggatctggtacgaccttgccctcctgattttcagctggggaattggcgagtggaggaatgccccgacatttacgcagcgagcataatgttaacctttacggctttaaaagctctatagttgggcctatgctttagagtttttctttcgggtaacgctttgtgtatttcgtgttttaatttataatacaaggatctttctatatctagttctacgtctctacccattctcatccatttgcatgtttacttct

SEQ ID NO: 133784 - DNA, 220 bp, Glycine max
gatgccatattgtgacttcatcattctatggagaatagacatgtggaggagtaactggtttcttgaggtgtccataagtagcagatggtctttgatctgctgcccttcattagaacttcactcttctgatttgtcaccaagcattctgactttgtgaagattacattgaatccttcatcacacagctgactgatgctgatcaagtttgcagtcagttcct

SEQ ID NO: 133785 - DNA, 356 bp, Glycine max
  unsure (1)..(356): unsure at all n locations
tggactgtgctagagagaaaaataaatgaccaaagtgatcttagagccatttctagggcanatttgggtgttgaagagtcaaattttgattcggtgagattttatgtgtaaatccagtttgaataagtctaaatggatgttatggactggtgtgaggtgagagtttgcttcaaatttacctcattctaaatttcacttttcaaacctagaaaacccattgaatggaggggtgttggacacctagattctgtgttgctgtgctttaaagcttgactttggtttagacatgattgatacatgatttgggacttgtangaattgatttgggcaaaaatggatgagaggaagtgtgaatt

SEQ ID NO: 133786 - DNA, 447 bp, Glycine max
  unsure (1)..(447): unsure at all n locations
agtaaaaatgggcctcaaccgagtaatattgcatatgatattttctgcctggnaacatccaccttgcataaaaactatntaaatactccagataaaaaaatgtcactaaaaattatgttacttgtattaatggacgtcactatattcgctgtattaacaccaagcataatcactgaaacaaaccacgttaaattataatgacaccaaattacactcactaccatttggtggttgaattcataggcaacactatattctagtggctaaatctaatattcacacgtgtcaccttaccacaatattacaaaatattaaatgtcataaaccacatatacagtgctctacatgccaacactcgaaatattacagattttctactataatattgcatggaaataaaccacgttgtattaagtgtataattttgtctttacataggtgataatc

SEQ ID NO: 133787 - DNA, 365 bp, Glycine max
  unsure (1)..(365): unsure at all n locations
catcatctttagttgccatcatgtttaatactagtagaactctgattgtagccgagtatgtggctatattattatgacatttgaacaaatgagcatttcttttatttgcataataggattgaacaattatgaattatgccttatgactatgtggtgtttatatatacgagatatgcatgtgccttgcttcatgattggattacaactttccaatgaatgtctgagaatgagtaggatatatgtatggtgatatttggtgacacttggctttttgtcgatgccaagggggagagaataggattaatcacaactccataaaanatacttaattcaagtgagctctactataaacaaaggggaaatat

SEQ ID NO: 133788 - DNA, 64 bp, Glycine max
  unsure (1)..(64): unsure at all n locations
tattaaaaggcaaaattgcactttggtccctcaatntttctccaatttcggatttgggccccct

SEQ ID NO: 133789 - DNA, 436 bp, Glycine max
  unsure (1)..(436): unsure at all n locations
ntatatatgatgtactttctaacatgaaaatttctggactgattcataaagaaatggatcagcttctcttttttctgagggatcttgtagaaataaagacttgaagggtgaaaatataccttttttttacttcgctaagaatattatattgaatattttttcctacccttgtttttacttggggtgtttttcatgtcttgaaaggtgggtttgataacttgatacaacaacaaagcttcatcccattagacgaggtcgattacatgaatcacacgacaccattttgacacggttaaaacccacagtttcagtatatcgaaataaaagtagaccattngttttctcttctggtactgcactatagtgtcatattttgctttatgnttatgcttgttaaaaacttctcgtgtacgatgttttcacatcanggatcgga

SEQ ID NO: 133790 - DNA, 274 bp, Glycine max
tgcagctgaattgatcacgacgctctataattgaatttctaactttctcacgatgtcattcgggacatactgatgtgacgctcggattgacaacggagctctcgacaattagatggcataactttcaacagatggcgatctgggaatacacatcgaacgctcaaattgacacggacccttagaaaatttaatggtataacattacactattccgattggaaaaagatatggagctaaactacaacggatcttaagaatcaaggcattattcaca

SEQ ID NO: 133791 - DNA, 455 bp, Glycine max
  unsure (1)..(455): unsure at all n locations
tctcaatccgngctgatacattgatacctgatttgctttaaatttactggngaagatgtttctgcgccgnttatcataaaaacaaaatagtgataattaagagtgagagaaaactccatctattgctagagctattatatattatactctggcttaatatgtttattttgttatttctatcaaattacatggaggttctgataaaaaaacaattacatgtaggttttatacctgagcatatacatttcaaagaaatatacacaataattaatgtacaaattcttaaccatttctgtaaatggtttttacttatacaatagcttataaaatgtcttcacttttattaaaataaataaataaaatgtcttcacanaaaaaaatgtatcttataaattgcaatacataaccaattagcaattattagggatattcaatttattataattntataaatt

SEQ ID NO: 133792 - DNA, 413 bp, Glycine max
  unsure (1)..(413): unsure at all n locations
catctccatgaaaatncttatttctattaaactatttttggaaagtnttcttcactttaaaacttaaacactctaacatcttccttaatataaagcttctgaaaacaaaatttcacaaactaaagtttgtaccaaggatcaagtacaacaataataacaatcaccatgttcatgtttctaatgctccccttatatttgtatgcttaactttcattctttcaaccatgctcataagcaacaaatatgcatcttttgccaaacttcaaaatattaactatcatgcaatatttatgaaaatattgagaagaagtacaaacaaagaacatgacactntcttggtgacttcaaacaaatcaaaaacttacaaacacccttgattatctaattctacttttggaatccaccaccacatt

SEQ ID NO: 133793 - DNA, 278 bp, Glycine max
  unsure (1)..(278): unsure at all n locations
aaaaaaaagatgaaagaagcatgaaattctcaagataatggaggtagggcaaataatgaacttccaagagaatggaaagcctcaagagatcatcccctcgacaacattattggtgatatatcaaaaggggtaacaactagacattctcttaaagaattatgcaataatatggcttttgtatctatgattgaacctaanaatataaaagaagccatactagatgataactggatcattgtcatgcaagaagaacttgaatcaattgaaagaaacaatgt

SEQ ID NO: 133794 - DNA, 377 bp, Glycine max
taacgcccgtccgagaagcgaaactcttgggaacacatataaatagacttatcacattgatatcattgtaagagcaatcacgagagaagaaaatattagaaagtacacgtacaattatctcaaacccaaaaactaactacttgtatattttatcttggcttaattgttaacaaatttgggagttcaatttttcaaatagactctcttacacctaggaacttttgggattggtgctatgtacataacacgatggatgatcattgtgaataaatataggatagactctgcatccatatgtgcgagtgtgagttctttccaatctgatacaaagaaaaaagaaatgaaaaacactttgtggcgagatatgtaatgaatga

SEQ ID NO: 133795 - DNA, 453 bp, Glycine max
gcagcttcactaaggtctcgtctggaaagaggtgttatgaggagatggccgccttttcttctgtagtcttagactccgggaaatacttttatagaaatttttcaaccacttcatcccaagtcttaaggctgattcctttaaacaaatgtaaccatcttttcgcttctccatacagcaaaaatgagaacatactcagctgcacagcatcttacggcacaccagcaagcttgactgtattgcaaatttcaatgtaagtggccaggtgtgcatatgggtcttcattcagtaggccatgaaatacatttccctgtatgagctgaatcaaagaatgaggataagtaatattatgtgcttgaacctctggccgtgctatactagtgaaaaactgcggcacagtggaactagagtagtcttcaagggtcactcttctacgtcgatcattcaccattatgt

SEQ ID NO: 133796 - DNA, 104 bp, Glycine max
tgataaatttaaaatattggttgaacatgtgttaattgttgagagacgaaaaattgggaataagagggagggtttgagagattgtggttggttatatatattaa

SEQ ID NO: 133797 - DNA, 307 bp, Glycine max
  unsure (1)..(307): unsure at all n locations
cccaagtgggcctgattactatttgcacccccatttttactaagtacacccccctgccttatttttggtgatgcttttttcgcaaaggtacgaaacttacgaatttcgtaacgatactcgntatctttccgtaatgttacagaaccttgcggattacataatcatccccattttgacttacggaatgttacggaacctcactaattgtgcaacgatgcttacttttgattttcggtgcgtcacggaaccttccggatggtgcatcaataccttcttttgatttccggcatggtccggaacttcacaa

SEQ ID NO: 133798 - DNA, 302 bp, Glycine max
acacttagaatactaacctagccatggacctgggtgttgcacaatttcatcatatctttctgtatactcacaacctctatcatatctaataatattcacccttctgcctaattgccttattacttcattccaataaatttctaaggcatccactgcttgagaaatcttatgcaataagtagacataacccgtacgtgaattattatcaataatgattataaagtatcattcatttctgaaataactaacatcatatggttcacaaatatcagtttgcacaactttaagaagctgagtgcttc

SEQ ID NO: 133799 - DNA, 314 bp, Glycine max
  unsure (1)..(314): unsure at all n locations
gcatagcggaaaataaagagtgtctggaagaagaagacatacacaagagtgttatactgggttcgcaacaaacccgcgtctacattcagtccccaagcgacctgcccgccttgagatttcttttcaaccttgtaagatcctttacaagcaaagatccacaagggatgtaccctctcttgttctctntgaacaacctagtggatgtaccctccactagaactgatccacaagagatgtaccctctctgtgtctcagtcacaacaacccaagtagatgtaccctctacttgtaccacagaggatgtacccttcaat

SEQ ID NO: 133800 - DNA, 359 bp, Glycine max
gacacatgatctaagctggaatgcctgcctaagaccggattggatcattttagtttgtataatataatatctaattatctattcatatcttctgagttttcaaatgggaggatggagtcaactcactcaagtttataaattgttagttcattctaagaaagaaaaagaaacacaactcacatggagccagtcaatacatcatatattacagtcaaaaccttgcctccagtatatccttcctctattatcatatttgcaccaaaccatacagccagaccataactgcagataaaaacaaagtagagcaaaccaaatcccaaaccataggcttgtgcctcatgcacttcagtcttttatgc

SEQ ID NO: 133801 - DNA, 324 bp, Glycine max
  unsure (1)..(324): unsure at all n locations
ctctcgatatgaaaccatcgtgtaggagcgttgagcaccaacagcgcttcgaggccataaaggatggtcattcctncgagagagacgcgtncagctcatggatgacgagtatactgacttccaggaagagatagttcgccggcggtgggcatcgctggttacccctatggccaagttcgacccagacatagtgctcgagtgttatgccaatgcttggcctacagaggagggtgtgcgagatatgcgatctcgggtaaggggtcagtggatccctttcgatgcggatgccctcagccagttcttgggataccctttagtgttgga

SEQ ID NO: 133802 - DNA, 268 bp, Glycine max
ctcctaagccggaacgccggcacatagggatgatataagcctgcttttgttaacgttgagcatgatctccaatgctccaaacagctgttctcaatgtctgctaatgaatcgactgtagaagaggacaatcctaaatttgctcatccatctttaccaaatgattacactcatgaattctctaagatgaagggttttgtgttcctgaatatagagtgggctgttcttaagcgtgaatttatgatcctaaacgttatatgtgatatatgtc

SEQ ID NO: 133803 - DNA, 332 bp, Glycine max
acaacttacacacagatcaaatcaacatgctgtggaatatgaagactttgggacgactgggtgacatccactatgccgacctcatcaacacagttcttttgcgatactaagcctcacatgtcttcagaggaatggatgatgactcctagcagaccattatcaacaacggcagcttcatcactagataacaacactccagtgttgtaaacctgaaagtaatgaacgttgacatcaacaggaacatacttattcctctagtgaactatgatgacattcagcaaatgaggtagaagatactggccattgctattgcttataaagacatggctttg

SEQ ID NO: 133804 - DNA, 333 bp, Glycine max
  unsure (1)..(333): unsure at all n locations
ttnttgtgaaagaatgtgactcttcacattttgaatttgtatttcaacgatcaagcacactcgtaatcaattaccaaaacattgtaatcgattacaactttgtgaaatcaattggaacgttgtgaatttagttgaaaactttttcaaaaacattttgctactggtaatcgattacaacaatctggtaatcgattaccagagagtaaaaattctttggtaaacatgttttgagaaaaatccatgcgctactcagtttttgaagaaactttatcatacttgattcagtcttctcttgattcttgaatcatgagtcctgaatcgtgatcttgattc

SEQ ID NO: 133805 - DNA, 266 bp, Glycine max
  unsure (1)..(266): unsure at all n locations
gcaagtccctccaattctacacatgttcctacttcacaacaaatggatttcatttaagtattacgtccaaacaaagtataccactgtgatgatgcanatgcatactttgtgaagaaccttgatgatgacttcatggagtgtttgatgaagctaaccattttcttctaccatcgcgtcttcgacattaagaagaagactatggaaaaactagaagccctcatccaacaccttcattgatggcaacatgctaatagggccaaatatga

SEQ ID NO: 133806 - DNA, 357 bp, Glycine max
  unsure (1)..(357): unsure at all n locations
tcaatggagaatgaagaagattaaagctacgtgagagatgtagagaaaaggcttctgaatttctgctttggctgagtgaggagagagaaaagcttnttggttttaaataaaaagggttttcccctttttttttccattattttattcaagctctgccacatgtccctatttgattggagcaaaaagggcccactttctctttttgactgtgacccatactcagtcacaaaagtgagaaaaatctgacctttgaaacgctacaatcctgcctcggtttgcgtgccgtttctctgattccaggttctcgcgtttctctgcgtccgtcggggccagttttcgaaagcagccatatatata

SEQ ID NO: 133807 - DNA, 236 bp, Glycine max
  unsure (1)..(236): unsure at all n locations
aaagaatcggtagttatcatctcattattgaaactaagaacccaacacagggcggtgctctgccaaagaaatgatatgttgatantgaatggtcgtctcccccacttatgaagtcatttctacattaaaggcccaacatgtatttaatgttggttaaaccatgatcatgtaacacagcatanatgctgttctggctttgctatcagcgcttgtgataaggtcaagggtcctattca

SEQ ID NO: 133808 - DNA, 482 bp, Glycine max
  unsure (1)..(482): unsure at all n locations
agctatacaatcaaacaactgatcagttttcattgcatcatctccgtcctcttagagagttatgaatgccatggttgccaaaaataaagatgcnttgatagttgttacgttttatcaacgcgggaggatggtataattataaatcctcatcattntatttccatattttggttaagtcattcgcactttattctaaaaagaattctaatcacaaaaaagggtaattggttctatgtcgtcactgccatatcctaaaagatggattactcttatgtgacttgtatcaaataattaagatagttaccagcctttattagaattattctccttaagtgttctccaaaatgatttgccatttattacatatactcagaaataatgtagaagacattattgatgtatcaagtttctctggagtttaactcatgtacatgcatcaatatctcttttattctcaagcagcanatttaccttaacgtcca

SEQ ID NO: 133809 - DNA, 437 bp, Glycine max
  unsure (1)..(437): unsure at all n locations
aagcacctgaggcatgcaagcttgacagnccatttggacactcctctttgtttctctgcagatttttattcagcagatcttaacattgaagcaagcctgaacatgataaggtaatggcttaatagtcatgatatgtattcgcccttatcttacattcctaattatattaatattaattttgctcctaatttctggctataattgatgtcaatactttacaactgacaggtaggggcacataatcatggtccctagtataatggacatggaataattaagtgtttttttataagaaaatctgtaaactgacattgctgagttcggtccgaaattgtgatatgctgcacaatgaaatgttcagattactgcacgactatcatgcttattacaataattgtcagaacctaacgcttggtattgtgaaacaacaagatgat

SEQ ID NO: 133810 - DNA, 431 bp, Glycine max
agcaccgcggctgcagctagaaggatgcttcaatgcacgaaattatttattgagagaaagagagaggggggagcatgaaactgaaggaataaaagagggagagaagtgcaactttgatgtatgcctcacaagactctcattcatcaaagttacaacaagtgtgacacatgcttctatgtatagactaggtagcttccttgagaagctgtcttgagaaaacttccttgagaagcttctttgagaaaacttccttgaaatgctagagcttatctacacacacccctctaataactaagctcacctacttgagaagcctccttgagaagacttctaaagaagctttagcttagctacacacaccccatataatagcttagttgaccccatgccacaatacatgaaaatatataaaattagccctattacaagac

SEQ ID NO: 133811 - DNA, 499 bp, Glycine max
  unsure (1)..(499): unsure at all n locations
gcacctgcggcatgcagctcggacttaagatctggctttgttctttactcttcttggaagctncatttaaggtaggggagtcttttcacttcttataccctaactatgttgtctttggaagctaggcttcattacatgctgttgcgatgcttaaaatttcgtatctactgccatgactagaactaaataatatgttgtttttctagaagcttaaaggttaaaaatgaattctttgcatgttaaaacacaacgttatcctttaataatactcaaattgaagtttcctagcaaaagttatgaatataacaagtttaagtttcctaacagaaattatgaatataacatgttcaaggacattctgtataataaatatttgtcaccaacatatgtatttatacaagttgctgcacatcggatacaatatattaaatcttttactcatcaaccatgtttactaatatagacgtaaccaattcacaagaatatcgttataatcatt

SEQ ID NO: 133812 - DNA, 347 bp, Glycine max
  unsure (1)..(347): unsure at all n locations
tcatgcaacaattggntaggcagggctatacgagacatcttgccaaacatagtcaggttaacgataactcgcctgtgctttttcttccatgctatatgtagcagagtcattgatccactcatgtttgatgagttggaaaatgaggccgcaattatactgtgccagatggagatgtattttccccctgctttctttgacatcatgattcacttgattgtgcatcaggtcaaagaaatcaaatgatgtggtcttgtttatctacgttggatgtacccggctgagcgatacatgaagatcttacaagggtataccaataagatatatcgcccagaaccatctattgttga

SEQ ID NO: 133813 - DNA, 433 bp, Glycine max
aattcatattcatcgcgtaatgaggaattggccttctggattaaatttaacctatataggcaatggttttcactaatgaaaacaaaacacataaataaaataacaattttttaatcagtagatgagtgatgtaaattggtacaagggtaacaaaacccatatacaaaacttgtgaaaccacacaccctactgtccacttcactggttatttaatattttgctcatcacagagagaaaaaatattttccttcataataaagagttaacggcttattattatttattcgtaaatatcttgtaaaaaatacacttgaacgaaaacgaaaaataggataagaatcttttgatttatcccacatctatcccgataattggaaaatcatctcacataactaaaaaacaatttacaaaccaattctacattcttttcttt

SEQ ID NO: 133814 - DNA, 290 bp, Glycine max
  unsure (1)..(290): unsure at all n locations
tgcagctattcgaactacattacagcgcctacataganaattattgcatgccaaggcaagcacaacatcaaggtcaggcccaaccgcatatgcaccattggctcctttacgacaaccaccatctctagagcccatctctgctcacatgcggaggatggagctccagatgcccgcatatatgcagcatgtgatcgactagcatgcagtcaatcatatggtgcaagtgcagctaaaaagagcttttacgcgatcaccttgcctcaacagagccaagatgatatccctttccc

SEQ ID NO: 133815 - DNA, 423 bp, Glycine max
  unsure (1)..(423): unsure at all n locations
caaagaataggcgagagattcggagccaagaataatgctagaatgtgtgatacattttcatgaaggttaggtatcataactcccattttcgttgtgttcttacttgacaaacagtgtgcatataagaattttttcaattgagtacaactttgcccactgaatttgtcgttacaggtttcccatcttacctaccaattaccatttgcaaaggcctaaacttagtttgtcagtgcttgcaggagttaacgtaagagaagttaatgatctttcttcataaaaataacccgaagtctatgtagaaagaaaatataattttagttaccaactttctttattnttggttatgggaataggccaggtaaaaatctttgatataattctgaaagattccaaaaaaataattaatcacgatggacatgaaca

SEQ ID NO: 133816 - DNA, 283 bp, Glycine max
agctagaacgtcctcaaatgcatcctatcttctgtaggtgctgctctaagcaactgatacaggtcatggccaacgtggacgtataagcagcttctgaagctggagccacagacacgtgtcgacccgctctccatgcaaacgtccacgtaatcatccaaaccgggttgcatggaggctcgtaacgaagctgatgatcgggaaataacacaatggggtcaactggcttttgtcaaagatattggttcggtcagtcggtcgtgtccactatgagggtcacaactta

SEQ ID NO: 133817 - DNA, 354 bp, Glycine max
  unsure (1)..(354): unsure at all n locations
agctnctatatatgtggccacaagaattttgttttgctgnctctaaacagacatatctgctctgataagcttgcatctgaagattataggcggtgggatattaaatgcatgcatgtaaatacacgtacttcttcatgctgagaaatcactcttcgtcgctagccggggtgaatactaacaaccaggaaatcacttccttttatatcaaagcaagtatgtgtagcacagcctctcttttttatggcaattgacgaagtttagagcttgaagtcattattctcataagattgatggatctatgagaatgccctataaaaagatctcgacaaagataaataattctaaaggcatttt

SEQ ID NO: 133818 - DNA, 322 bp, Glycine max
tcatgaactgatcaagaaagcttaattatgtgtcaggtatctaacctgatatatctgtccattaaacattccacgttgcactgatgacttatctagaatcatggcatcctccatatcgtatctgtgattatataacacgagatatttgtgaaccgcacatgaagggtaaaattacagctgctttgtattaaagcagataccctgtctatgccagaactgtgactatagcatttgtgcctgttggaaaatcatcaatgttgcatttagtatatgcactagtgcgtacaatgggagtctgaggagtctgaaaatggcccaaaat

SEQ ID NO: 133819 - DNA, 330 bp, Glycine max
cacttgggtatgacatgaacgctcggcgcaaacaaaggaattgcaattccttcctctccatttcatcgaaccctgcttctccagctttcaacttcaatgttccccaatagcgacgatttccatcttcctcctctaggataatagcgaattccacgactaaccgatcctccccttctgcccatgacaattcttcgcgtgcctcgagtccaagttccataagtccatatgtagcttgtgtgtcatcaagacgctccttgtaaatcttcatagtgtgcttcacatcgacgctagaatcatcgagagcttgcattaaacttgccccataatcgc

SEQ ID NO: 133820 - DNA, 374 bp, Glycine max
  unsure (1)..(374): unsure at all n locations
ttaagcacctgggctgcagcttcgttccgaagcattctatttttcatttcagcctttgctttcgtgtagcttatgaaaaacgcaatttcttcttctttctttcttccaaagccatttctaaagttgcacgaactttatccatcacccacagccaccattagccaccacaagccattgttgttctccacaccgagaggaagccttcaaccgaagcggaatcttccaacttggcttgcggtttcggtagagaatgaaaccctaatctgacctttcgttttctttcgaggtaaccatggctctacgcttgtttgttgttagttntatcttgtacttgcatcttttctgactttggaaccgccattggatgtcttatg

SEQ ID NO: 133821 - DNA, 295 bp, Glycine max
tagattttataacctcatcaagacctattgccactcctctctgaccatggaggcaacccactgaggtgaatccactccattcatagcctcaccaggaggcgtacccgctaggagttctaacaagaggaaccagactgtaacatctggtgtgcgtgctttttcaactacaaagcacagagctcggatcccaagctccagcaggcaacgacgcagaatagcacaggtgtataaccgagaaaaccaaatcggatttagcttacatctcaccacaaacatgctggcgtacgttcatgaa

SEQ ID NO: 133822 - DNA, 216 bp, Glycine max
tttttttacattctcaccggactccgtcaaagtatatcgtagaattgctcacacttcatttcaattcgagcggtcgatatgttccggactaattccgacctcccagcttaaagttattgccggttgaatttgcttaaactattgcctgaaacttgagcggcgttgattactatgggacacattctgacctccgcgaccaaagtgtttttcatttga

SEQ ID NO: 133823 - DNA, 355 bp, Glycine max
  unsure (1)..(355): unsure at all n locations
ccatccatgtgaatcaatacacagtgaaaatatgaatcaattctaatggctgtataaatcattntggccactggtaatcgattacatcctctggtaattgattaccaaagagtaaatcttttgaaaaatacattttacttaaatttcttggccaaacctcttgctggttcaatttggaattcccttcctaaatcactagaagatcncttggaggatgaatctcgaaactcttggatttttggcttgaactaaacctgagaagcgcatgatcacatggcatcaaaagaacatgatcatattgcattatcaaaacattcaagtccaagggtttggtttctacaatctaccctttttt

SEQ ID NO: 133824 - DNA, 447 bp, Glycine max
tattggaaaaagattttttttttagttttttggacacacccacgaaccatctgcatctgtgtaaaatcctatagaccctgcacaacacaaataggtcaaggatgcacataaatatgaaaatgagccataagttatcaattaagctcagtcatttgttcaagaccaaagctaagttttagtgagaaaataaggctcaaagagatgttaatggagcttataagaatagatatatactgaactacaagtgatcaatcaatacatcatattatatttaaaagattcgtttaacaacaagatattttcaacaatactataagtgtcttaatcgacaataaaatagtctttctccctttatagtgaaagaaacttgagaccaggtgtttaaatatcaatgtccctttaaggcttacaaataaaaaaaattctctgctccatcaaacatatcaa

SEQ ID NO: 133825 - DNA, 448 bp, Glycine max
  unsure (1)..(448): unsure at all n locations
ggatcttaagtcacctgcggcatgcaagcttgagagagcccgggtagtttatgattatttcaagtccatagccatcaaagtttgaaaagagtatgatgaactaagggatgtcaatatggccaccgatgaagccttggaatgagaaaccaagaaggcccgaaaggaagaacaccaccaaagccaagttntgaggggctttatagggcagcaatagtgagctcaagctccgaagaggtgaaaggaatcatcacgggtcaaaggcatgatcttgaaggacgagctaaaggctcgccttatgtcgaaaagaaatttgtcccaacagttaagcgagactgaagggaatatgtgggccatcatcgatgagtgcaaagagaagctaaatctagcggcgactcacgagcaaaggctataggatgagtacgccaagatatcatcagaaagcgaacaa

SEQ ID NO: 133826 - DNA, 389 bp, Glycine max
  unsure (1)..(389): unsure at all n locations
agctacttncattagaactctcttctgatctttctttatatacttatgtattggcttctggtattgccaataaaagttggcgaatattttttttatttctgacgattactaatgctaataaatggtatgatatgactaaatgtgattaagatatggatgatttgatattagaaaaagttttagcaacaatattatttactcctatgaaacttaaataatatcgtgcaattattccaaatacattattgataacattctgtgtaaaaataaaatttttaattaaatccacataaaaaataaatgtaaaaatgcggtcattactataccactatcatcacgaatttgaaaaagttctattttttatgtaaaatacattattaatcttccta

SEQ ID NO: 133827 - DNA, 405 bp, Glycine max
cctccatggcttaattcataatggatggcgcctgctctcacctctcttccttggtcttccgctgcatctacatggtggaaaagcaccattagaggaccccattgaagctcaaagatccagcctccatagaagccccacaagcaagctctcatcaagatgttagcctctcgaggcttgctttccttatatcttctatgggagtgaggtctaagatgtgacctatgccttccttcgtaatagtcacgaagttcttcacttatgctcttgcaagaagtatgactactataggaagcatattggtctctttcattagcttattagaaacctcttcctcctctgcatattccttctttctccagcatattaatcactcttttatttcattgtctttctctctgggttctt

SEQ ID NO: 133828 - DNA, 374 bp, Glycine max
  unsure (1)..(374): unsure at all n locations
caccccacgtaaatatgccacattcttcttcaccagcatattgagaggtgatacaattgtagagaaattatgagtgaaccttctatagaagcttgctccccatgaagctcctaatatctcccaccttttagggtgggccattcttggatgtacttgattttctcagggcccacttggaccccatttctaccaactacaaaacctaagaaaactatattatctacacaaaaggtacactcctatatatctgcatagagggtgcttttcttaaggactgaaagaacttncctgagatgtcctaagtgatcatctatgctcctactgtatactaaaatatcatcaaaataaacaacgacaaatctacctatgaaatc

SEQ ID NO: 133829 - DNA, 482 bp, Glycine max
agctcgctcgtctagctgatatttatcatgcagacttttctgatgatgaccgaggaacaattacggatcaacttgaaacttatgtgcttcaagtgagaagaaatgcttctttttccacttgtgaagatgttcaaagtttggctatgaagatggttcaaactgagaaacatttggtatttccattggtttataaacttattgagctagctatgatattgccggtgtcgacaacatccgttgaaagagctttttcagcaatgaagattatcaagtctaaattgcgcaataagatcaacgatgtgtggttcaatgactcgatggtatgttacaccgagcgggagatattcaagtcacttgatgatattgatattattcgaacatctaccgcacagaagtctcggaaaggacacttgcctcgtaatattatttaacccgctattgaagaactatgttatctcttttagtttaactattttttggtg

SEQ ID NO: 133830 - DNA, 344 bp, Glycine max
aagggatgccccacattatttccatgacacaaatgctaaactgatgatttggaaattttatgcacaactgtgcatgcatgcacctatgcggacactcaagtgtcaaatttttatgggcatgtgatgctacggctcaggattcatttcctctatttttagtcaacccaatgtttccaaaatatgttcttttatcaatttgtgcattcattcgaatccattttgggcgtccgggaaaatattcacagcattcacccttcaggtgtatacacatttgtcaaacactagttatgatcagtgaatcttttcaaaaaaagttggaagtcatctcttttctaaagcatgtt

SEQ ID NO: 133831 - DNA, 370 bp, Glycine max
  unsure (1)..(370): unsure at all n locations
agcttaccagaagcgccaatcagcggactttgtttctggtgnaanngcctgagctatcatgagtaaagatcgatgacccactcattaatacaactagcttattgctagcaaaatcgagtcatattcatagtcctgatgcttgcaatgataatttccttattgcggtaatgcttcttctgatgatgagatggcttttgatctgaggatgaatcttgttaccctgaaaggatctgagtgcagattgacaagcgaccaaaaagcattggtcattttttacaaggaccttttaataacaccttaagacgctcctctcgtggtgtgttgaccatcttgtatgacatgcgtttttgtttacattagtaaactaatc

SEQ ID NO: 133832 - DNA, 435 bp, Glycine max
gccacctgccgcatgcagctttcaatgaccatcacaacgatgatatttttctgaacctgtatatgtctttggataaccattgtgtctcctttatgcatagcttgcacggtcctctggtcagtaagagttctagaagttggatgatcacttcagtaatcgattacttccatgtgcttccatactctgaaataatctcaaagtggatttctaggttggcatggttctcctttgtaaaaatctttatttagattgacttagcagaattttgaatccatattccataaccaatgttattttcactctatgcttcatgacttcatcaaatatgcttgactagaggtcataagtttggccacctaccagaataagaaaaaagtcaactaatgtcttccttaaatttattttttgaccatattgtgcctaacacagcacatt

SEQ ID NO: 133833 - DNA, 378 bp, Glycine max
aagtggtggggatgtctcttccacctctaggacctctcaatcactcacaaactcacctcacgttctcaggacggcttccttttcagctctggactctgcagatcttcacacaacaaaatctctcaaactctctggaattcacatctctctctctctagaactgaagacatccaagagctcctcaagaaaatggccaaactccctctctaaatctgattttaggcttaaataggtggctttgttcgagctcatgcgcttagcgtaactctgatccgctcagcgcacattatagaatatcggcttagcgcgtgcgtttctcgctcagcggatggactgaagccgtgcgcttatcgggatgacccttcgcttaacgaacat

SEQ ID NO: 133834 - DNA, 376 bp, Glycine max
  unsure (1)..(376): unsure at all n locations
tcaattagttcatcaacagtaggaataggaaagctatctntgattgtgatggcattcaaggccctgtaatctgtgcaaaatctacaagtgccatcctttttcttgacaagaatgattggaggtgaaaaatggcttctgctaggggcaataatcccttccttgagcatgtcagctatcattaattacttcaatctgatccttccggctgcgaggatacctatatggcttgacttttactggtccagcaccttgaaccaatgggattgaatgattgtgagttcttctacggggtaatcctgatggcacatcccagactgttctataattgtaaagtaaacaggtccgcaatggcatgcgtatgctgcattctctcaag

SEQ ID NO: 133835 - DNA, 411 bp, Glycine max
attctttcagatatcatcaacacctgtttgagttacattctccccctttttgatgaggacaagcattatccaaggcttaatttttttgacatcatcaaaatcgttatgattgacattcttccccttcttgatgatgacaaccaccttgtggttaggagcaccaacaaagaaaaaaaatatctatgtgcatatagcttactcccccttggttttgcaatgtttgcttatatgagacaattggagattttctatttttcatatattaaaagtggtctcatataaagaataaagaatcctttcttattaatatatcttgtatctttgtctcccccattgacaacatcaaaacatttcatgaatagagaggagaaaaacgctcccacttgttggattgtagagaatcaattgata

SEQ ID NO: 133836 - DNA, 178 bp, Glycine max
atggtaagagactccagtaagattgggccatggatgcaagagaatgccttatggctctcatgagccttatggtagctattgggcccatgggttaagtatgtgcccacttatctttgttaatattagattattggttcattatttttttgggccgtagatttatggcaccacaggtgta

SEQ ID NO: 133837 - DNA, 305 bp, Glycine max
tgcacttcatttgtgttgagttgcatcacaacaacacacttattcacacttagcacattcaactagttttacagagaaagagtctctaagcttatttgaattggtggaatgaaatgaaatggaacatattggagagaaacaaaacatactatagtaaaagtgctatttcattggtaagatatcttataagggaatggaagacagttcttgatcaactgtttggaaagtgatcggatgaaataagcgataactttttttattcccatattacctttacttttagacaacccaatctttatttatat

SEQ ID NO: 133838 - DNA, 376 bp, Glycine max
gaaagagagaggggggagcacgaaattgaaggaataaaagagggagagaagtggaactgtgaagtatgtctcacaagactctcattcatcaaagttacaacacgtgttacacatgcttctatttatagactaggtagcttccttgagaagctttcttaagaaaacttccttgaaaagcttctttgagaaaacttccttgagaagctagagcttagctacacacactcatctaaaaactaagctcacctctttgacaaaatacatgagaataaaaacaaagaaccctactacaaagactactcaaaatgcctgaaatactatgctgaaaccctatactacttaaatggggcaaataccaaggcccaaagaagggaaa

SEQ ID NO: 133839 - DNA, 363 bp, Glycine max
  unsure (1)..(363): unsure at all n locations
tacagttataacacattccaatgcacggtcactccatttcatctctctattatcattaaatccaacttccctttgagccttaccaatattaaaacaaatacacctttagtctttaaatataggcttatactaacatgtttgagttgatttttaaaagtttactatgaacaatatcttacacagacaaccacatgtgttgatgttgcagataatcactttccttcagcaaaatgctcatcctcgtgttgcggagaagataccatctgtgcctgaaaatgtcacagaacaggntcttgaacttaatattgtgcggtgcatgcatgcatgcacccttgcttatgtactggatatttttatattttg

SEQ ID NO: 133840 - DNA, 190 bp, Glycine max
ccattcttatcaattaaaaacttttgtcgaagatcctctaaaaaatttgcattctaataataaagccatcattattctgaacagcaaaaagcattacgccataacaagaactttcacaaatataaataaaaaaaatgactcctctagaatgctgtaaaaacaaactccaaaggccaccacgactctgtaa

SEQ ID NO: 133841 - DNA, 397 bp, Glycine max
tttttgcttttattgttgaccacagagtggtacctgtagatatgtcgcggaggtcatgagaccttgtggacgacaagtggggtgctattgcccaaaaccaagcttgaccaatcccgacccaacccgggcatattctgtcagtgagaacctgtgatgtacctaatcaggcgagctcctggcagtcaacagattaaaggaacaaacaccacaaagcaaggaggcttgtggtggctggccagctgtgaatcttgtgtgatatgtggattatggcctctggtaatcgattaccaagggtgggtaatcgattactaagcttacaaacgaagaccggaggctgagatggtctctggtatatcattaccaagggggtgtaatcgattaccaggcttgaaaacta

SEQ ID NO: 133842 - DNA, 488 bp, Glycine max
  unsure (1)..(488): unsure at all n locations
agccaccgccgctgcagctattgtgcttacgcatcggntcttatgttccattgcaggcaaacagcgagaaatatgaggagagacaaaggtgttgtcctcattaactcctgcagttaaaggttcttgaaaatcttttttccagtaagacaacatgatttttaaggaaggtcatgattcttcgttccttttaacaaaagccatgctatatttggttccgggcctctttcacaaattcattacacttgctattgcaactctcacttctatacttccttcgttttatatattcaagatcaaaaaagaaaaattatatcattaaatatgtctgaaaataacataaattctcactcatatcctaatataattatatattcaatcaattcccctaataaccaaataaatatttaatctacattttcattgttcattctcttttccatgtcatattaaacattacctattatcttacatcttcatcaatgaatacg

SEQ ID NO: 133843 - DNA, 392 bp, Glycine max
ccgatttgatataaagcttgagtgtctgaccactcagctgaaacttcccatacatatataataagaccaaaggtcaacaagtacatgagatgagagggtgcagactgcatccccctgatcaaacagttacagcaagtgaaaagagaaaagagtggttcagacgtataaaataataacacaaaggtgcgtataacactaacagatttagagagaagagagaaggagaatgagaattgtattggggaattcaacccaactgaagacaagttacaattctgtttatataacagttacagttatgtgactgccaactgaccttagttagtgacagctgtcctaactaacaactaacccacagcaagcctactaactatagttagacttactgactt

SEQ ID NO: 133844 - DNA, 439 bp, Glycine max
  unsure (1)..(439): unsure at all n locations
accccttaactacgagctccttcacagattatgagacagacaaaacagaccctctaaccacaagcttcttcaaagtctgccaaacatgcacaaccaacccctaatccacaagcttccaacactgtcaaaagtgagtagttcggacctcaaaaataatcttcaccaaagtctatcaaaagttcaaagtctgagtcacaaccaacttcttaatcacaacctgttacacatacgtcttttgggactgcaaagtccaccaacttggtgagatggcaactgatgctgaacatcaattatgttggtcaaaagtgacacatataatggctctatattatatgtgcaaggagatggaacacctancacaaaatcaaaatgtcatgaagatcaatacctgttgcatgaatagcccctactgagattacagtctaaaaatgattttaga

SEQ ID NO: 133845 - DNA, 399 bp, Glycine max
  unsure (1)..(399): unsure at all n locations
tgtttcaagttattactntggtggtgttggaagatgaaagaacagacattagtcttgaaatttggatttagagctgaactcaactctacacatcggtttgtagggtgagtatgacttaagccttatagggactacattgatcatatctctagctgatgagggatctcaacacactccctctcacccaggattggatatctggagcgtggacaaatgtgagtgacccaataatcacacttccttgctgcctaggaatagacatctagagtgtagataaatatggatgacccaataacattctaagataaactttgatacaatctaagaacttggacttaaagctgaactcaaccccaccaaatagcatgtatgtgatgacggctaagcctatgagactac

SEQ ID NO: 133846 - DNA, 367 bp, Glycine max
ttgtgaaataatatctttgggaagagaaacttccctcacatgtagctatctttttcgtgcatataccaaaatctatcttagcaaaaatttgatttcgtacttgttaaccgttggatcgttaaaacattcgaacaccgtgttcggatatcatttgtgcatatctccaccgctgggattagtcataattgtatgtggagagagaaacgtccctcgcatagagacagagaaatggaggcgctcgatgaggtttttcactgacattgtaccatatagcatatacaattgaatcttagtgtatctgttgcataacgtatgtgtaaagatatctgtgacttgttcgtgaatatgttgtgtatgaatgtgaaat

SEQ ID NO: 133847 - DNA, 362 bp, Glycine max
  unsure (1)..(362): unsure at all n locations
catatccactctgcnatanggattttgtgatgatgtatgcgatgtttatatgctgaaattgctgatggaaatctgctatagatgaatggtagaactaacccaaggttataaagtgagaatgtgatgttatgaatggaaaaagagtgagactttgagagttggaaggctaagtctgaattctggggtaaatggaggttaaagtgagttaatactatcttgatatgtcatttaagacatgtgagaaatgctatgctgagcttcatagatatacaaatgaccttagtgaaccaagagcctattctagggcaaattgggtgtagaagactcaaattttgattcggtggaattcttggtgtaaattc

SEQ ID NO: 133848 - DNA, 415 bp, Glycine max
ggatctaagcaccgcggctgcaagcttgtggccctctccctaactttttctcttcttccgcgaacgcgatatagatattggtagatatgtgattaacaatgccttcaaaaccctcgactgagatgtcgcgtgctacgtgggcttcgttgaggactcttaccaatagtgcacgatgaagctcggagtttaagagcagttcgcgcaaagagatccttgctggagttttattcaatggctcaactactttaaactcactttgttggatgagacgaaggaactcatgagccttttccaaggtcaccacctttccttgaagaccttctttcttttcagctgcctttactacgcggggatccacttcttttgagggggtggccgcgcctgccgactcttggatcatgggtgctttcccctt

SEQ ID NO: 133849 - DNA, 331 bp, Glycine max
  unsure (1)..(331): unsure at all n locations
cagcagctatcttgatcttattgtgatcattgcactctgaagtacagagtccaaggatggtacacatctctgccttcatgctgnggctatgatattaactcattctttacaattaagcagcggggattcttctgagctaccaggacatggaagtcaatatggatggcgatttgttgctaatgaccaacactattcaaaccggtaaacttctcagcaactgaaatcaaatcccaaaacacgctcagctcatggtgtcaaagtatttcactcacaacctgcactgaagctgcatacaatgaaattgagattgagcaagtcagaatttattcgt

SEQ ID NO: 133850 - DNA, 496 bp, Glycine max
  unsure (1)..(496): unsure at all n locations
gattcttaagtcacctgcggcatgcaagcttatagaactataatgtctcaatcatttccaaatatgcatgtgaattaggaagcatcaacaagaatcaagccaaggctattgtgcaacgaatcaatggggcaaaacacaccaaatgattatgatgatggatggctcatattctcacaaaggtaaacacatcactttcaaattgagctttctaaactatcatgacatgtagaggagaatcaaggatttcaagtcacaaaatgtcaagaacttttattttcaaaacaattacccatttcttgaacatatcctatgattcaaagaaaaacatgcaaagtcgtacatgcacacaaaatngacccaaaatattaaattaaaaatccgacgaaactaacaacattaacacattaacaccacttacaaattaacaaaaccaacaaaactagcataactcaagaacacttccccccctcctcatacttaaacaacacattgtctt

SEQ ID NO: 133851 - DNA, 485 bp, Glycine max
  unsure (1)..(485): unsure at all n locations
tgcaagcttaacactcatataagatgtcactcttatgttcttacaggagcttaataccttgtaaaacagatacaagtggcagtcacattacaacagggtcacttttaaagctcagtcttgacaccagcatccatgcttgaacacatgtatgataatacaacaatacctgtagtacactaggataatcacggtccaagcagacttatactgactatagtcgttgatggaagaccagccaaaaacctcttcacatactctgcaagatctacagtggtatcaggcgcaagcctgcaagaggaaggaacaaagacattgagcactgattcaagttagatgtcaatcaattctttggttgccttaaatgcaaaaagaacaatagctacttgataaggcatatgtgcctcttngatgtataagatccactatcatatgaaccctgaatggaacatatttcaaaacaattaatggactggcttgattgcttc

SEQ ID NO: 133852 - DNA, 499 bp, Glycine max
  unsure (1)..(499): unsure at all n locations
agtcacctgaggcatgcaagcttgnttgcaagaaattngctcatcattatctattatgaaagaagtcaacaattaagagcagaacatagggaggttacagtaagaatctagcatacacactcaaaccatattattaaggcctttgagccattacccacttattctttacattatgaacaatactaccaatcacacaatgtcacccaaacccatcacaccattcacaagcccccctcatcctctcatttatatggagcctatatgccattgtgttggtgctacatggtttatcacgatgacaataaagtcctagtggccaaccaattaccgcaagagcggatcatgatgtcattggtgccaaagaacctgaaatcgtttctagttgtgaaacactatgatggcactaaggcccctccaaacaccttgacctctttgagtccttacttttatatagagctgcaaaatggtccactatatgaaaccctttttctttaacact

SEQ ID NO: 133853 - DNA, 391 bp, Glycine max
  unsure (1)..(391): unsure at all n locations
tacacacactcatctaagaactaagctcacctgcttgaaaagcttccttgagaagctagagcttatctacacacccctataatagctaagctcacccccgtgacaaacaaacatgaaaatacaaaaaaaatcctactacaaagactactcaaaatgccctaaaatacaaggctaaaaccctatactactagaatggccaaaatacaaggtccaaaagaagaaaacaacctattctactatttacaaagaagagtggacccaaccttggcccatgggctcaaaaatctaccctaaggttcttgagaaccctaagaccttctntatcaactctaatccatatttcttggagccgtctgttcatggctctagtaactggtacatttctaaggag

SEQ ID NO: 133854 - DNA, 395 bp, Glycine max
gacctgcggcatgcaagcttatggaatgtgcataaacattctttattttttgtgcatactggacttgacaagaaacttgagcaagttgattctactgtggcttttaggtctcaggaaagatttgaagctttttcatccatttttattttgaaagggagtggaagaaacatattcattcctttgtgcctctatggatctgctttttatgagctgagctacatttttctgttttgaactgaggcagtattttatgccttcagctattctgacaaatttaaattatagatgatggttattaatatcacggcttatattggttaaataaattattatgcaactgctaatattatttcgattgtcgatcagcaatacccatttcacgaataataaatctg

SEQ ID NO: 133855 - DNA, 389 bp, Glycine max
  unsure (1)..(389): unsure at all n locations
agcttataagagcgggtctgggatacgattgtcaagtgtttgcgatatgtgaagatgatgttccaagtacttcggatttggtccgaccatgccctcctgatttccagctgggaaattggcgagtggaggaacgccccggcatttacgcaacaagcataatgtaaacctttacggttgtaaaagctctatagttgggcctaggctttagagttttcattatgttaaggctgggagtcttttgtttttgaatttataatacaaggatctttcttcatctgtgcctggtctctacccattctcattcatttgcatgtttacttctttgtctgaaacggcagattcgatgacgagtcccncgaaggtactaatacctgggaccgcgctatcaa

SEQ ID NO: 133856 - DNA, 508 bp, Glycine max
  unsure (1)..(508): unsure at all n locations
ggatccttaagtcacctgcagcatgcatgcttgaaatacacaccacaatatttcttttttcacaagcatatgaaagtaggctttcataataagataatgaaacangacagttctatttattaaatcttcaaaatataacaatgataatctattactagctagctgaaattggttattttattcttcttggacctgggtttaagactttaaatgcatatacaatgaattggacatgtaatcaattaaatacatgaacttgtatttcaataacaaacaaagctttatttgtaatcgactaaaacacgaccggttctagttttagatttaagccctagctagtgtaactgatttacctggtaggtaatcaattaccacaacggtatgagtcttaattttcatattacaatactaacaatgttatcaatgactacttattctcaatcgcttaccaattgttaaaattggaatactctttatttttcaaggcgtgatcaattctaagatatct

SEQ ID NO: 133857 - DNA, 358 bp, Glycine max
  unsure (1)..(358): unsure at all n locations
ttataaatatacaatataatttaaatattataaatatttatttattacgaattctgattcaataaaaaaaaatacttattctatgaaatgcacatgctataaattttaacaatatattagagaacacctttttgtttatcgccatattctgtctagacattttacccgctaattattctcgaaaggcgaaactactactaaaactatccattactttctctcatatttctgtccgacctctattttctcgcttgtattttatgaaaaatatagagatctacgattttctgttgtactaaatactttaacatgtntatggttaagaaatataaatatcacatacattccttgattaaaa

SEQ ID NO: 133858 - DNA, 392 bp, Glycine max
gaccggatcttagcacctgggctgcagcttaaccaattcggagtaatatgtatttgaatgacataaaagggagaagacctaagttctgaaaggcttgaatggaatcaaaggtttcagcagaaaagaatttcatatcaataaacttatggccgataatggaacgagatgagaaaagattggagtaccatttctgctgttcgtcggaagaaaacactggggaagaggacaatgaaggtggaattggtgctgtggatgcgctagtggctccggaacgatgagctcttgaagccgaagcagaggcggaagaaccctttcgtttctttgacgattctgccatttgaaggagcttttgcagattttaatcggtgaaatcaatgagaaatgaaaaagaa

SEQ ID NO: 133859 - DNA, 352 bp, Glycine max
actctcttcctggctatgcttatggatggccctcctctcacctctttcctttgtcttacgctgcatcttcatggtggaaaatcaccattaaaggacctcattgaagctcatagatccatcctccatagaagctccacaagaaagcttccatcaagtggtaatcagagcacaagagcttcaagtaggtgctccctaaacctccattatattttttctttaccttctcttccattgttgtttcttcatatttctccatgtatcctctcacatgtctcgctctaactgctgttaacatgaatctttagaatgtccaccgattaacttgctataaaaagtaaaattggatttctat

SEQ ID NO: 133860 - DNA, 452 bp, Glycine max
  unsure (1)..(452): unsure at all n locations
ccggacctctaagcaccgcagctgcaagcttacatatttgtgtgcncttatacaccagattctttaatcagtgtctgtaagtggcctttgggaactactcatcattctccttagtaataaagcacttttttagaaaatatgctccaaattcatcccatttcgactcttctagtgttattcacaactcactaaatctctctttccatcttcaggactggacttagaatggaattatggaaatgaatccttatcataggcttcaacaattttgagatgctggcgggagcaagaaaacgtttgcatgccaggtgttatactttttttgcatttccatgtgtatattctattctgtgcagatcatttttgtgcccaattatattccggagactcttgttctttaagggccataaaaaaaaaaactcctcattngtatggaatattaatcctttatt

SEQ ID NO: 133861 - DNA, 394 bp, Glycine max
tcaccatgtccgtgatgaacaactcccacataattaagactaaccttgaaccatgttggatttgtgcagctttattctttgacatgaagttggtcatcttctcatgcagccgttcactagcctggcattggcaaggccatcaatacccaaaggatcatgttgcttaagttgtaaatggaagagataaccctaaatagtaaactatagagcctacaccaaatagtaaaagaaggacatacatctgcaatatgtgcatgacgaagttcaagccatataagatcatgatcctccaaaagaaccttctttcgctcaggtggaccaccagtcttgctatgaacctaaggaatacagtatatattgatttataacaagaaagtggacacaagtcacaaca

SEQ ID NO: 133862 - DNA, 470 bp, Glycine max
agcaccgcggctgcgcttgatccataaagacctaatatcactattatgagggctaaatagtgtgatggataaaaacatcatctatcaaaaagatggaaggctcttctgaaatagatatcaatggatgataggtttcgcccaaggggttcgaaatcactttgtgctgaaaaagaaattcacaaaacttggatacaatagtatagaagtaaactgtcgaaaaaaaaaaactaattatatagaaacaataaagaaaaaccagtggttttatactctcccaacatttgggctatgtccagttctccttcaaaacttacaatgatgtattctctatgccacttctggctaccacgagtactctctaggccactaatgacactacccttgatctccccctgagactaaaacccattaataaaagttgaagtgttccattaatacagatctctattacaacctattattctctatgc

SEQ ID NO: 133863 - DNA, 323 bp, Glycine max
gctgccattcaccaagactgatatgaggcagatttatacacccttcgagatttttgtgtattacaatcactatttgaaatgatggagggtgatgctcctgattcttacttaaaagcaacactgcattccattatggccttaaccaatcttgagttacaaagcagctatacagagaagttcattctttcttaatagtaacactgcattccattacggccttatcaaggtaacatggcagttcatgtatgtactcacccaaatgcacactctatttctacatatttataatctgaacctggcctaattctatttcctttcataat

SEQ ID NO: 133864 - DNA, 373 bp, Glycine max
gaaactaaggctaaaatctactcactcataatgatattgcccacagaagggtcatttgatacagtatcaaggaccaacgccttaacggaactctttacttctgtcggctaaaatgaaccgcttaaaagtctaatatcagcaccctgcataattttctcgctttccagagaacaacgtaggtctgagttcctcatcacaattgaggatacataggagcataaaccccacttttgtagctccataataagtataaagggaaaaattacatgagtaaaagtctagggtctgcccatatgtttaaggtagggtgcctcatgaccacgtgtgaggagctaaccttccttatgcatagaacaactccgaacctttactc

SEQ ID NO: 133865 - DNA, 487 bp, Glycine max
  unsure (1)..(487): unsure at all n locations
ttaagtcacctgacgctgcagcttaacctcgatatcataaaaattaagtttctaccagacattcactttgaaagttctctctaaatgagttgagaaataaccatgtgaaactaacgctataatctactcacaaatcaagatattgcccacagaacggtcatttgatacagtttcaaggtccaacgccttaacggtactttttacttttgtcggttaaaatgaaccgcttaaaagtctaaaatcaacaccctgcataattttcttgctttccaaagaacaacgtaggtctgagttcctcatcacaattgaggatacatatgagcagaaaccgcacttttgttcaccccaacaaaagtaaaaaagggaacaataaaatgaattaaaagtcatggttttgcacattctgttaaaggttgtcgtacctcatgacgaacgagtggngtgctaataccttcctcatgcattaaaacaactcccgaacctttac

SEQ ID NO: 133866 - DNA, 491 bp, Glycine max
  unsure (1)..(491): unsure at all n locations
gcccggatcttaagcaccgctgctgcagcttggattgtttgctgtactatatattgaaaacatgattgccaaaagcgtgagatctacgtatgctcatgagagttttcgtagactcgaatagtagatttgtaaaagcttacttcgaataaaaaaataataaattaactattaatatcatatcaatttaacattttattaatattgtaaagcacataagtaataagttcatccaattacaaaacataagctcttctccaacaaaaggtcatacatttagaaaacacatatggagaagatgaacctgattggcagcaattgtttacgaatggaatgcaggatacagaacaagtgctgctgagtgagtatactaatactctttggaattataaagatatgaanaagactagccataatagagaagagaaatcaagacaacaactctgattcatctttccagctaacagaactgaagacggctaatgccatgaaag

SEQ ID NO: 133867 - DNA, 152 bp, Glycine max
ctcacacagacacatgggcaatatttgtagccgttcgctctactcttctctagagaagctctgcccaatgtactaataggaacaactcatctatgcaaagcggagttggaaaacagtgttatattcactagactgtcctgctgtctccatta

SEQ ID NO: 133868 - DNA, 394 bp, Glycine max
tatatttcggatcaaatacgactactattgcaagcatatcggcgcaagatgatgataacgacatataatgtgttatctatgatcttagccgaattcttaataatgtcaaaattaaatatagcgccatagaatacatgtgtctatgtttgtattattcttgtgctaaactcaagtattatatcgagcctttcaatgttcaagcgttgcctcataataatgctatcaaatatatgttatctaagtctattttgcataacacaatatgaaagtgggcccttacactaacaaaagtctcgcttacctttgtgcctctgaaagaaattaacggccaaatcgtatcatatcttctagctcatcgttcaaacttagaaatattggtatgttatatacgaaa

SEQ ID NO: 133869 - DNA, 413 bp, Glycine max
ctgccatatatcatctttgcatcatcttaattgttatatttcctttgctttgcaaaaaaaacaatctttggatcatcgtgattgttattgtttggggttaatgaagggaaggatattgaatacatactatgcacattgaagaagagatatgtgaaaatttcgctgagtttaattttgatatattattgcaaagaatctatactgtcaactaattaaaaatgactttgatataaatctgaagagtataattacaaaaataaactttgttaccttatatggcaatgcatgattagattaatgtgtgaaatacttttataccatatttgcattctaattggggaattaagatatgagtgatcattaataatccgcacaaacacattgtcaatttagaacaagtcctttttagcgat

SEQ ID NO: 133870 - DNA, 411 bp, Glycine max
  unsure (1)..(411): unsure at all n locations
acctgcaggatgcagcttttgtagtaatgcatgagtttatgttntaatagcttaagcatttacctggctgtggtccaattcttgtgtagctagttcttgaaatgcatatagataacttagtgcctaggatttctacaataaaggtgaataccgtttgattttcttatacactaatgtactaatgttaaaggttagcacatatcatcaatttgatattctgaaaatcaaaattttccttaagattactgaaataatttatatcaaaatcaagcatttactggattttngtgtatatcacatacaagccatttaaatccaatgagtgcatgagtccagattctgttgaaacagagagggaggagattatcactcattgaccaattaaaaaataaaaaaaattgataggtcata

SEQ ID NO: 133871 - DNA, 384 bp, Glycine max
ctgcagcttgggagtatgtttacagtgttttgtaatgctttatttcaggagctattatggcatcgacactacttggcaaatatgctggattagatattggcttgacacagactcatcaacaataagtggtcaatcttccattaaacatgctcttctcacctataacttaggaattgatggctcaaatgccttttcttttacctctcatatgcaatttgggtatcttatatttttagggaaggtagttcccgtgctaacaaatcaattaaccatgatctcacaatacatttgttcaaatggtgagactatgttcccctctaagtatagctgatgttatgagacaatttccccaataaacaattttttcttacttatacttcatta

SEQ ID NO: 133872 - DNA, 381 bp, Glycine max
  unsure (1)..(381): unsure at all n locations
ctggtatcgaatagacggttcattaatttcatctatctgagctgttattttcctgtttattcacgaactaattctcaatgtaatttactcggtatgatatcaatgtcactaatatttaaatttataacttatttactcttatacaaaacttatttattttacgttatgctttcaatttaaaaaaatatttttagtcaatcttataattttaagacattatcaaaggcgcgcacggtttaatactagtttaaagactaanatcgaaattgaataaaagaattctacgcccgtgcacctgtcttttttttaattggaaatatcaattttacccttcttaatacccgctggatcttactttatacaagtggatgggtgagaatt

SEQ ID NO: 133873 - DNA, 380 bp, Glycine max
aacatcggtgcgaaaagtaatgaccattcgaattcctcgagagcttccgctggacaatttcgagcgccttgatatattatgtccccgaatcggacatctgtgcgaaaagtagtgacccttcctatctcttgaaagctttccctgttcaatagctggcgcctggatatattatgtccccgaattctacatctgagtgaaaagttatgaccatacgaatgttctcgagagcattcgtattcaattttagcgttccgatattttatgtcccgacacatacattcgactaataagtcataaaacattcgaatgtctcaagagcatccggtgctcgatatcgagcgcctggatatattatgttcctcgatcggtatattgggtga

SEQ ID NO: 133874 - DNA, 381 bp, Glycine max
tcagtctaatgcttggcgtgggaagacaccgttacttctattcatgggggtctagggacaactcgtgaccctcgaatgaaaatccgtaatttaatctccggattaaatgctgcaaagaaactgcatcctggcttgcatgtgatggcaaaagagtacatatgtttatatatctttctacaatatttagatattgttatgtcttcttcgctatatcttgcctttaatcaactcaaatcttataaatatgcagatgatattataccattatgttcttttcatcgagatagaatacggactatatatcatctccattctccaagttcttgcgcactagtgtacacaatatgtactcaaatgtagatataggactataatattatt

SEQ ID NO: 133875 - DNA, 219 bp, Glycine max
ttcggatttggaagggaaaacatttgtaagaaagaagtgaaagcgtatgcaatgaaaaatgaattggtggttctatttatgagggtccctcaccattataataaattggttctttatttacatttaaagaaagacttaatttctcctattaaagacaaaaaatattttttattttaaaactatattatttatttacttaaatattatttaactataaat

SEQ ID NO: 133876 - DNA, 402 bp, Glycine max
agctagtagccaagttgatcttttatcttctgataaacttctgcctgggtatatgatctttgtatagagacaactgcacaacaagcggaacaatgacaaatgataaagaaacatgcaactgttagaaaatttcataataatatgaaaaatatgaagaaaaaaaactcattgcttatagaataggttatttcctatgccaccatggatcaaaaagaaaaggaagataactaagcaacgggtaaaatcttgctgaatgacaggaaaaatacggtgaagataaaacaaaaccaaaatcaccgggaatgttattaggtgggtcacacctacctttagcagaatctagcccactatggtgaggtgaactgttttactgctgagataattccatgggatcattcaccc

SEQ ID NO: 133877 - DNA, 397 bp, Glycine max
cgctcctggaggtcctagtaacgaagtcatcctgcaataatacagcgagaaagtaaccggttacaaaagctcacacacacatgaaatctctgaacctatcaaataaagaaattaactcacacccatgataacattgtcatcacgttgcaccctgatttcaaattactataactagtatgtttcacaattgacgatgtcaatcagaaaaagagaaataactcaattcacacggttgcgtaacagctacattaacatgagagtgataacagggtaagaagtgagtgaaagctacagcatacacgaaagagagaacttactttgaaaggaatttataaattgaattaccaaatcgaggtcattttcatataccgtactgacttttccaagcatgagatac

SEQ ID NO: 133878 - DNA, 492 bp, Glycine max
cccggatcctcaagtcacccgacgctgcagctttaagaaactcatggtctttcttgtaaaatgctgtccagccttctttaaccgatggatcgtctcgaaatttgggttgcaacttcaaaagacacctcttcaagatctgaccgctgggatttgtgcgaagatgtctggagtgagctataagcttccgttcccgagagcatcttcttatttaagcacttcaccctttgcttctttgtagcttaggaaacatgccatttcttcttctttctttcttccaaatccatttctaaagttacaagtactttctccatcacccacatccaccattagccaccacaaaccatcattggtctccattgaaaacccactccgagaggaacccttctaccgaagcagaatttccaacttgggctgcggcttcggtagagaacgagaaccctcatctgatctctcatattctttcagggaacctatgctctatgcttgtttctt

SEQ ID NO: 133879 - DNA, 467 bp, Glycine max
  unsure (1)..(467): unsure at all n locations
gcttgagccaatggantaccttgttttttcctttgaagccccttggaggcgtggtcccataacttgatttgaagcccactacaagccttaaataaaaaaaaccacgatatcgccatatccttaaggaattttggagctttggaatggttatgggaataactgtgggggtttctgtttcattggataacatgtcttgttggctatgcttcatgatgtatcttgggccttacttgatgtacattgaatattggtaaaatgtaggaaatgttgaatgatatgttgtttctcaaacgctacctatgtaaaaaaaatctgaaaagacaaagaaaagctctttagtctagtgaataacattctaaatgactaaataatgattagactcttggtgctactctttatgttcaattttacctctactactttcgattctctcaatacttcttatatagcactatatcccattgctc

SEQ ID NO: 133880 - DNA, 257 bp, Glycine max
ttggaatcattgactgattttgtatcgataccagcgattgtttctgaattaatcaaaagatgtaactcttcagatgggttttgactttttcaagatggttttaagtatttctaaaagtcataactctcttaaatggtcctcttgaccagacatgaagagtctataaaagcaaggctttgttttgcattttaaaacaattcaatcaatccaatacaatgctttacagccttgaatctctttgaacttcttcttctttc

SEQ ID NO: 133881 - DNA, 440 bp, Glycine max
  unsure (1)..(440): unsure at all n locations
ttaagtcacctgaggatgaagcttaaantatatctatcttaattactgtataaaacgttaaaacttctggttatcaattacaagccttgtgtaattgattacaggcttataaattatattcaaatattgtaagagcatttccaaaattattctggccattggtaatcgattacagcctctggtaatcgattaccagagagtaaatatcatatttaagagatcttaaaaattttcttggaaaatatccttaggccaaacctgtgcatcatcaattaagaaactctntcttaaattctaggaactaagttcatgcaatatctcgaatttctggattcttgacttgagataaacttgagaagcgcttatctttggcatcatcaaaacttcatagcatacatgctactacatttctccaataaacgttggtggcgcctcccact

SEQ ID NO: 133882 - DNA, 445 bp, Glycine max
  unsure (1)..(445): unsure at all n locations
acctgaggcatgcaagcttgcctaattaatcttacatggagatgaaatgnatattaaacgcgcagaatggaagtactaagtatttattacctatctctaacaaaaagtaattacaatactacaaaataaccataaattgaaggagtattgatacaatatacataatttttatacataaaagttagttgtattcattgactaacagttagccatacacagaaaccctaacccaaatgagataaagagtgcaaaataattgttgcttacacgagaaaggggatccctcctcctctgctcagcacctcacaattactcaaacactctttaatcttcctataaatgtaaaaccctaggcttctggcatagatgctctttttgctgctttacacactattctcgaagttgtgcaaaatatgagctttgatcttcaaatcctacctaattt

SEQ ID NO: 133883 - DNA, 430 bp, Glycine max
  unsure (1)..(430): unsure at all n locations
attactttcctatccatttatattatgtcacacttaggngtgcctcaagatattaactgactatagactgctaactcgttgacaagtatgagtcatccgcaaccacataaaaaaacttgatatcatactttaactcaaaattttaaaactcaagtttatgggtcttctcatttatatgacgtttaactttattacttttactcaatgttgtgagacttcactttacaattgtatatcatcacagtcttttctttttctatattcttttaagaatggaccaataacttgcaattgtagccgtgtgtcttgcacataccactgaaatgtaaacgatcgacgactatgctccccaagattcaaatatgattgagtacccattgcttcttacaccagttcatactggctatttggatctattgtactcccaaat

SEQ ID NO: 133884 - DNA, 391 bp, Glycine max
  unsure (1)..(391): unsure at all n locations
gcaagctttccgtatgagccataaacatatncttattctaggcaaatcttgggcaagagggacttaacagttttctttttctgtttattttgggtcaattattgagctattaagcattcaaccttcatatatcggagtaagagtgtttgcatataaacaagtaatcttgtatgctaacctattttcactaaaaattactaaagcacaacattgtcttcactatatgttctggttttaatatttatattgaattggtgatccccccccagtaaacaagtgaaaacaagatgtttttgcaattattgctgaaaataagaaacaaaaacatgaaacaaagtttcaaaccattcagctatctaaatgaattgatggtacctcctacaaaatacat

SEQ ID NO: 133885 - DNA, 422 bp, Glycine max
ctaagcaccgggctgcactgactaccatttgatgccttttttactcgttaccttataatgtactgaagagattcatgatcactatgaatgacaaattccttggaaacaaggtaatgttcccaagattggagggctcttattaaggcgtaaagtgctttatcataggaggggtagctaagggtggcaccatgaattttttcactaaaataagcaatagggtgcccaccttgtaacaatactgctccaactcacactttagaggcatcacattctagctcatatgttctacaaaagtcaggaagagctacaacaggcgccttggtgagcttttctttaagaaaaacaaagacttgctcttgtcttctacccaaagaaaatgccacattcttcttcaccatctcattgagaggtgaggtaattat

SEQ ID NO: 133886 - DNA, 409 bp, Glycine max
  unsure (1)..(409): unsure at all n locations
gctttcattatttatgacccgttttgtttctattgtgttnntgtagattctattcttgattcattaacttattatacccncttttgacgtgcttaagccattttatttaagtcatttctcgcttaacctataaataaaataaatttccaccgaacgtttgaattgtattatccgttaacttcggttaaaatgaatttcgaccgttcggtcgtgccgtaaccacgttggaaatcaaaaagagataaaatattgatattataacaaaaaaatacacctttttgtaaaataaagcggaaaatcaatcggacatcttctctttgggatttctcattcttaattgaattgactaatatctaaggtgaaactaatgctaatatcaactctcctagtcaagctcgttcacaaaaat

SEQ ID NO: 133887 - DNA, 360 bp, Glycine max
  unsure (1)..(360): unsure at all n locations
cccggatccttaagtcacctgcggcatgcaagctngtagaatgtgtatacatgatacatgtcatggttgggtttggctcacagataagacggatgccccacattatttccatgacacaaatgcaaaaatgatgacttggaaattttatgcaaaactggtcatgcatgcacctatgtggacgctcaagtgtcaaatttttatggtcatgtgatgctagggctcaagattcattacctctatgttaaaataacccaatggttgcaaaatatgttcttttatcaattcgtgcattcatcctagtacatctcgggcgttcggggaaatttcacagcaattaccctttaggtgtatacacatttt

SEQ ID NO: 133888 - DNA, 445 bp, Glycine max
gtgggtctaaaaagaggcggatctgatcatcatgctttgataaatgcaaaaaataactaggacaaatgaagagggtgagaatgagggagaagcccatgctgtgactgccattcctatacagccaagtttcccaccaacccaacaatgtcattactcagccaataacaaaccttctccttacccaccgcccagttatccacaaaggcaatccctatatcaaccacaaagtttgtctaccgcacttccaatgatgaacaccacctttagcacaaaccaaaaacaccaaccaagaaatgatatttgcagcgagaaagcctgtagaattcaccccaattccagtgtcctatgctgacttgctcccatatctacttgataattcaatggtagccataaccctaaccaaggttcatcaacctccatttttctgagaatacgacttcaacgc

SEQ ID NO: 133889 - DNA, 279 bp, Glycine max
ttttctcttgtggaatagagaccactaatgagacgaccgtctggcaagataacaccaatccaaattactcattcaacattcctataatcctgcgatcatgaggcagtgaggcacccacaattcaatagcgctttaagaaacaaagtacaacaaatcctcctaccaaatctataaaaaattataagggtgatgaacccacacacaggacaaaataggcacagcaaacaaaggtatactacatattgataaccttaggggaggcaaactttgcctgcccaa

SEQ ID NO: 133890 - DNA, 416 bp, Glycine max
  unsure (1)..(416): unsure at all n locations
agctagaatgaaaactagacgctttgttctatctantaacttagcttgccatgaataacaatatctacacctgntgcaagagactgtggtctatgttcttctgcagatcaccatacatatctttgtccttctttgcaacattccggagtcaatgagcatcatgaagcttatgctgcaaacatttataatagacctccttagcagcaaaaccaacagtagcacaataattatgacctttcagcaatagatacaatccacggtggatgaatcatctcaatttgagatggacaagtcctccacaacaacaacagtcttgtcctcctttccaggatgctgctggtccaaacacgccatatgttcctccttcattacagcagccgtcccaatacagacaacaagagactgatgctcctcct

SEQ ID NO: 133891 - DNA, 279 bp, Glycine max
agcttgccttaggagagccagagcctctatagtcttatggatccaacctggctcttgaataagacaaccttcacgttacgaacgatgagcacctgctgcgcgtatacgtcatccactgatgggcattacaccgagagagattctctctaatgaaggactactgcctttcagcactctaagaccagataagttgtcaggcgatggcagagatgatggccactatggacaacatttaaccaataatagtcctgtaaggctataccaacgctgggcctgcta

SEQ ID NO: 133892 - DNA, 377 bp, Glycine max
  unsure (1)..(377): unsure at all n locations
atcctctaagtcacctgcggctgcagcttgcctaatatgttttgaaagacttgcagccgaaggaactagttccgctccggagtatgacagtcaccgctttatgagcgctgtacaccagcagcgcttcgaggccatcaagggatggtcgtttctccgggagcgacgcgtccagctcagggacgacgagtatactgatttccaggaggaaatagggcgccggcggtgggcatcactggttactcccatggccaagttngatccagaaatagtccttgagttatatgccaatgcttggccaacagaggagggtgtgcgtgacatgagatcctgtgaaggtgtccagggatcccatttgatgccgacgctatcggccaact

SEQ ID NO: 133893 - DNA, 443 bp, Glycine max
  unsure (1)..(443): unsure at all n locations
cacctgcaggctgcaacttggtagacttatactgggctttatagtttcattctagagacttaagaccttgatttggatgcttgagtatgttatcacaactcaatttaacccctctgcatcaccttaaccacatcattgttggtatagcatgataaaatgggacaattgttttccttttaacatatattttaccatagttttaactaattcctacatgaaatataggtgaatgttattttttcgtcaattaaaaactngattatatgtagtaataggctgattataaggaacaatctataatgccttttggttttatatctaacttttcgttgcacgaatatgtatatgaaatgttactttgactcccacacgtgtttagggccctatgaatcacctttattatatggaataaactgactaccaccctggatattttatttatt

SEQ ID NO: 133894 - DNA, 298 bp, Glycine max
ccatgtggcacgacaccaaaggtgcaagtcccttcaattctacacatgttcctacttcacaacaaatggatttcatttaagtattacgtcccaacaaagtataccactttgatgatgcacacgcatactttgtgaagaaccttgatgatgacttcatggagtgtttgatgaagctaaccatattcttctaccatcgcgtcttctacattatgaagaagactatggaaaaactataagccctcatccaacaccttcattgattgcaacatgctaatagggccaaatatgaagccacttg

SEQ ID NO: 133895 - DNA, 373 bp, Glycine max
  unsure (1)..(373): unsure at all n locations
tccttaaacctgcattaattctcagctttaccttctccattgttgnttcttcatttttccccatgtatctgctcacatgtcttgtgctaaatgttgttaacatgattctttagaatctccaccgattaaactttctatagaagctagagttgattttctatggctcanatntcttgttattgttattgaaccatgaattgtgttgagtttaggttcctttgagttttgtttttgattttttgtgtgcctaaaacctaaaccataaaattcttacgaaaacattaaagtagaagaaaaccttcaaaatctagagtgactttgatgcacgctccactggagcttgtngcctangatcttcttcataatggatcct

SEQ ID NO: 133896 - DNA, 402 bp, Glycine max
  unsure (1)..(402): unsure at all n locations
gcaatcttagattcaagctgggctagttgttcttcctcccaagaaaacaatgctctcctccagtcccagttccaattccaaactctgttatgatttcatccagaccataaagtatctntatctgttgagatactgaacaatctagcaaacatattcttcaatatcactgtatctatccatttctgtttgcagaattttgttgacaaaactacctagtcttgggcaccacagccttaaatccgcagctcctaaccttaattaaaatccacacttaccactgtnttcctgggaattccaaaagatcatacacatgaagacattctataatagtgtacctacgagctgcatattcgaatcatcccactttcaagctattgttcatgtctccttggactgtcacat

SEQ ID NO: 133897 - DNA, 414 bp, Glycine max
  unsure (1)..(414): unsure at all n locations
cccagaccccctcattaagaactagctcctttcttactctattgcccttagctgaatacacctttgtttggttctctattagggacttaacacctctcatgcaacttctttacaaactctgagctanagtccccttctttatgtataanaagaatcgtcaagccgggagcgggaatgaagtctaaggggtgttatatggattgaacccatagacaactctcaaaggcgattgcccggtggttctatgaacccccctattgtatgcaaattctacatgaagaagatactcatcccaagacttatggttgccttttataagagccccttaaagagtggataaagacctattcactacctctggtttgccatcagtttgtggatgacaactgggagagaaaagaagcttatttccta

SEQ ID NO: 133898 - DNA, 329 bp, Glycine max
  unsure (1)..(329): unsure at all n locations
agaatgagtccacggaggaaatgcttaccacttcatattgactgtatagtggnttctaatgactcctctgcggcttccacataaggaatacaggatgggcatctcaccaagatgtcttccttgcctgatacgaagaccagatgcccttccactacgaatatcaacttttggaggagtgttgagggaacaactcctactgagtggatccacgggcgccccaacagacagctgtagggagggttaatatccattatttggaaagtaacttgacaggtgtgagggcctatctgtactgggagatcgatctctcccctaacctctctgcgggt

SEQ ID NO: 133899 - DNA, 331 bp, Glycine max
gctgcagctaccgaataagcaaaaaaaattatttaattatgttttcattaagcttatcgaaataaagctagaaagatcttataagaaagtcacaaaccacttctataaacccatgtaagcacttctaaatgccctccaggtttgagattattgcagagggattttgtttttcaaaatttctcttgatcctatttccagatgtattagaatctcctgcttgccttggtttagaatgtggaattcaaacaggtattaatgaattagtatctaaaatgatattattttctgcacacatgggcgttgaattgcttgatgcacgcatgaactttaa

SEQ ID NO: 133900 - DNA, 467 bp, Glycine max
  unsure (1)..(467): unsure at all n locations
tactaagctggatacaacagacaaaaccaaaagaaaaaatttactctgcttgttactaacttggtataacaattgtatntgcatgcctatcaaaattaaaagacagcttgaagtattaaaggagaaatagtcatagctattgttctaagtagtgcataaaaagctatgagtatgttctcttttaagtgagttctaacaacagactagagaaccaagtttttggtattgtccttgctcctctcccttacaagggattcccatgtatgcataaagttttggtaggaaaattttgcttcatcttcagaaagaagggaagggatgtcttcaagagctagtggctttgagtaacccagacggagtaaggagttaacccaagagaaagtcaatttgctgagaatggtagtatggcctaattctggggtattagtgtcaacttcttgagctaacagtggttcatataaagttta

SEQ ID NO: 133901 - DNA, 316 bp, Glycine max
  unsure (1)..(316): unsure at all n locations
atgacacanatgcaaaaatgatgatttggaaactttatgcaaaacttgtcatgcatgcacctatgcggacactcaagtgtcaaaattttatggtcatgtgatgctagggctcaggattcatttcctctattntaatcaacccaatgtttccaaaatatgttcttttatcaatttgtgcattcatccgagtccatttcgggcgtccggggaaatttcacagcattcacccttcatgtgtagacacattttcccgaaattgttatgatcaatgaactttttcaaagaaaaagtggaaatcgtctcttttcaaagcatg

SEQ ID NO: 133902 - DNA, 415 bp, Glycine max
  unsure (1)..(415): unsure at all n locations
tgtatgatattctctgtcatgaaactaacagatgtagtgtgcacctgcgtgtgggtgttgttaataatatttgtgctctattacgaagaaattgacaggcggttcttgttgtttctcctaaggaggcaaacaatgtgacaaacacacttgtaagatggggtttctctacatccccaatgattaaatcttggtcttcacctattgngattttagcttctctagtttttgactcataccttagtgtaattnttgcctctcttacttactcttgttaccatatatatatatatagggggcatatcaagtganangagtgtnttattatgacaagtgataggattacatancatcccttagatcaaaataaaatggtcagatttaattgctaattaaaactacaagtgcacctcctcac

SEQ ID NO: 133903 - DNA, 374 bp, Glycine max
  unsure (1)..(374): unsure at all n locations
gcgcatacacactgcatttattctatngttgatctagacgtgtattttgacgttcatctttatcaccttttcttgctcatttattttgcgtttttgttcattattgttccattggtttcatttagatgtctattttacccagttaaaatttcagctcaaaacttgaagtattcaagccatagcagagttaagaagacaatgtgcctgaactgacaacaaccaaaatttcaacctagaaatcaagagtagtgtttatgttgcttaaggcttggatagttacaatttgtatttgcttatgctcaattgtctcggataacacaattcagaagagcttangacttattttgatgtacaaatccatccataactcagca

SEQ ID NO: 133904 - DNA, 472 bp, Glycine max
  unsure (1)..(472): unsure at all n locations
ggaccttaaaactacgctagcgctaatgctccagngctgcaggaattaaatttngnatggggcagcagaggagcacaaaccacaaacccttgcaacaggtacagatttctgattcaaggccagctgggttaccaagttaaccaatgcatccagtttgccttcaagcttcttagtttcagatgatgcagatgggtttgtagctacctcatgcactcctctaatgactatggcatcatttctggcgctaaactgctgggagttggaagccatcttctcaattagaattttggcttcagaaggagtcatgtctccaagggctccaccactggcagcatctatcatacttctctccatattactgagtccttcataaaaatattggagaaaaagctgctctaaaatctgatggtggnggcaacttgcacatagttacttaaatctcttccagtactcatacaggctctcttcactg

SEQ ID NO: 133905 - DNA, 469 bp, Glycine max
atcctctaagtcacctgaggctgcagcttagctccaggaattatgttgctcccctatatctaaaaaatatctgagactctttatgaattccaagcaaaagaattcctttgtgaatgaggtgggtttttggaatattgaaagttaactttgggatctaaagtgaagatgatcttgagttgagtgggagttcctatggtgaatagtttcttgtttggataggagaggattaatgtgtatcaagaggaagaggataagttgttgtgaaaaatttatcaatagggttattcaatgtcaaaggtgcttatagagcattgttgaatactaatgaccatgtagatgctcttatctatgattttctatggatcctcgtatgtccctcacatgttgacgcttttatttggacggtgtctaacgataaatttccatctggaagatgaagatatggtccactctctttttatatgtcact

SEQ ID NO: 133906 - DNA, 426 bp, Glycine max
  unsure (1)..(426): unsure at all n locations
tgtaaaanagtgatggtggcgcaagtgactntatattatgtgagatgttcaattcataatttcttgctcagcaagtttaaatcatgttgcatccatattttcttttcctacaagtgtttgttgaaattttttaaccaaagtgggccttatactgtgcattatgagtcgattatgtgtgcaaattcattcctgtcgtgtttgtgttggtattgagttgaggagttttgatcaatcctacaggactgggagataacagctgcttcagaaaagttggcagagtgtcaagaaaccatccttaatcttgggaagcagttgaaagcgatggctgtgccaaaggatgcttccctttntgacnaatgtgttgccacccaatttgacgcanataccaacactggcaccaccaccactctcaccacccgcaatgtg

SEQ ID NO: 133907 - DNA, 401 bp, Glycine max
tcacaaacaatacggaaagatagacatgttattgagggcttttgtgcagatacaaggaaaaatgcaattaccatcttgctcctcttagcctcttcatcgctgtcattaccatcatcaccaatagcttttctggaaaagtacatggcatttttaaatgtcagtacatcaataacaatatgcatatcatgagagtgaaacaacaaaacaaacagatactggacttcaaaccttctttttgtaatgacccgatcatcatgaccagcctcaacatggccatggccatggccgtagtcaagaaccctgctaacaacggtcctcataaagtcaaagacattatagctttgacacaatgtttctgcatttacattctcacttgtagactcgactcatagtcatagtat

SEQ ID NO: 133908 - DNA, 428 bp, Glycine max
  unsure (1)..(428): unsure at all n locations
tcaccttgtggtcctcctcatagttgttgcatgagatttcatgctctattntcatctcccactccaagtaggcctccggatcattctttcctttaaatggaggaatgttgagtttaataccatcaattcggttttgtctaggaacaccatcattccctcttctcctcctttcttcttcattatgatctctattctccatttgattcaacctctcatggagcgcatcatctcgttgtttcattaacctctccaaatgttgcatcaaagcttgcatttggaattgcgaaagccccactccatcattaggattagtacctgacatctcanacaaacaaatcaaacgtaacaagacaattatagttgctggttgaatacctcacccactcaagtgtatcacacaattatggcttttctctaatgaaacactc

SEQ ID NO: 133909 - DNA, 304 bp, Glycine max
  unsure (1)..(304): unsure at all n locations
cagcagatgagtgcttagttatttgtctcagcaccttgnctccaagactgaggataattgcactgtgtgccttctgcagtagtgctttcttatccccatcagccatcatcttttcaagtttggcttctccatcaagtgcttccaccaggccctgctgaacaagaagagctttcatcttcaatcgccatagcccaaaatcattttgtcctgtgaattattcaacctcatacttggccgggcccatttcttgaatcgaactcaaaatcgatccacgttcaccgcaccaatttgttgtgtcaagatc

SEQ ID NO: 133910 - DNA, 334 bp, Glycine max
  unsure (1)..(334): unsure at all n locations
gctngaggattatggtgtactcatcatatgtggnactaggnggcggtcgggcgatggagcacaacaattctccacatccacaaatcacgtataagaccaccatcccctgttgcccacctccaactgagctcacgtactcccacgtagccctcatactcattcctctcaacgccgggtccccatcaatcctcccaagcttccacaacatccaagaaattccacatcccatcatcatagactaacaaaaccaagcaaaacagagcaaaggcagaaaactctgtccaaaacacataccaaaatcacaactttttctcacttaaagaccccagtaaca

SEQ ID NO: 133911 - DNA, 456 bp, Glycine max
  unsure (1)..(456): unsure at all n locations
tgtgcattcaatatcctgatgagggtgttccttatgttctcaaaactggactaatacattagctgcccaagtttctgtagatgcaattgcctttggtgttttgatgatgatcatgatgatatgatgcaattgatgcacatgggcttttcaagattaaattctagacaatacctcatgattacaagtcacaacatcaagatgatcactagtatattaggaagggaattcctaattgaattagcaaaatgtttggccaagtaatttaaattaaaaagtgtttttcaaaggatttactctctggtaatcgattaccagaggatgtaatcgattaccagtggccaaatatgttntacaacagctactaaaattngaattttaaatttagactgtgtaatcgattacacaattttggtaatcgattaccagcacgtaataaacgttntaattcanatttaa

SEQ ID NO: 133912 - DNA, 396 bp, Glycine max
gctgagaaatttgtacaaaccattacaactgagatttcctttgagaagtatctcattggatccctaagatttgaccaaacaaacattaggatggaattcagaaaacacacaattgtcttttacaaactgacttacacttaacagatttttagagatattactgtcatgcaagacattgtgaagattaatagtaacattagaattgaatggagataaaaataaagatgagccaatacatttaataggaaaaccttaaccatttccttttatgacttgatcagatccttcaaagggaacacactgttgaatgttttgaacattgtggtaaagaggttttcttttttccaaacaccagcaagttcctgcgacttcatatacaacaaccacaacaactac

SEQ ID NO: 133913 - DNA, 348 bp, Glycine max
agctagaatacatttattgaactgataacgatatgactagtaaaatcgatgtcaacatgtttatgtggctactatccttatgggaaagaccaaaatatggccatggtaatttttgtgactaggaacctaatggggttgacaaataaaaatgaggaacaacaaaagctactatatataaggacagagaacactacatagtaaattaagaacatatactacgagtattatagaaagaacaaagcataactaaacacacataattaaaagtactaagcggctacattatcatttccaccagccaagaaacaatagcctttgatcttaaccaagttacaacgtttcaaaaac

SEQ ID NO: 133914 - DNA, 317 bp, Glycine max
tctgatgacctatggcattatcttctccggccacaggtatgccaggaatgacttgctatgctggctatctctgaaggtagggatctcccacaaaaggagacactgttctcgtttcaactgcctttggagctgttggtcaacttggtggccaatttgctaaattgactgtgtcgtatgttgttggaagcgctggaagtaaagacaacgtatatgttcattattgttgttatatgttcctggataaacgattaatcagcttaaatgttggatattattctactgtaaaaaactattttttgaataacctaatacaataa

SEQ ID NO: 133915 - DNA, 416 bp, Glycine max
cgagagctatatgtgttaatttaacttaaacttaaactatgttatgaatcatacatttacaattattctatatgtgtgaacacaatcaaatatataattatgcttatgtgaactcttagattatttttttatcacagttgatgtacaatagagaaatttataatgacaccacttgaatatcactccttttttataacctacaaaaaaaaacccatactttttctttgccattacaatgactccccttgttcttctaatagcgtgaactatgttagcttttgaagtcacgttattgacacatgcgttctaaaggaattgttctatccaaaatgcctttatatctcttctggtaagtttgactatgacacaacattgtccaacctttaggaactctggttgttgatacgctcaattgt

SEQ ID NO: 133916 - DNA, 392 bp, Glycine max
  unsure (1)..(392): unsure at all n locations
acagaagcaacaaccttctggaggaatcttgtggagggcccaagtgggcatggctgctatttgcaccctcatttttactaagtacacccctaccctttgttggtgattcttttttcggaaaggtactgaaacttacgaatatcggaacgatacttgttttctttccgtaatgttacggaactttgcggattacataatcatcccctttctgacttacggaatgttacggaacctcactaactgtgcaacgatgcttccatttgatttgcggtgtgtcacggaaccttacggattgcgcatcaatattatcttangcttttcggcatgtcccggaatatacacattgctaatgatggtgcaacacctacatgaccaaacacatgcatactgaa

SEQ ID NO: 133917 - DNA, 354 bp, Glycine max
acgcatcaacaagaatcaagccgaggctattgtgcaagcaatcaatggtgcaaaacacaccaaatgattataatgatggatggctcacattctcacacaggtaaaatcatcactctcaaattgagctttcaaaactatcatgacatgtatagaagaatcaaggatttcaagtcacacaatgtcaagaacttttattttcaaaacaattacccatttcttgaacatattctataattcatagaagaacatgcagagtcgtacgtgcacacaaaattgacccaaaatattctactgaaaatgcgacgactctaacaacatttgcaaatttacacgacttacatattaacaaaaccc

SEQ ID NO: 133918 - DNA, 274 bp, Glycine max
  unsure (1)..(274): unsure at all n locations
atcaaactgaagtatgctatcaagacttgaatttatacatgtattatagtatttatatttaaatgtcagggtgaagtggagcacataatagagggcgcatagttgctgtatttatgtagtgtaactgctcattacctaatcttgatacttctcattttcaatctatatatatatatatatatatatatatatatgaacggggnnncccntcggctgcatgaaaaaaaagtatattttatatttcagctttggtcttgattatattttatttcta

SEQ ID NO: 133919 - DNA, 449 bp, Glycine max
  unsure (1)..(449): unsure at all n locations
tactcagctgcgctccanaattgagatggagggagaaactgccattatctctatactcgatatttatcatcacgtaaatatttatataatgtcaccccttgattcttttgatagggacaaaaatgtatgattgaaatcaattacattatatctatctcatttgttttttacttgctttccctgatcagcacccatccttgagagatcaagcagcgagaaattaaggtactcattcctcaatacccttatgaatctaacaatagttaatgcttgaccatatgttttctcattgtctgcatgaaaaagaagtatattttatanttcagtttggtcttgattatattttatttctatcccatgcagagattctaaactgaaatacctcataattgatgataacactacttaaaagcatgggattgccatcttttgtacccaaaagcacatga

SEQ ID NO: 133920 - DNA, 442 bp, Glycine max
  unsure (1)..(442): unsure at all n locations
acctgcggcatgcaagcttgaaaacacttgatcagacagacttgtacgcttattatcgaagagagaggagctaagcaagtacaactaanatgaaatgggtgaagctcatcatgttgactagttaacagctttgatgagagaaggaaaagcacatgacgatcaatttctaagggatgctgtgatcaatctatttgtggctggaagagataccataacttcagctctcacgtggttcttttggcttgttgctacaaacccctcagttgaagccaagattctctaagagatgatagagaagcttgtgaccaaagaaaagtcgcttggggtgttaagcgtggaggaagtgaaaacgctgggttatctgcatggtgctatatgtgaagcgttgcgtctctttccttctataccctttgagcgcaagcaagcaataagctctgacatg

SEQ ID NO: 133921 - DNA, 366 bp, Glycine max
tgggaaatatgcgtgactcagatcacactgcatgtaattttcatgatgcttatccatatggacctatgacattgattgtatagatacttctccgcatctcaagagttacgaatatcttattgaaaaataaagagattataattgatgaataaccatgaagccaccggttacctacgactgtatattccgctaagtttgttgatcaatcattatggattcaagtatccctacaattctctctcataatctaatgtaatatgttcttaatacgtattgatatcttataaggagctcctaaaattccaccatatattctcacctgttttggcaatactcacacacacattttgcgaacatagtatgtac

SEQ ID NO: 133922 - DNA, 371 bp, Glycine max
  unsure (1)..(371): unsure at all n locations
agagatgggaaatgaacaatagttgtattagaaatttttgaactagaggaacaactcaaggttgtgaagtgtgtgaacttggaggaagccgatcatgagaataaaagaaagatagaaatagacgagatagaagaaaaattggaggacatgatttttgatatgtccgtaaaagatgatgaacatcaagctctgaagaagaaggtacaagaagctaaaatcgagctagaagatgctatgcgacaaattattaagggtaatgttctgttctgagaaaatccttattctaatccttatactaaggagacactntagttcataattntattaaaccttttactttaattnttcaacttcacagaaagagttcattt

SEQ ID NO: 133923 - DNA, 410 bp, Glycine max
  unsure (1)..(410): unsure at all n locations
cttgcgtagccgctcttggtgctcagaaatcctatttacatatncctcttatactagctattttgaattctttagttcctgaatgtacaaccttcaaattgttgctcgttcccctctttcttttctgcanaaaagaaaatcaatatcaaagaaaacatggatgaaatcctaagaaaatcaatatcaaagaaaacatggatgaaatcacaattaanaaccacaactaccaatctttcagagtcctttggttaatntgtcttgtctccttatgtggtggagttttgtttaataatattatacttttgccttccanaaaaaacttatgactgatcctcttttcattaatcctatnttgtatgttatggtataaaagatcatgggttctccacctggctccactattcctcctc

SEQ ID NO: 133924 - DNA, 464 bp, Glycine max
  unsure (1)..(464): unsure at all n locations
cccggatctctaagtcacctgangctgcagctataaaacaaaatgcttttcatttttcaatatgtatgtgaattaggaagcatcaacaggaatcaagccaaggctattgtgcaagcaatcaatggggcaaaacacaccaaatgattatgatgatggatggctcaaattctcacaaaggtaaactcatcactttcaaattgagctttcaaaactatcatgacatgtagaggagaatcaaggatttcaagtcacaaaatgtcaaaaacttttatattcaaaacaattacccatttcttgaacatatcctataattcaaagaaaaacatgcaaagtcgcacatgcacaccaaattgacccaaaatattaatctaactatccgacgaaactaacaacattaacaaattatcacaaccaacataactagcggaaccaaagaacacgcccccatacttaaactacacatt

SEQ ID NO: 133925 - DNA, 484 bp, Glycine max
  unsure (1)..(484): unsure at all n locations
tctnntcttctttttttttntatcaaagataatattttactcaaaaatccttattttgtattaaaggcgtgaaattcaaatgttagaatatattcaaaaaaattgaaggaataatataataccttacttgacaaggttatacaagaaagaatacggtacaaatcaacttaagatcgtcttgaaatcaaacaaatgaaagaaagaggaacttgaccataaccgtgacttgtgtcggtagaaccaaagttatcaaataaaagtgtgaccctaattgcagcttgctagtagaaccaacagtttaaaaattttaatccaagaacaaaggagaaactctcacaatagagaaaatactcaatttatgaatgttcaactttgttgtctccattacatgacttcccatttatagggaggtagaaaagcangtaatagaaaacaaacactaaacaaatcataatcttatctgaactaaagaatatataaaatc

SEQ ID NO: 133926 - DNA, 332 bp, Glycine max
tgaaccatgggcaaccatctcatgctttgatgaggtcaataaatgactgtgttccctgaaatcacaaaagcatacattatacaattcacactgacaggaacagtgtagagaagaaaattcaaaatatggtaggtgccaaattactaaaacaaaatgaaagcaaaaattttaaagccatccgaatgactggtaaagacaggtatcttttttcaataatttacaaataaaaaaaaaagttctttgaaaagaatggtaaggaataggtcaacatactcaacccaagaggattccactttgtcaagacagcatttcaatgagatagcagacaacac

SEQ ID NO: 133927 - DNA, 407 bp, Glycine max
  unsure (1)..(407): unsure at all n locations
aatcgattacatactntgtgtaatcgattacaggcttttaaattcaaattcaaaattttcaaattttctgaaatcaatttagtcattgataatcgattacatcctctgataatcaattaccagagaggaaatatcatattttttgaaaagataattgttcttaaaaaatctttgtaaaatattttctttagccaaacctgtgcagcatcaattaaggaattctttctaagatcctaactaagtacatcgttcttcttgcatttctgaatttttggcttgaatcacactcatctttgacatcatccaaacttcatatcatatatgcttctacaatntttggtgactctatatatgtcttctagaaaatacatctaattttattaacatatgtaaaacgagaatattca

SEQ ID NO: 133928 - DNA, 385 bp, Glycine max
  unsure (1)..(385): unsure at all n locations
aagctagaaaaatcctttacttttcaatttcccaanggatgtncccttccttgttctctttgaacaacctagtggatgtaccctccactagaactgatccacaagagatgtaccctctcttgttctcagacacgacaacccaagtagatgtaccctctacattgacaacatatgatgtaccctccaatgtgataagacaaagatctcacgcagttagtcctttgaaacttggtgaatggggaaacaaaagaattcttaggcagttagtcctttgaaatctttcgcttatgggaaagggaagaatcaacagaattctcagactgtgtcgtnttgaattccnttgacagggagaagggagacacaaaagaattcacgccgttagtcc

SEQ ID NO: 133929 - DNA, 471 bp, Glycine max
  unsure (1)..(471): unsure at all n locations
gagttgaatgatagcaatacagttatcttccttcatcaatttgncactatggatgtaccggttcttcttggttagcatatccatcaaaaatttggcatagaggggcatttgctgaagtgcttctccaaaaggcaaagtaatttccattttcttgaagatatcaagaaatttggccaaatgacgctctttatctttccgggagggtaccaattgataaggtacctccttgtattcaataggagtagcctctttcttcttttctctattggcctcactcttgcccttcttcttcttctcaatctcaacaactntctctntttgntttttatttttcaactttttttctttttcttcttcttcttcttttatttctttttctttttcttcctttcttcttatnttgnctngacaatctcttatttgtgtctctttctcttcatcaccctctgctttctcaacaattctttcagt

SEQ ID NO: 133930 - DNA, 311 bp, Glycine max
  unsure (1)..(311): unsure at all n locations
agcttgacctagaangacaagctatngattcttatcttgatgcacggaacaagagcactgcgctctgattcatattataccatttctatgtctgaatggcacttgcgtgaggtgtactccaaacacatacatccctagggagattatggcactaaccaacgagattatgacattaatatacacgtccaagaacagatatgctatttttggcgaacaaacacatatcactatccacgattatggctacatcagacatgtttggctgacctttaaaggactatatcgtccatatgagtgccttcttgacacat

SEQ ID NO: 133931 - DNA, 351 bp, Glycine max
  unsure (1)..(351): unsure at all n locations
ctataaaactaagctaacgacatggcgaccgncagatgatttctaatatgnaggggcgaagatgaaagtgagactatccacatgcacgtagagcagatcactcgagcatactgagttggcgacctaccaatagactaacgagctcacacaaactcgtaactctcattcgatgacacactgggagagagagattacctacagcctgtctctacatacacgctacttgcactgcctagccgcatgaactataccacacaataggacacggcttacgcagtacaacttgtccgtttctatgaccactgacaccactatttgctactacgagaccacagctctatcattgagcac

SEQ ID NO: 133932 - DNA, 346 bp, Glycine max
agcttttataggagaaacatgtgtttcctctctatttatttccgaaagacgcatctagtgaaggtcttagagaccataacaattttctagcgatttataattatgtgggccattaagtctatcatattctgacaatagccgagaagcccatgaatttcttcaggggcggagtaagagtcgccattagcttggccttggctaacaatcggggaagttcttgactctccgtcaatgtaagagcaaaccgatccatccacatggttgcctcttggtgtaaagagacgatcacctttcctctagcctctttttccgcgtatacttggcatactcgtccacgaccctatgc

SEQ ID NO: 133933 - DNA, 268 bp, Glycine max
  unsure (1)..(268): unsure at all n locations
tanggatggaatacttacttgatggtgaagaacttatttctctattgtaatcaacaaatgcgcaaaaggatgaccctatggctgctaactcttcaatcccgtgggtatggcctttgaaaggggggaaaggagttttttgaatgaaaaaacgtccctcccttcgtcattcttatattttggtgcataggtggctcgcccatgcgagcccagctcgcccaggctagctaacctgcactattatttttattttattattattctttccttt

SEQ ID NO: 133934 - DNA, 201 bp, Glycine max
  unsure (1)..(201): unsure at all n locations
tagaagatatcacaatcatcatattattcatcgtatgtttagatttagtagacttttacnaatgatgtatgtcacaaagtcatactgaaccatatttgcggtggcctaaaagaatactaattctgatatggttgacaatacacgctttgtatactgtatagaaattaaactttttgatttttttccactaactcttatgtg

SEQ ID NO: 133935 - DNA, 439 bp, Glycine max
actccgcttatgattgttgcaccacaaatttcattgagtgtcctcactgatatgttctacagacgattgtgtataaattcaaattgtcataacatatgattcgtggatatgatttaggctctctttctttaaattttaagccactggccaaaaagttatcccaatgtatattatttttgccatttgcaagccctctgagccaaacatttgatatttttggaacactaacccaggataaaagtttcctaccttaccataggttacgagagcacaggtgttttgttggggaattctatcatttggtggctaatgtgatcgaaatactctattcttaatatgggtattaagggaaaacaaaatgaacagaataatgtaatacaatacagattatcacaatgataaacaagttctttatggataaatagatgtctgaatcatg

SEQ ID NO: 133936 - DNA, 309 bp, Glycine max
  unsure (1)..(309): unsure at all n locations
aagcgattacacagtgtaaaatttaaattcacaattctaatagatgattaactcattttggccactggtaatcgattacatcctctggtaatcgattaccagagattaaatctcttgaaaaagacatttatcttanatatcttggccaaacctttagcagtttcaattcggaattccctttctaaaaatactagagatcttcttgatgttgcatctcgtattctcggattctgtcttgaactacacttgagaaacacatatttcataagccatggaaatatcacgatcatatggcatcatcagaacatc

SEQ ID NO: 133937 - DNA, 386 bp, Glycine max
  unsure (1)..(386): unsure at all n locations
gttgatggtgttgagaagaaatcacatgtctgtcntcattctaaanggggagaatgtgaatgtatgtatacatgattgtgatgatgtcacaagaagaatccaacaaggctcattatgcttcaagattaatacaacattgtctcaacaaacaaagccttgattcaagatttcttcaagatcaagccttgcctcacaatgaaatgttcgaagtcattcaaagcacatgtgatcgatcaccaatggcttgaaagcgtgtaatcgattacacatcatatgtaatcgattaccagagactctgaacgttgggaattcaaattctaaatgaatggtcacaactagtcacgacanacaatngtgttatcgattacactaagtctgtaatcgat

SEQ ID NO: 133938 - DNA, 265 bp, Glycine max
  unsure (1)..(265): unsure at all n locations
ggttaactccaagaacatatgggttaaaaacctaatgcacattaatggtactatttatcatgatgcatctntagtacaacttatattcaaaacacatttggtaactctactatattcttcatataccctgtcaagaggggctttttatctttctgccagacatctattgaaggtacacccattgtattacctatagattctaattattgcaatacttattaatagtttgaacaaacttctgccattgcatttcaatcataaacct

SEQ ID NO: 133939 - DNA, 450 bp, Glycine max
  unsure (1)..(450): unsure at all n locations
caattaaggagcatatatacaactttttaaaaaattagcatttctattttttggtaaagttctggtaaatcaattntttaaaaagtttgaatcacttttagttttactatagtaacattcttacattttcatcaagatttgaattttattacacattatgttttttactatttatattccatattaaagtctggtagtaagggtgcttgagtttctttcaatcaagagtagttgtatgtatgtaacacggtcttcttataaaaaaaaaattcacatcttattaaatattatgattagagatattggatatagcttactgttattntcatttntcacttttaaatttaggaaaaatcagaagcgggtaaaatacaatttattggttttaccttaacaatttcattatatgcgccaaagaaaatctatattcgtagtcttctaatatatttt

SEQ ID NO: 133940 - DNA, 380 bp, Glycine max
ttctactaaatcttaggggggtcctaaaataagatctacatgtgacaagtgttagttgtctgttacgactaaattttatatacaaaagttttcacaaatgtatatattttcctcaatttatggttcctcttgtaggattagaaatatttcttgtttagttattatcttcgctcagcaggggcctttcacatggaattaatgtaaattgtacttcaatttcaagaagaaaggagaatattcggaaggcgcaaaagttgttgtctcgctaagttaagaccgtgtgcttagcgagtatctgtcgctaagtgagtaagaggaatctggaagggaatctaccatgcaagcctgcgctcagcgcgtgatcaactcacttagcgagt

SEQ ID NO: 133941 - DNA, 98 bp, Glycine max
tacttcacacaatatatatatatgtatgtgttggtagaaagataccttggatatgcatgtgtttagcaaaaataccttacagaacatatatatgcatg

SEQ ID NO: 133942 - DNA, 313 bp, Glycine max
accagaaacacgattacctcatgaattttcaaagtcaatggtaattgactcatatttaccccctctcaaaatagaaaaggataagatcacttaggagggtcactaataacaaaatgaattcaagatcaaacaaacagaaagaatatcttgcatctaaactacgttttgaaaaatggtctacctctgcaattatggctgcaaccataaggttttctttatatgtctgcaactgcaattatgactaatccggctacatttgtccacaatttcctgtaatatctattaacgaacattgagaaaccacacttttatt

SEQ ID NO: 133943 - DNA, 418 bp, Glycine max
cattatcattattaattatctactttatttgtttggtatataactcttcttaccttgcacaaagacaaacgctccaatcgatatatgttcccccattgcaccacatatgctacctaagtaatgagccccaacacaccagcagccaatgttgcaattgtcctattcaagccttttcctagagtggctcctaaaaatgtgtcatatacatacatatattaggtaggtaattagttcaacacatgaataaataaacacaaccaaatctatatatatatatatatatatatatattagtgataagatatatgcacacaataattaaatccccgcgtgggatagagcacatattgaattgccagtgctcacaaccttgaatgcaaatactacgactgagacattggtgtgtgtgccataaata

SEQ ID NO: 133944 - DNA, 311 bp, Glycine max
caaaccacgtttattatacggaaatgagtgtttggaagtaagaaagataactcaatcacatttggaaaactctgaacacagattaattagaagtgatggacacaatggtggtaaaattgaaaaataaatacctaatagttatcacaaagcacactaaaactttatgatacaaagacagaggaaaaaacaaagcttacaagatgagaaggctagggttcagtttggccttcaaggatgattacaacatgaacaacggccaaatacatttcaccttcgagttacggtgtgggccgaccctgatgggatagtga

SEQ ID NO: 133945 - DNA, 316 bp, Glycine max
  unsure (1)..(316): unsure at all n locations
aaagaacttagaaaatatcaagaacaagcttgtttgnctttctttcgcatgtatgatatccactcgactaggtgtgaagtagaggagacctccaatcctatcacgcaacgtggcagacaaaagtgggcagttaacttgaatgaccattatggtctatgcggaaagtattctgcgcttcactatccatgttcacacattattgcatctcgtggttacgtgagcatgaactactaccaatatatagatgttgtgtacacaaatgagcacatcttaaaagctttctccgcacaatggtggcctcttgggaatgaaactg

SEQ ID NO: 133946 - DNA, 426 bp, Glycine max
  unsure (1)..(426): unsure at all n locations
tgacacttaaccactcaagcttganactttataaaactcttacaattgactcttattgtgtttacaacttcaaaagtactggtctattctaagcacctctaattacgtgtctatagttcatttttcatgacaacaattaaatgggagaacccaattaaaaaaaggtcaaagatctaaatgaaaatttaataaaagtatggggacccacagaataattaaacctatattttaaaaaggtattggtaccttctcattataaaccaataaattaggttgtacattaaattacatcttaattgggttgtaatttaattttaataatggtgttttaaattttatgattgcaaaataaaaactattggtgttcatttcaattttctaacattcaatattaaaccttgaaaaaaaatgtaattgtatatgaat

SEQ ID NO: 133947 - DNA, 156 bp, Glycine max
ggaaaaaaggagaataagaggaaaaatagtaagagggaaaatgggaaattagaaaagagagggataaaggggggaaaatgtgaaagggataaagaaagagaagggaagaagggaaaaagaaaaagaagggggaatgggaaaaagaggggaaaagga

SEQ ID NO: 133948 - DNA, 485 bp, Glycine max
  unsure (1)..(485): unsure at all n locations
gcaagcttatgcgcatatatccttacgaacgtttacttgtttaatacatcctatcaactaaaaaatgcacccatgtacaatcaaggtagcttcattacctagattatgtacttccaaggtgtatttgttatttacatcacacacgcctccttggctgaatttacatacatgcatactcaaagcatattggggtaccaaaaactgcacatgcgctcatcttggtatttctaatacccatacatatacaaacttcacgatgaatcttgactacctacacaataaggtgctacctttcatgctttntttcaagtttttgctacctaaagccacatgcaaattcaagcatattatcctttgctgactaaaattgtattcaaattagaacgtatatagttcttgcagtatgtttcttcacatagaatgcaacatatttatatatactctttgtgagacatnttgactaccaaaaagtatatatacataca

SEQ ID NO: 133949 - DNA, 387 bp, Glycine max
  unsure (1)..(387): unsure at all n locations
tactacctgattgtgagttgattttccttgtgtcctatgtttattattaatngatccaaggaaacttccaaagaanaaacgtccgattgatttttttgactattttattcaaagaatatttgattattttattattattttggcccttttttgtttaaccaaggtcacagcgtgaacgatcggttgaattttattttaacagtaattaaacgatattacaactcanatgattggctgaaattcattttattattttattaggtgagaaagcggcttaaataaatggttaaagcacataaaaaggtggtactgataacatacaaaatgaaaataatagttcgcgaaacatgtggggaccactatgggtgcatagaatgaattgaaaga

SEQ ID NO: 133950 - DNA, 337 bp, Glycine max
gcttggagaaaagcctatgagaaaatattttaaagtattaatgattataataataataagtaataccgagaggttttcttttgtccagacaatgtctgaacaatgtgcagaattgtctaaagcaaaaagaatggaaatagtaacaataacttggttgaaatccagggatgcatgaaacaatcaccttcttagttaccaactgtcataccctaatttcgtccggggacctttgcttgatgacatgcgaacattcttttggtctcgtgaggtgcttggcacccatcattatgcgatttgtgaaattccatgacatgccggaaaaaaccataaaatattg

SEQ ID NO: 133951 - DNA, 481 bp, Glycine max
  unsure (1)..(481): unsure at all n locations
tcttatctaaagtcgtatgggatttcttgggtaatatcttattctaatcattgnttaatttgaactttgacgttgcccattatagtttcaagggaatgagtctaccaagagtatgtcttgggttcatgtagagataaagcttggtagcagagaggctcaccaagggtgaaccttgggtttgtcgagccattagaggtccgacgagactcaccaagggcagaccttgggtttggcaagtctttggagattcgacaagactcaccaagggaggacttcgggtttgacgagcctttgttgattctaccaggaacgcattcgccctgtgtttggtgagtctctggggacaaacctcgggtttgacaagcctctgtgaagtcgacgcatacacgaggaaaattataatactggagggagagataattttattcgacttgatcatttgagtaccaatacccttctttcccaagtgtggctctttaaa

SEQ ID NO: 133952 - DNA, 374 bp, Glycine max
  unsure (1)..(374): unsure at all n locations
gtcacctgcggcatgcagctatctaaagtttctggatttcaaatcttgatttcaaaacttgtgctattcatctttttcattcccttctccctttgccaaanagaattcgccaaagattaaccgcctgaattctttttgtgtctctcttctcccttttcaaaaagaacaaaggactaaccgcctgaattcttttgtgtctcccttctcctttgtcaaagaattcaaaatgacacagcctgagaattcttttgattcttccctttcccataaacaaaagatttcaaaggactaaccgcctgagaattcttttgtttccccattcacaaagtttcaaagaactaaccgcctgagaactttgtcttaacacattggag

SEQ ID NO: 133953 - DNA, 381 bp, Glycine max
  unsure (1)..(381): unsure at all n locations
tatcacanaactgtaagacttgtagttgtttattgtatgaaactgagtgttgggtggtaaaaagccattaacaaaataaactcaatgtagcatagatgagaatgttatgttggataagtggacatattagacaagataggattaaaatgaatgcattagaaagaaagttgagaacttgagatagcatctgttgtagaaaaaaatggtagaatctcacctgaggtggtgtgggcatgtatgcagaagactagtagaagccccacttaagaggggtagcctgtagtcctatgtggggaagttaggctgaaaaatatatagtctcaccattaagaaagactagaggcaatggcttttcatggacattgattgaataaaacacta

SEQ ID NO: 133954 - DNA, 426 bp, Glycine max
  unsure (1)..(426): unsure at all n locations
acattagaatttagtaatgatccactaacctatatatttatagaacttaatgccactaacctagggaattaaaagaacttaatgactgagtgtaactgaaattgtggcaaccaaaagtcacccctaacagccatcaagccagccaccatttggtctcctaaaaggttgatgcctaggttgccaattgggcccttattacaactagaactaaaccaaactaaagcccttttagttgattaacccaaaacatatttttggtcagccaactttacaaggattgggccattatttagacaaactaaacactctaaaattgagacaaagtggtgccatttagtcctcctccatttgggccatgctacaacttacaaccttggactnttcttcttgaaactngggctcgaattcaaatagtatggacaacac

SEQ ID NO: 133955 - DNA, 307 bp, Glycine max
ttgtgctcctctgctgaccaccatacaaacctttgtccttacatgcagcaacctggagcaattgaacagcctgaagcctatgctgcaaatatttacaatagacctcctcaacctcagcagcgaaatcaaccacagcagagcaattatgacctttccagcaacagatacaaccctggatggaggaatcaccctaacctcagatggtccagccctcatcaacaacaacagcagccttgtcctttcttccataatgctgttgggcaaacagaccatacattccttcaccgattcaacaacaacaacaacc

SEQ ID NO: 133956 - DNA, 484 bp, Glycine max
  unsure (1)..(484): unsure at all n locations
ngagtatnggctgctgcgccgagtgcaagacttttattgtgttatgcttgggagcaagactgcgaggtcactaaccatagaacttagacaccgctctttgtccaaacaatatataaactcagtattagggacattagacctcactcattcaaacaagcggcttatatcacctacgtgtgttatatatacagcatttttggaaacgcattatattctacgctatatattgaaaatttatgcattgttccaatagaattcaattcattaaaatacacccagtataatgttttttttacatcatataatcatacaatgcagaataaaatgcagtgtttgattaactttcacatgcagaactgcagacaccaaaatcaaaagctaaaacaatatactaaatgaatctcaatggcaacacatctacagaaatgaaaaatagagattgcnagaatatatatagcaacgattctcatgcatgataaatcta

SEQ ID NO: 133957 - DNA, 417 bp, Glycine max
  unsure (1)..(417): unsure at all n locations
agcttatccttatggcttgccttctgactttatccnccgtgccaccctggaagatttaagccaagcccctactttcgaggggcaactcccaccttatgacgactatcccgagcaggacgatgaggaaggagatacccgtcttggccccctgctccacctcatagatccgtccgcacatgaactaccccaaccgaacatagtccgccatattccagtctcacccacacccgtaaaagaatctgttcccttcgcggaagataaaggaaagattaaggcacttgaagagaggttaatagcagtcgagggccttggcaattacccattctcgganttggcggatatgtgtctcgtgcccaacatcgtcatccctcccaagttcaaagtaccagacttttgatagtacaaagggacgacatg

SEQ ID NO: 133958 - DNA, 434 bp, Glycine max
  unsure (1)..(434): unsure at all n locations
actcttnctctctgtntctctcaactattcttcattcttcttcttttcacttttgttcttcctttttcttgcacaaattatgtggcttttccactagtgatgatcatggaaggctaaacactcaatcaattgaaggatccactccaagcaagactaaatttgagttatggtctagtatttttaataggtgtgaatgttcaactttttcttcaatcctattttcaattttcatgattatgaatgggcttaagattgaaaatgaattagtttagggattaatttcctaacttcaactttaatcacatattatttagacgatattccaacctaattttntatctaaatgaattttgggattaattngattgaattaactctaataacattgattgaaccttcacaacttgatctttctctacaaaactggataattc

SEQ ID NO: 133959 - DNA, 239 bp, Glycine max
  unsure (1)..(239): unsure at all n locations
agcttcatggtgaagtgtgattcttatttgttantgatgataacaactgatgacgacaataagatgatgactaaggtgatgaacaaaagctcatagatcaaagaacaactcatgtaaatcatagaacatctcatgtgaatcaagaacaggtcaggagttctagaatcaagaagaattcaggacttacgaagaaagcctataatcaagagtcaagattcaagattcaagaatcaagactc

SEQ ID NO: 133960 - DNA, 409 bp, Glycine max
  unsure (1)..(409): unsure at all n locations
tctccctantttgctataaatagggggaggagtgaagttganaatggttcagccttcttggcactttgtattcacttgaaattgctgaggaaaattgtttccgtgaagaanatccaagccgaggcgcttccgtaacgtttccgtaacgtttctgtgcgtaattacgcgaagattttcaaccgttcttcgacattcatcattcgttcttcattgttatttggtcttcaaccagtaagtaccccaaatcgaccttttcaattcattctatgtacccgtggtggtccccatttgttttgtgtacttttattctcgtttcattttactttccgtacctcctttaacgtgcttcagtcatttatttaagtaatttctcgcgtatataaaaaatataatanattttcaccgatca

SEQ ID NO: 133961 - DNA, 453 bp, Glycine max
  unsure (1)..(453): unsure at all n locations
gagcttggtctcgggacagcgttatgattctttcctggaggcagtggcaaaaacgacaatgagtttcgattagaatgtttaacagaatgaaaacgactagagagaggtgtcgtacggagctcggagtagaagagcaagagcatgagaatggaggaagcgagagtgatgacaccgccggagagcgcgcggctgtagaaatcctcgttgatattagggtaagcgtctaggttgcggagcttgcttattatgctctccatgattattggatggatccaaaaccaaagatttaagatgatgtaataagaagcggaaattaagaaacctaacttttattaaccatttgtgtgattgtttttgcnatcggaaacaccatattcaattccaatttttctgctgtgatatgatctatcagattggactcatttttttttctctgaatgacaatgcgactct

SEQ ID NO: 133962 - DNA, 402 bp, Glycine max
ctccgctgtgctgtcacaagaattcgtattcattcttatgtgaataaaaatccctacgtgtaattttctcatcattgcttttcctttttctcggtgtccttaacaatcgtgagtgatcttactaaaaggttgcatgagtcaagataaccgatcgaatggaaggacataattaatagcaagctaattaaagaagcaggactgaaagacaagaattgaaaatagcttataaaacggcaataaaagatggacatgtcaaaaaattaagcactcttttcttttgataagtctactgtatatccttcgtccggtaataattggtgggtaagataaaacatttataccaaaataattattatcttaattctaatataagtataaacattatttcttatttatattcct

SEQ ID NO: 133963 - DNA, 308 bp, Glycine max
  unsure (1)..(308): unsure at all n locations
ggatctaagcaccgcagctgcagcttaagatattatggtttctcaaactgcttatttccagaagggaattctatcaatagacctgctgtcgttaatggagacggttaccactactggaaaacccgcatgcaaattnttatagaggctatatacctaaatatttgtgaaggcatataaatagggccttatatacaccccacagtacacagagttacactatatggtatgacatcctgtgaaagcattacattagagtaaccttgagatcgatgatctgaacaggatagacaatgagtacactacatttt

SEQ ID NO: 133964 - DNA, 266 bp, Glycine max
  unsure (1)..(266): unsure at all n locations
gcgcatggtagattctggaagatgatgagttgaacaggttcgctaagcacaccactctatctcagtatgcgcatctgtttacgccatccggtaagcgagatacgcacgcgctatgccaaaactcactaatgtgcgcttatcggtccataattgcgctaggctcacgagcacgaacattgccacctatgtgagcccgaaataagacattgtgaacggagtttgggttgggatttagagctctgcatgtcgagagatcntatagagag

SEQ ID NO: 133965 - DNA, 398 bp, Glycine max
  unsure (1)..(398): unsure at all n locations
gcttatatgaatggagggacacatggccttatagtgtgcagnttaccttatcaaagaatttttcaaatcattgtcctattctaattaaatctaacaatgtggattgnggtcctaaaccttttacgatattaaactgctggctaacagataagtctttcagagaagtagtcaatcaatgctggaattctgcccaagtttcaggatggggagcatatgtattaaaagaaaaaatcaaaaggttgaagtgcatattatagatatggaacaaggaagaatatggtgatagctttaaaacagtccagcacttggaaatggagcttaataaattagaggaggacacattgcatagacagatgactgatttggaaatttcaagaagaaagaagctacatgaagat

SEQ ID NO: 133966 - DNA, 368 bp, Glycine max
  unsure (1)..(368): unsure at all n locations
ccgaaggatccttgacgtctcaagatttcttttgagacatatcttttgctcgacccttgctttcacatagttcctacaaaacatataagaacaaacaaggatcaagcataaaaggcataaactagtacatcctggttcaaccttgtttttttctatttaaaagcacaagaggtatcaacttattgtccaaaaatgacaccaaatcataggaatttatggcaattatcaacagagctnttgatttttgtggtgtcacaaagaacggtgctttctagagtgtctgtgatgaggttcacattcatttattcggagagtacggtatcacacaggagtgtggaaataagtgatatggagttagattgcagatg

SEQ ID NO: 133967 - DNA, 438 bp, Glycine max
aactggccatgaatcagaaatctgcacctgtcacaagactgtgtggattatgctcctctgccgaccaccatacagacctttgcctttctatgcagcaacctggagcaattgagcagcctgaagcttatgctgcaaacatttacaatagacctcttcaacctcagtagaaaaatcagccacagcagaacaattatgacctctccagcaaaagatacaatcccggatggaggaatcaccctaatctcagatggtctagccctcaacaacaacaacagcagcctgctcctttctttcaaaatgatgctggcccaagcagaccatgcgtgtctccaccaatccaacaacaacaacaaccccagaaacaacaaacaggtgaggctcctctacaaccttcccttgaagaacttgtgaggcagatgactatgcaaaatatgcaat

SEQ ID NO: 133968 - DNA, 385 bp, Glycine max
  unsure (1)..(385): unsure at all n locations
tgaaaggagcaaagaccatcagcaccaacttctctcctaagaaagactctattggtccctgatatttaacaagacataagtgagggtgaaactcaaagaagcataattatctttaacaaattgactcacactcaacaaatttnttaatattgagagtcattatgagacacaaatgaagaggaaccaacaaagatacttaaaccttcactatttcccataaaaatctaataaggtccatcaacgtgagtgaactgcttgatattntgtggttcaccagttacatgaatgctagcactacaatctggaatccacgtggagctaacatgtccatttccatgagaagaggcatatgaactgtgttaggttgatgctagagcaacaattc

SEQ ID NO: 133969 - DNA, 406 bp, Glycine max
  unsure (1)..(406): unsure at all n locations
aaacatgaactaattagacagcacaagctacagtacctaaactgggagcagcaggacaaacaattagtgtctttggcttctagcatcaatggcatcgagtcttcacacaaaagcatggttatcaaacaaatgaagttaatatgatgtgctctgtaaaagttttaatacacctatgaaaactaatattcatgtgctctgtatatcaattcatagtactaaacatgtgattatttacctgaaattatgttagctattatttggacatggtgtggatgttntaacttgaacccaaacatgtactataagtacctagtccctagtaaactgtttctatgttttatccgtgaacaaagccacttgcatcacttgccaattatattctaatattattatagatcttcattcc

SEQ ID NO: 133970 - DNA, 444 bp, Glycine max
  unsure (1)..(444): unsure at all n locations
tactacgcttatgatgaatcaagatggattcaagggagtttgatgattacttagatgatgacaaanagttcanaagtcaagaacacttcatgttaacaaagatgatgacttcaagaatcaaagaatgagttcaagattgaatcaagaacacttcaaggttcaaaaggaaatttgatttcaagaatgaagaatcaagtttcaagattcaagttccaagaatcaagaccaagattcaagaatcaagagaagactcaatcaagataagtattaaaaagttttttcaaaaaactgagtagcacatgaatttttctcaaaaccttttaccaaagagtttttactctctggtaatcgattaccagaatattgtaatcgattaccaatagcaaaatggtttccaagagcttcaactgaattacaatgttccggtgcttcaaatgttgaatc

SEQ ID NO: 133971 - DNA, 325 bp, Glycine max
tattatatcttcattatccgcttaaaaaacaggaggggacaaaaccttcgttgatcaaaatcaccaggataaatgataaaaaccgaaaaggattgaacgactgaccgggaccataaaaacgatccgaacgatgaagcgctgataagtaggctcggtgtaattgaggaggtgcttataaatgtgaagcaaggacaacgcaatggctccgcacgtgcaaatgaaagcgacgatgtacaacaagattgaaaccatttggcggccgaatttcgaatctcctccgtcagcgagagtcggcgaggtgtgctaacggagcccaattcatgac

SEQ ID NO: 133972 - DNA, 483 bp, Glycine max
  unsure (1)..(483): unsure at all n locations
ctatacatatactaagcttctacttagaatttggacatactctaatgactgaanactccttttggaagctctatcttggattagagttgatctcctcattgaccacttatacctatgctactaagtttgtgacatgatgctaaacacaatgagtcatatcttcaaaagttttcatccacccattcttcttttcaaagtgatgcttggaaccaagtgtaacccttggatgtcaaagctcaacttgtcttgctcacatgccaactcaacaattggtttttaaaggtgtttccctttttgatatgattatgggatgaaagtaagatattctttaactaatccccatcctttctctgcatcaaggcctctctcaactaactctttgcttaggcactccaatctttgctcttgaatacatatttttatctacaggtcttcctttttcttataaattttggccatctctctttcattgcttcaacttat

SEQ ID NO: 133973 - DNA, 448 bp, Glycine max
  unsure (1)..(448): unsure at all n locations
taacaaactgtacagaatactgtgacanacgttctgttgtcanatcanatacacagatacatagatctagaatattaacaccatggactgcacaatttggttggcactgataaagacaactaaatctgcagaatatcagtattatcttatggctaactgttaagcctgcaaccattgtccatacaacttattcatctaactcctctatctgtgcccgcttctcagcggctatcttcctgataaagaagccccacctcattgctgccttgatcttcagccatcccacaacagctctgcctgggcgagagcgatcctcatcatagttcggtatactgggagatggcatgaatgatgggaatgaatagccatcctcagcactcatggagccatgaccttccatgctgaagaggcgaaacaactgctgcatatcttcattctctagcatctc

SEQ ID NO: 133974 - DNA, 363 bp, Glycine max
  unsure (1)..(363): unsure at all n locations
cacctgcggcatgaagcttatatatatcgatactcttanattttcatcggaaactctcgggaaattcaaatagtcataactnttcacacggatgtccgattcgggcgcataatatgtcgaaaggctctaaattgaacaacgcaagctcttgagaaattagactggtgtaacttttcacacagaagctctaatgaaagtcatatggtcataactttacacactgaggtccgactcaggtttataatatatcgatacacgcgaaatttatcatcggaaactctctataaaatccaatggtcataacgtttcacacagatgtccgactcaggcgcttaatatgtcaagaggcgtcgaactgaacaa

SEQ ID NO: 133975 - DNA, 370 bp, Glycine max
  unsure (1)..(370): unsure at all n locations
ggaatcggacatccgtgtgataagttatgaccatangattttctcaagagcttccgttgttcaatttcgagcctctcgacatattatgcgcccgaatcggacatccgtgtgaaaagtcatgatcatttgaatttctcgagagtttccgatgtttaatttcgagcgtatcgatatattataaccctgaatcgtacctcagtgagacaagttatgaccatttgaatttgacgagagcttccgttgttcaatttccaatgtctctatatgtgatgcgcctgaattggacagtcgagttaaatcgtatgaccatatggatttctccagagattctgctgttcatattcgagcgtctcgatattgtatgggatcg

SEQ ID NO: 133976 - DNA, 473 bp, Glycine max
gcttctgaagcaagtagacattcttaacttttgtcatgttttgacgactctgaaagccattctgaggtagtcattctaaagtttccatcctgaggaacctttctgatgagcattttgatgtaaaatcagaatagccaatctgatgttagaaaagaaaggatacatgtttgaggtagatcttttttattgtagaagcaaatgcctttggtgtttcgatgatgatcatgatgatttgatgcaaatgatgcacatgggattttcaagtttaaattcatgacaatgattcaagaatacaagccacaacatcaagatgatcactagtattttaggaagggaattgctaattgatatagcaaatagtttggccaagttatttaagttaaaaagtgttttcaagagattactctcggtaatcgatatcagaggatgaatcgattacaggggccaaactgcttacacagctctatattttg

SEQ ID NO: 133977 - DNA, 382 bp, Glycine max
  unsure (1)..(382): unsure at all n locations
tcttagtctcaagtgatgaagataaagangnggctacttcatgatctcctctaacgacaatagcatcacttctggcactaatattgtgggagttngaagccatcttctcagttaaatttctggcttcagcaggggtcatgtctccaagggctccaccactagcagcatctatcctatttctctccatgttactgagtccttcataaaaatattggaggagaagctgctcagaaatctggtggcgagggcaactggcacatnagttcttaaatctctcccagtattcatataagctctctccactaacttgtctaatgccttaaatatcttttctgatggtcgtggtcctggaagcagggaaaatattttctacaatactctc

SEQ ID NO: 133978 - DNA, 399 bp, Glycine max
  unsure (1)..(399): unsure at all n locations
catgaagctagtcagaagnccaatattaattgtttgaatancatcataagatacaaatattaatatgtattgtaggtactagttaacctattcaatttcttttaccttatttgaacccgtgtttgtaaaataaccataaaaggaaacatgtgaattattgttgaactgtcatgtagatccactcttgaaagattatgtttctctttttgatgcggatatgcttttgagaaatgtcaaatgtttatagtatccattttattgatctacacttctacttaagcctcaaaatctaataaatacatgtggaatgtgtacacatgcagggtgtgagcaagggactagtggccacacgcctactttctgccatgcaagaaaaggggatgtngccctgatttgttt

SEQ ID NO: 133979 - DNA, 364 bp, Glycine max
  unsure (1)..(364): unsure at all n locations
ggacctctaagncacctgcggcatgcangcttctatataagacgaaccatcttatcattatacacatgttgagttntattcagagaattagagtttatctcttttatcttagtgagattgattctcgtaaattcttgagtgattcaagaacaccttggctgtatcaaaggactttcacaatctttgtgtgttgccctcgctggaaagagagattctttcattcctttcatcttcacctgatgaggacatgaccaagagcaagggcaaggatccacttgaaggacttggagggcctacgacaagggctagagcaaggaaagccaaagaagctcttcaacaagtgctgtccatactatntgaatac

SEQ ID NO: 133980 - DNA, 408 bp, Glycine max
  unsure (1)..(408): unsure at all n locations
tctcgacaaattcgaatggttatgactgttctcatcaaattctcgattcggngacataactcatctagacgctctaaattgaacaacgcaagctctcgagaaattcgaatggtcataacttttcacacggatgtccgattcggggacataactcatctagacgctcgaaagtgaacaacggaagctctcgagaaattcgaatggtcataatatttcactcggatgtccgattcgaggacataatatatcgagatggtcaaaattgaacaacggaaactgtcgacatattcgaatggtcataacttttcacacagatgtctgattcagcgacataactcatctagatgctcgaaattgaacaacggaagctctccagaaattaaaatggtcataacttttcacaccgat

SEQ ID NO: 133981 - DNA, 314 bp, Glycine max
  unsure (1)..(314): unsure at all n locations
tgaggcatgccngctatgtcctgagaaactggttgccatattacaacaatgatgtgaagattgctgaaaaccctagccgtgcaacaagtcctagggaagtagatacggagatgtgacaagaaaatctgcggtattgtgagtagcattttgaaagacgcctctgtgcctgaagctgatgaagatgtcccaacatcgttcaccccaaatgttgctgcgcctgatgtcaataaagatgttccaacatcttccggcccaaatgctgaagtactctctttccccagcgaagagagatcaacagatgaagatgatcactc

SEQ ID NO: 133982 - DNA, 390 bp, Glycine max
actcagcttaaccaaggagatggaccatttaagtgcttgattatttttgacaatgcatcaaagtgagctgcccgggagtataatgttagctccaccttcaatgtctctgacttatctctttttgatgcagatggagaatccgatttgaggacaaatccttctcaagagggagagaatgatgagtacatgaccaatagcaagggcaaggatccacttgaaggacttggagggcctatggcaagggctagagcaaggaaagccaaggatgctcttcaacaagtgctgtccatactatttgaatacaagcccaaggttcaaggagaaaagtccaaggttgtgagttgtatcatggtccaaatggaagaggactaaatgacaccactctgtctc

SEQ ID NO: 133983 - DNA, 434 bp, Glycine max
  unsure (1)..(434): unsure at all n locations
ggatccttaagncacctgcggcatgcaagcttgaaggaatacttgatgccttggtttacctagtaactcagctggccatgaataagaaatttgcacctgttgcaagagtctgtagtctatgttcttctgcagatcaccatacagatctctgtccttctttgcagcaatctggagtcaataagcaacctgaagcttatgctgcagacatttataatagacctcctcagcagcaaaaccaacaacaacagaataattatgatctttcaagcaacagatacaatccaggttggagaaatcatccaaatctgagatgggcaagtcctccagaacaacaacagcatgtccctcctttctagaatgctcctggtccaagcaagccatatgttcctcctccaatacaacagcagcagtcataacatagacaacaagcaact

SEQ ID NO: 133984 - DNA, 426 bp, Glycine max
  unsure (1)..(426): unsure at all n locations
tgcaataggctcattcaatcacttagtgccttctaagtttttggatccattccttanaagcccgagggagttatgaaacanagtattaatattttgcttaataccatatcaaagagaagaagtaatatgtgcccaagtgaaatgatgattgtttgcaactctagctcacaacgttaaagcccattgcacatctgtagaaactagctcccaatcaagttgccttgttgatatccaagaccaatgataaacctgaatttgactatattttgatgtgaattttcatgtcatatccatgcatattgatatattttattttggcaaaactcatggttgggtattaatntgtgaaagacatgtgcttaagacgctaaatgttggaaagaactaanaatcatgaactttttcacctaattagaagatcatagt

SEQ ID NO: 133985 - DNA, 399 bp, Glycine max
taataatgtttattcgaagaaaattctatcagggagaataaactattttgaatatgaattttgtagcatttttttaattacattacgttggtgttaatgatatattattgtgttaataatcgatgaacgtttcaactttcatttaaaaaaatttgtagatcatatttatttgaagacagtatctcgagtacgaaatttattctaatatgaagttgtcgtatttttttaattagactaggttcacttttttgtgtgtaaaaattgaaagcgttgaagtgaagcgctattgtgatgtttgttggtcttgatcatattaattaatatatttgagtatttcgtatacctatttaatttcgaagtttattgtaagataatattttactactactcttcatgata

SEQ ID NO: 133986 - DNA, 368 bp, Glycine max
  unsure (1)..(368): unsure at all n locations
gcgtacggcatcgctaagcgacgggtcttgaaaaaccaaacatctctctcgcttagcgaggcatttcgctaagtgagaacgtcaaaaatagcttggttaagtgtaacatcaggacattgaaaaatgcccaaggaagaggacaattgtgggattctgcacaagcactctattttccttcttcctctctcatccaaaaatctgccaatcttgcatatgcagctgtgcttgctgcattgtttctagcttcaatgatacaagtaagatccatacgatcctgttctctgctatattgctcaaccttaggatagataacctttanatctagcttcaagaattgtaggaatataggtatgttaaaagcagttaga

SEQ ID NO: 133987 - DNA, 270 bp, Glycine max
atagactatacatccttatgctctattttgacctggagcctgagtattaaggacctattccagatgcactccttgtactgccccataatgcatcattgactgttcggacttaaggacgcaggacgggcgtgaagacttacgagcctctgagaatcattctgaatgaccagagcgattcaatgggacttgatcatgcattatatacacttgcagatctcacgactacgaggatgttcgtctctgacacgagatctgagactatgctctcaa

SEQ ID NO: 133988 - DNA, 427 bp, Glycine max
  unsure (1)..(427): unsure at all n locations
accctgtttatacatatangaacgaatctaaattgcgatcttggatgttggtgtgtttggagggccctggtcaaaatatgttttagtaagtggttatgcaatgcaaggttgatcaggttatgcactaatgtatgattactttgtggaatatacttaaagttgaagaagttttaaaaatctatggttttgttcttgtatgagtaatcaggagagctcgagaggggtcttgtattgagagtaactggccatgctcagattattaataaatttgtgtaaccacttgttgcaggaatcaagagttagatcattcatttcaatattcttagattgtgcttgctggtcaccaaaattgtatgtggaaatgaatttaatctactttgcgattgttatggcatttctctaaattaagactgtacttttccttgct

SEQ ID NO: 133989 - DNA, 167 bp, Glycine max
gcaccgcagctgcagcttgaacacaggtcgtgggatctcattcatctgcttgaaccgccggctacaagaggcacctgaaccgaacctcggcgtgaagagctatgaccatctgaatgtcttgagaacttacgtcgcacactcctcgcgcggctgtatatgcgaagctg

SEQ ID NO: 133990 - DNA, 448 bp, Glycine max
tatgcgcatatttccttacgaacgtttacttgcacaagttattttatctactaagagagatgcacccatatacaatcaaggtaggctcattacctatattatttacatgtacttgcaaggtgtatttattatttacatcacacacgcctccttggctgagattacatacatgcatactcaaagcattgtggggtaccaaaaactgcacatgcgctcatcttggtatttctaatacccatacatatacaaacttcacgatgaatcttgactacctacacaataaggtgctacatttcatgcttttattcagtttttgctacctaaagccacatgcaaattcaagcatatatatctttgctgaataaaattgtatttcaaatataaagtctatatctttttgtaatatgttttcttcacataacatgcaacatattatgtatatattttt

SEQ ID NO: 133991 - DNA, 299 bp, Glycine max
  unsure (1)..(299): unsure at all n locations
gcttagaaccanaatgtccttgtatgaatgatgctctcctacaacctaagacaacgtanaatgaaataaactgtacaagctcaaggttcaataaaacaatcatactttcagctcaaaatgggtgcaagggataaatcaatcatgcacaatgtaagctttttatctaagtggctatcttcaatcaaaacatggccttcatcatcttcaatttcacacattcattctatactcggagattcatgcacaaatcattactcaatgttagtcattctctcacaattaaagatcacactctcact

SEQ ID NO: 133992 - DNA, 417 bp, Glycine max
  unsure (1)..(417): unsure at all n locations
agctnttattactgatacttctgttcattatatagtgaatatgcctaattataggttctgctatttatttttatttgcatgagattggctctatgtcctcctatgttcggtgttatttccttttttgatgaacaaatttggtttgcgggcatatgaatgattgcccctatggtgccgacataattggaatgatagggttttatcatgatgcttttgcaatcctttgcttaaaaaaatatcctcttttaaattgatttttgaatatgataataaaattatgtatctatattcttttaatatatcgtcattgtcatcatctttattatgctcctaatgacctataatgttgatcttttcttgttaaaaagttagagaaaatgttcaagcatataaccaaatgtatgacaaaattataat

SEQ ID NO: 133993 - DNA, 460 bp, Glycine max
  unsure (1)..(460): unsure at all n locations
tagagtatcaagtaattaagaactggataagcactaattgtaatttagtactgcaaaatctatatctcctttcatatntaatatagaataaataatactctattntgactagttgacagagtaaaaagtccatattcaagatttagttattttagcaaccccttaatgcaactttgtctgtttggtgcataaggacacaagagcaagcaaaaaagttagatgattctcctgagaatcattttgaaatttgaagtgggattcaaagggaattgaacatgcataatagactntagcatatgtcactactacaaaaatgttcttctatgacacgagatctaagacgatgctataaaattgaggtcttaaaatatacagtggcatttttgcaaataatcaatttttgaagacgattttgtgaaaccatctttgaagcgttggtcaaagatnnatttttaaaatc

SEQ ID NO: 133994 - DNA, 486 bp, Glycine max
  unsure (1)..(486): unsure at all n locations
agcttaggcataaatgagaaggtcatcctttttanggaagttgtgagagcttangcgcacacttgacaatctagataggcttccgatacttattatccgctgcaatntgaatcacatgaaacaatctttccatacgaaggacaaataaaataaagagagatatgatcttcttgcctaatacccctactaggaccaaattcattcaaaacttcaccattccacaacacacgcatctttgaggatgaaatacaatgccaaataatattaatgaaattttcaggacaagcaatatctcgcagagtatcccttacaaaagctcagctgagacggtcatacactntttctagatcaattttaatttccatccaccccttagctcctttcttacgcatagagtgaaaaacttcttgagctataacaatggtatcagagctntatctatatggaataaaactactctgatanggaaaaactatcttccatcaa

SEQ ID NO: 133995 - DNA, 184 bp, Glycine max
agaatctatcttattattataagttatattaatgaaggcctaataattgatattaagatatgataatattttttgggtgatcatataagagagcatgttgaagtaacatatgtactaaccctcaacaaaagtgagcttcttgattgtttccgggccaccatttccttcaacgatttcaacactc

SEQ ID NO: 133996 - DNA, 270 bp, Glycine max
  unsure (1)..(270): unsure at all n locations
actcagcttgctatccgaccagccgagctagtagcacttatacttttatgtccataacaggcgagctcttggctgtaaccaatatcagaacattagttctcgacccaaggaggcttgtgtagcggctgtccacctattgatcttgtgagtaatctgatgaataccctatggtcatcgattaccattcgtgggtgatcgattacagtgtttacaaancgagacacgatgttatgtacgaactggtaaccgtataccatgtttggcgtatct

SEQ ID NO: 133997 - DNA, 283 bp, Glycine max
agcttcggacgagatggaggtgaggatattaattgtattgtttagaaggagctgaaagcccatttgaataaaatagtgtggacagaacgcactacaaagaaggtgagagcgacctttaatgggaggaagaaccagaatgaacatttctcaggagaggtggacattgtgttttagtatgccacgagagcatctattgcttagtgcggcgctgaaatatcaatacagattcacatattcataaccgttggtagtcatttgcagctacgtgtgttttagaagaata

SEQ ID NO: 133998 - DNA, 310 bp, Glycine max
  unsure (1)..(310): unsure at all n locations
taagcagtgatcaaactcgctctatagaactgtttctgttaacatatcagtangatggtgcatagtgctgatcttatgaactctgattcttctttctgaccgaatgaagtgatatctaacatctatatgcttggttctatcatgatgaacctgatgcttggccaagcgtatagcactacagctgtcatagtgaatgttaccatattctcgattaattccaagatcatttatcagacctctcagcctaattccttcttttgcagcttcagtaagagccatatattcagcctcggtagttgatagggcaaca

SEQ ID NO: 133999 - DNA, 401 bp, Glycine max
aacaagacgcgcacaccttttttcttctgagtttatctcttaatggtaataattagacgcatggcttctatggggaattgaaatgattgtgtctggcttgcctgtgtaatgcttatccttcctgcttgagtcaaaagtaaaacactttcattgcatttgtaaaccatttcatggtgcactgttacttatataatagatttgaagtagacacattgcaatcttgcatgatccaaattgtgactgctacttatataataatatatgtctacccaaaaattgtcaacatgacaactagagttgagcatattctaatgatacacaactgctattgacgccattattatagattttctgataataagtagctcatacttaccaaaaactgccacatgatagtatta

SEQ ID NO: 134000 - DNA, 438 bp, Glycine max
ctacgctttcaattgacactaactatttaatgtgtgtttattttattatgggccttctttaaaatataagttacactgtatatggccctgttatatttttcttttgatgactgtggttgtgtcactaaaccaaatgtttctatcttacccataagtagttgattttgaagaacttttgattcataaactggcttctattttcatggctgcaaccatagatgtctttttttcctaccattgcttgctttcttttgatcaatcacgaaatcagcaacatgtcgtattgtaatatacataccaattgtcatatatagcatatccaaacattaatgtaacaattatttatattaatagtcatgcttctttgctgtgtgtggggatttctggctcccttaaatacatgccttactttcagttgtcaagtccattatcccatgg

SEQ ID NO: 134001 - DNA, 291 bp, Glycine max
ccttaggcacttgtctctctttcgaatgtgcataggaagattgtatccgagaagaagctccaggccgaggcactttcgtgacgttgctgtggcagttccatgagcgatttcgcgaaggtgtaccaccgatctgtgacgttcttgatgcggcttcatccttgaacgggtaactaccgcaaaccaagcttatcaattcattctatggaccacgggcggaccacattagggatcatgtcttgttagacgcgatttatttacctctttatagccccttttgacgtgcttgagcca

SEQ ID NO: 134002 - DNA, 214 bp, Glycine max
gtcaggattagatattgtatcaccggatgaatgcaccattggatgaactgaccatactgaccctgccactgtctaaagacatttgtggttctcccgacaatcatgtcttagatttcaagaggcgatccatatgcgattcggacgggcttagcatgctttcgcatatggaactgcgacataagtgtggctctttgcacaagatctaagacgatgc

SEQ ID NO: 134003 - DNA, 405 bp, Glycine max
  unsure (1)..(405): unsure at all n locations
agcttctccacttattttctattataggtgtagaggcgaagggaaanaatgttcaaccctcctagtaattcgagatcacttgaaattagtgaaaaaaattggtttcgtgaagaaaatccaagccgaggcgcttccgtaacgtttccgtgggtgatttcgcgaagaatttcaaccgttcttcgacgttcttcgttcgatcttcgtcgttcttcgatcttcaaccggtaagttcccaaaatcgaacttttcaattcattatgcacccttggtggtccccattnttttcgcgtacttttattctcgtttcatttacttttcgtacccnctttcgacgtgctttagtcatttacttaagtcattttctcccctaatcacaaataaaataaagttccaccgatcatttga

SEQ ID NO: 134004 - DNA, 375 bp, Glycine max
tcgctggtgacatattcaattgaattggcttagagaacccatgggtgggagtctttctcaataaacctctaaacctctccaacacttcactcaaggactcgtcatggaactgatgaaatgaagagattgcagctttcccttccgcagactttgactctgggaagtatttctttagaaacttttcaacaacttctttccaagctttcagactgttacccttaaatgagtggagccaccttttggcttctcctgccaaggaaaatgataatatactgagtctaatggcttcatctaacacgcctgccatctttacagtgttacatatttcaatgaatgttgccaatatgcataggggttcttattgtgtattcctgg

SEQ ID NO: 134005 - DNA, 190 bp, Glycine max
tgcatgcgagctgagatcttgacagcaggctctctatctagcaattaagaacaatatagctcttgctgactcgattgatagtgatcgtgcgcagctccttgagacatgaatcttgaatctaatgaacattgttatcgaagtaaagaacgtacaaaatccatagtcttcaggctatcttttctctttgctc

SEQ ID NO: 134006 - DNA, 477 bp, Glycine max
  unsure (1)..(477): unsure at all n locations
ctgccataaattgatatggatcatttttcgttttttaaaatntaactaanattgagattgacaaatgaagaatgagaatgaaaattgtatgtagaaattttgtgtgtactaaagcaatatatagaatgttattacctaacattgtgtgtaacaattgaacaagtctacaagatttactaagtttcagtgtacacacctatgattgtgacaaacaacattttctttttttttttctcaccaagaatctcgctatctctctcatcacctatctactcattttttttttcacttttcttcttctctctgactcacccatgcacccaacccttcatctttcacacttttttnttctttgctctctctactcggctcatcttcttcttctcttcttcttcacccttcgcttccatgcgaccacccctcctctgtgagactgcttctcttcctccctccccttcttggtatgattatttttct

SEQ ID NO: 134007 - DNA, 403 bp, Glycine max
  unsure (1)..(403): unsure at all n locations
aatagcaactnttatatctcaaatgaagtttagaaacgatggatgaagatcaaaagaattggaatgaaatggctaagacaatgatgaagattagcagaatatcaaatataatattcaacacagttcatattaaggatcatgttagggatttcaagactatactcaaatgaacatgacaagatataacacattaatattgcttatattagcttactctaaatgtaactttatggtgaagtgagtgggacctatgctgtatgatggaaggattaactaacacatacttgacatatactagacagtaatgacaaccttgtattctgtacgtgcaaccaagatctggtgaacccaactatacttgctgctggattgacagaactcanagacttctatgaactcacag

SEQ ID NO: 134008 - DNA, 413 bp, Glycine max
  unsure (1)..(413): unsure at all n locations
gaagaacgacatgcacttcttgcattgtaaagttgctttatcgtggtgcaactgtcggcattgtgttccttcaacgttagcaagatgtttttcggtttcaccatcgactttgtcatatcatcaataattttcttttcttgcttagacaatcgcccagcgtatggatgtccaactaagaacttcgccaattcatgatcgtgaatcccacagatcaacttcaccatccaaccgttccctccatgcactggtttcccacgaagcctgaagggacaaccacatttcctactcccggtgtctttctaacgattctttattttacacttgtcataccactccttcacacccattaagacaatgaactnttcatctgtaccgtctctgtgcagactcatatcactgaacaaatcatttta

SEQ ID NO: 134009 - DNA, 449 bp, Glycine max
  unsure (1)..(449): unsure at all n locations
tataccaccttgagtggttntcttctactcattcgatttcatttnttcttctaatgctcctttagaaacgaaacacaaaatgtcttaatctcattattggtcatgagaaattctatctttgtgctttcattcctcattcgtcgcattatttttattaaaaaaaatgtgtgttgatctgatcggtttggggggttgtttctttaccaaacgtgtttgcattntagtgaaagttttcagaggcttcaatgtcttcagccttttacatttacaagacttcaatgtcttttgtgatttacatttacaagacttcaatgtcttcagtcttttacatttataagacttcaatgtcttttgtcctttacatttcagagacttcaatgtcttctgtctcttacatttacaagacttcaatgtattatgtcttttacatttcaaagacgtcaatgttt

SEQ ID NO: 134010 - DNA, 481 bp, Glycine max
  unsure (1)..(481): unsure at all n locations
ctgcggcatgcaagctntgtgtaagaatggaggagaggaattatattatattcacaagttgttgcccaaagaacttttcttgacaaagaaagtgtttgaacaaaaactcttagaaagatgttgagaatgattcagtgaatcagtattgaaattcgtgccatggtcacatatattatagccattgatggctcttgaagaaaccatgttaaaagatgtgactcttgacaatttcttcaaaactagtcactgtaaaagttgtgactcttggcaaattcttcaaaaactagtcactttaaaaattgtgactcttgggaatttagttcttaaaaccagtcactggtaatcgattaccattatagtgtaatcgattacacatcaacagttgtgactcttcgtgtntagatttgaaaaccaatgtntagaaatactggtaatcgatacaaatgttgtgtatcgatacactagtttgaaatgtttatat

SEQ ID NO: 134011 - DNA, 425 bp, Glycine max
  unsure (1)..(425): unsure at all n locations
agctagaccctgaatattacataaaatttgttactaggagagatgatctaataggtgtcattatttaacattatatagttattcaataatgactttaattttcatatatgcttcatttnttcctaatatgttggaggtcattgtcttgacttctgacaatttgtatctgttatgagctacaactccatgatatttaagaatgcttcaatgtcttgatcactctttgtggtcaaacacaggagaccattctcacagctaggtaagagagcatattacatcatatataatngttaatgcatgtagcattcttacaaactgtatagtccctattcacgatggcagtgccaggataaaatgaacagcgaacctcatttatgtatagcggttcacacgtacataaatatgactaaacgaaacatattatt

SEQ ID NO: 134012 - DNA, 464 bp, Glycine max
  unsure (1)..(464): unsure at all n locations
tgtgtattcaaaagacatgtgtgtgtgaatgcgttanttgtatataatgnctatcgnagntttcaccacattttagaagttatcaatcaatatcagatagaaccaaagcatgtaataacccaaagacaataccagacatagaaatatgttgatggttgtgcgaaaatacaaggttaaattgtagaaaattccatcttattctgatggctaagaatgtggattgatagacgatataattctgagtaattactgtactcttgaaatattaagtcataccaaaactataaaaatgaaagaatatagcatatctgccaaaagaaaatacagattctgcatgggccacacaattttattatgtgatgttttacaagacatacatatggagctgctgtttcagcatacagcctattctatctatgtgtatggttctgcacttcattcactcaatagtgaaccaaatacac

SEQ ID NO: 134013 - DNA, 206 bp, Glycine max
agatgagttgtcaagttcgttaagcacaccgctccatgtcataaagcgcactgttatagcttatacgcttaacgaggcaagcgcgctaagccaaagagcacttatactcactaagcgatccagatctgcgctaagcgcacgagcatgaacaacgtcacctatttgagcctgaaatcaaatttgcaggggatttggcactttcttga

SEQ ID NO: 134014 - DNA, 375 bp, Glycine max
  unsure (1)..(375): unsure at all n locations
aaaactaagcttctcggagcttttgaaagtaacgcttaactctaacacccttctaataactaaactcacctgcttgaaaataaaacatggataaaataacacaacaaatataatcaaacatcaaatataattactaataatatttcagggtgttacacaaccaccttaagagttattggactaagaagcactccaaattaagtgaatcaccaaagggagaacaaccactaaaattgaggatcattntgtaattttgtaattggcaatttacttaccttcattgcttttatgtttntgtaacaaaaaggcctttcactggaagtgtgttggaagcctccaatangttaccaaacttccatttgtgtgtaataaatt

SEQ ID NO: 134015 - DNA, 481 bp, Glycine max
  unsure (1)..(481): unsure at all n locations
atcctctaagcacctgcagctgcgctgttgaacaggactgttgaattgatattcagcggtgtggtttgtttgaaatgaatggttgtgtctgaaatgaatgagagctgtatgaattgagtggactggaatgattagaggtttgttttgatcaagcttgcatccactagaagagaaagaacatgtgattagaactttgactganaatgttagtcagtttgtcagattgattatgaaggaatgcattgactgtatcccggtaagagtgtgatccttaaatgatttatccctgaagtactgatttttgcatgaatctctgaagtatggactgaatgcatgaaattgacgatgatgaacgccatgtttgattatgatagccacttagccaaagaggtaaccatgtgcttgaatgacttatcccttgcccctatttgagttgaatgaaatattgatgattgaaccctgaagcttacagcgtatctcc

SEQ ID NO: 134016 - DNA, 414 bp, Glycine max
  unsure (1)..(414): unsure at all n locations
ngctaacccatggaagttcctaatatctcccacactntttggtgttggccattcttggatggccttgattttctcagggtccacttggatcccatttctaccaactacaaaacctaagaaaactatattatctacacaaaaggtacacttctctatatttgcatagagggtgtttttcctaaggattgaaagaacttgcctgagatgtcctaagtgatcatctaggctcctactgtacactaaaatatcatcaaaataaacaactacaaatatacctatgaaatcccttaagacatgatgcataagcctcataaaggtgcttggtgcattagtgagcccaaaaggcatcactagccattcatacaaaccaaacttggtcttgaaaagcagtttccactcatcaccctttttcat

SEQ ID NO: 134017 - DNA, 261 bp, Glycine max
  unsure (1)..(261): unsure at all n locations
tcaagcaccgagctgagctgagcaatcaacgatcgactttttcncggttgaccganagaggcccgcaagatatagacacgctcataatttaagaccgaaggttgtagctaatctttacgacaatatcatatcactcggacctccgattgagcccccgtatacatagagacgctcgaaatttagaacagatgctggtgagaaacgctaacgacagtagctttacactcggaaggccgagtgagtaccgtgatatatcgagac

SEQ ID NO: 134018 - DNA, 340 bp, Glycine max
  unsure (1)..(340): unsure at all n locations
tcacgctgctcatcgaggccagatcgctgcactgaatttcttagacnngnatggngatctaccgaagagcatacaccacagactcttgcgacagatgtagatttctgattcatggtgagctgagttgctaagtcgaccaaggcatcaaatctttcttccagctttgtattctcactggatgaagatgaattgatggctacctcatggactcctctgagaacaatagcctcatttcttgcactgaattgctaggagttggaagccatctactcaatcaaattcctagcctcagcaggagtcagtatcacaagagctacaccactggtagcatcaatcatac

SEQ ID NO: 134019 - DNA, 381 bp, Glycine max
  unsure (1)..(381): unsure at all n locations
ttatgtttatgctatagttctagttggtggatttgagactattaaagttctttttctttgccatattggattaggaaactttcctgcgtttgatgaaagatcttgcttgcttttgataattctactgcacagaaacttatataataaaaagaaagaataaagaaatgattaatgtggtgaaactaggtaatgttgtaaaactattgtaattcttttatatgaatagtagtataattttacgggaagtgtccccttggttaactgatgtggaattgaagagataaaagacgtaataattnttactatagattttttaataatgatagatatgaccaataatctatttagctatatactggaacctatgaccgnggacaacaa

SEQ ID NO: 134020 - DNA, 427 bp, Glycine max
  unsure (1)..(427): unsure at all n locations
ttagctcgcctgggcgagctacaagttcactttatgatactntgcctataaataggcgtgctaggggggctaataaggggttccagtattgagagcgaaggaagttgagagaaataagagagaagaagacgaaagaagaggaaacgaggtcaaagcactgttgaatcgtgactatgatcaatctctacatcattccttgttcagtgttctttatacgactgtcggttagttttgtttttaagatttaaatgtgatctatgcacccttatgggtcccccttggtgtctgtgcatattcatctcctcattctatcatcggtaatctcattttttttgtaaagtttaaacttaactgatcattagcgccgtacagttgtcttttaaagagattgaaagttaataaacaaagccaagatataatcaacaca

SEQ ID NO: 134021 - DNA, 124 bp, Glycine max
acactataaaactcagctgctgaggactacctgagcaactttttggttatgcaacaagagagctgaaatctgagggcactcggaaccacttctcgaaatccaaccctaacaaaccatagttcta

SEQ ID NO: 134022 - DNA, 377 bp, Glycine max
  unsure (1)..(377): unsure at all n locations
tcttaagaaggggggggttggattaaagatatttccaacttgttcccctaattaaaaatctatttcactttttacttcagttatgaattcccttaatgacaaacttcttaaatattaattcacatgaagccacttggatatgaatataaagcaataatacataaaggagattaagggaagagaaaatgcacactcagttttatactggttcggccacacccttgtgcctacgtccagtccccaagcaacccgcttgagagttccactatcttgtaaattccttttancaagtctaaacacacaaggaccaatccttcctttgtgttagagatcctttacaacaagagactcacagtctcttaatcccttatagaatg

SEQ ID NO: 134023 - DNA, 238 bp, Glycine max
actcatatggtgctccccctttgtgactgaggaacagctttacttgaaattaagtgattgagagagatgagcactcgatgtaaatcccacttgatctccccctatggcataaacaatgagccatagtgcggatagagacatagaataatgcatgcatccataagcatgcaggcgaggaagacaattatgcatacataagcgaagcacgtgtgagaagaaggcattcatgaactataat

SEQ ID NO: 134024 - DNA, 287 bp, Glycine max
tagagaaacaatatacccttgccaaaagttattttccttgtaaccgaatatgagaggcatgatgtcaacatttagcttttaaatgaacattcacgggaaacatcaggtcaaactgaaactgggaataaaatcactcatagtgtataaaaactcacacaggtgagtgttttaccctaatcccaaaccatagctgcaccatgactttattttgcacatgattttctatcgaaccaaaagatcacatgcacgatcacggatcaataagattttctcgagggtatcatttt

SEQ ID NO: 134025 - DNA, 332 bp, Glycine max
  unsure (1)..(332): unsure at all n locations
tcttttcattctcttctcccttttccaaagataattcgccgaggactaaccgcttgaattctttntgtgtctctcttcttccttttccaaaagaacgaaggacttaccgcctgaattcttttgcgactcccttcttccttgacagagaattcataacgaaacagtctgagaattattttgattcttcccttatcctaatacaaaagtgttcaaaggactaaccacctgtgaattcttttgtttcccattcacaaagttcagaggtttaacacctgagatctttgtcttacacattggagggtacatcctttgtggtacacgtagagggtaca

SEQ ID NO: 134026 - DNA, 424 bp, Glycine max
  unsure (1)..(424): unsure at all n locations
tcatactcagctagactattcctgcttttacatccaggagnagtttatgtatattttatgaaccagcttcgagttcttgtactaaaatagagattcaggactccttctggttgaattctctgatagtctctctttagttatatactattgagaacttgagatatacatttttttctctcttaaaatcctttttatctttcagcgatttgtgtttaatatctgttgtactttgaaactgaatccttggatgagctgctatagagtttatttgggtttatgattcctatatgctcttattggcttatttcaatatagttaatggctaaaattatgatgtgagttttcatgttgatgtcataaaagcacacaataagcgcttagctaagttgttacctaaacacaacctttatatgtgtttgtatgt

SEQ ID NO: 134027 - DNA, 305 bp, Glycine max
tattctgtattaataatgaagaatcaaatacggtccacgaagtgctattacaaatcatgcatacaaaaagatatagtccccatggctcaaaatatctatgtgcccataatacatagcaaattattgtatttatactgcttaattatgaaaagctgttgtggagaaattagataaaggacaaatagtttgtacatcacagcgatgaatgagcatgctgttattgaaaattatgaatgtatcgacggttatgacatgttgcacatgatttatattacctccaagagagagaagatattatgagtgat

SEQ ID NO: 134028 - DNA, 338 bp, Glycine max
ataagaggattccttatccacccccctcagtaactattttgcttgggcttgcacagtactttataaataggaccattgtgttagtattttgtatcacattattacaccttatcaatctataatactaataaaagcattctttgtcatttactcttctacctgaaccttctaattccaacacaattcttgtatcggcgcttactgagttgtttaattatgacataggggaaatatgctgatctataatatgaatatacaacaaatcttgttatatctgtagtagaaacatttgatatatttaggcctggctcttgataatatgggctgcctttcattat

SEQ ID NO: 134029 - DNA, 354 bp, Glycine max
  unsure (1)..(354): unsure at all n locations
tgagatgaatataatgattcttgcggatagtatgcattaatcattgtatttaatccttaaattgcaatttggatggcttgggaataatcatatttttatgcgagattcttgcgttaagggtacaatatnntgtaaatttgatgaagatttggcacaatgcatgtctagttcttctttgagtgcacaccttgattgtcagggaattaatctcaccattttcatgtcgtgtactcggagatcaatgcgaaatgttgccgatgtttcatcaaatttaacaaanagagacttaacctttgatgttaaatctactatnaaaatatgtcttcctgaatgggatacacgcaccacctttat

SEQ ID NO: 134030 - DNA, 386 bp, Glycine max
  unsure (1)..(386): unsure at all n locations
tatagtagtactttgatttccagccgtgtatttcgctatattattatgacnattgaacaatntagtaactctttatttgcatggtgtgtttgaacaattatgaattatgttatatgactatgtgatttttctatatatttgatctagtcatgtttcttgcttcatgattagtttatatttctccatgattgttgtgtgaatgattagttgtatttgtatgtttcatacttgttacgcactttggctttttgttgatgccaaagggggagagaaatanggattaaatcaagaactcacatgagtaatanacttaattttaagtgactcatanattcanaaacanagggggagaatggaaattatgtgagtgatcgactaggaaaaat

SEQ ID NO: 134031 - DNA, 333 bp, Glycine max
  unsure (1)..(333): unsure at all n locations
agctngaagaggcccttgaatccaatcttcatgcgcatcattagtgcttacctcaagtgattgatccttctctttttctgattctcttcaattctttgcactatggaaatcaccattcaacaatctaagccaagatgaagtcttggttttatttctattcaattcacgatgcccagatatatataaaaaaaaagtggaggaggtctaattntttagttttgtttgtactcctgtttttattttattttattttcttgtgttgagagaaaataaacatatacttgactctgatcatataaaaatatagttgtttttttttttttttttaaattt

SEQ ID NO: 134032 - DNA, 468 bp, Glycine max
  unsure (1)..(468): unsure at all n locations
gctgagaggatgcttcaatggagganaagaaagagggagttatagagaggtggggagcacgaaattgaaggaagaaaaagggagagaagttgaactttgagttgtgtctcacaagactctcattcatcaaagttacaacaagtgttacacatgcttctatttatagactaggtagcttccttgagaagctntctcgagaaaacttccttgagaaggactaatcgcctgaattcttttgtgtctcccttctcccttgtcaaagaattcaaaacgacacagtctgagaattcttttgattcttcccattcccttattcaaaagtgttcaaaggactaaccgcctgagaattcttttgtatccccattcacanagtatcaaagggttaatagcctgagatctttgtctcaacacattggagggtacattctttgtggtataagtagagggtacatctacttgggtttgact

SEQ ID NO: 134033 - DNA, 250 bp, Glycine max
ttggcgactaacctccatcaacctccattgatagacatttccactcaatctctgccaagaatgacctcgttgaggagatccattgaccgagggatccatacagacactggactggtacatattggtatctaagactatctcatgaccgttgtgatcttttgacgtgtgatgcaaagctgagatggactaccttgttcctactcggacacacccgaccatgtgtgagctatttgcagaggtgagagcctcg

SEQ ID NO: 134034 - DNA, 229 bp, Glycine max
cagatagatatcgatctagggagatatacatagagaggcatgttcaaacgggacacgaattttaaaccctatttatagtaaaatcgtcatttacaccttaagacctctatggcacttacagtatgatcttgtagttgcctccattacatataacatcatggagaagacgtatagactcatgataatggacgactactgtaccgggacgagaagtgtgttcctatcccac

SEQ ID NO: 134035 - DNA, 379 bp, Glycine max
ggatccttaagtcacctgcggcatgcaagcttgctagttcgcccatattttgttattcatgcataggttctttcttagtagagtttgtatttcacatcttattattaatcgatatataaaggtacatgaacaattcagaatgttcttttaacatgtctaaattgctcatgtacctttatgtgatgaataatgaactattgagcattaattacattaatcttgattatttcttccatgttgactgtactgaacgacttcaaaaggttagagaactaattgatatgggcacatcatttgatcatgcataaaatggtaactagcatctaatgagggaggggcattcgcatcatataaatgtgtgtagcttatatgcccaaaa

SEQ ID NO: 134036 - DNA, 387 bp, Glycine max
  unsure (1)..(387): unsure at all n locations
actcagcctgaagataagaacttacagtgtaaaaatacatttgtctattactttatgnngaagnaggataatgtcttctcttcattaatgtgaagttcatcacaacactctcttcatttatatgtacagacatgatgaaaaactagctattgatgtcatataatcttttattatttcatcttcagctaacgtcctttttgtgaatattacacaatagtaatttttggtttaaaacatgattgcccgctatacttctgcataatatcataaacttataatctttcatgaaatgtattactaagaaagattatcagaacatgctaataacctgtgtcgcagttgcattatgcttggaatgtaaagcatccagagaaatttgtacacaga

SEQ ID NO: 134037 - DNA, 351 bp, Glycine max
ttctaatacggtataaatcataacgaccgttattatttatatgcgaactctgttggtctgcacagcagaaagatatgtactgtattagcataatcgtccatatacgggatgtgcttaagcgacccacagtgcgctcctacaagatacaggagagagggaatagcccttagagactcgagagcgcctcatgcagcgcctaaagcacattgaggtggagtgcggcgttctttatatgctattggcacgatgaggacttcagcttaaactgtctcgctgccttatcgcttaacatatctatcaatagggtgaccagtgagataatagagaggtttgactctcttcttatacaaa

SEQ ID NO: 134038 - DNA, 284 bp, Glycine max
  unsure (1)..(284): unsure at all n locations
ctgcttaatgctacttttcacgtaatgcaantttacgttttctgtgtctaattacaatttcgttcttgcttcttcttctactctcatttacgtttctgtgtcatctacatttctgttcatttacgtntttgttcatttacgtttctgttcatttacgtttctgcttcatgtttcatttgcgttttctgtttgaatccatggaaggctagattttctggtgttgtttccttttgaggacgaagcccaactctctttgaggtatcgcttgtaatgtggtttcctag

SEQ ID NO: 134039 - DNA, 362 bp, Glycine max
  unsure (1)..(362): unsure at all n locations
tctcgatataatataaacccgaatcggacatttgtgtgaaaaagtatgaccatttgaatttcttcagaggctcccgtggtcaatttcgagcctctcgacatcttatacgcccgaatcgaacatccgcgtgaganagtatgaccatttgaattcgcaagagtttccgatgtttaatttcgagccgatcgatatatgataaacctgaaacggacactcgtataaaaagtatgaccatttgaatttctcaagagcttccgttgttaatttaagcctctctcatatgatgcgcccaatcggcatcgtgtgaaagtatgacattgaattctcagagttccgatgtaatttcggcgatcgaatatata

SEQ ID NO: 134040 - DNA, 311 bp, Glycine max
  unsure (1)..(311): unsure at all n locations
tgttgacacgcggagatntacgtcaacttttgtgctcttctatattgtcatactgacattngagtcacgttgacgggcggagataccctagtggctatccgtataaacattcttttctgctgactgtcaaacgaaaagcctgatagcatgcatagactaacgttgacttctgcgcccatcgtcaatcgcggccgactagcccgttgacacgcagagatttacgtcattttccgcgctcacaagatctgttatactgacatttgagtcatgctgacgggcggaaatacccaagtggatattccgttaaacat

SEQ ID NO: 134041 - DNA, 311 bp, Glycine max
agcttaactttacttatttaccaatttctcagcttgagcagggtgttaatttttcacaagccacgcttgagctttaaggaaacaacttggttcaacttgttttacacccttattcaacaccctttgttcaaaaaataaatatatggaccttactttgtgtactgttcccacaccatttttctttgtaaataccaaggtgcaatattccaaaaataaggtgttatatgtaataagaatttaccttgggggatgtcaataccctattttttcaaaaaaaataatgaattatgtgctccaccccacacatggta

SEQ ID NO: 134042 - DNA, 429 bp, Glycine max
  unsure (1)..(429): unsure at all n locations
gcacttgaaactcaagcttatgagttttggtttccaaccttgttctttcacttataacaaaagngtgctatatcttttcattctcatcntcctttgccaaaaagaattccccaaggactaaccgcctgaattttttttgagtctctcttctcccttttccaaaagaacaaaggactaaccgcctgaattcttttgtgtctcccttctcccttttcaaagaattcaaaatgacacagtctgagaattcttttgattcctccctttcccttaaacaaaagatttcaaaggactaaccgcctgagaaatttgtcttaacacattggagggtacatcctttgtggtacaagtagagggtacatctacttgggttgttgaactaagaacaagagatggttcatctcatgtggatcagttcaagtggagggtaca

SEQ ID NO: 134043 - DNA, 198 bp, Glycine max
tgttatcactgtgacaagaaatggtctacggggcaccgctgccacccccgcatccatcttctcattgcaccaatacgatgccaaaccttcgcttgtgcttagaaccactcgaatcccctgcgccaacctcaccacttaccccagtcgaggaatcctctcccctgtagagcctgaatgcattgcccggatgcgccgccc

SEQ ID NO: 134044 - DNA, 455 bp, Glycine max
  unsure (1)..(455): unsure at all n locations
agctnggatttccttttagtagggaatcttttcttccttttatgtgaccaacccagtccccctcattaagaactagctcctttcttcctctattgcccttagttgaatacacctttgtttggttctctatttgggtcttaaccctctcatgcaacttctttacaaactctgacctagattccccttctttatgtataaaagaagtgtcaagtgggaggggaatgaggtctaagggtgttaagggattgaacccatagacaacctcaaaaggcgattgcttggtggttctatgaacccccctattgtaggcaaattctacatgaggaagatactcatcccaagacttatggntgccttttagaagagcccttanaagagtggataaagacctattcactacctctgtttgcccatcagtttgtggatgacaactggtagagaaaagaagcttagtt

SEQ ID NO: 134045 - DNA, 439 bp, Glycine max
  unsure (1)..(439): unsure at all n locations
gagggagtccacggaggaaatgcttaccacctcataagactggaaagtggtttctaatgactcctctgcggcttccacataaggaatagaggatgggcagctcaccaagatgtcttccttgcctgatacgatgaccagatgcccttccactacgaatttcaacttttggaggagtgttgagggaacaactcctactgagtggatccacgggcgccccaacagacagctgtagggagggttaatatccattatttggaaagtaacttgacaggtgtgagggcctatctgtactgggagatcgatctctcccctaacctctcggcgggtgccgtcgaaggcacgaaccaccattgaactcggctttaagtgggaggcattgaatggtaatttctccaaagtgctcttangcatcacgtttaaactggcaccattatcgatg

SEQ ID NO: 134046 - DNA, 445 bp, Glycine max
  unsure (1)..(445): unsure at all n locations
agcttaaagtgagaaagtgtggaagagttagtcttccttcttttattcgntgaccacagagtggtacttggagatatgtcgtgggggtcaggagaccttggggacgtcaggtggggtgctattgcccaaaaccaagcttgaccaatcccgacccaacccgggcatagtcagtcagtgagaacctgtgatgtacctaaacaggcgagctcctggcagtcaaccgataaaagaacaaagaccacaaagcaaggaggcttgtgtggtggctggccagttatgaatcttgagtgatatttggaatatggcctctggtaatcgattaccaagggtgtgtaatcgattacaaagcttaaaaatgaagataggaagttaagatggcctctggtaatcgcataccaatggtggataatcgattaccaggccctaaaatgggatcaggaacctg

SEQ ID NO: 134047 - DNA, 429 bp, Glycine max
tgttgcattatttgttatttatatcatcatgaacagagagggtacatgttatggagattaatagaatgttggaatgccaccttaattgcgatcacccctagcctgcgttcattgtgactcttagagttggctgtcaatgcggcgctatctatgaaccagagaaaggctaagcgaagcattgagtagtatgcatctattgagacatggactcttgagggctatgatcccagatgaaccagagataaggcctaaatagtgcttatagaatttggatagtcctcacctttgaagctagctgattgggcgggtaagacacgccttaagcccaagttctaattcgacatcagcagttatcttacattcattagtgagcaatctgcatttccacactccgagcccatatcccaacgcgtgagagggtatgataga

SEQ ID NO: 134048 - DNA, 430 bp, Glycine max
agcttgtagaatggctagacatgatacatgtcatggcttgtttttgttcaaggataaaatggatgccccacattatttccatgacacaaatgcaaaaaatgatgatttggaaattttatgcaaaactggtcatgcatgcccctatgctgacgctcaagagtcaaaattgtatggtcatgtttctgtttttggttaatgcggggcgaaaaagtcgctagcgcaccggattctggttggtaatcaaagggagaagaccattttagggtcgggcttcctttccttctttttgttcatttggcgacaattctgtattgttcagatattgtccggtccaaagacctttctgcacatttctttctgtttccttcgatccctgatcaagagactctcttccttcttcttcatcctttttactatctcgcattctttg

SEQ ID NO: 134049 - DNA, 397 bp, Glycine max
  unsure (1)..(397): unsure at all n locations
aaacactcagcttgagcaattctaacgacataacttttactcggaggtctgattganttcgtaatatatcgagacgctaagaattgattatcgaagctctgaggatattcaaacgactataactgtttactctgatgtctgattgagtcccgtaatatatcgagacgctcgaaatggaataccgaagctttgagcaaattcatacgacaataactntntactcggatgtctgattgagtcccgtaatatatcgagacgctcgaaattgaataccgaagctctgaacaaattcaaacgacaatcacatttttactcggatgtctgattaaggctggtaatatatcagaacgctcgaaattgaatgtcgaagctctgagcaaattcaaacgacaataac

SEQ ID NO: 134050 - DNA, 441 bp, Glycine max
  unsure (1)..(441): unsure at all n locations
gcaagctntcttccgatctctgatcgggaactttctttctctgttgcatctttcgatattagatcgggaacttctttttctttctctttctcttttcttctgagggcgaggatggacattctcaccctgggtcaaggcttatggtgagttgggattttggctcaaggcttgtagaacggatggacatgatatatatcaagcttttatggtcatgtgacactagggcttacgattcattttccctatttaagtcaacccagtgcttccaaaacatgctcttttatcaattcatgcattcatccgagtccattgtgggcattcaggaaaatattctcagcattcacccttcaagtgcatacagaattttttcaacacaaacttatgttatgatcagtgaatctttttcaaagataacctgtaagttatctcttttcaaaagcg

SEQ ID NO: 134051 - DNA, 447 bp, Glycine max
  unsure (1)..(447): unsure at all n locations
tgcaagcttcttctcatgtngaattttttgggttcggttcgatgcctctntcaaccctataccttacaacgggttccttattgtgagaggatggatttgtcttgttttcaacataagcgtttttgctgctcctctttgcattatggtaagaatttaggagcagattatttaaatcatatcataaaagaaaatgattacgtatacttttattttcagtgtttctttttcagaagctactactttttgcttctgaaaaaatattaaagattttttactttttttcttgaaaaaatgttatttattaaaaatattcaaacaaatcctcttaataatattagtattcctctttngcatttttttcttatgcgctcaaagataaattaaactcctgtgattgtaagttaattcaatacttttggttntatgagatagctcaattcaataatg

SEQ ID NO: 134052 - DNA, 297 bp, Glycine max
tatacctaccaattctacatataattatcaagttaaattagtatttcacataagtcatgttactaccaacttaaataccttatcatcatttaacactaattctatgtaaggactattaatgttaactaagaacatataaaaaataagacttacgttgagagattaataataaaatcttaaattaaagaactgaaatcattttttatctggagaaaaatgtgggggaaaaatctaatttcccggtcaaaatgcaaaaccatatcccaccacatttttccttatttcttaaaatttaat

SEQ ID NO: 134053 - DNA, 161 bp, Glycine max
aaccctgtcttgtacggataacagaggattgctgggcttcacgacgataacgacccattgatgtgatctatctactctccggcttctactatgtcatccgagcttgcatgcgctggtgcactgcctctgaccttggctcagctttctcctatgagactata

SEQ ID NO: 134054 - DNA, 298 bp, Glycine max
  unsure (1)..(298): unsure at all n locations
ngtataanagaggaggatggcaaggtgcatgtatagtttgttacaacgtgcagaactaaaactttgctcacgtagcttactacactatggcattatgagttccttcactacgagtgctggttgtaactctttaaccttagaggcgctgatactgagcacatgaggcgataagtgtgcatattcattccaggagcgtctgagcaggaacagatgcgcagagacattatcgattcttcatgataggcagctttcagttgcgtgtgatgagactgaactaagcacttaaaccgtccttctt

SEQ ID NO: 134055 - DNA, 420 bp, Glycine max
  unsure (1)..(420): unsure at all n locations
agcttataataagaaagtgaagtcaaaatctttttatgttggagatttagtttggaaggttatcctgcccatagatagtaaggatcgagccttgggcaaatggtccccaaattgggaaggaccgtttaaaataattcagatctattcgaatggtgcttatgagttagaggagctaacccctcagaaacgtactntgagcataaatggtaagtattngaaaaaatataaaccaacactgctcgaagttaaaataagcatagaataagagaaatacgggaaacataaaaatggcgataacagtaaattgccacgaaagggcatgtgtcaatattacatcgagaagtagaatcgaaatacagaattcgaaataaagaaatcataagttctactaagtcatgaccaaatcttcatacagctttt

SEQ ID NO: 134056 - DNA, 439 bp, Glycine max
  unsure (1)..(439): unsure at all n locations
ntagcattgccaattgccctgatgtaatctccttcttcattgtcactcatcaagntggagtggtatcacagcattgaactaagttgatcgttctaatggtagtttgtgccttcatggttgggatgatgttgcaggttccggtttgttgttgagggaaaagatgatcagccacgtctcgtgtgtgctaagagagtgcctttgccctctccacaaccttagtttcaacaattgacgttagtcgaaacttgatggtgagaatcaaaagagtaaaaaaaaaaatgtgtttaattcataatatatattcgaccatttgatctttgacaaattntttcttcaaagaaaatctttaatatttaaaaaattttattttanatctccatcgtcanataatgaccgtaccttcatatttatttgaaacttgtcttcaccccgtctcctt

SEQ ID NO: 134057 - DNA, 447 bp, Glycine max
  unsure (1)..(447): unsure at all n locations
agcttgattattgcaaggacgtatgattgtattnttaaaaaaaataagagaaaagcattnttgccttgcagttccatgttggggtacaatgaatgaaagaaattattgcaaggaagtggcattgcaagcttggaaacactagcagaaaactactacttaaagattttatcagattttgagaattcaagtttgatagataaaggagggccaaagtttccatttttgtccagcagttcaaagttgggctatagtgaacgaaacatgctagattactgcaatgaagtagtatcgcatgctaagaaacactaggagaaaatcactccttaagaagtttccacacattcatcctgtagttccatgttgggctacaacgaaaaaagttagatttgatgaaggaagtagcagtgctagcaaacaatgggagaaaacaacctcgtaaaaagtttg

SEQ ID NO: 134058 - DNA, 456 bp, Glycine max
  unsure (1)..(456): unsure at all n locations
ntgaccaaaccccagcagcagttgtttccttagagacttgtctatcaccttgtctccaagactgaggataattgcactgtgtgccttctgcagtagtgctttcttatccccatcagccatcatcttttcaagtttggcttctccatcaagtgcttccaccaggccctgctgaacaagaagagctttcatcttcaatcgccatagcccaaaatcattttgtcctgtgaatttttcaacctcatacttggccgggcccatttcttgaatcgaactcaaaatcgatccacgttcaccgcaccaatttgttgtgtcaagatcagattntacttcacagaagaatgaatttcttgtatgaacaagaacaagcaaaatgcagaananaatgaaccaaaaaacttgacanaacttcagcaccacttttattcaatctctgtagaatttttctggtactctctt

SEQ ID NO: 134059 - DNA, 440 bp, Glycine max
  unsure (1)..(440): unsure at all n locations
agcttgtaggattatggtgtacctatcatatgtggtactaggtggcggtcgggcgatggtgcacaacaattctccacatccacaaatcacgtataaaaccaccatcccctgttgcccacctccaactgagctcacgtactcccacgtagccctcatcctcattcctctcaacgccgggtccccatcaatcctcccaagcttccacaacatccaagaaattccacatcccatcatcatagactaacaaaaccaagcaaaacagagcaaaggcagaaaactctgtccaaaacacaaaccaaaatcacaactttntctcacttaaagaccccagtaacatttccttcgttccaattcgttaaccggtggatcgactcgaaaatttttctgggagtctctagtacataagtctacantttgaccgttgggatctgtaacagaca

SEQ ID NO: 134060 - DNA, 323 bp, Glycine max
ctatgatactcagctgtgcattcatatcctgatgaggggggtccatatgttctctaaactggactaatacatttgcttgccaagtttctgtagatgcaattgcctttggtgttttgatgatgatcatgatgatatgatgcaattgatgcaaatgggcttttcaagattaaattcaagacaatacctcaagattacaagtcacaacatcaagatgatcactagtatattaggaagggaattcctaattgaattagcaaaatgtttggccagtaatttaaattaaaaagtgtttttcaaagggattactctctggtaatcgatta

SEQ ID NO: 134061 - DNA, 432 bp, Glycine max
agctttagaaatcatattttggccccctacaaagacaaggtggtccaaaacaatgaaagtgtcttccgaaattggcctttaatgtcatctatcattgtttattgagatttttcacttcatgacaatgcttattctgaggtattattcctacttaaagatgttgctatttaaaggtcgtttattttcagaaaatgttttcttttttaatttttatttctcttgttaattatgaatttttcaccttttcaatttatttttaattaagaaagatctgtacaacataaagagaatataaaaaaaaaattgtttttagtgtttacgggataaattaatctttaaaacagggaatagatttaatgtgacagtcaaaatagaaaataaaaacaaaaaaatatttctcagagtaaatatttcataactttctctcattct

SEQ ID NO: 134062 - DNA, 433 bp, Glycine max
ctaagcttgtattaagtttagaatttgggaactttttatttttattttatgtacaaaaggaatgtgcagtaggtcttgaatatttatggaccaaaattgactctttaatttaaatcaatgcatgaactcctcgcacttttataaacaaatttgattatgtacttattaaaatataaaaaacaaacacgtgaccaaaccctattcacgtacattattctaatgactgataaccaagcaactgcacactgcaattcccaccacatagtgagatattgttagaaatactcttatagacattggattcacagactcctttggtaatatggtgtggcactggatcctataaggccatccgcgggattacgtcaaggagatccaatctatcttcctatcttttgttctatgcatggaaagattatcctaattataattt

SEQ ID NO: 134063 - DNA, 395 bp, Glycine max
  unsure (1)..(395): unsure at all n locations
acctgaggcatgcaagcttaacgtcatagctttcatggaggtcattgtcgatttttttcatagcttaacgncacaactaaatcttatttatagntgngtagtattgctttatattattttattatttttataaatgagttgaaattattttctcattttatgtctatttattcaaattaaaatttgaactgcaagaagaaagtataaaagatttagttttttttcctaatatgttatatgtataaattcatgttaaatgaatttttaagtaagtgtaaaatattaacatagtaaatttaacttttagatactcacatatcttctatgacagcaacaactgcgctggtaaaattgtctcttttgttctttctctatacggttttcactggtggagt

SEQ ID NO: 134064 - DNA, 223 bp, Glycine max
  unsure (1)..(223): unsure at all n locations
ttccgagtcgtgaagcgcatctctacgtgtgggacttcaaaatttcaggtttgggtagacttcttctcacatacaatttcgtgggtatagggttttgggagatatgatgggtagttctactagggttatgctntatgataattatttctgaagagatttatgaaagcatgttaaactgtcatgtttgtgtgagtcaagctacccattctgtttannggtttat

SEQ ID NO: 134065 - DNA, 451 bp, Glycine max
  unsure (1)..(451): unsure at all n locations
agcttagtgaactcttccatcactacaaattataaatataaccatatttccggcgccaaaaattgttggaaacgttaaacatctgtcgttaattgaaaattntcaatggatttttgtccatcgaaaaaatggtcataagaaattttaactgacatatttttcatgtccgtcggaaatagtccatgaaaaatttttgacagatactattcgttggaaatttgtcacagactatttccgatggatttttcccttaaaatttttttacggaaaatccttcgaaaatttctcatggatttttccatgggaaagttcacacagaaaatctgtcggaaaatcttattttatagataatttaatatttcaattgattttggtttttatcatttatgaacgataatntagcgattattttatgtatttttattatttaccataaaaatttgaattgata

SEQ ID NO: 134066 - DNA, 424 bp, Glycine max
  unsure (1)..(424): unsure at all n locations
ggaaacaaggctcattttgtctatcataggaattaatttaaggtaagtccatttggctagaagcttataagaacaaaattgcctcaatcatttcccaatatgcatgtgaattangaagcatcaagaagaatcaagccaaggctattgtgcaagcaatcaatggggcaaaacacaccaaatgattatggtggtggatggctcanattctcacaaaggtaaactcatcactttcaaattgagctttcaaaactatcatgacatgtagaggagaatcaaggatttcaagtcacaaaatgtcaagaacttttattttcaaaacaattacccatttcttgaaaatatcctataattcgaagaanaacatgcaaagtcgtacattgatcgaggtcgtacccgaatcaaataaacatgaaaatgcagtaac

SEQ ID NO: 134067 - DNA, 414 bp, Glycine max
  unsure (1)..(414): unsure at all n locations
agcttctccccaatttctataaatggtgttagagtgttgtggaaaagggttcagccccttagacacttctctctctttcgaatntgcttaaaaaaattgtttccgtgaagaaaatccaagccgaggcgcttccgtaacgtttcccgaacgtttccgtgagtgattacgcgaaggttttcgaccgttcttcgacgttcttcattcgttcttcatcgntcttcagtcttcaacgggtaagtacctcgaaccaagcttttcgattcattctatgtacccgtggtggtccacatttggtttcgtgtatttttattctcatttcatttattttttataccctcttttgacgtgcttaagcacatttatttaagtcatttctcgcttacacctaaaataaaataaatttccaccgatcgt

SEQ ID NO: 134068 - DNA, 411 bp, Glycine max
  unsure (1)..(411): unsure at all n locations
ntgaagttnttcaccttctcgctaagccaaactactggcttatctagcgtccgctaagcacaacactcatgggctaagcgcgtggaagactctggaagaaaataagttgtacaggttcgttaagcgcaccgcttcatctcactaagcgcaccgcttcagttcatccgctaagcgagaaaggcacgcgctaagccgaaattcactaatgtgcgctaagtggtccataagtgtgctaagcgcacgagcacgaacacgaccacctatttaagcctgaaataagaatttagagggagtttggattgggattcagagctttgcatgtctagagtttctagagagagaaaggtccaagttccaagagttttgagagaatttgttgtgtgaagatctgcagagaccagagcttggagc

SEQ ID NO: 134069 - DNA, 451 bp, Glycine max
  unsure (1)..(451): unsure at all n locations
actgagctgcagctgcgatgccgatcattgcatgtttttctttgcttttcgagangnggtaaggcattatccctatctcagaatttatcactagctatgacgtcnggtgaactgattcttttagtagtgcaaaatttgtatttctattactgtttctttctgccatgtcacaaattagcctaatggaccataagctggaggacttgtaaaataaagagatatttatgaaaagtgtaccctatctagagctcactggtcttatcccatggcttttgacccctctccttcatcctctgccatttcaggcttcgccgctaaactctcatcctctgttgtacggagaacatcactcttctgctctagtgataaatccgataattttttcttatcaaatcacacaagttagataaaaattttctcttgtgacgtcaacaaactcgaccattcatca

SEQ ID NO: 134070 - DNA, 366 bp, Glycine max
  unsure (1)..(366): unsure at all n locations
ctttgggagctggtgcgtgcaaactaggactcttttgttaaagaatgccttatgncacgaacaacggaaactttattgtgggtttgtatttcaagaggagtatctgcggattgaaggctgctagttatgcaatagtgcagcttactgtggttggggatttgaaccatctttttccaaatattgtgttgcttatgcttcggtaacatgatcttgtgtggatcaaatgagagagaaaatgaacgagaaatcatgaaggaatgagtcattgatgattttttattctgtgatagtttttaaccactagtatttgaatatcattgacgatgtaatntntaattgacggaagaattattttgaatccgttta

SEQ ID NO: 134071 - DNA, 405 bp, Glycine max
  unsure (1)..(405): unsure at all n locations
agctntgtgtggagcttcaatggataatgtttaataagagaatggcaacgtgagggagagagagggctgtctgaaatttctgttttgctgagtgaggagagagaaaagctttttggtcttaaataaaaggttttcctcttttttctattattttattcaagctctgccacatgtccctatttgattggaacaaaaagggcccactttctctttttgactgtgacccatactcagtcacaaaagtggggaaaaatctgacctttgaaatgctaaaattctgcctcggtttgcgtgccatttctctggttccagttcctcgcgtttctctgcgtccgtcggngccagttttcgaaagcaagcaatatatatatcaaaacgctcagaatagaaccccgagcatggttc

SEQ ID NO: 134072 - DNA, 445 bp, Glycine max
  unsure (1)..(445): unsure at all n locations
agcnttaacaagagncttacaaataacttttatgttgcagaanactaacaaaactacccatcatatctcccaaaaccccatacccacganaatcaaaggagaaagaagtccacccaaacctgaaatttcgaagtcccactcatagacacgcacttcacgaccccgaaaatgctcccctttcacgatttggggcagaaatgatggccaaaggttgaagctttgtttggagctttaatggagaatgaaggaggaaagaatggcaacgtgagggagaggggaaaaggcttctgaaaagtgtggcgctgagtgaagagagagagagcttgcttttaatttaaaaaggctttttcctcatttcttattaatttattataaactatgccacatgtctccatttgagtggagcaagaagggcccactttctcttttgattgtgacccatact

SEQ ID NO: 134073 - DNA, 177 bp, Glycine max
tgcttttctttacaaagggtaccaattcatcctactcaattccaaatagcgcaaattcaatgtggggaatgaaactatgaataattagcctttttctttctgaaatcatcttacatgaacaaagtattggggtatcacgtacacccaattgacaaatgctattctgcgtctgactga

SEQ ID NO: 134074 - DNA, 428 bp, Glycine max
  unsure (1)..(428): unsure at all n locations
agcttgaaaaatcctttactttctatatccacaanggatgtacccttccttgttctctntgaacaacctagtggatgtaccctccactagaactgatccacaagagatgtaccctctcttgttctcagtcacaacaacccaagtagatgtaccctctacttgtacaacanaggatgtacccttcaatgtgttaagacaaagttctcaggcagttagtcctttgaaacttggtgaatggggaaacaaaagaattcttaggcagttagtcctttgaaatctttggtttatgggaaagggaagaatcaaaagaattctcagactgtgttcgtttgaattctttgacaagggagaagggagacacagaagaattcacgcagctaggcctttttttctttggaaaagggagaagagagacacaaaaacgaatt

SEQ ID NO: 134075 - DNA, 378 bp, Glycine max
  unsure (1)..(378): unsure at all n locations
tgggtggaaggatgaagtgaatgatagcaatacagttttcttccacaacaattntgccactatggatgtaccggctcttcttggatagcatatccatcaaaaatttggcatagaggggcatttgctgaagtgcttctccaaaaggcaaaagaaatttccattntcttgaagatatcaagaaacttggccaaatgacgctctttatctttccgggagggtaccaattgataaggtacctccttgtattcaataggagtagcctctttcttcttttctctattggcctcactcttgcccttcttcttcttctcaatctcaacaactttctctttttggttattattcttcaactctttttctttttcttcttcttcttct

SEQ ID NO: 134076 - DNA, 357 bp, Glycine max
agcttatcatgtgaagacctatattagctttatctttgtcgggaccaccaccttatcatcggctttgacattgatttgagaatatactctgactatggtacccatagaatgcgtctgtctccaaactctaccatacgtgaggaaaataatgggactatcttcgcatctcgagctacatatgcaacagcacactcagagatctgccgagccagcatccaccctccataactggtccaccctcattgacagataaggatcttttgggagggagagagagagagatatagattgtgaatgcaacacaataaagagttgttacgtgattagacacgactggtctcttttgtccacaaagag

SEQ ID NO: 134077 - DNA, 337 bp, Glycine max
  unsure (1)..(337): unsure at all n locations
tgtagatcggagtgagacacatgagatcagtggctatgatgttatctcacaatgctacaagttatataatccaatctatagagagacgatngtgagctgatatgtcgagtgctatgttgaacgcacattgcattctgatgagaacgacgacacttatgattttctaccactctttgaacaactatatgatcaagctttgactacaaatgattcaactccaccgctttacccaactacttatgccaatgaagcctcctcatcttacgcagggagctcatgtgaaaggccaagaagaatgcgaaacattcactaattatatgacgacactgacattata

SEQ ID NO: 134078 - DNA, 442 bp, Glycine max
  unsure (1)..(442): unsure at all n locations
agctttaactgaatngcttatttcttatgtttttaaanggnagaatcgattacaatatattggtaatcgattaccagcgtatctgaacgttgaaattcaaattcaattgtgaagagtcacatcttttcataaaatgctttgtgtaatcgattacatggttatagtaatcgattaccagcgacaagttctgaataaaaagtcaagagatgtaactcttccaatgattttctcaagattttctcaaggctataactcttctaatgcgtttcttgaccagatatgaagagtctataaaagcaagaccttgacttgcatttcaataaattgtacaacttttgaatttctttgaacaacttttgagatatcttgaaaccttcgcttctcatctttcttcttcttccttcgccaaaaagccttttatagtttctgttttcaaaccttg

SEQ ID NO: 134079 - DNA, 391 bp, Glycine max
  unsure (1)..(391): unsure at all n locations
tagtggattatggngtacccgtcatatctggtactatgtgttgatcgggcgatggcgcanatcaactctcccacttccacaagtcaaacataaacacaccatccccacttgcccacctttcaactgagctcacgcactcctacgtagcccttatcctcgttcctctcagcaccgggtccccatcaacccctccaagcttccacaacatccaaacatttcgatctcatttatcatgaaaatacctcagtaacattctcttcgttccaattcgctaaccgttggatcgccttgagatgtttactggaggttcctaatacagaaatctanaatttgaccggtgggatcttctagaaaatatccagaacacgatatatactactttttcccctga

SEQ ID NO: 134080 - DNA, 425 bp, Glycine max
agcttcaacattcaacttcgagcgtctttttatttatacgactcaattagacatccgagtataaaggtattgccgcttgaattctctcagagcttcaacattcaatttcgagcgtctcaatatatgacgggactcaatcagacatccgagtaaaaagatattgtcgtcttaattggctcagagcttctacattcaatttcgagcggtttcgatatatgacgggactcaatcacgcatccgtgtaaaaagttattgtcgtttgagttggctcagagcttcaacattcaatttcaagcgtctcgatatatgacgggactcaatcaggcatccgtgtaaaaagttattgtacgttgaattggctgagagcttcaacattcaatctcgagcgtctcgatatatgacgggactcaatctgacatccgagt

SEQ ID NO: 134081 - DNA, 433 bp, Glycine max
  unsure (1)..(433): unsure at all n locations
ttgagcanattcaaacaacaataaccgtttacttcgatgtcttattgagacccggcaaatatggagacgctcgaaattgaattggtgagctttgagcgaattcaaacgacaataactttttaactcggaggctaattgagtcctataatataaccaaacgctcgaaattgaatgttgaagctttgagcaaattcgaactgacataactttttactcggatgtctgattgagtcccgtcatatatcgacacgctcgaagatgaatgttgaagctcagagcctattcaaacgacaataactgtttactcggatgtctgattgagtcccgctatatatcgagacgctcgaactntgatgttgaagctctgagccgattcaacgacataacttttactcggatgctgatgagaccgtatatatcgacagctcgaaat

SEQ ID NO: 134082 - DNA, 416 bp, Glycine max
  unsure (1)..(416): unsure at all n locations
ctgaggcatgcaagcttatgaacctcntangcactcngacttctgactcattcacttaatactttatggttcaatcaaataaccattaacacattaagctatagaaaataaattctatacagaaaacatattttcattgttggcccatttttaatagaaatgggtgacaacataaaagtacatgggaaagtcatgctaattagagaaaagtggaacaattacaatttatagtaatcattctcactagccttaccactctaagttgtgaaaagactactatgttccatagtttgactttcatcctcgctcaaaaagttgcaaaattgaagatatattaaccccttaacaaggtgtcatcttgtctatccatttgggataaggcttcctccagacaagttggtcattgggcatcaaat

SEQ ID NO: 134083 - DNA, 265 bp, Glycine max
  unsure (1)..(265): unsure at all n locations
tttggatgccggaccaattagatattcataaaccaccaaaaagcctgaaatattttgcaatcatttgtattataatgatactgatacacacactgacacactatatataatgtaaaagatcattttgctcaatttgtgatgggtntggggcaacataaatcagagtagatggagggcttggtgggttgccctaactagtactatatggcaacacaggaatcttttgatatttcaagaaaaccttttgatcatataaagtcatgat

SEQ ID NO: 134084 - DNA, 376 bp, Glycine max
agcttgagaatgaggaagtgtgaagggtgttactttttgctttatttgtgaccacagagtggtacctggagatatgtcgcgggggtcaggagacctttgggacgtcaggtggggtgctattgcccaaaaccaagcttgaccaatcccgacccacacccggcatagtccgtcagtgagaacctgtgatgtacctaagcaggcgagctcctggcagtcaacagataaaagggacaaagaccacaaagcaaggaggcttgtggtggctggccagctgtgaactttgattgatatgtgggttatggcctctggtaatcgattaccaaggctgggtaatcgattacaggcttaaaatgacacaggaggctaaatggctctg

SEQ ID NO: 134085 - DNA, 351 bp, Glycine max
  unsure (1)..(351): unsure at all n locations
taacgatttctaattatgtgggccattaagtctatcatatgctgacaatagccgagaagcccatgaatctcttcgggggcggagtaggtgtctgccatcgccttggccttggctaacgatcggggaagttcttgactcccgttcaaggtaagagcaaaccgatccatccacatggttgcctcttggtgaaagagtcgatcaccctcctctagcctcttttcgcataacttnggcatactcatccgcgatctatgtcgtggtcgtgctagaccaactctctgtacttgcgatgaagtaacatgtgctctgctccaagacctgaacagctctttgacctgacaacatcactct

SEQ ID NO: 134086 - DNA, 421 bp, Glycine max
  unsure (1)..(421): unsure at all n locations
agcttatgcacggaanatgtaattatgaatttgatatgcccgattatacaccatttcctagttaaacatgcattaggcaccatgttcaatcattttgtttttaagtgaaatgggtttatgatcccaacatggttggctcatggtaccgaatatatgcaactaagaatgcagcgtgaatnttcgtacttcccttttttttttgtttttttgttttgcagaggaaaatacaaggatcatgtatgagcaaacaaaaagtatgttgaacgcatatgatgatgcaatgactcatgcaaaatgggaatgtgataacggacaaatgcaggaacgatatgttcattatgatgctgaagagatgtttatgcggtgcatgatatgaatgcattttacggacacgagagcccggaaaattatctcttcttac

SEQ ID NO: 134087 - DNA, 386 bp, Glycine max
  unsure (1)..(386): unsure at all n locations
ttttttgaagccaaaccgaatgaaaatggttatgttgagtgtgttaaatgtgaactggtctcaacccaaccttaatcacnaattggggttgttgccaaagtcanggtcaattangattangatatntcgggggaaaaaatgggaagaaaaaaaaacacaanaaatagggggtagagtanggaaaagggtaatttgtcccaaatttaggggaggcactgtgtaagaattgaaatggtcaaagaaaatattatacacacactgtttgtgtatataatgttttttctgtgttaaaaaaatactgtgagtacaaatgaaatgaataagtgtgtatgctatggatgaatgctctcctagaacctaagcttttgaatcctagaaaaaccatg

SEQ ID NO: 134088 - DNA, 458 bp, Glycine max
  unsure (1)..(458): unsure at all n locations
cacctgaggcatcccagcttcttgcgtagccgctcttggtgctcataatatctcttaaacaaatccctcttattactagctattttgaattctttagttcctgaatgtacaaccttcaaattggtgctcgttccactctttgtttctgcaaaaaagaaaatcaatatcaaagaaaacatggagagaattgtcatggttattattactcgaaccagaaggaataacatctaaacaagtcattttattcttagaatgtgaaaactctgcatatttatggagaacatggggtatggtggcacgtaagcatgtgaataccgcaagtcattttctccaattcaagggcttgattaattgctctaggaaaaaagcatacatctggtatattggttggtttgcagctgtttggagcattnggcagaatagaaattttggtttacgttgggttgaccatcttcact

SEQ ID NO: 134089 - DNA, 336 bp, Glycine max
taagcttgacggttaaagtctcacgaatgtcacgagacatcttgctttcttagtcaggttagccataactcggctgggctttttcttccatgctatatgtagcaaagtcattgatcctgtcaagtttgatgagttggaaaatgaggccgcaattatactgtgtcagttggagatgtattttccccctgctttctttgacatcatgattcacttgattgtgcatctagtcagagaaatcaaatgttgtggtcctgtctatctatggtggatgtacccggttgagcgatacatgatgatctataagggtatacatataatcttttcattctaaacatc

SEQ ID NO: 134090 - DNA, 454 bp, Glycine max
  unsure (1)..(454): unsure at all n locations
agctntgcagaattggtcttcgccagtgatatgatattgtgggtccgaaaagaggcaaatttgatcatcctactaggacgactgagaaaactggggcaaataaagagggtgaggatgagggagaaacccatgctgtgactgccattcctatacggccaagtttcccaccaacccaacaatgtcattactcagccaataacaaaccttctccttaccccaccacccagttatccacaaaggccatccctaaatcaaccacaaagtctgtctaccgcacttccaatgacgaagaccacctttagcacaaaccaaaaaaaaacaccaacaaaaaggaattttgcagcaaaaagcctgtagggttcaccccaaattccgttgtcatatgctaaacttgatcccatatctacttgataattcaatggtagccataaccctagccaaggttcatcaacct

SEQ ID NO: 134091 - DNA, 403 bp, Glycine max
  unsure (1)..(403): unsure at all n locations
aagcagaaaagaaaggcaagagagtcaagctagtttggtattattttattgacggaaaagncacaagattgaaagaataaaatgaatcgaaaatgcaaaacaaagccttgctgttatagactcttcatgtctggtcaagatgaccatttatttgagtcataacttatagaaaaacgtataaccgatttgaaagatatccatttgaagagtgacatcttttgattcattcagaaacagcctactggaatctattaccaataattgtagtcgattcacaaagctttatgtgaaagatggactcttacatcgaatctgattacaaattcaaggactggtactatactaatctagaactatacacttgtaaatcatgtgacgtgaaatcatctgaaccttcaaacat

SEQ ID NO: 134092 - DNA, 451 bp, Glycine max
  unsure (1)..(451): unsure at all n locations
agcttctcgagtggtgctagttatgtatgttntgacaattcttggtggaaaaatcaagtcaaccaggagatgaaggcaacgaacaagataaggaaataatttaggagcctaaaggaaattatggaaagaaaggattttgaacaatgtaacatgaagactatagcctacaaggagagagacttgcgatgtcccttttggagttatgattggcttctggtgaagaggacttgattgcattntaaacaaaaggattcatgtattagtggattttggttattacggtttgacatagggatactttacacttgtagaatatacatttgtgtttaggaagaggtcatgtttctttntatgttcatttgtatctatttggctaaactttgatacttcttatgccattcggnctttattaatatatttcttttgcctataaaaaaataaaaattaccta

SEQ ID NO: 134093 - DNA, 220 bp, Glycine max
cccccggtttactaaaggcaccccctttttattattttgaaatctttttccggaacgctatgaaacttacaaattcgaacgaactaatttccttcgcaaggtacgaatcctaggatatgtattaatcttttagcttcgaaaaatacggaactacggttggcaaaacacctttttcaatttcgccaattacgaatttacgaataccaagctgcttctttta

SEQ ID NO: 134094 - DNA, 355 bp, Glycine max
agcttccatcacggtacacattacacatattactctatgagaagctcaactaactaagaaaaagacacagaagtcaagattacctcagaggaactacaaaagaaaggattgagagcttgttctccattgaatccttgaggcggactctgaggattccactccgattaagaagttcctccccatgtggtgatctgacggcaagcaatggcagctcgtggtggtcattggtggtcatgggtggtagaggaggagtttctagggttggttggagatctcagagggatatacgtgaaatcatattattaccctgaaacatgtattataatatggaatctcgcttagcgaactccattac

SEQ ID NO: 134095 - DNA, 234 bp, Glycine max
tacacagttctaataaccacaggttatcctactcagatactcacagtacaatctgttggtaccgactcgtaaaccgttggatcgactcggcaactatactggaggttcctagctcataagtctacgctaagacccgtgggatctgctagaaaatgtccagagcccaagctgaactactcatcccattgcttgcaacgcgcgagcattcttctgcacaaggacaaaatttctgct

SEQ ID NO: 134096 - DNA, 376 bp, Glycine max
acacataaaacccagctaccaatcacacaagtagataaaagggacagggttgtatctatttcacgaaggaactgtacaaaagtggggtatttacacacgtatggactattagacaaaatataagcggacttgacctacaattattgagaacctaaaatcagatgaaaactttagagtaagttaatagaacatgtgttatgaatctccaggatctacacggtagaaaaagcattgcacgaaacaaagattatgaatcattgggtgaactgtactgaactacctgtcatgcatcacacagtattacacagaattataattttgtggtacaccaacgatacaatgctaaaccctaattcttataaaagagatagatcct

SEQ ID NO: 134097 - DNA, 273 bp, Glycine max
atcttcctctgccgcaaattttatattttttttcagcgcccagaaaaaagaggcgcatgcgccgctgaaaaatattcgccagggctatttaactaccgatgtcggcaatgattatatcatatccacccctgcattttatttggatgatgcctattaggatatgttccggccgggtcatacacgcatgtctatgtttggagcctcgtactggccgttattctagcctgacgaaacggctagcatctatttcgatcaatatctgcgggaatcatg

SEQ ID NO: 134098 - DNA, 330 bp, Glycine max
  unsure (1)..(330): unsure at all n locations
tttgttcgangggcctaaaaatgacgatgtctttttgtttgtttcttcgcgcgaactgaaccgaagtttgtttcggtcgactggcatgttctcattttgtcggccaggaaaacattatcccacctcggcataaaatacgtgattcaccgctatagacaggtaaagataattgctatccgtcatccgcctttatagatggccggccgaggtctgaatagaagcctgatcggatgattcccgacgaacatgttctaacagatatcattcaagtttattcagggattgtatggaataacaatatccgacattcgtggtaaatagccgtgactg

SEQ ID NO: 134099 - DNA, 439 bp, Glycine max
  unsure (1)..(439): unsure at all n locations
agcntgattagattattttattttcggtctgnattnggagacttttaatcacaccggtacaacttgtacccaggccgtggtttatcttgtttaatatatcagnttttgcttgttaaaaaaaaaacgtaattcgtttgcacattgattggcaaggcataaaattgggattatgggaagctttcatggaattaaggcaacaatgtcacaatgtccttacctcaacttttgacaaggtttctacatcatcttctgtttgtatacaggatcccacatatatttgctctgtaatctaagaatttacgaggtatcaatatttataaatattgtagaaagtatgctattaaacaaataattgtaagcaagtaaattcacattgcaataccttactatagcgcataccaagagagtgattatagtacatctcatctntggaacgatc

SEQ ID NO: 134100 - DNA, 306 bp, Glycine max
tataggttggactttccagaaaagtatggagtcaacaccacttttaacatttctgatttaatttcttttgcaagtggagctgatattgaggaggaggaactaacagatttgaggacaaatcatcttcaaggggaaagggatgatgcactcctccctaggaagggaccagtcactagaaccatgagcaagaggctccaagaagattgggctagagctgctgaagaaagccctatggttctcatgaacctcacggtagatttctgagcccatgggccactgttgagtccaattatctttgtacatatt

SEQ ID NO: 134101 - DNA, 138 bp, Glycine max
ctaaaccttcattaattttcaactttaccctctccttcattggtggttcttcaattttttccatggatctcctcacatggcttgggccgaaatttggtaacatgatattttattatttccatcgattaaacctgctat

SEQ ID NO: 134102 - DNA, 248 bp, Glycine max
aatatgataagcaccgctttaagagtgctgtacaccaacagcgcttcgaggccatcaagggatggtcggttctccgggagcgacgcgtccagctcaaggacgacgagtatactgatttccaggaggaaataaggcgccggcggtgggcaccactggttactcctatggccaagtttgatccagaaatagtccttgagttttatgccaatgcttggccaacaaaggagggcgtgcgtgacatgagatct

SEQ ID NO: 134103 - DNA, 408 bp, Glycine max
  unsure (1)..(408): unsure at all n locations
agagaggggacacgaaatgaaggaataaagaggcagagaagtggaactttgaagtatgtctcacaagactctcattcatcaaaggtacaacaagggttacacatgcttctatttatagactaggtagcttccttgagaagctttcttgagaaaacttccttgagaagcttctttgagaaaacttccttgagaagctagagcttagctacacacacccctctcataactaagctcacctccttgagaagcttccttaagaagattcctaaagaagctagagcttagctgcacatacctctctaatatctaagttcacctccttaagatgagaagctagangctagctacacaccccctataatagctaagctcacccncatggcaaaatacatgaaaataccaaaaaaa

SEQ ID NO: 134104 - DNA, 411 bp, Glycine max
  unsure (1)..(411): unsure at all n locations
tctataaactaaaaataattatgcgtaagttaactggtagaaactatcatataatttctctaaaaacagagaaaggttgtgcataaggtaatttgaatttataaaaaaaaaattttcttatttattttttagaaatattttagataagcttgctcaaaaatgtacttagtacatggttaccaacacgaggaaaggggatgcattnttttgaaattaataatttctatgttaatacaatatnntttatttagattgaaatanagtaagatattaacatgtgaaaatataatcaaatcaagaaaagataaatataactttaaaaaatcatatatgaattaanttaaatatatantaactgtgagctaaaaaatattatgtgctttggattaataaataattntacatatataa

SEQ ID NO: 134105 - DNA, 446 bp, Glycine max
  unsure (1)..(446): unsure at all n locations
agctggtccttcanaatagagagattgaatatgagggattattatgnngaagacctgagcctgattccacagagggtgacacaaaatcttccgcgtcagggaacatctgaagcccttgatgatgaacactttgaaagctagatgtggcccttgaaatcattgcttctttaaattatcttcttccaatagctgttttctaaagaatggttctgatgagtttcttgattgaaagaaagatactacatattgagagcatatatatatatatatatatatatatgcttgatttgtttccttaatatgaagttgcagaagcaaattaagcaccataacatatatgtatatatcatggtattatgatagggtgaaaaataagagaaagagagagagaagtcnactgggagatatagcatgaagttctttctttcccacttacgacctccctt

SEQ ID NO: 134106 - DNA, 467 bp, Glycine max
  unsure (1)..(467): unsure at all n locations
ggatcttaagcaccgcggctgcagctttaatttcatacaaggaagcatgtcttctcttaggaatctaagntttggttttgaatgtaaaaaggcatgaatattaggacatgtttgagaggtttttattaaaatttaaatttggcttgcccatgagaaataccttgcacctaggtagcatggaaaatacctttcaacagtatgtatatatgtgaatatatatagcatggaaatgccttgcaaagtgtgtgaatatatggcataaaaataccttacaaagtgtgaatgtatagcaaataatgcatttcaaaaatctgtatatgtaggataggtagtgtaaaaatgcctttcaaaatatgtatatttgtggataggtagcataaggagcctttcaaaaaaatatacccatgtcaaanatggcacgagaatgcttcccanatgaatatatgatgtggaatttcctttcaagt

SEQ ID NO: 134107 - DNA, 415 bp, Glycine max
  unsure (1)..(415): unsure at all n locations
catgaatgatacatgatttgngtcttgtatgattcaatttgggcaaanatggatgaaggtaagagtggttttcgaaatctgcactttatgncaaaatttgttgttgaaatgtgcagcagaattttgtatatgtgcagaaaaatgcttgtgtatggctggttgtggaaagggtagtacatatggngttctcgacattttctagcagatcccaacggtcaaaatgtagacttatgtactagagacgtccagtaaaattttcgagtcgatccaacggttaacgaactagaacaaagagaatgttactgggatatttgaatgtgaaaagttgtgatattggtttgtgtttgggcagagtnttctgctttgccctgtttcttggatgtgtagtttggatgatgaatgtgaatacttgatg

SEQ ID NO: 134108 - DNA, 351 bp, Glycine max
  unsure (1)..(351): unsure at all n locations
gagagtgattctcctaaatgctggagtgaatcaagaacacgctggctgtattaaaggactttcacaacctttgtgtgttgccctcgctggaaagagagattctttccttcctatcatctccacccttgttctttcaaaccacaattccagaaaatccacctctgcccanaattatctcgtgaccataactcccatttcacacactncaaataagtgattcttgatcctaaattgaatttcaaaacgagatctttcacctcgttttgaatcacctcattggagccctgtacttccgtattgccattctatattctgccacccaccactacctacgtttacatcccttctcca

SEQ ID NO: 134109 - DNA, 415 bp, Glycine max
  unsure (1)..(415): unsure at all n locations
atatcanctaattagttaatgttttgaaaaaaatacttcctttgaacctaatagccaaaataatgaatccattcatcaagaaaattaggtaacataatttaatattgataatctcaataaaaaatcattttctaaaataccctttagaacaaaaaagagaaagttggtgaaaataaaactttaattaaatgaagggtatttagagatatatcatcaaatatagaagagttagtttaaagttgcttatattttaatccatcacatgttttttttttatttttttatatttcaatccagataaagtaactattntaaaatggctaaatgaactatntagtcctttattntattttttgggttagtttgaacttttatnntatttaaaagttcaatttattcttttatctaaattttt

SEQ ID NO: 134110 - DNA, 271 bp, Glycine max
tcgtttaccttaaattgatttgctagtcattaagatatatcaaaatatttaactgtacattattaaaatttaatgcatatcaagaattattgagtagaatggtttaacctcaattaaaatctttgtatccaaatcacatcatagttgaattagtacttacatagaactaataacagttaacacaagtgatagtgatttatgttcatcaatcaaatgatttatgttcgaatcttaattaactccttggatgtggaattaatcatgttggaag

SEQ ID NO: 134111 - DNA, 352 bp, Glycine max
  unsure (1)..(352): unsure at all n locations
agcttgtccttggnttagacatgatttattatgatttangacttgnaggattcaatttgggccaaattggacgagggccagtgtgatttcgaaaatctgcactattatgcaaaattttgctgttgaaatgtgcagcagaattttggctttgtgcagaaaatgatgtgtatttgctggttgtggaaagagtagttcagattgggttctggacagtttctagcagatcccaacagtcaaaatgtagacttatgtactagggacctccagtaaaattttcgagtcgatccaacggtgaacgaattggaacgaagagaatgttactggagtatgtgagtaaggaaagttgtggtat

SEQ ID NO: 134112 - DNA, 350 bp, Glycine max
  unsure (1)..(350): unsure at all n locations
ctaacattcattaatcaaccatttaaccacgtatatgagaatattttctttcagaactatctactaaaactaagtgtgccttgtcagggtgacctggcaaaggagctctaaaacttaccctcgaccgagatacccttggtaaaagacaaagggggacctgaaataaggacttgacctaagtagtcgagagtanggagataagttgtaaaggtgaataaactgtcttataaggagggaactacgtctattgtggatgtacgtgtgacacctataatatactactgaataatgactacaatatggacctaaatatgaactgcacaataaagccactatcaatatggctaaat

SEQ ID NO: 134113 - DNA, 442 bp, Glycine max
  unsure (1)..(442): unsure at all n locations
agctntgcaacattntaaaacccaacttgtatatcaaagattcaattctaggatctaaaaaaggcacacttgagcatatgattggattacattgtatgttacctgcaaaaatcaaaataataataacatcattatttgtaaatcataacataattaacattcaattaaattgaatgtattacatacttcgctatatctatgaaggtgttgtttccaaagaagaggagcaactatagattccatgatttaggttttggtactaacatcaagacgaagttaaagatggatataggagaaccagagaaagtaagtcaatgagttaatgcatatgatggcaatacatgcattgtatttatagaaaaaatctaacaataacacatttcagttggtggattcttaagccattgatttgtcagtgggatcttggtcgttcaatgtgcgt

SEQ ID NO: 134114 - DNA, 450 bp, Glycine max
  unsure (1)..(450): unsure at all n locations
catgatttacattctccccctttctcaagcaaattcttatttctttttgacatcatcaaaatcttcatgatttacattctcccgctttntgatgatgacaaccacctgtaggttatgagcaacaacaaagaanaaatatctatttgcatataagttactcccccttggttttgcaatgattgcttatatgagacagttgaagatttcatatttttcatatgtaaacaatttctcataaacaatagatcatttttcttactattttatcttttatctttctctccccctttgtcaacatcaaaaacaaatcatgaatagagaggagaaagatgttaccacttgttgcaatgtatgagaatcaagtgataccaataggcattanaacaatcattcaataataatgaagcaaaaacaagtacaataacacatcaatcaaacacaatcaaatac

SEQ ID NO: 134115 - DNA, 443 bp, Glycine max
  unsure (1)..(443): unsure at all n locations
agcttcatgatgatgaatcaagttgatttttgttgttntgatgatgacaaaaagctcaagagaatgatttcaagattgagtcaacaagttcaagatcaagattaaattaggattaatttcaagatttaagaaatgacatcaagaagaatcaagattcaagaggcgatgatttcacaagggaagtattgaaaagaatttttcaaaaaccaaacatagcacaattttgttttataagaaaagcttttctcaaaattttctaagttaccagagtttttactctctggtaatcgattaccagtttcttgtaattgattaccagtggcaaagtttggatttcaaaagttttaactgaatttgcaacgttccaattgattnttaaaatggtgtaatcgattacaatatattggtaattgattaccagtgtatctgaacgttgaaattca

SEQ ID NO: 134116 - DNA, 272 bp, Glycine max
tagacgaaatgtacctaggtaagttggcgatggacaacatttagcgttatggagaacacgagaggttacacggagaagaagagagcgcgagcaaaataggtcgcgtatgacataatttaaactatatgtccaacatcggtttccattacaaaaccaatgttaacaaaatgatgttaacattaacatcggttttcttcaagaaaccgatgttaactggtcatacgttaacatcggttttcaaaaaatcgatgttaacgaacatatgttaacat

SEQ ID NO: 134117 - DNA, 445 bp, Glycine max
  unsure (1)..(445): unsure at all n locations
agctntagctactatatgaatcttcttttgaagctncncaagaaggtgagcctaattatgagaggcgtgtgtgtagctaagctctatcttctcaaggaagttttctcaaagaagcttctcaaggaagttttctcaagaaagcttctcaaggaagctacctagtctataaatagaagcatgtgtaacacttgatgtaactttgatgaatgagagtcttgtgagacatacttcanagatccacttctatacctattttattccttcaatttcgtgcctccccctctctctttctctccctctttcttttcctccattgaagcatactctccaagcttcttatccaaggctcatcttggtggtgaagctccttccttcatggctttatccttaatggatgcagctcctctcacctatttatctttgtcttccgctgcatctccatggg

SEQ ID NO: 134118 - DNA, 190 bp, Glycine max
  unsure (1)..(190): unsure at all n locations
gataaaaggatgccccacatatttcatgacacaatgcaaaatgatgattggcaaattttatgccaaacttggtatgcatgcacctattgtgacgctcaagtgtcaaattattatggtcatgtgatgctagggctcacgattcatttcctctattntaaatcaccccaatgttcccaaaaatgttctttta

SEQ ID NO: 134119 - DNA, 262 bp, Glycine max
  unsure (1)..(262): unsure at all n locations
agcttcaatggcanagggaggattgtattttcttctaggaaacccgtggagatcgatatttccattggaaatgacaaagatcaagtgctatgcgatgatgatcctatggaggccacccacttactcttggagagaccatgaccatgagataggagggctaatcataatggggtgaccagacaaatctcattcatcattagggcgaaatgatagtgctcataccattgggtccacaagaagtgcgtgatgatcagagaaaaat

SEQ ID NO: 134120 - DNA, 373 bp, Glycine max
  unsure (1)..(373): unsure at all n locations
agcttgttgaaattgcatggtcggatgagttagacatatccattnctgtttanggcttttggngatgatgttntgtgatgttatatgctgaaattggccatgggaaacttgttagagatgaaatgtagagttaaccctaggttggaaaagtgagaatgtggtgttatgaatggaaaaagagtgaggcgttgagagttggaaggttaaatctgaattctgtgggaaatggagggtaaaggagttatcctatcttgaaatgtcatttagacttatgaatagcttgtctgtgctaaaagaaaacacatgatctatgtgatttttagcctttctagggcaatttgttcgctcatttctattctgattctcatatttc

SEQ ID NO: 134121 - DNA, 379 bp, Glycine max
cacgagcataaagtcgcggatgagtatgcccaagtatacgcggaaaaagaggctagaggaagggtgatcgactctttacaccaagaggcaaccatgttggatggatcggttgctcttaccttgaacgggagtcaagaacttccccgattgttagccaaggccaaggcgatggcagacacctactccgcccccgaagagattcatgggcttctcggctattgtcagcatatgatagacttaatggcccacataattagaaatcgttaggaaacttgtatggtctctcacgccttgactagatatgacttcctttttgaaatacaattgagttgtcccatggttctactccaaaaagcttgtgcaaataaatcactcctac

SEQ ID NO: 134122 - DNA, 407 bp, Glycine max
cttttaagtggacacaagaggatctgtgtcaagtggaaaccagccctttcacaaaacctaatacagacgaagcccaaaggtataatttttggccctaaaatgaggtcagtgattttttatattctaaaatcttaaaaaaaatcccattttatcttcctcttcaaattatttctccattttcttattttaattaatttaaatgaatattaaataaattaaaacaataaaaaattattaaatcagtgaatttaataaatgtgttctttatatgtttgtgttaattacactattatacttagttaacacaaataactaatatgggtcgataaaaataaaaaataaagaataaattaatcatataattttaataaaaactacataaattataacaatagaaaaaaatctgg

SEQ ID NO: 134123 - DNA, 382 bp, Glycine max
  unsure (1)..(382): unsure at all n locations
atatactcatccatttgccttcctaattactcaataaatctttattatatactctttgacaattatggtgccatctttttttgtacatatcagtgtattatttacgttttacataataagctgtctatctgatataatcgatcagccaatccttgaaaacaaaattgggggtaacaagtttgtagtattctttaattaaactttttctttaacagtttccttaacagatgtatatattattgttntccaggctaacaaggaacagttagtgcaactaatgtttgaaacattcaacatatcanggttttatgcttccgaacaagcaagtgtgtcactatatgctgtangacgtatctctggatgcacagttgatattggtcat

SEQ ID NO: 134124 - DNA, 438 bp, Glycine max
agcttgtatcgatgaaatattactacattctacctctttagattgtgaacacaacctaatactgagcaacataagaggaattatgacaaaaattgggaaaaaaagttaaaatagttatataacggtaccagcaaacctaaatcaattaaacattgtaatttgtagctagaaaccaataatataatgcagttactgtgcaatcatacaatgaaaagaaaaaatatataagaaaactttagcagaaatcattaaaaaaataatccaaatgatttcattaaaattttattttctgagcctaatgacactgtttgatccatttttctgacccaataagatagttcaggcatggctgttgttgttgcatattttcagtagctacttgacatattggaccttgatgttttccttctttgttgtgcctaaaacattattagagat

SEQ ID NO: 134125 - DNA, 440 bp, Glycine max
  unsure (1)..(440): unsure at all n locations
atggattggtttggtttgagttctgtaatattttntgctcacaccattgaaccacatcatttcaattntatgggtttgaattctttnttcccagtatacctcacttgacccatgaacactcctattaataaattgtttcccattcgcatgtgctaaatggttggcaatggatcaatgaaacaaaaaatagttgtgagaaagcatttaagaaaaaaagataaaagggcatcccagagcatttggttcctacttagtggggttttgggagagtagatgcatatggaatggcgccttaccatcacaagtatagaagttatttttgggatttgaacctatgaccttcatgatagaagacaacaacctgtcaattatcattgtgccatggctcaccctcatggtagcaaagaagatatcatgaaatctattttagatataatgat

SEQ ID NO: 134126 - DNA, 462 bp, Glycine max
  unsure (1)..(462): unsure at all n locations
cgagcgcagttccaagggagttgaagagtataatttagattttcttatgaagaaatcttctaagagaaaagaggaggtaaacaaagctaanacaactccaaatgtggtttccaaagatcacaagcttcccaaagttgatgaattgacaagacgtaaaagtgttgtgccccgggtggatgacatcaatgatgggtctactgtgaacaagaggcagaggactcccacgtttaaccagcttacaggtccttatcacgaaccgttctgcttggacattttcatatcaaaagcctctgtccgtgcctgcgttgttcatagggtaactagcaagggtgttgctgtggcacattctatttccaagggacttcaagttgacctggcttctaccaagaacaaaaccacttgtgctgctgtgggagcaattcttgctcagagagcattggctgatgatattcatgacattgg

SEQ ID NO: 134127 - DNA, 443 bp, Glycine max
  unsure (1)..(443): unsure at all n locations
agctngaaaggcaatcatctctgtcggggttacctaattgtttccctagaagagaaagtacctttctaatgagtttaggaacaaaatatctagacatggaaaagataaaagctcaatagagcgaagataaaagatgataattgagaaagcaaaaaataggatggaagctatgagaggaatgaataccttttgcaattgcaattggaaggtcaacatttgaaaatggacttggaataggtagtgatgttacagcaagggttcaatcaatagaaacctcaaaggaatgtaaaaaatagttcggcagtaacaatatacttgtataaaggcacatgggataaggacaacatgaattaccaaggttaattgaaaagagaggagtgtaagaggtaaagcttctgtcaagaattacatgaagaaaaccaaaacacgaatagaaagggaaa

SEQ ID NO: 134128 - DNA, 467 bp, Glycine max
  unsure (1)..(467): unsure at all n locations
tggatgtgtacaagctcaagtaagtgcattcatactcatacatgttcttgaagtatatnncaatattgctcaaagagtggtaaagtaatttgtttcctagtattacatttaattttaagtgctatatttatttcttaagatcttgtttctcttaaagcccttttatacctcgtcgaattaaatttattggttatagtgatagtttgctttatttgaggaaatatattatactagtttttcttgaattgctgcaagaatttaataactagatgctaagatatcatatcttgttatgatttgaaaagaagaagatatatatttgttgatggtggaaatttgaaaataagattcaacgacttataaaaacttatcattaacttcttacgatgattctcaatcaacaaatgaaagtatttttgagtctgtgggatctagaatcatatgactcttggaagtgaattctttta

SEQ ID NO: 134129 - DNA, 434 bp, Glycine max
  unsure (1)..(434): unsure at all n locations
agctggggggcctccctctgtatgnctgggtcaccctanctaggacgggtgctgaattgggagagtcctcggcgcgagttgagaagctcaggtgatgttgcgcgtactgatgggtaccgtgagaggtctgcggtggcttgatccatgcgggcgctgaagtcacagcatgggtatctcctttcttcctttttgccccagttgttccgattctcctagcgttggtacttgtggaggagacgtaatcaaacttccctctcttaaacctacttcaattctttccttggcgaataccaagtctgtgaagctggagggcatgtagccctctaatttctcatagtaaaacaccggcaaggtgtctaccatcatggtaatcatttccctttngaccatgggaggctccacttgtgctgncaggtccctctactactgagcgt

SEQ ID NO: 134130 - DNA, 450 bp, Glycine max
  unsure (1)..(450): unsure at all n locations
agcttatgaataagctcttacttttttttatcattctatatanaanaggattatatataatatgaagatcagtacaagtggtactgttatatatacaacccagcacagtactntgcaaagctatggtgacctaatactagcaatacatcaagaattaggtgaccataggtttgaccgcaagctaggcacccaaacacagaaaggctatattctaatcccccctaaacacaaaacccttccctaatattgctagaccagaagtggaatggattatgaaatcctttttccaaaattcttaaaccatgtccagcagaggaataaagcgtcctccatcaatttttaggcattaaagctgtcatttgagaaaatgactctgtttctatggtgccaaatacaccatgtcaaggatatccaccaagtctggcagtgctgcatcttaatgtcctccaa

SEQ ID NO: 134131 - DNA, 431 bp, Glycine max
actccaccctatgacgccagctccatgcaatgggttggactgatgttctcttagtttatcctgatacgagcattgctgcagctctaatggatatgtatcaaagtatgggagatgctcttgcccagcaataccgtggctctgctgctcacaatactgtatgacattttgtgggattctaaatttatgtaatctgccgacaaatatctaactgcttatttgcatcttcttctgcagctgttgtgatatatgtaacatatattttggtgaatgacacgttgtttcagagaggcatggaaagtggaaagcaacaacacaatctagagagtttttaaaatccataaaacgatactatagcaatgcttacacagatggtgaaaaacaagatgcattaacttgtattatccctccaactatttaattcaattatttct

SEQ ID NO: 134132 - DNA, 424 bp, Glycine max
  unsure (1)..(424): unsure at all n locations
agcttgtcacttttttgagtcactcaggattttcctaagtttacttcaattggtgtctttatagaacttgtcttttcttaatacacttaagcaaactcataaatagggattaattgaaaaggcttatgatttgtgtttaaaaggcttgtaataattaaagcatcaagggttttggactcaacanatttcccataaaataagatgtaaaaacaattatcaaagagacattggagaacattcaccatacaaggatagagagcacatatgaactaatcaaactgaatggtacacagattgaaatcataagggactaaacaataaatatctaaacttcatataaccggttaaaattacctgctacaacaagtcaattntggtgattcatcgtgcactgcccatttaaaacatttcaanacttatgatg

SEQ ID NO: 134133 - DNA, 386 bp, Glycine max
cgatgtgagaaagcgtggaagagtcagtcttcctacttttgtttgttgaccacagagtgatacctggagatatgtcgcgggggtcaggagaccttggggacgtcaggtggggtgctattgcccaaaaccaagcttgaccaatcccgacccaacccgagcatagtcagtcagtgagaacctgtgacgtacctaaacaggcgagctcttggcagtcaaccaataaaagaacaaagtccacaaagcaaggaggcttgtgtggcagctggccaactatgaatcttgagtggtatctggaaattggcctctggtaatcgattaccaagggtgtgtaatcgattacagggcttacaaatggagacagaaacgtaaaatggcctctggtaatc

SEQ ID NO: 134134 - DNA, 444 bp, Glycine max
  unsure (1)..(444): unsure at all n locations
agcttctatataagttgaaccatttatttatttcacaagnngagttttattcagaaaattagagtttatctcttttatcttagtgagattgattctcgtaaattcttgagtgattcaagaacaccttggctgtatcaaaggactttcacaatctttgtgtgttgccctcgctggaaagagtgattctttcattcctttcatcttcacctgatgaggacatgaccaagagcaagggcaaggatccacttgaaggacttggagggcctacgacaagggctagagcaaggaaagccaaagaagctcttcaacaagtgctgtccatactatttgaatacaagcccaagtttcaaggagaaaagtccaaggttgtgagttgtatcatggcccanatggaggaggactaaatggcaccactttttctcaattntagagtggttagtttgg

SEQ ID NO: 134135 - DNA, 360 bp, Glycine max
  unsure (1)..(360): unsure at all n locations
tctcgacaaattcgaatggttatgacttttacacatatgttcgattcggtgacataactcatctagacgctcgaaattgaacaacgcaagctctcgagaaattcgaatggtcataacttttcacacggatgtccgattcggggacataactcatctagacgctcgaaagtgaacaacggaagctctcgagaaattcgaatggtcataatatttcactcggatgtccgattcgaggacataatatatcgagatggtcaaaattgaacaacggaaactgtcgacatattcgaatggtcataactnttcacacagatgtctgattcggggaacatactcatctagatgctcgaaattgaacaa

SEQ ID NO: 134136 - DNA, 402 bp, Glycine max
taagccgacccgaaacttcaccgttggaatgaaaaagatccatcaaattaacaatgtttttctttgctcccctccaaaacacaaaaatatcatcagcgtataagatatgtgatggagtagcaaaatgcttatggttggccatgggaagcaacctgttggaggctaccagagaagaaattcctttactcaacacttcttctgcaatgcaaaacagcagtggagatagggggtctcattgacggactcccctcttgcttaggttgtgaacattactttgaataagaaactccatagtataattttcttcaaaagcgagagtatctttatttattattttaaaagtgctcaagggttgcaaattctactagatataatacctttctttgtacatatgggactgac

SEQ ID NO: 134137 - DNA, 367 bp, Glycine max
  unsure (1)..(367): unsure at all n locations
cactcatgtcctctacttcctccaagtaatcatggtattctctatatttgggaaancatccncacgcnnattaaatctataaatctacaattagcagaattagataattgaatgaatttgatttaacatgaaatgctgaacatagttccatgccatcacgatgatacttatttctattctacaaaatgtttgtaatatatataataaagaccttcaaagtaatactaaaacccatatttttagtatatctattcaattaagaactctaaatatgatgcatctattatttctcatgtcacacattatgaagcaaaaatgtgatcaagaaaaaagaatcacatgctagcaatccttctcctgatagcta

SEQ ID NO: 134138 - DNA, 406 bp, Glycine max
  unsure (1)..(406): unsure at all n locations
agcttgagggaaaactngatgccttggtctttctagtaactcagcttgccatgaataaaaaatttgcacctggtgcaagagtctgtagtctatggtcttctgcagatcaccatacagatctctgtccttctttgcagcaatctggagtcaataagcaacctgaagcttatgcttgcaacatttataatagacctcctcagcagcaaaaccaacaacaacagaataattatgatctttcaagcaacagatacaatccaggttggagaaatcatccaaatctgagatgggcaagtcctccagaacaacaacagcatgtccctcctttctagaatgctcctggtccaagcaagccatatgttcctcctccaatacaacagcagcagtcataacaaagacaacaagcaac

SEQ ID NO: 134139 - DNA, 327 bp, Glycine max
  unsure (1)..(327): unsure at all n locations
atgaaacaaaggattaataatttgcttaataccatatcaaagagaagaagtaatatgtgcccaagtgaaatgatgattggttgcaactttaactcacaacgttaaagcccattgcacatctgtagaaactagctcccaatcaagttgccttgttgatatccaagaccaatgataaacctgaatttgactatattntgatggtgaatntcatgtcatatccatgcatattggatatatttattttggcaaaactcatgggtgggtataaatttgtgaagacatgtgcttaagacgctaaatgtggaaagaactanaatcatgaacttt

SEQ ID NO: 134140 - DNA, 443 bp, Glycine max
  unsure (1)..(443): unsure at all n locations
agcttactcatgatgcatacatatatttatttcttgaggagcgaaaagagtgagctcttgagcaattattgtgtgtatctaaagtcaaaatgatagcataaattatgttgtattttcattcatagtatatatctgaaatcatgattctatacagaatgaaaattttgcgttctatttacacttcttgtaaagtgtccaattacctaacgtaaagactgagaaaagaaagttaagacatactctttttcaaagggtaaggtgagtgtatgagaaaatgatgtaaaatgttttagacaaaattatatatttctcctttgagttaaaaaccaaaagtgaaaaaaagaaagaagactcaacaagtatgttatgttgtgattatgacagttagctggataaataatatttctcattttttggntcatatttttcttagctttctatct

SEQ ID NO: 134141 - DNA, 327 bp, Glycine max
gcttaagaaaagatggcctcagcaaactccttatttccagaatggaattctatcaatagacctcccatctttaatggagagggttaccactactggaaaacccggatgcaaatttttatcgaggcaatagatctaaatatctgggcagccataaaaatagggccttatatacccaccacagtagaaagagtttcaatagatggtagctcatcaagtgaaagcataaccatagaaaaacctatagatagatggtctgaagaggatagatcacgaagtcaatcaaccctatagcgcaaaacataataacatcttgcctacgaatggatg

SEQ ID NO: 134142 - DNA, 454 bp, Glycine max
  unsure (1)..(454): unsure at all n locations
accgcagctgcagctggaaggatgtcaaggggaattatagagtagtttttatagaacgcggagcacgaaagtgaaggaagacacacggagagaagncgaactttgagttgtgtctcacaagactctcattcatcaaagtaacaacaagtgttacacatacttctatttatagactatgtagcttccttgagaagtttttttgagaaaacttccttgagaaagcttctttgagaaaacttccttgagaagctagagcttagctacacacacccctcttataactaagctcacctccttgagaagccttcttaaaaatattcctaaagaagctagagcttagctacagatacctctctaatagctaagttcacctccttgagatgagaagctagagcttagctacacaccccctataatagctaagctcacccccatgacaaaatacatgaaaata

SEQ ID NO: 134143 - DNA, 197 bp, Glycine max
cgtttttttttttaaacaccaactagccttccaagcacaataacaatcccacccgaaaattaacctaaaaagatggtatcaccatgccaaaagaagagaaaattagaagctaccgcaaaccttgtctccgggaagtctgtgtgcgcatgaccaactgtgctgcgcaattgcgtacgcaggtttttgttatcacctac

SEQ ID NO: 134144 - DNA, 473 bp, Glycine max
  unsure (1)..(473): unsure at all n locations
agtcacctgcggcatgcaagctttggttttgaatgcaagagagcatggaaatgattttatgtngggaaaggtccccctttaagcccacatttggagaaggctggaccttgatgggtctttgcgcctaaatgatgaagaaatggtggtcataaaagaaggagcaaaagggaaataaagcttacgtggtttgggtagatagcccaatgctttgccaatatgcatatatgctgaaaatggcacaaaaatgcttctcaaaatgggagcatatggcatgaaattgcttttcaaaatatgaataagtagtaaaaaattgcctttcccatgaatgtgtaacatgaaatttcttttcaaataaatgccaaatatgtgtataacatgaaatgactcttaagtgcgtacatatgtgtgaataaaatgtgaacatatagcaaaaaatgccacccaaaatggagtagatataggtagcaaaaata

SEQ ID NO: 134145 - DNA, 235 bp, Glycine max
cagaaagagaaagtgctaagggctgaccctttttacttacttctcccctatttataaaaatgggggagaagctgccaccactcgccagcgagcaggtgcttctccaaagcacagctttggagaattttggaggccaaggggcctgtgtattgcacccatttactaccaccctactttttgtgttcttttcgaagtacgaactacacttcgacgaactgtttcttcgtatgtagga

SEQ ID NO: 134146 - DNA, 460 bp, Glycine max
  unsure (1)..(460): unsure at all n locations
atcttagagcaccgcggctgcagcttaaacaactggaanngatacatatgctattatccattaaaagaaggaggttttccttctgaagaatttttcccactttaaaaattttcttcacactcacttatggggaagcacaaattggatgaaggggacttagatgccacatcccatattaaaaccaataccaatgccactcaaaggagttgagcattgtaaagacaaaacatcttcatgctcttctcaagcttcaagcttttggcttcatgggtcttcccctatctataacatttctttcttggtgaaggatcttttggacactggaagagttcttggttttccacatctttctaatatttcttgtgatcaaacttaatttcgcatcttcttcattagagtcatcatcaatgaattcttcttctgaagcattattcacgacaaaggctttggacaatgactc

SEQ ID NO: 134147 - DNA, 379 bp, Glycine max
  unsure (1)..(379): unsure at all n locations
tcttatccaaggctcatcttggtggtgaagctccttcttctatgtatcttattccctagnggatggcgcctcctctcacctcttcttctttgtcttccactgcatctncatggnggaaaatcaccattaaaggacctcattgaagctcanagatccagcctccatagaagccccccaagcaagctttcatcaggactactagcaacaatatgttatcaaagagaaaaactctagatgagggttcactgtaatcaagcaagtcgaagacctagcatgatcacagattcacctccactccttgtgtgcaaatagtgttggtgtttgtgtgcattaaatgaaaatatttacctcatgcatacattttaaaacacactaaaag

SEQ ID NO: 134148 - DNA, 463 bp, Glycine max
  unsure (1)..(463): unsure at all n locations
acctcagagtcacctgaggcatgcaagcttcataggaagcaacactaanatatatttggaaattacatctcannnannaatgaagaatgggtaacttgcacgtcctttattataagctcaacctcgtaggaacactggttgctctcatcaccccccaaaatcctattgtgagatgtcatggccccacttagataagatgacagctatttgattaagaggaaataaaaaatacaattaattaagttgaagttcactagctaccttacccaccaagtaattaattctcagctccctatctttgactgagtatggccctaatcaaatataatactacaaaaacccgtgtgatagccgcttctccaatcagctaaactatctcttcaagatatttttttaatttccagtaagattggtagggaccaaagccactccatattatagttctaattangatgacaagaga

SEQ ID NO: 134149 - DNA, 408 bp, Glycine max
  unsure (1)..(408): unsure at all n locations
ctcactgctagcagtgatttaccctagttcacttagtttttttcatttcgantaagaatgagaagtcccaaagagaaaacgtctgaatgattctttcgctttattttactaaaagggtattttgattatatattttaatttacctctttttttatttccaacgtggttacggcacgactgaacggtcggaattcattttaactgaaattaacggatattacaaatcaaatgatcagtggaaactttttttttttattattaggcgagaaatgacttaaataaattactgaagcacgtcaaaaggggatacataaagtaaatgaaaatgagaataaaaatacatgaaacanaatggngaccaccacgggtacatagaatgaatngaaaaagctcgtttaagggtactta

SEQ ID NO: 134150 - DNA, 211 bp, Glycine max
gcgaaacagcagagctagtttctagatcatcccactgtctactgctgctcgacaatgggtttaccgaggccactctatgcaggctcctcaagaagctctacctagacgcttctttaagaatcttgcacgtggcttcatcgacacgctttctaaagatgattctgagagaagctatatgcttatctactcacaccctcctatcaactaccat

SEQ ID NO: 134151 - DNA, 449 bp, Glycine max
  unsure (1)..(449): unsure at all n locations
agcttctaaggggcgcacttagcggcaccttatactntagaaaatatactaagtatgggattcgccgcaatgaaatacgcttagctcaggtcagctcggcttagcgcccgacttccaacaaaaaatttgactaagttacctggacttagcgattcaacctcgcttaaccacaggtatctcagcaagaggatgagtattcatcctcaaaagatgaactcgcttagcgcagtaggcgcgcttagcaagttcttccgagaatgcgtatattcaatgaatattgatgaactcgcttagcgcagcatgctcgcttagcgagttcatcgtgtttgccaaaaaaacgcataaaacgcagttcgttttcttgcactntttttagcctctaaaagganaatcacacatgcaaaccaactaaaatggcttctacagtacaaacatatataaagtcctca

SEQ ID NO: 134152 - DNA, 141 bp, Glycine max
  unsure (1)..(141): unsure at all n locations
agctanntttcttcctcatcatgtggcatatttttccaagaagggcccttttataaacctattcccgaaataagggccttttataactaattctggcctggtgctctttttcatggaacctgcatgcctaaaccatgccaa

SEQ ID NO: 134153 - DNA, 373 bp, Glycine max
tcttcacaataacgatcatgaagttttttcttttttactacccatcatatctccccaaaccccatacccacgaaaatcaaaggagaaagaagtccacccacacctgaaatttcgaaggcccactcggagccacgcacttcacgactccaagaacgccatcctttcacgatttggggaagaaatgatggccaaagggtggagctttgttggggtttcaatggagaatggaggagaaggacaaagcaacgtgaggaagagggagagcttctgaattttctgctttggctgagtgaggagagagagaagctttttggtttaaataaaagcgctttctcttttctatattttatcaagctctgcacatggcctattg

SEQ ID NO: 134154 - DNA, 433 bp, Glycine max
  unsure (1)..(433): unsure at all n locations
agctcgagaatattgagactgtgactttcttcatcagncaccanagctagggctagacagttttcttcaccttatatcagaaccagctgctgctaggaaggacccactgtggtcgaactccgctgcatgacacacagaattcatatgaaagccttttgaagtatgtgcaacttcttaaccagtttgtataaatgtaggatatattgccttcaagtgaacatgaataccggatctcgttggtgttcccgaatcatatggagcataattcctgaagttcttcaccttacgtagatgccaaagattaacaccatcatgagcagcagtctgtcatagttcagagtaccatatgaatactgtataacccatcgtcatactntactagttacattgtctgacatatccgcaggaagtattcattgctagagagagatat

SEQ ID NO: 134155 - DNA, 390 bp, Glycine max
  unsure (1)..(390): unsure at all n locations
cactatgaaactcagcttgctacgctgtatggagtctggagatgatagcttttcttttntatatggcncanagctncattgaccacatgagatagctcttcctcttccaaccaagagttgtcaaaaagaaacctcttacctttacgagtttgataatgacggctcagcttcaatacaagagggaaatgatctaacctacacgagacgaggtttgacgaacagcaatttgagagagcatcaccttgtaattgcccaagctcagtcaagctgttccaggattggcatgggtgaacccttgctttctacccatgtataagaatagccctacaaggtgtgtgtctttcaaaccagaatttaacactacttgtctgtaacctggtctgagataat

SEQ ID NO: 134156 - DNA, 444 bp, Glycine max
agctctgtccaaagatccctcttgttggtctagacttagatcaaacaacattattgtaacagcttatttaaaaccaaaacttaatccacagatccctcatttaagactaagtttcaatcctacttcaatcaagttctaaggcaacagtacatttcccaatgctaaagtcacctaactatgcacacaaatgggtgataagaccaagagcatacaggatttaagcactgaaagaagcattgaacacaataaacacaaccaattagatattaaaggaattacatcagttgttctttagaaatccctaacaagggtgtttagccagccattacagaaaaaccctaacaataatgagattaagagtagagaatgactactccttacacaagaagggggatccatcctcctcctctcagcatctcataatcactctgcaactcactaatc

SEQ ID NO: 134157 - DNA, 169 bp, Glycine max
agcttctgaccactatggactactttgtttgttttccgccgatcgcccttacgagccttgaaagcctttccgatgtaagaatgtgagtacattgctgtaagagatgacacgaaatgcaccagatgcaacatgagttggggagctatgaaagaagaagccgaaacacttg

SEQ ID NO: 134158 - DNA, 260 bp, Glycine max
ttggagcccgtacgcccttgagcgtccccatcaacggaacacttcgctgcttatactacgaatggctacggaacggataatgaacagagagaggagattccacttcaatgagaagacgagtctacaagaagctcaccagcttaggaggccatggataagtgcttggaggaaagatgagatgaatgaagggacatgcacagaatagcacaaactttgtgctctagatgagctatgaaatctgaggacaactttccaatgat

SEQ ID NO: 134159 - DNA, 435 bp, Glycine max
  unsure (1)..(435): unsure at all n locations
agcttcnccactatttttctataaataggttgagaggcgaagggaaaaaatgttcaacccttctagtaattcgagatcacttgaaattagtgaaaaaaattggtttcgtgaagaaaatccaagccgaggcgcttccgtaacgtttcccggggtgatttcgcgaagattttcaaccgttcttcgacgttcttcgttcgttcttcgtcgttcttcgatcttcaaccggtaagttcccaaaatcgaacttctcaattcattatgcacccttggtggtccccatttttttcgcgtacttttattctcgtttcatttacttttcgtacccccttttgacgtgctctagtcatttacttaagtcattttctcccctaatcaaaaataaaataaatttccaccgatcatttgatttgaatatccgtaatttctgttaaatga

SEQ ID NO: 134160 - DNA, 355 bp, Glycine max
  unsure (1)..(355): unsure at all n locations
tnntgtttgtgggtgatgaactctatcgctcataatgacatgatcgccggctgacatattcaattgaattggcttagagaacccatgggtgggagtctttctcaataaacctctaaacctctccaacacttcactcaaggactcgtcgggaactgatgaaatgaagagattgcagctttcccttccgcagtctttgactctgggaagtatttctttagaaacntttcaacaacttcttcccaagttttcagacttgtacccttaaatgagtggagccaccttttggcttcttctgccaaggaaaatgaaaatagactgagtctaatggctttatctaacacgcctgccaatctta

SEQ ID NO: 134161 - DNA, 312 bp, Glycine max
  unsure (1)..(312): unsure at all n locations
actcagcccccctggggtgaaacacttcggcgaggattttttttttccaaccaangaccgctaaagaccctggtgaaacttccacaacccctaacttcaacctcctcaggcccgcaggaccgagaatgaaaatgcgcttcctcccatcttgctcggagattcttaaacttcacactttccagtttcaacgtccctaagaggaccccttgctctctgcagaaagaataacgtcaaggctatcaccgctgacttacggtcaatcatgagtgcattgcaggtctattgacctgataatcccgtaagacaaaggag

SEQ ID NO: 134162 - DNA, 147 bp, Glycine max
cccgggtagtcaaagagaagttcaagtccatggccctcaaagtctgaagagagtattatgaacttaggggcgtcaatattggcaccgatgaagccttggaatgagaaacccagaagggcccaaagggagaacaccaaccaaaccagg

SEQ ID NO: 134163 - DNA, 420 bp, Glycine max
acacatatactgtaatcgattaccagagctctttttcataatatattctcaacagtcacatctttgtatgtggttcttgaatggctatcaaaggcctatatatatgtgacttgaaacacgaatttgctaagagtttttcaaaacaaaaaggtcttttcctcttataaagcaaaatcgttttatcctcttacaaattccttggccaaattacttgtgattcaataaggaattatttgagtgctcaaattgttcaatctatctctctcaagagagatttcttcttttcttcttcttcattctgaacagggattaagagaccgagggtctcttgttgcgaaagaaatctaaaaacacaggaagggttgtccttgtgtgtttagaacttgcaaaatgacattacaagatagtggaactctcaag

SEQ ID NO: 134164 - DNA, 435 bp, Glycine max
agcttgagatgaggaagtgtagacgggtgtttctttcttcttttattcgcggaccacagagaggtccctgcagatatgtcgcgggggtcaagagacctttgggacgtcacgcggggtgctattgcccaaaaccaagcttgaccaatcctgacccaacccgaacatagtccgtgagagagaacctgtgatgtacctaaacaggcgagctgctggcagtccacagataaaaggaacagagaccactaagcaaggacgcttgtggtggctggccaactgtgaaacttgattgatatgtgagattaggcctctggtaatcgattaccagtctgtgtaatcgattacacagaggaatgggtcactggtaatcaattaccaggtacgtgtaatcgattacacagtgcatgctcgcaggtttcatgtcctgaggctatgtaa

SEQ ID NO: 134165 - DNA, 309 bp, Glycine max
tcctaatgggcctagatgggcccagtgctgaagaacaactcttattttgatcttttcgcccgcatatggagtattgcttatcacttccttccgaaacgtcacgaaatcttatgaatcgtgtgacaattggctttaagcatctcaacgtgactggcgaaaatccgcatgtcgactaacaattctccccggacgaaattagggtatgacacatatgtattgagatgctgtgtgcattgagtcgtgagctatgaaccgtacaatcacgcgactgtaagacccattaacggcgacaggttaatgtgccatgag

SEQ ID NO: 134166 - DNA, 452 bp, Glycine max
  unsure (1)..(452): unsure at all n locations
agctntgtgtaagaatggaggagaggaagatttttaatttctcaagntttggcccaatgaacttttcttgacaaagaaagtgtttgaacaaaaactcttagaaagatgttgagaatgattcagtgaatcagtattgaaattcgtgccatggtcacatatttatagccatttgatggctcttgaagaaaccatgttaaaagttgtgactcttgacaatttcttcaaaactagtcactttaaaagttgtgactcttggcaaattcttcaaaaactagtcactttaaaaattgtgactcttgggaatttagtttttaaaaccagtcactggtaatcgattaccattatagtgtaatcgattacacatcaacagttgtgactcttcgtgtttagatttgaaaaccaatgtttagaaatactggtaatcgattacaaatgttgtgtaatcgattaca

SEQ ID NO: 134167 - DNA, 455 bp, Glycine max
  unsure (1)..(455): unsure at all n locations
ttgacaatattcaaaanatgttgtcaaattatgaataaatgttactattatatttttgcgacattntattaaattttgcgtataacccatgttactaaagtctaaaaatgtcaaaaaagactttagtaatatggacaatacacaacatttgataaaatatcgtaaaaatatattaataatattattcataatttaacgacattttttaaatgttgtcaaagatttttaataagatttttattaagtgttacanaaaaaatattactaanaattacatatataatagttacatatcacctttttgcatttttctctctcttaaccgatcnatccagngtgttgactaattcatcataataatccagcncatatatatatatatatatatatatatatatatatatatatatatatatttattattatatattgaatatctattagccatttatatg

SEQ ID NO: 134168 - DNA, 440 bp, Glycine max
  unsure (1)..(440): unsure at all n locations
gcttcacanaggcttctctaatattatcttccagcagaanactaaccaaactaccccttatatcttccaaaaccccatacccacgaaaatcaagagggaaagaagtccaccccaacctgaattttcgaagtcccactcgtagccacgcacttcacgaccccgaaaatgcccttctttcgcgatttggagcagaaatgagcaccaaaggttggagcttttgtggggtttcaatggagaatggaggagaaggaaaaagcaacgtgaggaagagggagagcttctgaattttctgttttggctgagtgaggagagagaaaagctctttggttttaaataaaaggttttcctctttttctattattntattcaagctctgccacatgtccctatttgattggagcaaaaggacccactttntttctttttgactgtgagccata

SEQ ID NO: 134169 - DNA, 346 bp, Glycine max
  unsure (1)..(346): unsure at all n locations
agctttataagcgccggnctgggagactatagtctagnggncgccatataccaagatgatggttcgagtaccttggatttggtatgaccatgcccttctgaatttcaactgggaaattggcgaagggaggaacgccccgacatttacgccacgaacataatggaaacctttatgggtttaaaagctctatagttggcctaggctttagaagtttttcttttggtaaggctttgtgtcttttgaatttataatacaaggatctttcttcatctgttcctacgtctctacccattctcattcattagcatgtttacttctttatttttgaaacgacagatccgatgat

SEQ ID NO: 134170 - DNA, 389 bp, Glycine max
  unsure (1)..(389): unsure at all n locations
gaatggttctagtggtttgatgataacctagatgatgaccaaaagccccagagaatgatttccagattgagtccagaaccattcaagaatcaagagaaatttgatttccagattcaagaatcaaggttcaagtttcaagtttcaagtttcaagaatcaagaataatcaagatcaagattcaaaactcaagaaaagactcaatcaagataagtactaaaaagttgttcanaacattgagtagcacatgaagctttcccagaagctgttaccaaagagtttttactctctgataatcgattaccaatgtactataatcgataccagtagacaagtgtgtttcaaagctgtcaactacattacacgttccactaattcaaatgtgtatcgat

SEQ ID NO: 134171 - DNA, 435 bp, Glycine max
  unsure (1)..(435): unsure at all n locations
agcttgctctanatntacattgatgtttgtatttatgggaggaggttgtatgcccattttgttttaagggtagtgtcccactggtaagactaactttccaaaatgttgccttcgcaggaaatggccccgaggaagcttgcctcaaagaggtccaggaaggactaggcagccgaaagaactagttccgctccggagtatgatagtcaccgctttaggagtgctgtacaccagcagcgcttcgaggccatcaagggatggtcgtttctccgggagcgacgcgttcagctcagggacgacgagtatactgatttccaggaggaaatagggcgccggcggtgggcaccactggttacttctatggccaagtttgatccagaaatagtcctttgagtttatgccgatgcttggccaacagaagagggcgtgcgtgacatg

SEQ ID NO: 134172 - DNA, 375 bp, Glycine max
  unsure (1)..(375): unsure at all n locations
acacatgatactaagcttctagctntcattgggtatttgatctccttttgtgctctatattgtgggatgtgctcaaatatgtggggcaattttggtttggtttcttgcttggntgggttgaaatgggggtttgtatgagatggccctaggcctataatgtattttgaaagaatggggcatgccacattgtccccgttctcttgctattgatgcctaaacgcgcgcccaccaagtgttcggtgaaatgcctcaatggcattagcgcgtgattttcgtagggaaacaacctatgggacaatttggtttgcacatgttttctattttttgggacatgcattcagtttcgtaagggctagagtaattgccccacatata

SEQ ID NO: 134173 - DNA, 337 bp, Glycine max
  unsure (1)..(337): unsure at all n locations
tgaggtaggtcatcgagtcgcgatggctgtaaagaaagacttatatttgnatggtgagccacagaagaacatagaccacagactcttgcatcaggagtagaatgttgattcatggtcagctatttactatggtgaccaaagcataaaggtttgcttttagctttttatcttcaatggatgaagacgaattcgaggctacctcatggacttctctaagaacaatagcatcatttcttgcactgaaatgataagagtaggaagccatattcttaatcaaagtcctagcactagcatgggtcatatcaccaagagctacaccactggtagcatcaatcat

SEQ ID NO: 134174 - DNA, 419 bp, Glycine max
  unsure (1)..(419): unsure at all n locations
gatcttagagcaccgcggctgcagctgtccganaagtacctatttttttttaagtccaacgccttaaatggtcctctttgcttttattggttaaaataaaccattaaaagcataaaaccaacacataactttacctcttttgcaagaactacgtaggtatgatttcctcattgcaattgaggatacgtaggagaaaaagtcctgcttttgttgaccaccccaagagatcgttaatggtccaacgccttaatgtttctctcctttcaaaaacaagacatcgttaatggtccaacgccttaacgtttctctcctttcanaaccaaaagatcttttaatggtccaacgccttaaatgaacctttgttcggttaaaatatatcttgcgaaaaaagataaaaaaaaacttaaccaatggttagt

SEQ ID NO: 134175 - DNA, 291 bp, Glycine max
  unsure (1)..(291): unsure at all n locations
ctcataaacatctgaaagaattccatattgtctgctccaccatgaaaccttcagatgtccaagaagatcacatcttttttgaggtctttcctcattctttagagggagtggccaaagattggttgtattaccttgctccaaggtccattacgagctgggatgacctcaagagagtattcttagaaaaattttccctgcttccaggaccacgaccatcagaaaggatatttcaggcattangcaactcagtggagagagcctatatgaatactgagagagatttanaaacta

SEQ ID NO: 134176 - DNA, 427 bp, Glycine max
  unsure (1)..(427): unsure at all n locations
agcttgggcattcaatatgctgattatgtgttttccatangntctcaagactggactaataaatgtgctgcccaagtttcatggtcttgcagatgaagatcctcataagcatcttaaggagttccatattgtctattcctccatgaaaccccctgatgttcaggaagatcatatctttctaaaggcttttcctcattctctggagggagtggcaaaagattggttttattaccttgctcccaggtccattaccagctgggatgaccttaagagggtgttcttggaaaaaagtttccctacatctatgaccactaccatcacganagacattttcaggcatcagacaacttagtggagagagcttgtatgagtactgggaaagattcaagaaattgtgttcaaggtgttctcaccaccagatttctga

SEQ ID NO: 134177 - DNA, 385 bp, Glycine max
  unsure (1)..(385): unsure at all n locations
tcaagcaaggcttcatggtgaatgtgattcttttgtgtttttatgataacaatgatgaccaccaaagatgatgacaaaggtgatgaacaaaaagctcaaagatcaaagaacatctcaagtgaatcaagaacaagtcaagagttcaagaatcaagaagaattgaagactcaagaagaaagcctagaatccagaattaagattcaagatctcaagaatcaagatcaagattcaagactcaagattcaagaatgaagaanagactcaatcaagataagtattaaaaagtgttttcaaaactttgaatagcacatgagtttttgacaaaacctttaccaaagagtttntattctttggtaatcaattaccatattggtgtagcaaaatg

SEQ ID NO: 134178 - DNA, 417 bp, Glycine max
  unsure (1)..(417): unsure at all n locations
actcttcacatataattttgttttccaacgnncaaacaccaccggaatcgattaccaaatcattgtaatcgattacaacattttgaaatcaattggaacgtcgtaaactcagttgaaaactttttgaaaaccattttgctactggtaatcgattacaataatctgataatcgattaccagagagtaaaaactctttggtaaaaggttttgagaagaattcatgtgctactcagtttttgaaaaaactttntaatacttatcttgattgagtcttctctcgatcttgattcttggaacatgaatcttgaagtgttcttgattcatctttaactcattctttgattcttgagatcatcatctttgttatcatgaagtggtcttgacttttgagcctnttgacatcatcttagttatcat

SEQ ID NO: 134179 - DNA, 293 bp, Glycine max
  unsure (1)..(293): unsure at all n locations
tcacaactctttagaaatcaactgtgtaaatcgattacaccattttggtaatcgattactagcaagaaattttcataaataactcccaacaatcacatctattcaaatgattttgaacggccatcanaggcctatatataggtgacatgggaccacgaaattcttagagtttttgctacacaaagagtctcatcctctcaaaaactaaattctcttatcctctnaaatatccttggccaagcacttgcaaattcataaagaatctgaatgatcttcaattgtatatctttctc

SEQ ID NO: 134180 - DNA, 182 bp, Glycine max
atgagtatgaactttgagaggaattataaatatcaacgttgttaaatgccacaatgagcctctatttataccctaagtgacacacaaaagtggacggaagaatgaatcttatctcaattgactggatctgaacttgaattgaattggcggagtcaaaattggagccaaatatcactaatatg

SEQ ID NO: 134181 - DNA, 450 bp, Glycine max
accgcagctgcagcttgagcaattaaacgaaataacttttactctatgtctgatcgagtcccgtaatatatcgagacgctcataatggaatgttgaagctctgagccaattcaaacgacaataactctttactcggatgattgattgagtcccgctatataatgtgacgctcgaaattgaatatcgaacctttgagccaattcaaacgacaataaagttttactcggatgtcctattcagtgacgcaatatatcgggacgcttgaaaatgaatgttgaacctctgagcatattcaaacgacaataactttttactcggatgtctaactgagtcccgaaatatatcgagacactcgatatatcgagatgctcggaattgaatgttgaacctcagagccaattcaaacgacgattactgtttactcggatgtctgagtgaggcccgcaatat

SEQ ID NO: 134182 - DNA, 444 bp, Glycine max
  unsure (1)..(444): unsure at all n locations
ctatgaaactcagcttaacattcaacttcgagcgtctcgttatattataggactcttttatacatcctagtaaaaagntattggcgnttgaatttgctcagagcttcaacattcaatntcgagcgtctccatatattacaggactcaatcagacatccgagtaaaacgttattgttgttngaatttgctcaaagcttcaaaattcactttcgagcgtctcgatatattacgggactcaattagacatccgagtaaaaagttattgtcgttggaattggctcagagcttcaatattcaattacgagtgtctcgatatattacgggactcaatcagacgtccgagtaaaaagttattggtcgtggaatttgctcatagcttcgacaatcaattttgagcgtctctatatattacaggactcaataagacattcgactagaaagtat

SEQ ID NO: 134183 - DNA, 219 bp, Glycine max
tcacaatattacaccttatcaatctataatactaataaaagcattctttctcttttactgttctacctgaaccttttaattccaacacaactcttgatttggtgtctactgacttttttaattatgacatagtggaaatatgcttagctatgatatgaatatacagcaaatctgttatagctgtagagaaacattgattattttacgcttgccccggaa

SEQ ID NO: 134184 - DNA, 441 bp, Glycine max
  unsure (1)..(441): unsure at all n locations
agcttgcttatggggcttctatatatgctttatcttngagcttcaatggggtcctttgatggtgattttccaccatggagatgcagcggaagacaaaggaaaagaggtgagaggaggcgccatccattaaggaataagccatggaagaaggagcttcaccaccaagatgagccttggataagaagattggagaggatgcttcaatggaggaaaagaaagagggagagaaagagagaggggggagcatgaaattgaaggaagaaaaagggaaagaagttgaacattgagttgtgtctcacaagactctcattcatcanagttacaacaagatttacacatgcttctatntatagactangtagcttccttgagaagctntcttgagaaaacttccttgagaagcttctntgagaaaacttccttgagaagctagagcttaac

SEQ ID NO: 134185 - DNA, 348 bp, Glycine max
  unsure (1)..(348): unsure at all n locations
cctatgatactcagctagagacccctctaccaccttgtgttatcctactctcaaatccctcntctctgggatggacctctaaacttaggtaaaggaatcctttcatgtggactcaaaccccatgattgtctttcggaggattcaaccatggcattgcatgcttgcctctataggtattactttttctttacatgtgtcatttaaatgagtgattntatttcaaaattatgttttgttgttgaaactgatttgagagtgcatattcctcttttatccatcttttttactctttatttctttgggaagactctaaataaaaaggagactttgcccaaattttattcaaaa

SEQ ID NO: 134186 - DNA, 438 bp, Glycine max
  unsure (1)..(438): unsure at all n locations
agctngaagaggcccttgatatccaatccttcattcgcatcattagtgcttacctcaagtaattgttccttctctatttctgcttctcttcaattctttgtactatggaaatcaccattcaacaatctaagccaagatgaagtcttgtttttatttttattcaattcaggatgcccagatatatataaaaaaaaagtggaggagttctaattttttagttttgtttttactcctgttgttattatattttattttcttgtgttgagagaaaataaacatatacttgactctgatcatataaaaatatagttttttttttttttttttttaaatttgtgtggaaaagttatttaattctatggattatacagaagagggagtgatgaatcgttgctcaattctctggtttgagatgtctggtggaaataatgcttttat

SEQ ID NO: 134187 - DNA, 264 bp, Glycine max
  unsure (1)..(264): unsure at all n locations
ggagcaccaaaatgaaggaagaanaatggagaaaagntgaaccttgaattgggtcttacaagactctcattcatcaaagttaccaccagtggtacacatgcttctatttatagactaaggagcttccttgaaaagctttctcgaaaaaactttcttgaaaaggactaatcgcctgaattcttttgtgtctcccttctcccttgtcaaagaattcaaaacgacacagtctgagaattcttttgattcttcccttccctaatcaaa

SEQ ID NO: 134188 - DNA, 441 bp, Glycine max
  unsure (1)..(441): unsure at all n locations
agctngcttgtggngcttctatggaggatttgatctttgagctcaatgagggcctttaatggtgaattttcaccatggagatgcagcggatgacaaaggaaaagaggtgagaggaggcgccatccactagagaataagccatggaagaatgagcttcaccaccaagatgagccttggataagaagcttggagaggatgcttcaatggaggaaaagaaagagggagagaaagagagaggggggagcacgatattgaaggaagaaaaagggagagaagttgaactttgagttgtgtctcacaagactctcattcatcatagttacaacaagtcttacacatgcttctatttcncggcccaacaagcccgttgacacgcggagatttacgtcatcttccgcgatcacaagaattgtcatactgacatttgagtcacgctgacag

SEQ ID NO: 134189 - DNA, 235 bp, Glycine max
  unsure (1)..(235): unsure at all n locations
acttcacgaccccgaaaatgccctcctttcgcgatttggagcagaaatgagcaccaaaggttggagctttgttggggtttcaatggagaatggaggagaaggaaaaagcaacgtgaggaagagggagagcttctgaattctctgttttggctgagcgaggagagagaaaagcttcttggtcttaaataagagggtttcctctttntctattattntattcaagctctgccacatg

SEQ ID NO: 134190 - DNA, 286 bp, Glycine max
  unsure (1)..(286): unsure at all n locations
gtatttcacatcttattattatattgatatataaaggtacatgaacaattcanaatgttcttttaacatgtctaaattgttcatgtacctttatgtgatgaataatgaactatcgagcattaatttcattaattttgattatttcttccatgttgtctgtactgaaagacttcaaaaggttagagaactaattgatatgggcacatcatttgatcatgcaaaaattggtaactagcatctaatgagggagggtcattctcatcatagaaatgtgtgttgcttatat

SEQ ID NO: 134191 - DNA, 286 bp, Glycine max
  unsure (1)..(286): unsure at all n locations
taatggcttctcttcattaatgtgaagttcatcacaacactctcttcatttatatgtacagacatgatgaaaaactagctattgatgtcatataatcttttattatttcatcttcagctaacgtcctttntgtgaatattacacaatagtaatttttgggttaaaacatgattgcccgctatacttctgcataatatcataaacttataatctttcatganatgtattactaagaaagattatcagaacatgctaataacctgtgtccagttgcatttatgcttgg

SEQ ID NO: 134192 - DNA, 385 bp, Glycine max
agcttgagaacatcatgcattattcttatctttttttcaaaggcgagatggcaagatgctctacccctaccttacacctacccaagacgtaatgtaagccatgcattatcatggagtgctcataaatctgtcaaagagcttatgctaatgaagccatggcttggaacaccaaactatgatccgtatcaacccagtccatgaggtccatacccttttcaagactaatgaatgtgcgatgagtgcgataacacttgagaaacataaattgatgcagcaagaaaaggatagattgttattggcactggatttaccatcctacggccgcattccttttagaatgacgagtccatatatcatgtcatcgataaaaagaagatctgaccat

SEQ ID NO: 134193 - DNA, 207 bp, Glycine max
cagagaaggaattgcccttagcgactcgaggcgccctatgcagccctattgccatggggctgcactgcgcctaaattcttatgctaatcgcacgatgaggacttcagcttaacccgacaggctcgcttatcgatatctgcaacttataaatgcgttactagtgagataaacaagaggtttgactctcttcttctacaaaacaccacc

SEQ ID NO: 134194 - DNA, 291 bp, Glycine max
  unsure (1)..(291): unsure at all n locations
accggatcttaatgaccgagatcagctgaagagtttttatttttacncgcttattcgtacccgagggacctgaaatgtccggggtacgaacttgggacttagtgggggctattgccaaaccaactgaccatccacccacccgcatatagtaggaaactgtacgtcctaacagcactcttgcgcacaataagaacaaacccaacaggagcttggggggtggcactggatttgggattatggatgggctctgaatcatacaagggggatcatacagtaaaagatccgaactaa

SEQ ID NO: 134195 - DNA, 294 bp, Glycine max
  unsure (1)..(294): unsure at all n locations
tntngtttanggnttttggttntctgcttaatgctactgttttctgtaatgcaattntacgctttctgtttctaattaccaattcgntcttgcttcttcttctactctcaattacgnttctggttcatctacatttctgntcatttacggttttgntcatttacgcttctgttcatttacgtttctgcttcatgtttcatttgcgttttctgtttgaatccatggaaggctagattttctggtgttgtttccttttgaggacgaagcccaactctctttgaggttcgcttgaat

SEQ ID NO: 134196 - DNA, 368 bp, Glycine max
agcttctcaaggaagttctctcattaaagtttctcaaggaagctacctactctataaatagaagcatgtgtaacactcgttgtaactttgatgaatgagagtcttgtgagacacaactcaaagttcaacttctctacctcttttattccttcaatttcgtgctcccccctctctctttccctccctctttcttttcctacattgaagcatcctctccaagcttcttatccaaggctcatcttggtggtgaagctccttcttccatggcttattccctagtggatggcgcctcctctcacctcttcttctttgtcttccgctgcatctccatggtggaaaatcactattaaaggacctcattgaagctc

SEQ ID NO: 134197 - DNA, 329 bp, Glycine max
  unsure (1)..(329): unsure at all n locations
tgtatactgnaatgagtatggcacacacattgcatgtctgttatgccttntanaggcttgaaaagngcgagaacatgagctgtgttttctggaaaacgcgatgaactcgcttagcgagaatgttgcgctaagtgagttcatcaatactcattgtatataagctttatctgaagaactcgctaagctcgctgactgtgctaagcgagttcatcctttgaggatgaacattcatcctcttgctgaactacctgtggctaagcgaggctgaatcgctaagcccgggtaacttaaccattntnttttgtgatagccacacgctaagttgagca

SEQ ID NO: 134198 - DNA, 443 bp, Glycine max
  unsure (1)..(443): unsure at all n locations
ctgcagctgnagagactaaaagggaaatgatttattatttatataancgaaggatacacaatccctcagtctcaaaggcaaagcctatagagaccaaaaggtgcaaatgacttggtatttaaacaaccggagggtatatagccccttagtcatgaaggcaaagtctgaagagattaaagtgtaaagaattggtatttagacaactggaaggtacacagcccatcagtcttgaaggggaagtttgaagagattaaagtgtaaatgacttggtatttagacaactgaaaggtacatagccccttgattttgaaggtgaagcctaaagagattaanaggtgcaaatagctctagtatttagatgaccggtacacagccccttcaatttgaaggcaaagcttgaagagatgaanaggtgtacatgactcagtatttagacaacatga

SEQ ID NO: 134199 - DNA, 397 bp, Glycine max
tcaacatcagaccacttccagggtgctggaactacttcatatggacttgatggggcctatgcaagttgaaagccttggagaaaaagtatgcctatgtggttgtggatgatttctccagatttacctgggtcaactttatcagagagaaatcagacacctttgaagtattcaaggagttgagtctaagacttcaaagagaaaaagactgtgtcatcaagagaatcatgagtgaccatggcagagagtttgaaaacagcagagcatatagagtattcaattccagaaccagaactgtgatggaatccatcaatgtggtggttgatgatctaactccagcaagaaagaaggatgtcgaagaagatgtcagaacatcgggagacaatgtagcagatacagc

SEQ ID NO: 134200 - DNA, 123 bp, Glycine max
  unsure (1)..(123): unsure at all n locations
tttctatttctagaccacaacnctaattatttacatcgagaccattaatgaggtgaccattatttgaccagagaactttctctgaaataatcttattctttctataccttagctggaaaactt

SEQ ID NO: 134201 - DNA, 401 bp, Glycine max
  unsure (1)..(401): unsure at all n locations
ttctcacatttctcaacccatattactttctaaaaagtattggtagccctctaactaacaacacattatctaactcgcttttctttactacattgtatcacttgtcaattgtttatacttggctctcttctcctatggnatccacgtattagcattataaattaaatgtcttattcccctctcgcctttcggcttggtctataaaataaaaatgaatagtttacaactttctggttctaaactagaagaaacattcttttaggaacgccacaatttcccaattcgacaaacaaaatggcgaaactttgcattcgagaaggataatagagaatcatctctacaattttaatcgtgacgccttgggttcggttacttaacatgactaacaagtaacaattaca

SEQ ID NO: 134202 - DNA, 225 bp, Glycine max
cagacctggaattgacaagtatggcctgagataatcaatggtcataacttgtcacaccgatgttcgattcaggcacattatatatcgagatgctcagaaatcgaacatcggaagctctcgagaaattccaaaggtcataacttttcacacggaagtccgattctggcgcatcacttatcgagacgctctgaattgaaaaccggacgctctcgagaaactcaaatg

SEQ ID NO: 134203 - DNA, 430 bp, Glycine max
  unsure (1)..(430): unsure at all n locations
tctttcttttctattaaaggggtattgtttaataaccaaaatggtcaacccttctggtatatgagaatcacttaaaattagtgagaaaaattggttccataaaaaaaattcaagccgaggcgctttcataacgctttcgtgacgttttcatgggtgatttcacaaacatttttcacccgtcatcattcgctcttcgacggtcttcgggcttcaaacgggaaggtcccgaaatcgaacttttcaattcattctatgtacccttagtggtcctcatttgtttcgcgtgcttttattttcatttcatttacttntcgtacccccttttgacgtgctttagtcatttacttaagtcattntttcgcctaatcataaaataaaataaatctccaccgatcatttgaattgtaaaaccattaatttctggtaaaat

SEQ ID NO: 134204 - DNA, 468 bp, Glycine max
  unsure (1)..(468): unsure at all n locations
catgcaagcttatgcacgcgaaatgtaattatgaaattgttatgtcttataaacaccatttcctcagtaaccatgcattaagtaccatgttcaattattttgctttgttgttgcgtgtttttttttttagaaatgggtttatgatcccaacatggttggctcatggtgcctaacacatgaaactaataatgtagtgtgaagtttcacgcttcccccttnttttgtttttggtntgtagaggaaaacgcagggatgagcaaacatgaaaacaaatggtatgcaattttgcagaccaaaaagtttgttgaacgcatatgcatgatgatgccatgactcatgcaaaatgtgaggctggaatatgataacggacaaatgcacgatatgtccattatgatgttatgaagagatgcttatgaatgcattttacggacacgagagcccggannaatatctcttcttacttgcgca

SEQ ID NO: 134205 - DNA, 369 bp, Glycine max
  unsure (1)..(369): unsure at all n locations
ttaatccctagnggatgaacgcctctctctccttttctcctttggcttccactgcattgccatgggggaaaatcaccattaaaggacctcattgaagctcaaagggtcaacctccataaaagccccagaagcaagcttccatcaaagaggtgtaatcttcacaaacgcctcaccaacttggctgatgggactattgatgttgctttggtgaaagaattntatgctaatctctacagctctgaggatccttcaccaaagcaagccagagttagaggccacttggtgaagatagacgccgacagccttcacatttctagagactcctgtagtcctagaggagggggagacattaccaacctactctaggta

SEQ ID NO: 134206 - DNA, 391 bp, Glycine max
  unsure (1)..(391): unsure at all n locations
gccttccttttcttagatgccgtatgccgaatattagcaaaacacatgacattagcacaggttattttcacaaaaacattatataaaactaaaattttgactgggcgcttagcatagcatggtgagcttagcgagccttataaacttttactcagcggctaagcgctagtctgctgcgcttagcctgaagacacaaaaaatattttttctacagattatgcttagcacaacaattgagcttagcatggcgcgcttcgctcagcctcatcagaatgatacttaggcttagtgcacagggcgcgcttagcctaactacaaaaacttaaaagatagtgagagagttgagcttancgcaggagggcgcttagctcaacctnctcaacacacaaca

SEQ ID NO: 134207 - DNA, 469 bp, Glycine max
  unsure (1)..(469): unsure at all n locations
atcctcagagtcacctgcggctgcagcttatataggggactnagattatatattgtttgggacacccacccgcattactggaataccctacaacatagtggaaatgtatacaatgtccttcactctttgagagaacggcaatacgtgatccgtatgagcatacgggctgtcgatccgtatgaatgttttttacatatgaattgacagtctcataagatattttttattttttttcaaaaatataatttacgtgttaatttaaaattaaattgtaaattatattaggcaattgcgtcacataatgataataaaccaatgagccaaagatatattaacagaacatatttgctgaataattcttataaaactacgagagttgattctatatgagctaggaataaaagattagggaggtttttctttttcgttggccataaacatttggagagtcggtggaatcttaacaatt

SEQ ID NO: 134208 - DNA, 310 bp, Glycine max
  unsure (1)..(310): unsure at all n locations
caagctactgtcataatcaccgatctctggttcattgnngactccaacaagtctgagcaagcgaaaatggtttttggtgattctgaggtatattttgcgcttgttatttgggtggtgggttgttgctcatatcatcgatcgattatatagattgcatatttcagggtgatcaaattcatgctgtttgtaaatcggaccagctcaagtcttggaaagctaatttcaaggagaattccacttatgttatgcatatatttcaaagttgtaagaatgacggtcaatttagagtgtgtgaacatgagtacaagtt

SEQ ID NO: 134209 - DNA, 483 bp, Glycine max
  unsure (1)..(483): unsure at all n locations
atctctaagtcacctcgcggcatgcaagctnttaattgttntgaaccttntaaaatttctgattgttagcaaaattctaagggcaaaanacaattacacaaacgtcaatgctacataaaatttatgttcatggttcacctaaatcaacaaattcggtattcggcctaaacaaagttgtgtaacactgcattctagctatgtacggagtgagtcactgctttgcttgagaatgacaatgtgtactctacactccacagcaatgccactggtggcaaaggacaatggtctcgtaacaacacttgttacataacgacagtggtaattgaacgttaaatacgcaactaaatttttagcatgtntactaaattcataattatgcaattacctgtacaaaatgatttccatacacatgaccaatgcatattacacgatgcacagaagaatttggcggcggctaacttctaagaggaaaaaatgtcatgc

SEQ ID NO: 134210 - DNA, 411 bp, Glycine max
  unsure (1)..(411): unsure at all n locations
gcgacggtgcacaacaagctttccacatccacaatgcgcgcataaacccaccatgcccttgtggccacctccaactgagctcacgtactcccacgtagcccatatcctcgtttctataacaccgggtccccatcaatcctcccaagctttcacaacattcaagcaaaacaacattcacacagcacaagctatcacagccgagcaaaacaaagcagaggcagaaaactctgccaaaacaccaaccaaaaatcacagcttttcccactcaaagaccccagtaacaattccttcgatccaatttgttaaccggtggatcgactccaaaatattactggaagtccatagtgcataagcctacantttgaccggggggatctactagcanacgtccagaactcattatacattact

SEQ ID NO: 134211 - DNA, 435 bp, Glycine max
  unsure (1)..(435): unsure at all n locations
agctatgcggatatagntgtcaccttcgaattgtatcaacggggcccgaaaagagcaaattgaatcaccctactttgacaaataaaaagcctgtggcaaatatagaggatgagaaaaagaaagaaacccatgttgtgactgtcgttcctacatgaccaaatttgccaccagctcaacaatgtcattactctagcaacatcaaccctttccattacccaccacccaatcaaccacaaaggccacccctaaatcagccacaaagcctgtctgccgcacatgcaataccaaacaccacccttaacacaaaccaaaacaccaaccagggaaggaatttttcggaaaaaagcctgtagaattaccccaattcagtgtatatgctacttgctccatattactcgataataatggagccataccccagcagggtctcacctc

SEQ ID NO: 134212 - DNA, 269 bp, Glycine max
agactacccattatatctcccaaaaccccatacccacgaaatctaagagagaaagaagtccacccaaacctgaattttcgaagtgccactcgtagccacgcacttcacgaccccgaaaatgccctcctttcgcgaattggggcaaaaatgatggccaaagggtgaagctttgcttggagcttcaatggagaatgaagaagacgaaaatggcaacgtgagggagagagagagctgtctgaaaaagtgtggtgctgagtgaagagagagaa

SEQ ID NO: 134213 - DNA, 310 bp, Glycine max
  unsure (1)..(310): unsure at all n locations
tctttggctaccagaccttccaggcatctctctccctctctttatggtttggtcctaaccttaccttttatcaattcagcatgtttcattggtcttttatgatagggttttgattcttaacttggcatattaaattgaattttgttgcagacaagcagtgtcatactggacatgctcaaagctttgtgcattnttgtttgtgctggagcggttttggctactcgcgcagggacgagtaaatgtgggctgcaagatgctcaaaagctagctgaacaccataattcatgattctcttacacgtagcatttgg

SEQ ID NO: 134214 - DNA, 387 bp, Glycine max
  unsure (1)..(387): unsure at all n locations
cttaatgtatcttctagagaaagttacatgaagctgcctcggtaaaaacgcttcccagccttcgttaaccgttggatcttctcgacattcggtctacaactttacaagacacttgtccatgatctgaccgttgggatctttgagaaaatatctggagtgtgctcgaagattccgttcccgagagcatttcttatttaagcacttcagcctttgctttcgtgtagcttaagaaacacgtcatttcttcttctttctttcttccaaagccatttttaaagttgcaagcactttctccatcacccacagccaccattagccaccacanaccatcattgttcttcattgaaaacccacaccgagaggaacccttcaaccgaagcggaatct

SEQ ID NO: 134215 - DNA, 397 bp, Glycine max
ttgtttgaaagtcaacataaatgactcgtgaaactatgcatgaaattatgaaatgatcagttgcatatgttcatatggactgattgatgagtctaaaggaagtctcattcatttcactttaattattctaatttaattttgctgggatagaacatttgtcatgagacaaatgtcgtgccccagtcatgaaaataataggtatatctggttcacttaatataaaggcaaataaagacagataatcaatcttatgttcttattgtgcaaacaaagggaacatcaaaatgaaagtggatcaagtcatttgactatttctacattagaatagtgcttttctagtagtggctagtccccgcccacccttagtcatgttctagatccatgactgtgaacatac

SEQ ID NO: 134216 - DNA, 399 bp, Glycine max
  unsure (1)..(399): unsure at all n locations
tggtattttcaaaaacaaaatacgcttagactctttcaacattaaactaaacatgaacttgatttactttatgtgaaccgactttgactttattgaccaagagaaccctcattttattgaactggattccctttactggaagcgtgaacttctcatctgaaagttgcaaacgggattagaatcttcttaaactcgtggcttcctcttgtgaagtcacctttaatttgtgacttggtcagcccctttagctataggaaccaatgtnttccacacgctatcacagtaaagtttaatgaaaaaanaatcttgagctcacgattcttggtggctggcattggattgactaatggatattgatgcgtaaaagtcattagttttgatcaaactgggtactggatc

SEQ ID NO: 134217 - DNA, 420 bp, Glycine max
  unsure (1)..(420): unsure at all n locations
caagctatgaagccgatgaattaacgaattttttgttttgttaaatgaccggcacaactctgcaactgatcttgggaaatgaacactcgtcctctgagtaatggcctgcgaggccaacgcattcgacaaaaccgtcagagcatttcgacaacacaaggttgtcgggaacccatcagcaccccacttgtctatctcctcattcacatcaccgcactcatcaaatggcacatattgcgacgtattgaacttcagcacacatgtacctgcaccagtaaagttggtgcaaactgctcaaactctctggtataatgtattgtctaatctaattttgagtttttcttttttaatttgtgagaatcaaagacgagatttataactcanatatcttactcaactaaataggtatatatcaaaacatct

SEQ ID NO: 134218 - DNA, 162 bp, Glycine max
  unsure (1)..(162): unsure at all n locations
ctaatagaatatgctctgcttaaatgaactggtgagagagaaacacaaaagacgcatttacttaataaaatctctcccttgatgcagcgagagtttagctcaatcactaaaattagattgcaggtgatacgaagaacagcttaatngttacacacatttgca

SEQ ID NO: 134219 - DNA, 352 bp, Glycine max
  unsure (1)..(352): unsure at all n locations
acaaaccacaacccttgcgacaggtacagaattctgattcaaggccagctgggttaccaagttaaccaatgtatccaagtttcctttcagcttcttagactcagatgatgcagatgagtttgtagctacctcatgcactcctctaatgactatagcatcatttatggcgctaaactgctgggagttagaagccatcttctcaattaaattcctggcttcagcaggagtcatgtctccaagggctccaccactggcagcatttatcatacttctcttcatattactgagatcttcataaaaatattggagacgaagctgctccganatctgatggtgacggcaactggcacat

SEQ ID NO: 134220 - DNA, 322 bp, Glycine max
ttattcagaaaaatagagtttatctcttttatcttagtgagagcgattctcctaaattcttgagtgattcaagaacaccctggctgtatcaaaggactttcacaacctttgtgtgttgccctcgctggaaagagagaatctttcctttctatcatctgcacccttgttctttcaaaccacaattccagaaaatccacctctgcccaaaattatctcgtgaccataactcccatttcacacactcaaattaagtgattcttgagcctaaattgaatttcaaaacgagacctttcacctcgttgttgaatcacctcatttggag

SEQ ID NO: 134221 - DNA, 410 bp, Glycine max
  unsure (1)..(410): unsure at all n locations
tttgaattcttataccaacgtcacaatggagatattgttatctacttgcccttcttatccacttgcttgactactaaagctctggtggctgtttcatccccaaagaagattttaattcaaactctgtatattgtttcgtacttctactctttacttggtatgaacttcctgctaaattgatcatattcttatttttcatatttatgagccaagctgatcatatttactctgatttcagttgttgtcatttgactctcgcggatgctttgttagtgtacacccttattgacatggacaaaattaactaaatgtttgatcattaattgaacatattgagtggcagaatcaattattgagttgtanaatgtaaattcaatttggtattttcataggagctattcttatgtgta

SEQ ID NO: 134222 - DNA, 308 bp, Glycine max
tctcacaggctttagatttgggagcaaaatctatccttgtggacggactctcagccacttatgatagtcgccgatgatcccattactggcttccctaagctctctgtactttcttcacgccgcatcccatgccttgcaaactccttggagtaccctcgcgttgtggtcactgaaaccccgtgcgatgaaaggcgtgatgctttcgtctgatggcactcctctcatgggacatccttcgcatgaagatagaatcctgattctttcttccttctagcgagggaaccaaataacagacgccccttcatgct

SEQ ID NO: 134223 - DNA, 401 bp, Glycine max
  unsure (1)..(401): unsure at all n locations
ttgggaaatttaagggtccgagaaaataaaacccttgaccctcagtacatggaaaatatgtgtccgaggtcacaaggtcccagcccaagtaagatcatggtgatgcccgggttttatgttcacgataaggtctcgaggtgtaaggatctttgcaggtacaagtctgcagcctaagtaagagttggaataaggtttatatgcacattttcttctactgtagactcactcattttaagtctgtaactagccaaatgtatgtgataattaataatagttcanagtgatttaatctattgcatcttcaattgtaagtgcttgaatagataaagattcagaagtgccaagaattgttgttataataaaatatacttgtcactcgatctgacattatgaatgctctc

SEQ ID NO: 134224 - DNA, 322 bp, Glycine max
  unsure (1)..(322): unsure at all n locations
catgtctatatcaatggtatcatcttcaaaagaattttctggaaaaaaagcatcatcaaattttcattttttaaagatgcccccatttttctgatgtacatcttcaagtgaatcttggggcaagtantccccttgtatttatcaatatccgacaccttgaattttggagggataacgacgctgggcactaggcacagttctgccatgtcagcaaaggcataatctccacctccttcaatagccctcagcctctccttcatatgatcaaatctctccctttccaacatagcaggagggactcttnccaccgcaaaatgcatgg

SEQ ID NO: 134225 - DNA, 421 bp, Glycine max
  unsure (1)..(421): unsure at all n locations
tgcaggaaacttctttaccaaactcttctctatataaagagaatcatatacaagagtcatcatggcatgaaatggtggggggaaaactcattttctcatatagtcttatacccaatgattctatttagtcatccaattatcacattagatatattatacaagagtgagaattagctgtacgtagtttcctcgttggccaaatgaactacatatagcaatttcaacctcacaaacttttatctatctcaaaactttatttatcatcgtagcaaaacaaaaagagtatcattattgcctaatgaaaagtgtattttattntattttatcccatacaatcagacatctgtgtgtgagaaaagaaaatgtcattttttttgtcttatctcacatggaggtgcatctaacactttgtggagaatat

SEQ ID NO: 134226 - DNA, 344 bp, Glycine max
  unsure (1)..(344): unsure at all n locations
attggctatatatattagcaatttggaatgaactatttttgaaataacatccaatttaaatcaataagtttatcttgctgtccactatttaaatatgtttattataaaggactatntcttgcttgattgacaaataaatgaaaacttcactaacgtgacaataaaatcatttctcagactacaaaatagattctcctaacaactaattactctattaagtgataccttattaaatgaaaggtccaatacacaatatatataaaaaaatgctattcaagtatcaaatctcgtaaaaaaagtcacaaggaaatcttagcataaaatcataccttagctcaatttac

SEQ ID NO: 134227 - DNA, 339 bp, Glycine max
tgattatttagtgtatgtggggcctaatcacataatggatgccttatgttaaatttcccttaattatttaatttagggttggattatagggttgaactgataaaggattaattctcgtaacctaggataagagacttgcttgtgaatcaaggggaaacaacatgtttttaattatgttattttctaattcaaatttgcttgctacttaatttacaaaaacaaacaaccccccccgcccccccaaattcattattggtttattactatctggtatgaaccgttggcttgaccatttctcgttgggagaagacctaggatcatttctagatactgcatttt

SEQ ID NO: 134228 - DNA, 413 bp, Glycine max
tgcagctgcagctgaagaaactagagttttttttttttgtaatccaactggccatgaatcaaaaatctgcacctgtcgccagactctatggtttatgctcctctaccgacaaccactaagaccattgcccttatgtgcaacaatcttgagcaattgaacagcctgaagcttatgctgcatacatttacaatagacctcctcaacctcagcagcgaaatcagccacaacagaataactatgacctatccagcaacaggtacaatcccggatggaggaatcatcccaaccttggatggtcgaatccttaacaacagtagcaacaacaactaccttattttcaaaatgttgttggcccaaccagaccatacgttccttcaccaatccaacaacaacaacaaccgcaacagccccag

SEQ ID NO: 134229 - DNA, 392 bp, Glycine max
tagccttagttagaagtgcacgaccgcacctaacttatattggacttatcctttgtattacatgtttgacaggtacactttccgaaatacccctaacaattgggttgaccaatgctattggacttggactagtcatcgactcgatcgcgctatcacgtcattgaggctatgattgaacaagtgagtcactaattgactagctcgacccaatatatatatatatatatatatatatatatatatatatatatgtggcgtatgtaatataattgtcataaagtatgtttaatatatagtacatatattacggttatatatataatataaagataacggttgtaaaacaaaagcgcatgttataatagatcgtgtatgtgttatataatataact

SEQ ID NO: 134230 - DNA, 405 bp, Glycine max
  unsure (1)..(405): unsure at all n locations
agcttttatccaagctcatcttttggttttattccttcttccatggcttattccctagcggatggcgcctcctctcacctcttctcctttgtcttccgctgcatctccatggtgaaaaatcaccactgaaggacctcattgaagctcaaagatccagcctccatagaagccccacaagcaagcttccatcaagtggtaatcagagcacaagagcttcaagtaggtgctccttaaacctccattaattntttgctttaccttctcttccattggtgtttcttcattcttttctccatgtatctcctcacatgtcttgtactaaatgtttttaacatgattctttaaaagttccaccgaataaacttgctatagaagctagatttgattttctatggttcaaataac

SEQ ID NO: 134231 - DNA, 180 bp, Glycine max
taagaattgaactttgatcctttaaggttataacgacttgcacattgcccacccgagttagacatctttgatgggtaatgaccaccaacggaatatgtttcttcataacaatttctcatgtaatatgagcttgtcgttttgcttcttttagttaaaaacgaatcggggcctctactgaaa

SEQ ID NO: 134232 - DNA, 253 bp, Glycine max
taaaatttattttcatattttaaacctccaacaaaaatttaatttaaaggaataactggcttataggattggttatatgtcaaaaatacacaacttgggtttaatcagagaggaaacacataaccagcctacctttgaggattggagttgtcttaaaatcacacaggaacattccaaagaaccttaaactattatactaattggctaaataatcaatactttgatgttaggggtgtggccaatttttttccat

SEQ ID NO: 134233 - DNA, 411 bp, Glycine max
  unsure (1)..(411): unsure at all n locations
acctggagattcaatacttcatgttttcgaacgaaacacnaggattattatatactgtactccttaaaggcttaaactaaaatacacacaatctaataataatagaaaatacacataatctagcacattaattttaccttgtttgcacaatggcaactttgtcactttaaatataaaatgtaacattaccatccatcacaggcaatatataggtaacgaccatattccaagcttatcaagagctgaacctgatcatgtgaatactcgtttaattggaaggggagctcangctcatcatgtacaatattgcttgaagatataaagttgattcattgttaaataaagatgatgaaaggaaaagacaagaaagagagaatatacgtttaaaattgtttaactcgcatttctaac

SEQ ID NO: 134234 - DNA, 356 bp, Glycine max
  unsure (1)..(356): unsure at all n locations
aacataactaatgatcaaaagtaacattttatccctacccttattaatctggctcttgaaccttgcatctcttcatgttcaccacaatcccatcttccttcaaccatttggagtttccttgcaaagacctgtgactggatacttactatngactccaagcactttagagtattcaaagcttggcgtctcacaagctcttcacgaatgataggttgaagcttaactattcccttcaatgctctcgaagctttccttgcctgtaaactcttaccagttagtgaatggtgtgcaagaatctacagtaaggggggcgttcagttcttattttcatctaccgtcacttatgtttcttttcc

SEQ ID NO: 134235 - DNA, 447 bp, Glycine max
  unsure (1)..(447): unsure at all n locations
agcgacctgcagctgcagctcaaatatttttgaattgattttttttttttactaanaaacaannaactcatatacataattaaactgaaaggccatattagccaaagacttgagccagtgatgtaggacttaagactttgttgtattcttctaagtacgaataatttgtttaatttaatgaaagaatttatatttagattttattgtgtaaaattgtcttgactcagctaaaaaaactcaaaggctatattatgaataaaagatatttattcatcttaattacactaagaaaaatttacttcataagtgaatgtagaactcatcacataaatgatgagaatttttttatctcgctaataattaagataaaagaagctggtgcaattaatattggagttctaagtcaactagcacaattcatgtacgtatattatagtagaactcatc

SEQ ID NO: 134236 - DNA, 284 bp, Glycine max
tttcatggtggagactattgatactgagccttatcgcacttacgaatgctaaacatacttttcttgggctgggttatgtcagaagacttttttacactgctttatgtgattaatgactactgatgtgcatataggtcatgtttatcatgagtgaaccttatattctcgattgagattcaatacaatgattcttgcaaataatttgcattaatggttgcatggaatcttgaatcgtccatttggaatatttgcggagactcatatttatatggtagattcatgcg

SEQ ID NO: 134237 - DNA, 175 bp, Glycine max
attatacgcactcgagataagtgattcttgagcctaaattgaatttcaaaacgagaccgttcacctcgatttggaatcaccttatttggagccctggagcttcaattattggcatttctatatttcttgacagccaccacttaacctacggtttaccatccattcattcatttat

SEQ ID NO: 134238 - DNA, 467 bp, Glycine max
  unsure (1)..(467): unsure at all n locations
gatccttaagtcacctgaggcatgcaagcttgctagcggactcggagcttgttttattcaaagatctcttgggaggagaatatcatcaaagctccacaagtcagagctattgtggaatgaagaacacacataagggtatatatagaagaaaccatttatccgaatgcacttcaaaggcctttaatcgctttcttacttttaactcaatggagccttagccctctaaaccaacaatggtagttgaaattccaatcacttctttctagcttctagtattggttaagaactaagaacataaaaaacaaacacccataaccaattctaatgctagtttgatacacatggtaactcttctatcagttctaaactccatctttgtagtttcaacaaattagaaactgcaatttgccttngacatatctatcaaacaaagctcanagcctcagactaaaacaggaaaactcaca

SEQ ID NO: 134239 - DNA, 294 bp, Glycine max
  unsure (1)..(294): unsure at all n locations
agctactanccaaagggacanaccttgaattttatttcttgatagcccttatgagcctgggctccctctccttgttttgaagctcactacaagccttaagtgaaaaaccatgatatcaccgtattcttaaggaattttggagcttcggaattgagttgggaataagagtgggggggttttcgttcataggataacatgtatcgatggctatgcttcatgatgtattttgggccacacttgatgtacattgaatattggttaatgttggacactgagaatgacatgttgtttctc

SEQ ID NO: 134240 - DNA, 309 bp, Glycine max
acgcttgcattttgcatactgatcaagtagcatctgacaagtggattctctctgggggctaaagcagcttctaaagaacaaatctctctggatgaattcaaagggtgtccccaagatgaagcagaagccaacattcaaggaaaagaccatgagttctcttctatagctcacgagcatagacccaaagaagctgtttcacaagaagaatttcatgattttgatatgagtaaaagaacaaagaaaaactggtggaagtgctctgccaacctcacgaaaagtggcgaaggacatgtatcgtccaaatgaatg

SEQ ID NO: 134241 - DNA, 362 bp, Glycine max
ccccaaatttggttttaaaattataaaagcattgaaattatgacttgcttggaagagtttttactcgaatttgggctaccccatggttgatactttgcatagaggtagcatggaaaacacctttgaagagtgtgcatatatgtgtaaatataaagggcatgaaattcctaacaaagtttgaatgattatcttcctaaatgaatatatgatagcgtggaatttcctttcgaatgcaagtgtgtgcaggatataattagctttccaatattcatataaataaatgtgagtgaaacaataaaaatttgtatgatatatatttcaagtgtgtgtagggtagttggtatatcaaatgtttaggacat

SEQ ID NO: 134242 - DNA, 271 bp, Glycine max
ttgaatctcttccacgtgtcatagagaggtttgtcaaatccttgggaaaacatcgcgatggcgggatttgcactgattaatcttgatggaggaaagaatctcgctatgaatttatcctccacctcttcccaagtgttgaggcttttatttggatgtgattggagccatgttttcaccttacctaatggaagcttgcttgagaagcttctatggaggttggatccttgagcttcaatgaggtctttcaatggatattttcagccatggagtt

SEQ ID NO: 134243 - DNA, 464 bp, Glycine max
  unsure (1)..(464): unsure at all n locations
atctctaagcaccgcagctgcagctgtcctggttaacatactggacttgatttggtactagtangattcaatntgggcaaaaatggatgagggaaagagtggttttcgaaatctgcactntatgcaaaattttgctgttggaaatgtgcaacaagaattttgtataagtgcaaaaaaatgcttgtgtatggctggttgagaaaagggcaatacatatggggttctggacaattgctagcagatcccaacggtcaaaatgtagaattatgttctagagactctcagctaaattttcgagtcgatccaacggttaacaaattggaacgaaggaaatgttactggggtatttgtatgtgaaaagctcgtgatttgagttgtgttttggggcagagttctctgcctttgccctatnttgtttggttttgttagtccatgatgatcggatgtggaattacttggatgtt

SEQ ID NO: 134244 - DNA, 381 bp, Glycine max
  unsure (1)..(381): unsure at all n locations
aacattggttctaccttaaaaccccttgaacatcttcacatagacttatttggtccctttaaaactatgagtttgggtgggaattactatggcttaattatagtagatgcttactcaagggtcacatggactttgtttttgaaaaccaaaaatgaagcttttgatgcttttcgcaaacttgccaaggttattcaaaatgaaaaaggtctgaagattgtttcacttataagtgatcatggagaagaatgtcaaaatgagtctttcgaacaagtttgtgaagaatatggaattcaccataacttttctgcgccaagaactcttctgaatgaaacagaaatacctaagtacttttgggctgatngtgacatactatntgctaca

SEQ ID NO: 134245 - DNA, 366 bp, Glycine max
  unsure (1)..(366): unsure at all n locations
gcttgataatttagataaggacatatgctttatcatgatattctcactactaagaaaatatgtnttaacattgttagatttaactcgatttttaagaactgaggtagacaaataagtggtggtatctttgaaattaaattcaactttttaaaagcggctacgtagaaaccatagttgataaaaagtatatgcagttacgaggttgttttttactggtgaccgtctttgatttcaaattaaataataaattaaatntttatttttcgggcctccctccgtccattgcgcttcttagggaaaaccacaagtctcaaaccctccattcttctaaccttcgtgcatagctcttcacgctcactccaacct

SEQ ID NO: 134246 - DNA, 436 bp, Glycine max
  unsure (1)..(436): unsure at all n locations
agcttcttgcgtagccgctcttgttgcttttattatcccaaacacaaatccctcttattactagctattttgaattctttaggtcctgaatgtacaaccttcaaattgttgctcgttcccctctttcttttctgcaaaaaagaaaatcaaatgctgcgaaaacatggatgaagtcctaagaaaatcaatatcaaagaaaacatggatgaaatcacaattaanaagcacaactacctatctttcagagtcctttggttaatttgtcttgtcccctcgtctatcaagttaaaaccatatgttttcttttacttaatctttnaacttatttcctattatgtaaatgacaagagttacccaattacaataactaacacatggcagggctcaaagctattgattaatgaatcattacctgaaatacaacnaattaaagaaa

SEQ ID NO: 134247 - DNA, 460 bp, Glycine max
  unsure (1)..(460): unsure at all n locations
agctagagcttaccttcatgaatatggatatggtcatctgtatatgcaanngcacgcaactactacaactacaagcgcatatagttcaacgaaagaaacacgcgcccacaagaaaccaacttgcctcaagttatcgcaagaataaaaagacttatagattccatggtatcggtaatgtaattttactagactgcactcaaggaacaacaattacatgttacgaacaatttataaaggccgaccacaaaattgatggcgaactgattttaatatttgagattcacagtttatcagaaaataaatgaaataaatggattgtcaaatatagtctttggaaacttgtgattcaagaaaatcagtctaagctgcttcatacattaataaaacagagattaataanatactaactaaccctcgaggtgtctatcatttctggctgttctactatattctctattct

SEQ ID NO: 134248 - DNA, 208 bp, Glycine max
  unsure (1)..(208): unsure at all n locations
gtaactaattgcaaaccctagctccaatcgttgcaacattntaccagctcaaccaatcaatacacgaatagagggcaatttcacacattaacacagaanaagaagaatatatataatatatatatgtgtgtgtgtgagtgtgtgtgtgcgtgtgtgtgtgtgtcaccaataacgatatggatgagagtgaatattgtgtcttgtgtgc

SEQ ID NO: 134249 - DNA, 448 bp, Glycine max
  unsure (1)..(448): unsure at all n locations
gcttatataaatatacatattcctaagatttgttgtaaagaannccatcctatatattatatttaaaacaataatatataagattataaaagggtgataaattaaaaaagaataaaatttaaattttgaactattttcacataaaacttatattaatattatgttttgcatcgaatatacaaatgaatacttgagtgtaatggtaaaagagtgtgcttcttacttcaaaaatcatggttctggtccttcttagagtcaattttctcataaatccaacatttaaaatttaacccgcaacgactaanatcatgtattaagatattggattntgaaatataaggggactcanatagttaattaaaaaataagaagaccaatttgatgaaatagacaaaatagagggacggantttctaantaagtctaaaaaatatatatgtctataatca

SEQ ID NO: 134250 - DNA, 407 bp, Glycine max
  unsure (1)..(407): unsure at all n locations
gatgatatctcgagtactttggatttggtacgaccatgctctcctgatttccaactgggaaattggcgagtggaggaacgccccggcatttacgcaacaagcataatgtgaacctttacggttttaaaagctctatagatgggcctacgctctagagtttttccttttgttaaggacttgcgtcttttggttttgaatttataatacaacgatcttacttcatctgttgctggtctctacccattctcattcatttgcatgtgtacttctttttctgaaacggcagatccgatgacgagtcccccgaaggtactaatacctgggacccgtctatcgacttcgagcangagatgaatcatacggaagatgaaggaaatgaggatgtgggacttccttcggaactagaa

SEQ ID NO: 134251 - DNA, 391 bp, Glycine max
  unsure (1)..(391): unsure at all n locations
aaatccctctggggaaagcaactttttggtttcagcacttttaaggctatttgcatcttcactcaccatgaatgtggttaagtcaagaataacagcctctgcgtccccaaaagcacctgaaacagatatgagtatgtggtcaactcctactggaccagaatatggcttctgccaaagaataacaataactcacctctgctttgaagtccttgggaaataggtcctttgccctccacaaaatatcaatttcatcacggttcagcatcaaaatatttgaccgcacaaatgcagtctgacacataactcntaacatcatatcctcacgaacaaaatcttcacttaaatgtatgcactcgagaaccacatcctctttgacacgacaacggatgtc

SEQ ID NO: 134252 - DNA, 369 bp, Glycine max
ttgatttttttttttagccttcgagccgtgttacctttactgttttaagctcactacacccttaaaagaaaacatgatcttccatatactaaggaatgtgaagctttggaattgctttggaataagcgtgaagggcctttgttcattggacaacttgaactgctggctatgcttcatgatgtatattgggccatacttgatgtacatagtatatcgcgtaaaagttggacatgctgaatgaaatgctgtttttcaaaggctgaagcacctcgaaaaaactaagagaaaagaaaagctttgacttgagtgataatattttaatggccaagaatatgaaactcttgttctctctgatgctaattatatatt

SEQ ID NO: 134253 - DNA, 314 bp, Glycine max
  unsure (1)..(314): unsure at all n locations
ggaccctccagaagagtatggagtcagcaccacttttaacatttctgatttaactacttttgcacgtggagctgatattgaggaggacgaactaacagatttgaggtcaaatcctcttcaaggggaaggggatgatgcaatcctccctaggaagggaccaatcactagaaccatgagcaagacgctccaagaagattgggctagagctgctgaagaaagccctagggttctcatgaaccttaggatagatttttgagcccatgggccaaggttgggttcaattatctntgtacatatttgactangatgtcatt

SEQ ID NO: 134254 - DNA, 324 bp, Glycine max
ctcacaataaatttctaacattaatggaggcataaagattctagatacattcactaataattatgttgggcaacacacgcatgcctcatccaaatcaaacatttcacacacgaaatgtgatgcacattatacccatagactcttatgcatgtggtatcatcttggaaaacactataaattaacatgtgagtctatgtaatcgatgaattgccacacaatgaacaacccaacactatcacttgcaccgagatgacactgccaatgacgtgtgttacgatgttctggccttgcaaggatactccaatacatgtgatcaacatgagc

SEQ ID NO: 134255 - DNA, 358 bp, Glycine max
ccattgccttcctcgcccaatactatgactagccgttgaggtgcttcacctttggggactctcagttatcacccacggtggaagagtttgaaaaaatcctgggatgccctctgggaggaaggaaaccatacctcttctcgggattctacccctctttagctagaagttctaagatagtccaaatctcgacctacgaattaaaccacaaaaagcaagtcgaaaatgggagtggttggagtaccaatgaaatgtttggaagcaacaaccagagtcttggcagggtaaggcaaataggccccattcatggacatcctcacacttttaatcttcggaggggtcccctttccaaatatggatg

SEQ ID NO: 134256 - DNA, 481 bp, Glycine max
  unsure (1)..(481): unsure at all n locations
tgaggcatgcaagctntacaaactattgtgaacaaaatatgctaatggtgatagtgctatagngctgctatggcatgaaacattatccattagcaaagaagagatagtgactaaggaagccaactaacagactaactaaagtaaccaaaaagtaaaggcaggaaccactatatgcagggaagaaatggaccatacctgcacaggtggaaaactaacttttccaatatgatcttccccagcgaaaccaaagatgccaacagcctggttataagtcacacgctttccaacctcacacatgttcttgtagaaggaactggaaaggaaaactatcctcagaacacagaagatttgttttctataaataaataagaaaagagtaaaacagtacaagagattgtgaaatttctcaagtgacattntatttcagaagtgaacagcaacaattgaacagaanatttactctaacatttcttttatgtat

SEQ ID NO: 134257 - DNA, 378 bp, Glycine max
  unsure (1)..(378): unsure at all n locations
gatgaataaacttcttaaatatgcactggtagatgaataaatctcttaaatatgcacttacttatgaaaaaaactttgtttattgggagaaacacgtctcaataattaggtcatgattttttggatattgagatacttgcttttagcatatattgaaaaaaaaattatgattaaatgatttaaccaacagataaaaaaaggctctttaattcaggaacatcttagttaaataaaattcagtaacatcttatgccacaattgaaaattatgcgctactataatggctntattagctactaaatgatagactaatggagagatttgattagtttaaataaaaaaaaatgagagatctaattgattaaagtaaatgggtcg

SEQ ID NO: 134258 - DNA, 331 bp, Glycine max
  unsure (1)..(331): unsure at all n locations
gagtaggtgtccaccatcgctctggccctggctagcaatcgaggaagttcttgactcccgttcaaggaagagcaaatcggtccatccacatcggtgcctctagatagaacgagtcgatcacccttcctctagcctccttttccacgtacacttgggcatactcgtcttccactctatgctcatgggtcgaggctagatttagttcttcttggtacttgctgacgatagctaacatggtggtcactgtctcgcataaccgctgagacaagtntcctttggagctcgagcaaaccttagctcatgtttcaagatcataccgactactcgtgat

SEQ ID NO: 134259 - DNA, 387 bp, Glycine max
  unsure (1)..(387): unsure at all n locations
accgaattgagtagcaaaaggattcttgattgttcaaatctcaaaccactcttaaagtcctaaagccttacattttttaaaggttaaaactgaatggcgtaaaatgcgatgttcttaccttgttgtggagtaagttcatccttagttcttagatcgggagcatctaaagagcttttgtcatgctgttctgcaaataccacctcaccttcataaacaacttgacgatcctcaaaatttccagttcttgtatccaacacacattgacattngtcattcttaatagtgacgacatgttaacaacacattgtaagtcatggcttaatcgaattgtgggaaataaagatatacaaacattaaaaccttaacatcaacttacatgggtctgat

SEQ ID NO: 134260 - DNA, 409 bp, Glycine max
  unsure (1)..(409): unsure at all n locations
atatgttaacaaggaaacatatgtatattcaccacgaaaacatcatattggaaggaaatcgttgtgttgtgattcaaaagatccttccacccaagcataaagaccttgggagtgtaactcattcttgttcaattggagaagtcactgtgggaaaggctcttattgacttgggagccaacattaatataattccactctccatgtgcagaaggttgggagagttggagatcatgcccagtaaaatgactatacaactggctgaccgctccattaccagaccatatggagtaattgaagatgtgttggtcagagtgaaacattntatcttcctcgcagactctgtgggaatggatatctgtgaagatactaaattctgtaatattgggaaggcattcatgtaactgcaact

SEQ ID NO: 134261 - DNA, 332 bp, Glycine max
aatggggacaaaagagcagattgatcatctactagacgactgagaaaatggggcaatgaaaggggagaaagaggagaaacctgctggactggcattcttacggcaagtttccaccaacccaacaatgtcattactattcataaaaacctgctcttaccaccacccgttatcacaaggcatcctaataaccacaacctgcaccgacttcaagacgaaacactttagccaaccaaaaacacaacaaaggatttgcacaaaacctgaggtcaccccaatcgtgcattgctaactgtcctatcatcataataaggagccaacccacaggtctaact

SEQ ID NO: 134262 - DNA, 374 bp, Glycine max
  unsure (1)..(374): unsure at all n locations
ttatgtaaccataaacggttatttttcttacgccagtgttggagtcaaatatctagcctttcctaggaatactagagacctaacgcatttttcttcatagcaaggggagtaagtaccattctttggctagatggtgctacccataaagaggatttctggacattatgcctgattcctagtgcatcatgattggtcgggagagatgagagatctagtccttgtggaaaggataggatttgcattttttgcaatattacttataagcattttcctcttgtttgtgctagctgcagaactattaagcattcatttgctaaatgaaatcctttattcacaatggtnttgagctcgcgggggaaaaaatagggaccttt

SEQ ID NO: 134263 - DNA, 202 bp, Glycine max
tatagaaaatatgactctcttgaaattttgcatattttattcctggggaatattgagttgctttgatcagaatatgaatatatatttctttatcaacaccacccacatgtttcgaaattttacttgtcaaccacggatgagtaacactggctgctgtgaacaagtggaatgcattgtatttttcatgaaggcaatcattcga

SEQ ID NO: 134264 - DNA, 459 bp, Glycine max
  unsure (1)..(459): unsure at all n locations
agcttctccttccttatcctataaataggttgttgtttgaacaacaaaaatgttcaaccctcctggtatatgagaatcacttaacattagtgagaaaaatcgtttgcataaagaaaattcaagccgaggcgcttccataacgcttccgtgacgtttccatgggtgatttcacaaacattttcaaccgttcatcattcgctcttcgacgntcttcgggcttcaaacggtaagttcccgaaatcgaacttttcaattcattctatgtacccttagtggtcctcatttgtttcgcgtgcttttattttcatttcatttacttttcgtacccccttttgacgtgctgtagtcatttacttaagtcattatttcgcctaatcataaaataaaataaattaccaccgatcatttgaatggtaaatccataatttctgtaaaatgaattccaccgttcggcatacc

SEQ ID NO: 134265 - DNA, 266 bp, Glycine max
cttttagtagggaatctatccttcctaagatgtatctcaacccaatctccctcattaagaactagctcttttcctcatctattgcctttagttgaatacacctttttgttggttttctatttggttattaaccctctcatgcaacttctttacaaactctgacctagattccccttctttatgtataaaagaagtttccagtgggaggggaatgaggtctaactgtgttatgggattgaacccatagacaacctcaacaggggact

SEQ ID NO: 134266 - DNA, 357 bp, Glycine max
  unsure (1)..(357): unsure at all n locations
agcttatccctagaagtgatggaccttnttatgttntggagaggatcaataacaatgcctataggttggacctcccacaagagtatggagtcaacaccacttttaacatttctgatttaattccttgtgcaggtggagctgatattgaggaggaggaactaacagatctgaggtcgaatcctcttcaaggagaaggggatgatgcaatcctccctaagaagggaccagtcactataaccatgagcaagaggctccaagaagattgtgctatagcaactgaagaacgccctagggttctcatgaacctcatggtagataattgagcccatgggccaacgttgggtccaattatagttg

SEQ ID NO: 134267 - DNA, 357 bp, Glycine max
  unsure (1)..(357): unsure at all n locations
tcgtccgcagatccctcttgtaagactaggcttaacttattcaacattattatcacaacatattcagtaaaccaaaaccccacaatccatccctggtaatgtagttatttagtcctgcttctatcaagttctaaggcaacagtacatttcctaatgctaaagttacctaacagtacacacaaatgggtgatcagaccaagagcatgcagtaattaagcattaaaagaagcattgaactcagaaaacacaattaattagatattaaaagtaattacatcaactgttcctttgaaatccccaactagggtgtttaaccagccatacaaggaaccctaatgcaaatgagacaaanagtac

SEQ ID NO: 134268 - DNA, 299 bp, Glycine max
  unsure (1)..(299): unsure at all n locations
agctcggattctgttgtgatccttgacattatttgaccatggatgtgtattgatcttcctttatacaaaagtttaatttttttgcttggttgttgtctctttcgngaggaaaacccacaggctgaagcttttttgcttggttaggcagatctttgcttgcgttggttgagaaacagtttctaagttcttttcaagactatcctttagtgatttcctttttcagttgcatggatcttactccattgattggtgaatcttgccggtacaaaaacaaggattattttgtgatcctcggcctt

SEQ ID NO: 134269 - DNA, 212 bp, Glycine max
agcacctatggaagttcatgaaaaaacttttgtttcagatttttgattcgttttgtgatttggtttgggttttaagtggtgatgttgtgatggacattgctgtgtaatggaggaaagccccctccttggacccgaagctcattcatttctttccattattcacaaagctctctttttggatctataaaagtagggaagcttaatctttcttt

SEQ ID NO: 134270 - DNA, 89 bp, Glycine max
tctgctcgcacgaaccaagagcggggcactgaggaggttttatcactcgggagcaggggaccaaaacgtccgagaataaaagccggggc

SEQ ID NO: 134271 - DNA, 214 bp, Glycine max
  unsure (1)..(214): unsure at all n locations
aaatttatagttgcaaaggagttttatgtggtgaaattaaaattttttaatgttgtctgctggtagagatatattttatgcttgggtgtgattattggtgtgaaattcaacctatatttcttttttttttctgaaaaattgttcttaagaataaaatctgaggncangttattgcaannntgattggaaaatttgagctttggtgatataatat

SEQ ID NO: 134272 - DNA, 402 bp, Glycine max
agcttgcttaagaagagtcctaaagaagctagagcttatctacacatacctgtctaatagctaagctcacctccttgagatgagaagctagagcttagctacacaccccctataatagctaagctcacccccatgacaaaaaacatgaaaataaaaaaaaaagtccttattacaaagacaactcaaaatgccccgaaatacaaggctaaaaccttatactactagaatggccaaaatacaaggccttgacgaaggaaaaacctattctaatatttacaaagataagcgggctcatacttagcccatgggctcgaaatctaccctaaggctcatgagaaccctagggcctttccttggatctctagcccaatctacttggagtcttctaaccaatgcccttac

SEQ ID NO: 134273 - DNA, 193 bp, Glycine max
  unsure (1)..(193): unsure at all n locations
ttcctctcaatttgatcttcgactctctcatgaagcctattcacatattccgcctctgcttgaccttctttatgcttacaaatagacacattaggngcttcccctaagatccacatgcattaattggataaaaccctcacccacttcaaaaggagaactattagtagtgcctttactactccctctgctacga

SEQ ID NO: 134274 - DNA, 283 bp, Glycine max
  unsure (1)..(283): unsure at all n locations
tcaggctgctcaattgctccaggntgctgcatgggagggcaaaggtctgcatggtggtcagcagaggagcacaaaccacaaactcttgcgacaggtacagatttctgattcaaggccagctgggttaccaagttgaccaacgcatccagtttgccttcaagcttcttagtttcagatcatgcagatgggtttgtagctacctcatgcactcctctaatgactatggcatcatttctggcgcttaactgctgggaagtggaggccatcttctcaataaatttct

SEQ ID NO: 134275 - DNA, 319 bp, Glycine max
agtctcaccctttgagatttctatatttatgttatccaaggagaggtctttccgagttcttcattctctaggaaattctttatgcattcttatggagatctcttttctttgttcaagctcttcaggtttgatgtcatcttcaagagcagaatccttttcctgaaaacctgcatcttcttcttctaaagaattatcttgaacaatagagttagtttcatcacatactacatgaacagattcttcaacacttagagttatcttattgaatactctatatgctttactatgcaatggctaaccaagaaaaatagcctcatcg

SEQ ID NO: 134276 - DNA, 257 bp, Glycine max
  unsure (1)..(257): unsure at all n locations
gagcttncggcgctcaattctgaacgtctcgatatgtgatttgctggagatcgacattcgtgtgaagagctattaccatttgaatttctccagagcttctcgtgttcaattttgagcctctcgacatattatgcgcccgaatcggacatccgggtgagaagctatgaccatttgaatttcgtcagagcttttcgtgttgaattncgagcctctccacatatttatcgcccgaatcggacatccgtgtgaaaatttat

SEQ ID NO: 134277 - DNA, 381 bp, Glycine max
gctatataattgaacgctcgaattaaacatcggaaatctttctataaattctaatggccataacttttcacacggatgtccgattcgggcgcataatatgtcgagaggctcgaaattgaataacggaagctcttgagaaattcaaatggtcataacatttatctcaaatgtccaattttggcgcatcacatatagtgacacacgaaattgaacaacagaagctctcgttaaattcaaatggtcataacttttcacactgaggtccgattcagggttataatatatcgatacgcacgaaatttaacatcgaaaactctcgagaaattcaaatgatcatgactctttacacggatgtccgattcggcgcataatatgtcgaga

SEQ ID NO: 134278 - DNA, 408 bp, Glycine max
acacgatcggaaaagtactagcgcgattgtggttttcatggtggaacacaaccttcacttggatgtcaaaaaattagtcgatagtcactctctcaacttgtgaggcagaatacatagcaactacttcatacatttgtcatgcagtctggcttaggaattagttaaaaaagttgggcatgtcacaagaatagccgaccaagatctatgttgatagtaagtcagccattgttcttgcaaagactccagtgatccatgatcgaagcaacatattgatacatgttaccactacgtaagggagtgcataacaagaaaggatgtacatgcagaatatgtgaagtctcaagaccaagtagctgacatcgtcaccaagctgctcgagtaagatgacttaatcaagtaagaagctac

SEQ ID NO: 134279 - DNA, 399 bp, Glycine max
  unsure (1)..(399): unsure at all n locations
tagatganagaagtagaagagagacattgcccaaatagttttgtgttcaacacaacctatgntaatgaaacactagattggacaattccttctttgtgcatgattggacactttaccagattacagaagattggaccaccaatatataagatgagagtactggaccacacgaccaaggttgtcctccaccctgcctctctcgtctatcatctaaaaataaaaaatctccaccttggttcaatgtcatttttgaattacaattaactcattntatttctatcaatctacattaaatagattcagacaatgtatgaacttgcttcctggaataggcttcatgaacatatcagccatattttccctcgtattaacttcttggactctgaacctcttctcata

SEQ ID NO: 134280 - DNA, 108 bp, Glycine max
  unsure (1)..(108): unsure at all n locations
tttgaagctcactaccagccttaagtgaaaaaccatgatatcaccatattcttaangaattttggagctttggaattgttttgggaataaatgtctgggggggggggg

SEQ ID NO: 134281 - DNA, 449 bp, Glycine max
  unsure (1)..(449): unsure at all n locations
tttgaaattttattatatatgtgcacggacgcattgtaatcgatgacacaaatatggtaatcgattaccagagagcaatgttgccagaaataactgcttgtaatcgattacactattatggtaatcgattaccagaggttattttatccagaaaatataaacaaatagctttctaggagataagaagttctgagttactatcaaaatactttttcatgagaaatatatctaaaaatacttgatgaataattctcaatcatgtaattcacatatcatattatgcacaaacattataacatgttaataatcaattttatcaaaacaatcaacataagtatgaagagtattgattgtattgatatatatgaacgaatatctcctgctaataagatgaaatcaatcaagaacatatactcatgatttcaaacaatcanaaaacaaacaaatac

SEQ ID NO: 134282 - DNA, 404 bp, Glycine max
  unsure (1)..(404): unsure at all n locations
gctgagcttacacacaccccctttttttctagctcacctncttgagaagagaagctcgagcttagctagacacccttataatagtttagctcagccccatgaccaaatgaatggaaatactaaaaaaagaccctactaccaagactactcaaaatgccctgatatacaaggctaaaaccctatactactggaatggcctaaatacaacgcccaaaagaaggaaaaaacctattctaatatctacaaagaatagtggattccaccatgaaccatgggctcaaaaatgtaccctaaggttaatgagaaccctagggcctgtcttagtagctctagcccaagcctcttggagttttctatcccataccacttgggggggaggattgcatataccctcaccttggaag

SEQ ID NO: 134283 - DNA, 303 bp, Glycine max
  unsure (1)..(303): unsure at all n locations
aagcacctgcagctgcgctgtgaatgcctgatgttgattattcatacccattctggcttagggtttttttgtgatgatgtttgagatgtttatatgctgaaattgctgatggaaaactgcttgagatgaattggttaattaacctatggttataaaaggaacatgttgtgttatgagtgggaaaaaagtgaatttttgagggctggaacgccaaatctggaattggtagtatntaaagggtagagtgagtaaatcttagcttgcaatgccatttatgacttatgagaaagcttggactgtgct

SEQ ID NO: 134284 - DNA, 240 bp, Glycine max
agaattcaacattcctagtctctactattatgttgacatcaagcaacatcacttttaacactaagaacatataggccacactatattttgcataacccggtaacaagtaattagaagtcttagagcctatttggttttcttagggcgggtagcattactatggctagacacgcccacactcctagatatttcatatgggggatcctattttgtaagaaacaagcggttaacacagcttct

SEQ ID NO: 134285 - DNA, 191 bp, Glycine max
ttgaaccgaaacaaaacgcaaacaacagcccacccaaacaccgaacggacaaacaaggaagacacgagtaccaacacaaacaccgggagacgccgaaaaccaccgtacaccacaggcagccccaggacaaagaagggccacagcgagaaccaacgacaaaacccaccgaccgagaaataaagaagccagac

SEQ ID NO: 134286 - DNA, 409 bp, Glycine max
  unsure (1)..(409): unsure at all n locations
agcttctcattngatccagtagaggttgttttacaacctatttcactcaagtcacacccaggaactctggcacaagagacttggtcattgccatcttgaaagaatgctaaacatgaaaaaaaggaaatatgctaaagaaaatttgaagaagtttcaaatggaggaatacaaatctgttagcacaccaatgaatcaaaatgacaagtttagcaaggaagaaggtgttgataacattgatgaaggatattataggagcttgattggatgtctaatgtatctcactacaacaaggccaaacattctatttgctcaaaagaacaaaactggaatttttggtgacaatcaagtagccattgctattgcaaacaattccatgtgtcatgggaagactaaacatttcaacatcaag

SEQ ID NO: 134287 - DNA, 265 bp, Glycine max
atcttcatctaattttaccttttcattgtgatgtttggtgctctgtttgtttgtttctttacaatatttgtgagatgagttatgtgcaaacccatgattaaaatgcttggattggtggctgtaatggatggctctaagcctatacctggttctttttatgaattgcatggcatgttgttccttatcccttattatacatgttttaacatgcgcacaccaactatttgatgaaatgtcacaatgactattctttgtgttattttga

SEQ ID NO: 134288 - DNA, 399 bp, Glycine max
  unsure (1)..(399): unsure at all n locations
agagccacctgcggcatgcaagcttcaagagaaaatatttgactttttcttccatatatccgttttgctagtttcaaatattaattagaatttcactttaaaaaaaagttcacagctaaaaaaaaattaagaaagtactaaatatttctccttcttacttgttaatccttgaaggcacattttcagatgacataatcaccactagtatgtttctcaaacataaagattcctgaaatataacataagagagaatactattaagtttctaagcctgttggttccaggtggaacaagtgagcacataattttcatagattctcaaacgattctacactcaaatcaaatccaacaactaaagtaggaccttttgaaanagagagaaaaatctttccatcacat

SEQ ID NO: 134289 - DNA, 382 bp, Glycine max
  unsure (1)..(382): unsure at all n locations
tctcattctcgactgatagtcctttgcaatctcagncgaagccgggggggacctggtgggcgatcattgatctgcatntgcgtgaccatgtccttgattgtgccgacgataatgtggtcgtcttgagggaggtctgtggcacacggagggccattgtataagatgtactctggctttgctttggtcataaatagctgagtctggaatgcgttcattaggaaacctaacccgatggcacttttatccatttgtgtagtaaaatctttgtattttccctaccatttgggtgtcggttacgtccttatccgatatgatgacactctacatggcttatgacgctccctcttgctatttgttttattgtagatcacctttgcttttt

SEQ ID NO: 134290 - DNA, 314 bp, Glycine max
  unsure (1)..(314): unsure at all n locations
tgtctcagcgtntatgcgagacggagaccaatatgctatctatcatcgccaagtaccaagaagagttaggtctagccgcggcccacgagcatacgatggcggacgaatatgcccaagtatacgcggaaaaagaggctagaggaagggtgatcgactctttacacccagaggcaaccatgtggatggatcgngttgctcttaccttgaacgggagtcaagaacttccccgattgttagccaaggccaaggcgatggcagacacctactccgcccccgaagagattcatgggcttctcggctattggcagcatatg

SEQ ID NO: 134291 - DNA, 266 bp, Glycine max
aactagttccgccccggagtacgacagtcaccgctttatgagcgctgtacaccagcagcgtttcgaagccatcaagggatggtcgtttctccgggagcgacgcgtccagctcatggacgacgagtatactgaattccaggaggaaatagggcgccggcggtgggcaccacctggtactcccatggtcaagtctgatccagatataggtcttgagttttacgccgatgcttggccaacagaagaaggcgggcgtgacatgagatcct

SEQ ID NO: 134292 - DNA, 254 bp, Glycine max
  unsure (1)..(254): unsure at all n locations
ntaatcgatcgtttataccgttatctcgcctaataaatttatatatcaatttcaaccgatcatttgtgttgtaatgtcgtttaatcaatgttaaaacaaaatctaaccgatcgntcacgctgtaacctcggttaagtcaacaaacgccaaataataataataaaataatcaaaatatcttgaaaaaaataataataaaataatccaaatatctttgaataaaataatcaaaaaaatcaatcggacgtttttctt

SEQ ID NO: 134293 - DNA, 389 bp, Glycine max
tgcaagcttgttctagtccaatgggatggcctgtctttatatgacactatacgggaaccattggatacactacgccagtcttacaaccttggggacaaggttgtgttggttgaggggggtgatgatagcaattcagatatccaagaacagaaagactactagagctacaaggaattggacaatagcaagttcaaaaggaataccatataacccacacgcttcaatgactgtgtttgaggttgttaagcaagcagtaaaatctattctgttatgcccactgcctattatcactatccctcccatctagttagttattataataaaagaaaatacatgctgttagcactacgagccacagattgttataattgttggtgcagaaatctttg

SEQ ID NO: 134294 - DNA, 387 bp, Glycine max
  unsure (1)..(387): unsure at all n locations
gaaanaaccaagagcaacaagatgcgtgtttctaagaccattatcttttctnttattttacanaaattattataggaatgggtataaaattataaatatgtctctcgtcccgttataattattgtgtaaaaaataaaaatctatctcaaaataattattattttaatttttcaatataacattaattatttttttttacttatctccattataatattaatggtgaattataacattatttataggtatattttgggattaaattacatagaaatcggtaatttttctctcctatttcttcattctttgttaaataattattattttatcatcatttaagtttttgtgcagaaaatattaaaagtgagtgattttaccactgttagt

SEQ ID NO: 134295 - DNA, 167 bp, Glycine max
tcggattacacttggatcttttttgatcaaagctggtcttgctaacctcggaaccctttttcattattttaaaactatttttcttctcaaactgtagtacatgacagaccttcatgtgtatccaacttttaacatcatattatgtctatagaaagaaaacactcctt

SEQ ID NO: 134296 - DNA, 326 bp, Glycine max
gcaagctacgaatcaaataagcatgcatggctattttatgttgtccagacggtcaaagagcacaattataattgtatctgaaaccaaggatactattctcttcactagtaacatgtggcctctgtgcataagatactatatatacatgtataggaagccctgagtttataaggataatgacacaactggttgatgtcttaaaacaaagagaaatttgtattggcaaaataaacttgaaattagtgttatcaatgacggatggtggaaggccaaaattttgccgtttaaacacaccattgcaccttatggcattgccatggcgggcc

SEQ ID NO: 134297 - DNA, 386 bp, Glycine max
  unsure (1)..(386): unsure at all n locations
tagtttacttctcagttcttcaaacttggctttcttcaatggntnttgtcggaaattatcaagattatcttctgatttgcagtagatgagctcgatttttcctttgtcaactttgtccctgataaaatgatacctagtatcaatgtgcttgttgttcccatgatctacagggttcttagcaagactgattgctgacttattatcaatcagtaaacaaattggttccttcttttgaatcttcatttcttttagcattttcctcaaccacagaccttgacatgctccaaggaaagctgctatatactcaacttcacaagtagataatgctactggatcttctttcttcgagctccaggagaatagagctccaccatacatgaacacat

SEQ ID NO: 134298 - DNA, 369 bp, Glycine max
agcttgctctacattcacattgatgttagtttgttgggaggagcgtacatgccattgttgctttaagagtaacgtcccactggtaaaactaactctccaaatgtttgccttcacaggaatggccccgaggaagcttgcctcatagaggtccaggaaggacaatgctgtcgaaggaactatttccgccccggagtacgacagtcaccgctttaggagcagtgtacaccagcagcgcttccaagccatcgagggattggcgttttccgggagcgacccgttcagctcagggacgacgagtatactgattttcatgaggaaatacggcgccggcggtgggcaccactggttactcctatggacaaatttgat

SEQ ID NO: 134299 - DNA, 366 bp, Glycine max
  unsure (1)..(366): unsure at all n locations
agtctactttctacaaactggtatangtgaaaatggaggcatatagttgtgttttcttcacattgtaagtctactttttgcaagccaatttaggtgaagctagggggtctatagcaagtgtttgtaaaacattgtaagtctactttatgcaaacctcatttagttgaagaagatctgaaatttcacatgtagcaaaattacattagcctagaatgaacattgatgcaggtaatacaatattgatgatgacaacctaatttggttgaaataatgcatcttttagcttcctcttattgtcgtcaacaaaaagatgcagagggacattnngtggtaatcaaattttgtaatttcggtaacctgcctcat

SEQ ID NO: 134300 - DNA, 399 bp, Glycine max
  unsure (1)..(399): unsure at all n locations
attcttcttgctaggatatgttttcttctgtnttacttaactataataacatatatataaatcacattgtttagcacgtgccgcgaaacttaatggacttgaatctctcctactgcatcgaactcactgctatccctgatttatctgggtgtccacgtctagaaaagattgatctacagaactgcattaatctaactaatattcatgactcaattggcagtttgagtacctcgcgtagtttaaaactgacgcgctcgtcaagccttatcaaccttcccattgatgtctcagggctaaaacaactagagagcctttctctatctggctgcacccagttaaaatcactacccgataacataggaatcctgacatccttgatagcacttcatgctgatggca

SEQ ID NO: 134301 - DNA, 365 bp, Glycine max
  unsure (1)..(365): unsure at all n locations
gagacatcttgcttgaagcgatataatnggtgttttaccanaattctttctatggaagacaagaggcccatttcttaggctttgttccagttatgcattgtaaacaaacttccaagcatcggttgacaacttctgtttgtccgtcagtttggggatgatatgtngaactaaacttaagttgtgtacctactgctttaaaaagggctttccagaagttgcttaaaaacaaaaggtcacaatctgaaacaatggaagacagaaatccatgtaatcttacaattttctgtagaaaaactgcggccacttcggtagcagtgaaaggatgtcctaatggtatgaagtgagcatacttagtgagtcggtca

SEQ ID NO: 134302 - DNA, 334 bp, Glycine max
  unsure (1)..(334): unsure at all n locations
ttggaccaagttccanaccagatgtttatcttccatgctgtatatatcatatatnngccctttggttggatctgagagaatctcatacgcttcgcatattcgctgaaagntctccgtagcaatatccttcattctggtaatagaagaaaacanaacgaatgaagaaattgcaaacgaaaatgaattaccgaattagcacagagacagggacagaagactacgtgaggagcttggtatttatcgggatgatagacttgcgcccattgacgatacgctctgcgaatntcttcatcggaagcttctggagacatgttcaagagtgcgtagagttctc

SEQ ID NO: 134303 - DNA, 430 bp, Glycine max
tgcggctgcagctacactaccagatggctttattattatatagtcccaattgatcgattatatattttactcgagaataattttgtgttaccacgaagaatttaatagcttcaaaaacgcactgtcatggtgccatgattaagcaattacacaaccaaaggggtcgtggtgagaaataagagctgctaaagaattgatcacatgtaccacatcagataacaatacacttaccatgatacaaatttgtccactcgtctatgattgctatggctgatacaagtacctattttttgaccacacattccaaatttgtaggagcaatacatgacaataagacaacaaattggtctttccacatcatcgcacatatatcttgttgctttctacaactgatctcattttggagaacattggcatcactcatgtcacg

SEQ ID NO: 134304 - DNA, 363 bp, Glycine max
  unsure (1)..(363): unsure at all n locations
aactaagcttgggagcaggaggctccattctgtgacagtgcagtattctccactcctaccattgntaactactctgattcaggtacagtcaatgtcttataagctggctggagcctcaaccaaaaaccatagtctccaattgcaaataacatagcgcaaggcctccatatccctctagttcagttatttctacttctacataataaagatattcaaactctaaattcaataatttggtttaagatgaagcanaattaaattagaaacatcttaacaattgccaccaatcattatggacttgaactatacctttagacaaaataacatttcagtcttcatgtagtgagatcttatgatatatca

SEQ ID NO: 134305 - DNA, 346 bp, Glycine max
  unsure (1)..(346): unsure at all n locations
gtctaaaagaaatgctcttgggtcatggctggaatacaactttgagaaagaaatatgtctgagcttagtcctaacaaattagagtcattaatcgtagttattattcaattgataccatcgttatgaacaacatattgttaagaacagcatactgttatgatgcaaaaatggcaatgctggtggttggctctaacttggtccacttggaagcttaggaacaacatagtgttctctaatgcaacctttactgctaccaaactggttgaagatgccataatcactctatggacgttgctcaggcactctgagaaacattntacttatccatttaatcaatgggtcaggt

SEQ ID NO: 134306 - DNA, 401 bp, Glycine max
agcttttcctctgatagctctggtatggttctctatcgcagacagaagcataagggattaatgccttcataccactatccgcgtgtcatgagtatgtctccatccacagactgtaatttcaaaatcccaactgtggagatgtgcggaaatgaatttctgaccacgtgtccaaatttcaatacaatccatgggttaaaaagtctaaaatcgtaattttattgtgacggttctgagtgtatgctggaaaagacaaagttcagtgcgagggataattctttcacttcaaacattatctgatgaatcccattggtggttgtatgtgagaataattatcaaaacttgtttttaaattacacaatgatccaaccgttaacgagttttatattattgtttactgacac

SEQ ID NO: 134307 - DNA, 469 bp, Glycine max
  unsure (1)..(469): unsure at all n locations
tatgggtatgattatcatgtcacatatctntngaatttccttttcttcagtacagtagcgaaggtgactggtttggtactttggttgccttgttaatgtgcttggtacgcgcctttttcattagggtcagataaagctttatgcatggtttagacattgaaaacattgaaacgcaatatttacgtactgaaatggatgtcacaaaatgttgggagaaatatttatgttccaatactgtatgagagacctatatgttaacggtaatgtgaatgtaatcttatttttttcttataatgtgaatgaacgaatattatcttaatggcctggaacgagaataataaaacaattatgaattattaatagtaataagtatgtataggtcgaatatttatttagaaataactatatgatagatctgtatgcataaagtgaccaatttataggttattatattaaattaatgatattt

SEQ ID NO: 134308 - DNA, 384 bp, Glycine max
  unsure (1)..(384): unsure at all n locations
agctntntacatttattgacgaaatattgtattgttacactattcgccaacatacaaaagaccttgtttttgagtttagagtttgagcttcaattacattatccttagagcacctctggctaaagacttataggtggacatatgctctatttagaagtcaacattatgtcacacggatgtgatggatataatattatatcactataatattatgtggtcggtaaaaactcttaaagatgctatgacatggatgtaatggataatataagacagtataagacaacaagggagtttaccttcccatatgtgtatatattatacacatatcataaacgtcataatttgtgttaccactcttgcatgacaaacacaaaatattaaatt

SEQ ID NO: 134309 - DNA, 321 bp, Glycine max
  unsure (1)..(321): unsure at all n locations
aatagtctaaacttacttggatcgaggnttattactttangctacaacatagaacacaagaacatgattaattagagaaatatcctcatatgcatcaactcatttgttagaaagacccaacgctttttacctattggtggcaacttttacttacttgcatttactgtttttaccataaaattagtttatttctgtttttaaccatcaattatcaatgtttggttcaacaattaatgccttacttctgaataaaactttgtctaataagtaagttcccagagttcgatactcggatcactccgttttaatttaaatacttga

SEQ ID NO: 134310 - DNA, 348 bp, Glycine max
atgcaagcttgtacaaccaacattctgttctactataccgttgaaggatctaacctaaacgttaagaagattctatatattctatttagatagggaaactcagattatacacatggaatagagatattgcacaaaaattgttctatataacaaactttactatgaaggggttcaaaacaatctctagctctctaaacctagaatatatagctccttataaaggagacaactattatctgtctaaccaagaatagctacgacttaatacaaaaaacaattttatttacaatacaacctatgttaatgaaccaccagactggatgctaccctttatatgactagatgctc

SEQ ID NO: 134311 - DNA, 332 bp, Glycine max
  unsure (1)..(332): unsure at all n locations
ttgangagtgaccatggaagaaacaattatgacgatatgagcgaaagagganggtctcttacctatgaaatcagttcaaattcataagagagagctaacaacaaggtctcacactctctaattgtgggttgtcttggaaaataaacgagtgaaataagagttttctatgttgtggttcaggttggggtcaataaaactaagtgtatgactattcttcttctttctattcacaccctatcacttcctaagatcaaccactatgttctcatctcttaacgtcaacacacctcagcccaacactntaaaactactatcacacctaagataaattt

SEQ ID NO: 134312 - DNA, 447 bp, Glycine max
  unsure (1)..(447): unsure at all n locations
gcctgcttagcacattatttcttattggaagacaactatcatgagcaagcacgctatacgtgcatcctatggcttaatgcatggtcacttaatccaactggacatgcacgctaagcacgagcattgcactaagtgtacaagggagttctgattggccaaccaagtggtgtatatatttaaagaaaatgaagattcaaaacttccttaacaacaaagaagacaatataaagcacggaaacacaagatgttgaggaaaacaagaatccattgttgaaggaaatatgtttcgagagctctggccaatccatttcactccattgctcttccattttcttccatttcattccatcntttatacattgaagnttctcatgacaatcagaaactataaccacccgttgttggagctatgtaaccaaacttctttgatgtatgattctaactatt

SEQ ID NO: 134313 - DNA, 380 bp, Glycine max
  unsure (1)..(380): unsure at all n locations
tcttctcttttacatacacaaccattataaatgggtccatattgtcctactatattcagtacttatagacacctctcacttttccttaccaacacatgcatccagacaccaggagtgagacacaaacaaaaagataatgaccactagttaaaattntagttttgttatgtagtttgattcctttatactatntatgctatgtgtttaacaaatttacgccccctaattttgaacaattgtgccgaaatcattattaacaaccctagagcttgttaatcttttcatgaaagttttagtgtttattcaaggtataagcataattgattaaatatggaatagtatgtgtctagttaaagggatgactaaataagtaattaaat

SEQ ID NO: 134314 - DNA, 448 bp, Glycine max
  unsure (1)..(448): unsure at all n locations
cttaattttattnntttccttaaccctctaatttttggtgaattttatctcatcaaattaaattgacatattttacatccaactntaaaaaacttgtgagatttatccctagttaattatccattaaaagcttgtcaaaaaaaagttaggagtaaatctcaccacaataaataaaaaaaaatgggtgtaaaaaaatgaggagtttagaataaaaagtgcaattatgttagaagtaaaaagacaagggataaaattggcatatttcttaaaattcatgggtaaaattctttcaattaacttgttagagataanaattacctaacattgaaaatttgagataanaagtacaattaagcccttatcgaaagatnaaaatgttttggtctcatgtatatctcattttctatttacgatatatatcataattcatattgtgttcattttcatt

SEQ ID NO: 134315 - DNA, 349 bp, Glycine max
  unsure (1)..(349): unsure at all n locations
cggtccttttaataaaaaccaatnntgaatgttttgtgcattgttatttntattcttcttttttttaaaacaatgactgtaattataagactattcttctaatttcattaaagagaaggcggaatacatagtctaactttgtatatagagcactttgggaaccttattttgtctcttctcatgcataaccgataaatttaaagcaataaacatttgctgacgagaagagaaagataaaagaatgaaaggaacatacacataggaaaaaaggtaatatgacgtttattactgcgaattacgaaactataatgtaggataaattnnatcaactaatttcttaaatattgtg

SEQ ID NO: 134316 - DNA, 220 bp, Glycine max
aaagaggggagaagtattttggttcctaccattacatttaattgtaagcgctatatttatttcttaagaacttgctgtctcttaagcccttttataccctcggaaactaaatctattggctatagtgatagttcgctgtatttgaggaaatatactataccacgtcctcttgaattgctgtaccaatttataactagatgctcagatatcacatcttttt

SEQ ID NO: 134317 - DNA, 435 bp, Glycine max
  unsure (1)..(435): unsure at all n locations
ctgcagctttctctttcttgataataatgatatttgttttaatccttgaatttgggttgttattatgacatttgaatacttactatttgttttaatacttgcatagtatgactgaacatgatgatttacttgctcttggttgtatatgggtatgagttttaaacttaattattttaatgatatatgattagtaatatttacttttatttggttattatgaatgacactctatgaagtattatatttctagtgtgatgaatggttatgatatcttgtttgattgttttctattctctcgcattctggcaatattattatgatatttgaacaatntactatctccttatttgcatggtatgtttgaacaaatatcaagtatgttatttgactatgtggatttatagataatctattcatgantattgcnttcatggt

SEQ ID NO: 134318 - DNA, 449 bp, Glycine max
  unsure (1)..(449): unsure at all n locations
tctaatcttaaaattcttacgaaaataaatgtgtttgacaataaatgtgtggaaatgtggccaagatattgaactctcacacaacactcattttcgcaaatcaaatccatatttgaggccattaactagtttatttcgttcaaaaatcaaatacgggaggtaataagtggcatggaaattttataaaaaaaattatgatcttatagtataaatatttttacacattcattcaactacaacttattatacaccataagtttattaacttttaaaataattattttaaagtaattcaaatagtgttcaataactattataatagtataaaactgttntacataataaatccataaacattaattttataatttactatagtccacacgataaacagtngtggttgcctataatagaaactagtttgttttgaagatcatggtagaagaatg

SEQ ID NO: 134319 - DNA, 279 bp, Glycine max
  unsure (1)..(279): unsure at all n locations
acgatgagattcanaactcaccttggcacactgttgggaattgtcgggaaaaaaaacgatatgggaagagaataagaggaaatgggatgccaaggagagatggtaatgggttttgtcaagagttgacatacagagagatagtaaaaatgcttctctatgaagttntaaaagaaatataacttaagattttttttttcacccattggatcaattttaaggaaaagaatgcgctggttatctttagatagatataatgacacgacaagttaagtattgaac

SEQ ID NO: 134320 - DNA, 268 bp, Glycine max
  unsure (1)..(268): unsure at all n locations
ttaaatcattcggaccaggattttttatacatccatgttcccacatattcttttcaaattntctccacctcaaatataatagtaaaaatatagtaattttcataaaatataacttttggggttaaataaaatacgagttaaatttattcttttcaaataaaaaatcaaaattacatctaattattaaataagtggaaaaagatatatatgaggcaagatactaaatatcatcatatcataaactgaaatgtaatgttcctcgcacttg

SEQ ID NO: 134321 - DNA, 311 bp, Glycine max
ttgttgaagaaaatcaatgaaccaaaatatgtaggctctcattattcttgatattgcagattataggatacagctttattgttgtacgccataacgccacttgttggttcatccgtagaagaggaggtactaattttcttagattttctcagagaaaaaccactattattccaatttggattaatctggtttccaaggtagaaagccagtgatttataactttatttccagaaccattttcctttttataatcagacaagctattgttgtaatagtttgttcgcaatgttctgcaaaaatcttatgacata

SEQ ID NO: 134322 - DNA, 368 bp, Glycine max
  unsure (1)..(368): unsure at all n locations
acacataaatactcagcttaaccaacctagatgactatttttgngaaaatgtatttcaggtcgcaagaaagaacaaagaagncaatatattaagcataatacctcacataattttaaagatataaaaaaggccgctactgtgttagaagtagtaaacaacactcagtgtatcacataaaaatgatgtcatacatagctatatattattctttcagtaacagacccttgtgatgcaggtcagaaattagtctgaatttacggttttaagcatagagaaattatggaaatatccctacaccctaaaccatctatgggatatagaggttgtctgagaggagagaaatcctattcgatcacaattcaatcat

SEQ ID NO: 134323 - DNA, 253 bp, Glycine max
gggcgacggcgcacaacatgttttccacatccacaaagcgcgcataaaaccaccattccgtgatgcccacctccaactgagaaacatgctcccacgtatcccatatatcttgttgtctcaacaccgggtgctcatcaatacctccaagcttccacaacatccgagcaaaattacattccaacagcacaagctatcacaggcattcaaaacagagcaaatgcggataactctgtcaagacgccagccaaattac

SEQ ID NO: 134324 - DNA, 268 bp, Glycine max
  unsure (1)..(268): unsure at all n locations
acactatttgaggtgggccgtgtctgtatggncttagatttctcacggtccacttggatcccatttctaccaactacaaagacctaagacaactatattatctacacaaaaggaacacttttctatatttgcatagagggtgtctttcctaatgatcgaaagaacttgcctgagatgtcctaaatgataatctatgctcctactgtacactaaaggatcatcaaaagagacaactacaaatatacctatgaaatcccttcatacatga

SEQ ID NO: 134325 - DNA, 319 bp, Glycine max
gcccctactttcgatgggccactcccaccttataaagactatcccgggcaatacgatggggaaggagatacccatcttgggcccctgctccacctcaaagatcctgtcccacatgaactaccccaaccgaacattgtccggcatatgccggcctcacccacaccacgtaaagaacctgttccctttgcggaagataaaggatagattgatgcgcattgaaagagggtaaaagcatactatggcctttgcaattacccattctccgagttggccgatatatgtcttgtgccaacatcgtcatcccttcccaagtcacagt

SEQ ID NO: 134326 - DNA, 423 bp, Glycine max
agcttgctaacccatggaagttcctaatatctcccacactatttggggcgggccattcttggatggccttgattttctcatggtccacttggatcccatttctaccaactacaaaacctaagaaaactatattatctacacaaaatgtacacttctctatatttgcatagagggtgtctttcctaaggattgaaagaacttgcctgagatgtcctaagtgatcatctaggctcctactgtacactaaaatatcatcaaaataaacaactacgaatatacctatgaaatcccttaagacatgatgcataagcctcataaaggtgcttggtgcattagtgagcaccataggcatcactagccattcatacaaaccaaacttggtcttgaaagcaggatacactcataccctttctcatcttgatt

SEQ ID NO: 134327 - DNA, 410 bp, Glycine max
tatccttatggcctgactacggacttcaccctccgtgcttacccggaagatgtaaacccagcccctactttcgaggggccactcccaccttataaagactatcccgggcaaaacgatggggaaggagatacccatcttgggcccctgctccaccataaagatccgttcccacatgaactaccccaacccaacatagtacggcatattccggcctcacccacacccgtaaaagaacctgttccctttgcggaagataaaggaaagattgatgcgcttgaagagaggttaagagcaatcgagggccttgcaattacccattctcagatatggcggattatgtcttgtgctcacatcgtcatcctcccaggtcaagtttatatttgatagtcaaaggcgacatgtcaaatgca

SEQ ID NO: 134328 - DNA, 343 bp, Glycine max
  unsure (1)..(343): unsure at all n locations
tggccgctacctattctatgaacggaagcatgcgcgacacttgtcgcaaccttgatgaatgagagcattgtgagacaccactcacagtgcaacttctctccattttcttccttcagtctcgcgctcccccctctctcattctctcgctcttttttngcctccatagaagcattctctccaatattctactccaggtcatcttgcgggcgaagctccttcttccatggctcttttcctagtggagggcgccgccattacctcttctcctttgacatccgatgcatctccgtggacgagaatctacactacaggaccccatntnacctcatagatccaccctcat

SEQ ID NO: 134329 - DNA, 329 bp, Glycine max
tccctctaaaagctcaggacacctctttgagaagacttcctgagaagctagagcttatctacacacacctctctaatatctaagctcacctctttgagatgagaagctagagcctaactacacaccccctataatatctaagctcacccccatgacaaaatacatgagaatactaaaaaggccctactacaaagactactctaaacgccctgaaatacaaggctaaaccctatactactagaatggtcaaaacaacggccaagaagaaaaaacctatctaatattacaagaaaagggacccaccttggcccagggcgtcaaaatatcca

SEQ ID NO: 134330 - DNA, 377 bp, Glycine max
  unsure (1)..(377): unsure at all n locations
agcttggacatacaatcaatatatttattgttgatgagattgcgcacgccgacatcatgagggttgatgttttttttttggttaagaattgaactttgatctattaagnttataacgactcgcacattgcccaaccgagttagacatctttgatgggtaatgaccaccaacgaaaattgtttcttcataacaaatttctcactttaatatgatcttgtcgttttgctttcttttgttaagaaacgaattagggcctctactgaagatgcattgacgggttaccaaattataaatcgagcttagctttattctaattcagaaacttgagctgattgcataatgatcaaaatcttaatcaagtccgagttgaattttgc

SEQ ID NO: 134331 - DNA, 309 bp, Glycine max
  unsure (1)..(309): unsure at all n locations
cccnaannncnatttctaaaacaaatccaattattaaaatttatgccattaatgagntgaccatntattgatcaaagatttttctttgaattatccttattctttctagactctaggttaaaaatttaagagtttaaccatgctttggtatcttatgataacatctcattttctatcatttcaatagtctaaaaactctacctaatcacacaacaaagcaataacattgtctaccatacacacatataaaattgggatgttagagccgccaccgctgctaccttcatcgccattgccaccacaccccat

SEQ ID NO: 134332 - DNA, 312 bp, Glycine max
agcttgcgaccataatctcttggcgtgcatactatatccagtcaaagcagttaatagtgaaatgtaatgcggaggagccacatccaaaatcgttacagcaacataacaggtcacacagtggctattgtagtgaatacaacagctacattctttaactcctctttagttatttccaagactttgggaggagtataggtaggtaacaaattatgcatgcatctcccttattataaaaaagtagatttgttatggtttttataatccaaagcttagctacgtgctaattcagaggggtttatataacataaaagc

SEQ ID NO: 134333 - DNA, 291 bp, Glycine max
  unsure (1)..(291): unsure at all n locations
cattgcgaagtataccactttttgtttctttanacgcttgtcatcaaataattatgtttatcttgtgattgatgcagatgacattgtgattataggtgaagattaagaggacatcaaggctctcaaacaatatctattttagcacttccaaactgagttaggtcctctgcattgttatcttgggcttgagataactcaatcaagctcaggaattgctatctctcaaaggaagtatgctctcaacatcttggaggagatattcctcatagatttcattattgcaagttggag

SEQ ID NO: 134334 - DNA, 289 bp, Glycine max
tgttgagaaagcaccttcttatttgaataatcttgcgaattacaatgaactctctatgtcactatgaaagatcgtttgtggttgtgattttgataattgctgaaacggtggaaggaaatggaatcggagccacaccttgagaagatgcaactccgccaaaacttgcgcactatctggcacatagatctctggagtaccattcaatcttacactccttataagtagtaacttataacttccgaccacatactcaatgaagaggaagacatttctattaactaaatataga

SEQ ID NO: 134335 - DNA, 415 bp, Glycine max
  unsure (1)..(415): unsure at all n locations
cttctatgatgccttggaagccttaacctgtttggttacaatgcanaagtatgctcttattgttaaagggactactcaaaataatgccactgtctatgcttttggtgagtgcgcgaaagatcttacaaaaccagattgtgatgtgtgctttgcacagtacaagacacgtgtccttaagtgctctcaatttcagagaggcattaacggtggcatgtttttctttgatgggtgctttcttagttatgatggctacaacctcttcaatgagagtttagccctcacgacttgactgtttgtggaaccgaagaattttgtgggaattggagtgtgtataaggccaatactgtggagttggtgagaaatttgagcattgaagcaccaaagaatgaatggttctttgtggggtatgtgagtc

SEQ ID NO: 134336 - DNA, 433 bp, Glycine max
cttgcgttgcggcatagttagattcttgtgaaagagtctacccctttcttttcttccttgtagatcgtgatggcggcgcagctaatccgtgaacgagttaagatggagtgcctagagggagcttgggagaccctcgaaggcaacacgaggtgccgatttcggggcaccattcgattcacggctacttctttggtgcatgcagatgaacctgcacggacgcttcagcgcacggtggagtggacagcctttctggattagttttgtatacttttgagggtgggtgtatctaggactgactgttaggtttactcttttgtttttgtatgggtagacctgatgtataggaatttgatgatggtatacatgtggctgaagccaccactatgaacacctttgctctggatgacactatgtattgtgtaaaactcccata

SEQ ID NO: 134337 - DNA, 461 bp, Glycine max
  unsure (1)..(461): unsure at all n locations
nntgatttcctttttccagaaacctttcttttctcatgttcacccaaacccaatctccgggttcgaagacaactttctttctccctttgttggcttgtttggcataacttttatttttcctctcaatttgatctttgactctctcatgaagcttcttcacatagtccgcctctgcttgaccttctttatgcttaaaaatagaaacattaggcatagccaaaagatcaagaggagttagtgggttaaaaccataaacaacttcaaaaggagaactattagtagtgctatgaacaactctattgtaagaaaactcaacatggtgtaaacaagctttccaagttttaagtcttcctcaaactgtctaagcaagttccaatgtctataacaactttgttgccatcgtttgggggacagtggtgaaaaaatttatgccaactgcccaagtctcaaatggtagacta

SEQ ID NO: 134338 - DNA, 380 bp, Glycine max
agcttccttaagaagatagcgagagaagctagagcttagctacacatacctctctaatagctaagctcacctccttgagatgagaagctagagcttagctacacaccccctataataactaagctcacccccatgatgaaaaacatgaaaatgacagagaaagtccttattacatagaatactcaatatgccccgaaatacaaggctaaaaccctatactactagaatcaccaaaatacaaggcctagacgaaggaaaaacctattataatatttacaaagataagcgggctcatacttagcccatgggctcgaaatctaccctaaggctcatgagaaccctaaggcctttccttggatctctagcccaatctacttgga

SEQ ID NO: 134339 - DNA, 390 bp, Glycine max
  unsure (1)..(390): unsure at all n locations
tctcaaagaagtgagtttaactattttaggggtgngtgttgataaactctaacttctcaacaaagcttctcaaggaagtttctcaaagaaactttcatttagttagtagcctagaaacatttgtaacacttggcataactttgatgaatatgaaatctcttggtggtgaagctcttccttccatggcttattccctagtggatgacgcctcatctcacctgttctcctttatcttctgttgcatctccatgtttgaaaatcaccattgaagcacctcattgaagctcaaagatccaacctctatagaagtttgtcaagaaagcttccatcaagtgataatcanagcataagagcttcacgtacaccctccttaatattcatttaatttca

SEQ ID NO: 134340 - DNA, 381 bp, Glycine max
agcttatgtggagatgacctatagaatttctattttgagagtagaccaaatggagtgtgaacttgatacaagcccaaataagcctgttattttctaagtgtatctgaggagagccaaaataagggggattagtgggaaaagtgtgataacaaaatatcggtatgagttgagagaggagggaggaggtggtttacgatccttgggagagtttatgcctctcaaagtgcctaaagagagatgctcttattgttgccttccttgtttatttataatgtaaacagtactatatcttaggatctggtccttaattccagacctgaatatgtaaataataaaaatactctcagcctttatttctatctttacttgatacctatcaaa

SEQ ID NO: 134341 - DNA, 378 bp, Glycine max
  unsure (1)..(378): unsure at all n locations
ttcaatgttcttaagcaaaagctatctaatgcccccattcttgtgttgccaaactttcaaaaatattctgaaattgagtgtgatgcttcaaatgttgggaatggggctgtgttgttgcaagaaggccatccaattgcttattttagtgaaaagttaagtggtccttcctttaactattcaacttatgataaggagttgtatgccttagtacgggctttgaaaacatggcagcactacctttatcccaagggaattgtcattcatagtgaccatgagtccctcaaatatatcaaggggcaatgcangcttaacaaaaggcatgcaatagtggtggaaattctagagcaattcccttatgttatctaacattaaaaggga

SEQ ID NO: 134342 - DNA, 361 bp, Glycine max
  unsure (1)..(361): unsure at all n locations
agcttgcgtcacactttcaatagacgaagttgaatacatagctgcaagaagctgttgtgctcaaagtctctggatgaggcaccactgatgtaacctccattgaagcttgtaggcctaggatcttcttcataaatggattcctttgcttcttagaagatgaatggccgcggactggacaaaggaatagagagaggacacgccacttcacggagaagatgagtctataagaagctcaccaccataagacgccatggataacagctnggaggaagaaggacatgaatgaagggagagggagagaagagcacaanattntgtgctctaaatgagctttgagatctgaagttaatattcaaatgat

SEQ ID NO: 134343 - DNA, 400 bp, Glycine max
  unsure (1)..(400): unsure at all n locations
cttgagggtgcgtagcccaccatcttttcatagtagagtatttataatgtgtctaccatcacgattatcgtctccctttccatcattgggggtaccacctgggccgccagatccctccaccttttgggcgtgttctttgaaagatccggccccctttttgcacatgttctgtagttgcatcctatccgaaaccatatcaaaattgtactgatactgcctaacaaaggcaaccattangtccttccaagaatggactcgggaaggttccaagttagtgtaccaggtaacaactaccccagtaagactntcttggaaggaatgtatcagcaattcctcatcttttgcgtattcccccatcttctgacaatacatctttagatgggtcttgggacaagtagtc

SEQ ID NO: 134344 - DNA, 412 bp, Glycine max
  unsure (1)..(412): unsure at all n locations
acctataaaaactcagcttgactctgcttgtgcaagttgatttaatttcgncagatgattttgcataaanacggctacactcacaagcaatttttgatgttacgaaaaacggatatgatagtgtagaagagggctcagaggatgaactaaatggcttattacgctattgcaaggaagcacgctcattttggatcaagctcttaagattataaaggggagagtgtacaatcacatgtataggttgaataattctcacggtattgcgggaagaaaataataataagggagtgaaatagtcactcccataaaccaatgacaaagtttaagcgcattaaatactgatgcatgcaaccgtttcgtgtgatgagcccaaattcttgctcaaagacacatgcatattgctaaaaatatt

SEQ ID NO: 134345 - DNA, 282 bp, Glycine max
ttaacttcttctaatttggcggccacaacacttcactttgtttttttctttttcttttcatcagagagatttagtgaaacaatgacgtcttcaatggtggaaggtggacgcgacgaggggaaacacgaccctgtggatttgatcacggaaaccatgaatctgacggctcaatactttcacttccagtgaaactgaaacattcttgagcgcatctatttcccttaaggacaaggttcattttatttacttatgcgttacactgtaacagattatagatagatc

SEQ ID NO: 134346 - DNA, 271 bp, Glycine max
  unsure (1)..(271): unsure at all n locations
ctgcgttgaactattgatcattntatatattccctgttcctaccgcctttaagtatttatgtgtcaacttttatacttccagatgcgtatggcttatccacatcttctttcattaagtgaaagttaattgagaaagatttttgacaaactgtttgcttctaaagtagaaaaactagcctgtgttcagtagattctttaaaattccaaatatacaatgcccactcagccactctcatatgagaaaagcctaaagactggtatataaccctat

SEQ ID NO: 134347 - DNA, 440 bp, Glycine max
  unsure (1)..(440): unsure at all n locations
gctctattaatggaggtgttacttatatcttcagactgatcaacacatgcacagtgggcaaagatgcatgggagatcctgaaaaccactcatgaaggaacctccaaagagaagatgtccagattgcaactattggctacaaaattcgaaaatctgaaaatgaaggaggaagagtgtattcatgacttccacatgaacattcttgaaattgccaatgcttgcactgccttgggagagaggataacagatgaaaagctggtgagaaagatcctcagatccttgcctaagagatttgacatgaaagtcactgcaatagaggaggcccaagacatttgcaacatgagagtggatgaactcattggttcccttcanaccttgagctaggactctcggatggggccgataagaagagcaagaacttggcgtncgtgtccaatgatg

SEQ ID NO: 134348 - DNA, 377 bp, Glycine max
  unsure (1)..(377): unsure at all n locations
tggacttaccttggattaattcctttgattttcctttngagccttggtttcctttccttggtttgaagctcactacaagccttaaatgaacaaccatgatatcaccatatccttaaggaattttggagctttggaattgttttgggaataagtgtggggttttttttttgtttcattggataacttggtttgatggctatgcttcatgatgtattttgggccatacttgatgtacattgtatattggttaaatgttggacatgctgaatgaaatgttgtttctcaaaggctatagagtcaaaaaaaatcgaataagaaaaagaanagcaataaaggtgaataggatcttaaatggcacaagaatgatgaaactcttg

SEQ ID NO: 134349 - DNA, 410 bp, Glycine max
  unsure (1)..(410): unsure at all n locations
agcttctgttatcaattatgagcatctctttatgttacgggactcaatcggactttcgagtgaattgttattgtcattcgaatttgctacgcgcttcggttataaatttcgagcgtctcgatctattataggactcantcngtcttccgagtgaaaagttattgtccttccgaattgctaccaccttcggttttaaatttcgagcttctcaatatgttacgggactcaatcggacttccgagtgaaaagttattgtcgtgcgaatatgctacgagcgtcgcgtttaaatttcgagcgtctgtatatatgtcaggactcactcaaactttcgcgtgaaaagttattgctgtctaatattcaactacctcatgttttatatttcgagcgtcttgatactatacgggactcaa

SEQ ID NO: 134350 - DNA, 387 bp, Glycine max
  unsure (1)..(387): unsure at all n locations
tgtagcanattcgaacgacaataacatttcactcggaagttctattgagtcccgtaatatatcgagacgctcaaaatttaaaactgaagctcgcagcaaattctaacgacaataacttttcactcggaagtccgattgtgtcctgtaatatatcgagacgctccaaatttaaaaccaaagctcgtagcaaattcgaacgacaataacattttactcggaagtcccattgagtcccgtaatatatcgagacactcaaaatttaaaaccgaagctcgcagcaaattctaacgacaataacactttactctgaagttcgagtgagtcccgtaatatatcgacacgctcgaaatttaaaaccgaagctcgtagcanattccaacgacaata

SEQ ID NO: 134351 - DNA, 213 bp, Glycine max
cttgactacttcacacatggatcgatgatcatgcacaatggcttcttagtcaatgtacgttaagtgggaaggattattttgtatccttcttgatttctcaacattattggagaaaaatatgagtttgagtccctcctcgcagacatatgaagatctttgaatgtcgtttgcaatattatttttcatgatccgacactcattcaagagtattca

SEQ ID NO: 134352 - DNA, 451 bp, Glycine max
gcttaattagagctctcaatccactctggtatatgttgatatggagagcttcatcacaaccatgggtggaagtttgcctcaaaaaatctctaagtctttgccaagcttctccaagggattcatcatatgtttgctggaaggaagatataacatcctttcccttgttgatctttgatcttgggatgtactagtgcaataactgggctactacgtcatctcacctagacaagttgttgggaggaaagaattttatccacaagatggcttctctatctaaggaaaaaagaacaagcacaatgcctcatctaatacatgattcatcttcatggtgttgcatatgtcaatgaacgcacaaagataagtgagcgtatggattctcatgtttatgcctaccgaaaattgatatgtttggatgacgtggatgagtgctggtttcatctcaagagtccat

SEQ ID NO: 134353 - DNA, 362 bp, Glycine max
  unsure (1)..(362): unsure at all n locations
tgtaatcgattacacgcatactgtaatcgattaccagattcttatttcagaaaatattctcagcagtcacatctttttatttggttcttgaatggcttgcaaaggcctatatatatgtgacttgagacacgaatttgcaaagagcttttcaaaacaaaaaggtcttatcctcttaaaaagcaaaatcatttcatcctcttaaaaattccttggccaaaacacttgtgattcaataaggaattatttgagtgctcaaattgttcaatctatctctttcaagagagattacttcttctcttcttctttattctgaanaagaattaagagaccgagggtctcttggttgtaagaaatctgaacac

SEQ ID NO: 134354 - DNA, 294 bp, Glycine max
agctagtgacagagattatgatggggtgattaaaataaataacacgcaagttaatgaggtaattagcttatgcattcaaccactcaaaacatatataattccatatcatgcaagttaatgtgaataaaataaatagcatattggaagcaagtttcacaaaaagggaggaatcagaagactctatagtgttacaaactataatataagaaattgttgataaataaactgcgaggggagcaaagattcagaaaactgcttcacctgcagctggacatattactccttttactatta

SEQ ID NO: 134355 - DNA, 364 bp, Glycine max
gtattacggacacttaaaactaagcttggtcaacgttactgggattataacttgatgttgatgaggtggtcgccgcttttagagaaaatgagagaatgatgagaaccgaaaatgttgatgatgaacaccatgcactagttgtggtggagtctaagcgagggaggaatcattcaaggtgatatgatgggccaagaggaagatcaaaattgcaatcgcattcacaatgagatatgagtaacatgcaatgttactattgtggtgagaatgattatgttcaagcaaggtgcaaacaaatgaaggaggactaatttaagagatatgaacaaagatgataccaactcccacactaatgtagtaataagtg

SEQ ID NO: 134356 - DNA, 313 bp, Glycine max
  unsure (1)..(313): unsure at all n locations
agctttattacttattagatttaccatgttcttaggnganantagnggctgctatctttaatattatttatggttcggtaggctgggataaagccaccattttgttatactagagagctcttgaactccgattcccatatttattagcttaagagatttaagctctcaatagaaattacctgataataatatagtgtaccctcttcaaatgtgtgaagatttgaatcactaataactagcagtgcattataaaaaaaagcttaaaagaagaagggtggatgcctgcccccttaaattcgtccctggggtggag

SEQ ID NO: 134357 - DNA, 312 bp, Glycine max
  unsure (1)..(312): unsure at all n locations
tctgcttctanatatagtgaattaaagaaattaaatgattatctgaanaagaagatccagattatagaagagactctgagtctggctagtaagactagtgaaacttcctttgttgataaactaagggaagaagtagcatgttttaccaatgactttgggaatttcttggaaagttcaaagactttaaccactctnttgaaattccatcaacatccccatgacaagtctgacttgggctntgaaaagggaacaacatccttcaagtcacagtttgttccaaacaaatgtgacttatgttttaagtttggacac

SEQ ID NO: 134358 - DNA, 401 bp, Glycine max
  unsure (1)..(401): unsure at all n locations
tgcggcatgcaagcttgagaacgttagggaaccgttagattttccgcttttgttgccgaaacacacgtgagcccgcttagaggtaaggaatgagtttatcgcaattggggttagaatgaacatgtgtatgaatccttacggatcaaattgcggtttattttggaatgtttattgtattgaaattcttcctatatgattatgtgaaattgtttgaggggttttactcctcgtggattgagaaatttgtttgtgtttttgataggattaacgtgataaatagttatattgggatcatgaaatcatgattgaaattgtgtataagtgataaactaaatatgtgatgaatcgtgagataacatgctgctttganaatataatacttgtattgagatcgagtataa

SEQ ID NO: 134359 - DNA, 412 bp, Glycine max
  unsure (1)..(412): unsure at all n locations
aagaagatagcaatacctaatgtcaatntctttatttctgtcttgaggacaaggcaacttctcatgaaggtggtaccgataagaatctggatccaactacccagcagaccatgattcattaaatccagtggctactaaagcttggtctattactaaaatgtccctgagttagatgagagggggaacaggtctgtgtattctgttaaatagagatattaaagagtgagggggttagggaaaattcttccttaacagggatcaagggttgctctgactatttcagcacattatatctgtatctcttcctaattctctccactacaatatagtatctctttctaatttcattatgtgcacactctcactttanatcaggagtattcctattttctatcaatctctgcaacaaaag

SEQ ID NO: 134360 - DNA, 438 bp, Glycine max
  unsure (1)..(438): unsure at all n locations
gctctattaatggagatgtttgtattatttcagactgatcaacacttgcacagtggccaaagatgcatgggagatcctgaaaatcactcatgaaggaacctccaaagtgaagatgtccagattgcaactgttggccacaaaattcgaaaatctgaagatgaaggaggaagaatgcattcatgacttccacatgaacattcttgaaattgccaatgcttgcactgccttgggagagaagatgacagatgaaaagctggtgagaaagatcctcagatccttgcctaagagatttgacatganagtcactgcaatagaggaggcccaagacattngcaacatgagagtagatgaactcattggttccttcanacctttgagctaggactctcggatagggctgaaaagaagagtaaaatctggctttcatgtccaatgatg

SEQ ID NO: 134361 - DNA, 386 bp, Glycine max
  unsure (1)..(386): unsure at all n locations
cttaaaactcagcttcacaattcaatgtctaactttactcaatgcttgatttgngacataatatatcgatatgctagaaattgaacaacggatgccctcgggaaatttgaatggtcataacgtttcacaccgatgtccgattcggggacataatatatcgagatgcttcgaaatgaacagcggaagctgtccagaaattcgaatggtcctaacttttcacacagaagaccgattctgggacataatatatcgagacgctcgaaattgaacaacggaagctcttgacaaagtccaatggtcaaaacttttcacaggatgtccgattcgcagacataactcatctaaaccttcaaattgaacaacggaagcgatcgacaaaattgaat

SEQ ID NO: 134362 - DNA, 286 bp, Glycine max
taattttagatagtacgtttttgccactcataaagattgcatcatcaacctccacccaaagaatgaagagatctgctagagatgaaaaaatgttggaagaacaaaagatcaccgtatgctcacaatatcaagattgattacagggcctagaaaaggttccacctttgaagaacagaagttgattcaacccctgtagccaacaaatttatccattaaaataaaaacttgctaccccaaacgaacctgtggcaaaagtatcctgaatacattcctcttttgcaattga

SEQ ID NO: 134363 - DNA, 332 bp, Glycine max
aacaaaactttattaactacggttaaacagacacactaaggtcaccaaaaaaataaaacaaaaaaatagacacactctcacatactgacatacatcacttataatatatatactgaaaaaataattatatgagaaaacgctataatgatatctttcaagtgtataatataacgcttggctatcatttaaaactttacccaataataattaagagatttttttttaatccataggagcgaaagaagcggtggtactacacactcccacacctaaaatatattatcgtacgcaccattgatctaacaactctctgacaaaaaataaaagaagag

SEQ ID NO: 134364 - DNA, 411 bp, Glycine max
atcgagtgagtggacttatttatgcagcacacagaatagtttacactagaatcagaaggtgtggtcagaagagtattctatatgaaatatatatcgatacgagtcctcgaacaatagagtatcaacattgctaagaacagcatatcacgaacaaccatactatctatgcaattaaggcaaaacaccatactactaacatacccagaattataaggttgttataataagtatacaacgtacatataagaagcaagaatttaatagttaataaggatgtattaaagaatcacaaacttcaactactacagtcacgactacacacaagataaagtaagtagtcatgcgtgtacacgtcaagaaagacatactcatccaagacatatatatgggtgcaaacggtttcacaacact

SEQ ID NO: 134365 - DNA, 392 bp, Glycine max
  unsure (1)..(392): unsure at all n locations
gctcttgcattcttgtcacttcgnggaggggcatgtattggaaacatggngcatttgggagaaacatggtacccatctaagctagatcttgacgagtattcaaaccattctttgtcttgccttaaatgttaagaagcgtgccgatgacactatcacccacatttttctccacatgcataacatcaatacaatgtctgacatctagatcggaccaatatggaagatcaaaccatatcatttttgtcttccatatgcaaggtgtacttttttgtccttcttttgggtctttccaaatatagtattgatgtcctcaacctgctcaagaaccagctgaccagntaacgatatcagcacacttttatgctctngacttccattaaaacatttttcaa

SEQ ID NO: 134366 - DNA, 205 bp, Glycine max
caaactggttttgtttgccccttgcccatatttcgtgcgtggtggccctttcttcccctgggaccggaagtatgtgcatttcttggtttctgcgcttttaaatcttttagattcattgaacgaaactttgttattaaaacacattgccctccttggtttttccgcggggtttttgcctaagcatgcaagcgtcccttataggggt

SEQ ID NO: 134367 - DNA, 376 bp, Glycine max
  unsure (1)..(376): unsure at all n locations
gctaagctccttcaactgcacaaggctcttaatatttgaagtgtatccttgnggatccttcacccgacgaagacactgacaaaaacttatcttctccttcttggataaagtatggcaagctgggggcaagtaaattttcttcccatcagaccttggatgcaactgtgatcgtatacccatatctgccagatcttgaccggtattcaagccatccttcgtcttgccttgaatgttaaggaagcgtccaatcacactgtcacaaacatttntcttcacatgcataacatcaatacaatgtctaacgtcaagatacaccagtacggaagataaagaaaatgacctcttcttcatatgcaacttgactttatcctctttt

SEQ ID NO: 134368 - DNA, 377 bp, Glycine max
cgtaccaccccggaagattcaatccatgcccctactttcgaggggcacctcccaccatatgacgactatcccgggcgagacaatgaggaacgagatacccatctgggtcccctgctccagctcttagatctgtccccccttgaactaccccaacctaacataatccggcatatgcggacttcacccacgctcgttaaagaatctgctcccttcgtggaacatatgggacagattgaggcgcttgaagagaggatgatagcatgccagggcctcgaacattacccatacttggatctcctgacttatgtctcgtacccatatagtcattcttccaagtcaaagcaccggtctttgttagtccaagggatacatggcga

SEQ ID NO: 134369 - DNA, 242 bp, Glycine max
ttacactaagttgacgagttccaggaggaactaagagaatacctgaattagagcgactgatttacagacagcatcatagatgtcgccattgtgaaagaattttacacgaacctctttggccccgaggataaatcacctatgcaggtgatggtgagaggtcatctggtgaaattgatgaagacacttctgattacctttctgaagaccccaatgattgtggaagatgcggaaaattttgcgct

SEQ ID NO: 134370 - DNA, 331 bp, Glycine max
  unsure (1)..(331): unsure at all n locations
agctttatacagagaactactgtgtctctatttaactagtcactgcacatatacaaaggataaagaaaatgatgtattagtgcacttcggagtagaatttaccagtgtgacttaaaaagttattacagggataagtgatatattatgttggagacatctaataatgaagtcataattaccatgtctcacttactattatatcttttttttctagataacacgggcagaatgattgccattcgcccttgacatcaangtttttttataaacattgaaataatacaatgcggatcaaaatttatgtgatggcattgactgtgtcactctaaga

SEQ ID NO: 134371 - DNA, 336 bp, Glycine max
gtcaagcacactagtaatcgattaccaaaacattgtatcgatacaacattttgaaatcaattggaacgttggaaattcatttgaaagctttttgaaaacccatttgctactggtaatcgattacaataatctggtaatcgataaccagagagtaaaaactctttggaaaaggttttgagaaaaaatcatgtgctactcagtttttgaaaaaactttttcatacttatcttgatggagtctcctctggattcttgaatcttgatcttgattcttggaacttgaatctttgaaactgattcttggatcttgaaatcgaattctcttgaaccttgaaat

SEQ ID NO: 134372 - DNA, 254 bp, Glycine max
ggaccaagcgcgaccgagagaggcaaattgatcatcctcctatgacgactgagacatctgcggcgaacgaatagggtgaaaaagagggagaaacccatgctgtgactgccatttctatgcgaccaactttcccacgcacccaacaatgtcgttggtgagccaagaacataccttctccttacccaccacccaggtatccacataagccatcccttaacaaccacaatgcctgtctaccgcactttcacagacga

SEQ ID NO: 134373 - DNA, 421 bp, Glycine max
  unsure (1)..(421): unsure at all n locations
cgtgcaagcttttcgagtcattctatgcactcattgtggtccacatcgtgtatcatgcatttttatcctcgttatgcatactttttataccccctgttgacgagcttaagccattttacttaagtcatttctcgtttaacttagaaataaaatcactttccatcgaacgtgtgaattgtattatccattcacttcgggtaaaatgaattccgaccgttcggtcgtgccgtaaccacgttggaaatcaaaaagagggaaaaaataatataataataaaaaaaaacatcctttatttaaataaagcggaaaatcaatcgaacgctttctctttgggatttctcattcttaatcgaatcgattaataactaangtgaaactaagggctaaattcactcgcctagtcnagctcgtccacaaaaat

SEQ ID NO: 134374 - DNA, 342 bp, Glycine max
  unsure (1)..(342): unsure at all n locations
tgcttgtggggcttcgatggaggctggatctttgacttattgaggtcctttaatggtgattttccaccatggagatgcagcggaagacaaaggagaagaggtgagaggaggcgccatccactatggaataagccatggaagaaggagcttcaccaccaagatgagccttggataagaagcttggaaggatgcttcaatggaggaaaagaaagagggagagaaagagagaaggggggggggggagcangaaattgaatgaataaatgacggagagaagtggaactttgaagtatgtctcacaagactctatttgatcaaagtaccacaagtgtacacattctt

SEQ ID NO: 134375 - DNA, 357 bp, Glycine max
agctagcatgccgttgacagtgttttttttctaatacgaatccgattcgtacttcttcttctttatataagatttcacttccccacactatataagagaaagctggtcaccccttttactttttttttctgcactaaagttaaaaagaaaaaattggaacgcatgtactctaaccggttttcgttacttgatttaaaccgaccttcaactttagtatttattagtgctggggattgtgaaatcattgcttatacttttagatttaggcaagggaatgaccatctatcattgacacacctaccatatagtttgtttttttcctaactattagacgggataccgatcttctgaaattct

SEQ ID NO: 134376 - DNA, 476 bp, Glycine max
  unsure (1)..(476): unsure at all n locations
actaagcttgtaaaacanataatttacatgtttaatttttattaattattataatttcacgaaaataaaaaaagaataagatgagtaattattttaaagttactctaactaagagtaatttgatcctcctcttttaaaaatatagatgcactaattagctagaaaaagaactttaccgttacagtaattttatgtaattcataagtatccaaatattgagatactatttgtctttaaaaaagtacttgtagatatttataattagataagattaatggattaatgtttttattgatttacattgcgcagtacgcacgcctgatgtagtatgtaaaattatcattagttttctagtcaatctagatnttaaaaaaatattaattcaatactcaacaaatntattatacatatgagtttggaactaaataaccatgtaatggtanntaatactcttacatctcttgtgggtacatcgt

SEQ ID NO: 134377 - DNA, 454 bp, Glycine max
  unsure (1)..(454): unsure at all n locations
acaaactattgagaacaaaatatgcaaatggtgagagtgctatatgcgctgctattgcatgaaacattatccattagcaaagaaganatnnngactaaggaagccaactatcagactaactaaagcaaccgcaaagtaaaggcaggaaccactatatgcagggaagaaatggaccatacctgcacaggtggaaaactaacttttccaatatgatcttccccagcgaaaccaaagatgccaacagcctgggtataagtcacacgctttccaacctcacacatgttcttgtagaaggaactggaaaggaaaactatcctcacaaaacagaagatttgcttttctataaataaataaaagaagagtaacacagtacaagagattgtgacatntctcatgtgacactttatgtcagaagtgaacagcaaccattgaacagaaaatgttactctaacat

SEQ ID NO: 134378 - DNA, 361 bp, Glycine max
gacctttaaactctgcttacatcaagggtaattcagctcaacatcgtgataggtcaagttgatggcgttatagatgccttatcatttccaatcagtctcttttgcaacggtcactcttttaagccatttgtaataaaggttagaaaccctaggccaaatgcccaaattggaacggatagaacttaacttgaaccaagacataatgggaataaaatagctatcatgttggaggtaataatcaagaaaaataatggcatctatgacatcatcagcacaaggacgaaggtagaagtgtcattcatgggctttaagaggaataatgaaaccaccaggagctatgcggttttcttgatcatcttaa

SEQ ID NO: 134379 - DNA, 419 bp, Glycine max
agctctatagaaggtgcgctcctaatctctctacttttgcatctcctctcaatgagctggtgaataagaatatggcgtttacctggggtgaaatacaagagcaagcctttgcttttctcaaagaaaagcttactaaggcacctgtactagctcttcctgacttttctaaaactcttgagctagaatgtgatgcctctggagtgagagttggagctgtattgatacaaagtgggcaccctattgcttattttattgaaaaacttcatagtgccaccctcaactaccctacctatgataaagagctttatgccttaataagtgccctccaaacttatgaacattaccttgtggatgtgtcattattttctcatatatcttaaccctatttgtcaccattttaattactgagtagccttaat

SEQ ID NO: 134380 - DNA, 406 bp, Glycine max
  unsure (1)..(406): unsure at all n locations
aacgtgcatttgtgtgcaatacacaattccttatacaccacaacttaatggtgtatcagaaaggcataataaaactttaatggatatggttaggagtatgttaatcaattaaactttacccgtatctttgtggatgtatgccttgaaaactgccatgtatttgttgaatagggttcctagtaaggcagttccaaagacatcttttgaactatggacaaataggacacctattgtaaggcacctgcatgtttggggttgccaggcaaaaataagaatttacaatccgaaagaaagaaaaatggatgcaagaacaatcagtggatatttcattggttatccagaanactcaaaggggtatatgttttattgtnctaatcatagtatgagaattgtcaaactggaaatg

SEQ ID NO: 134381 - DNA, 238 bp, Glycine max
ccagaattctgccgatggaagacaaaaaatccattatttatacttctgttcaatcaagcaccaggaataagcttcctagcatcggttaacaacttcatgtctgtccgtaagtcatgtggatgatatgttgaactgaacttaagctgtgtacctcgttgcttataaacgactttctctaagttgcttaaaaacatagggtcaccattgacacattggcagacagaaatccatgcaatct

SEQ ID NO: 134382 - DNA, 312 bp, Glycine max
attaccgtggccaaggagaagggattcttttctgatccagctttcataattcacgaacactgagatcattgacctatgcgtcgaatccacatggagctatttctggatcaataaatgatgattggttaaactaattaactaccttcctacgttactcaagcgagcaaagaaatcacaacttctatacattaatatacttgcaagacatccaaatggataaatgatttcaactaattccataccacacatcataacatgaaaattagtttctcctacgtaataaaacatcacaatatgatcatctatcaacta

SEQ ID NO: 134383 - DNA, 176 bp, Glycine max
cccctaattcctgctagtcagattaaaaacactttttgtatagttccatgtctctgaaaacattcggagctgaaaagggaaaaagtacaattactcaggctacttacacaggtgaagacaaaaattttttatactttctattcatttgtgaacttatcctgaaagtattcttgcta

SEQ ID NO: 134384 - DNA, 292 bp, Glycine max
agcttgcagactaagcgtttatcttcactttataagaatccttcagggtgttgcatgtgaacctcttcttctacatcaccattcacgaatgtgattttcacatccatgtgatgcagcataagatcaaaatgagcttctaatgccaaaattactcgaagagagtctttcttatatataggggaaaagggctctgtgtatcgatttgaggcgcccctaaataatgattgggttaatagtaataatttaaatcacccaaaccatgtgggaaattcctttctttgtctttccctct

SEQ ID NO: 134385 - DNA, 302 bp, Glycine max
  unsure (1)..(302): unsure at all n locations
cgcagaacctacattataaaaaccattttatagtatcttatgctttacgaatatgcaatttaagagcgatgttgccaccaaacgctttggaatccaacaggtcaatagctttagaggtgattgagatacactcaaatatgcttcttcctttaatgaacccnctttgttctccaaaaatgattctaggagctatggtggatagcctatcagccaagatttcaatgatgattttccattgtgaagtggccaaagcaatgggcctaaactattcaattctattaccttgagggaaattgggaatg

SEQ ID NO: 134386 - DNA, 336 bp, Glycine max
  unsure (1)..(336): unsure at all n locations
gaggtgctcaaacacaagtttgggctcacgtctctagatggccatgtcatacaaaggttntacagaatgcacgaatattcctctggcttagaacctgaagagaagccacttgttgatgcttatcatcatgaaggtggacaatgttatcagactctgaatcactcctgcttcactcaagaaactactttcaacatgatctgctcatggcaaatggacttttatgcaacatctgatcgcacagtctcttttctggagatattgctcttctctcgcttcttctttagttatcatgtagagcctcaaattagagaagtagacttatatattgatggtgca

SEQ ID NO: 134387 - DNA, 343 bp, Glycine max
  unsure (1)..(343): unsure at all n locations
tgatacatgaactcataacttatcaagctaagatatactcaatntgctaaagactcntttggccagtggactgacaattctcttgttattcgaactttctttacattaacatcttcaagccttatattgacttcaaagctttgatccattgagagatcctagctagttgttggctaatagttttgacacttgacacgaagtcgctattatgcacagagagagtggtgaccacaaattctttctgtagcatatcttcagagaagtacaatttgccaatgtgccctatcactcagagctaacattcatcgtatgaatcgaatgaaacgttaacaacattagacaa

SEQ ID NO: 134388 - DNA, 366 bp, Glycine max
  unsure (1)..(366): unsure at all n locations
tgtcattcttacctcaaagcanaacagagaagaaaattccaatcaaaaaaaaaaagagaaggaaaatgtccaatctaagagaaagcatataaaaaaagagagaaggataatttccaatcaaaggaaaaagagaggataggaaattcccaatcaaagagtgggagaaagcgaaaagaaaagaaagaaaattcccaaccaaagagtgggagaaaataanaggaaggaaagaaagctcctgatcaaggatcgaaagaaatcagaagatatgtgcagaaaggtctctggaccggacaatatctgaacaatacagaattgtcaccaaattaacaaaaggaaggaaaggaaaccacgacctgagagtggtct

SEQ ID NO: 134389 - DNA, 307 bp, Glycine max
  unsure (1)..(307): unsure at all n locations
tagcaggggagaaagaccattcttttgctagatggtgctaccattaagaggatatctggacattatgcctgattcctagtgcatcatgatttgtcgggagagatgagagatctagtccttgtggaaaggttaggatttgcattttttgtcaatattacttataagcattttcctcttgtttgtgctagctgcaaaactattaggcattcattngctaattgtaaatcctttattcacaatgtttttgagctcgtgggggaaaaaatagggaccttntaagaataatcccaagaagccggataacaat

SEQ ID NO: 134390 - DNA, 352 bp, Glycine max
  unsure (1)..(352): unsure at all n locations
tcttagtgtggtaagtgtcacttcttcatcccttggtggattccattcttggttttccttatggagcacctatggaagttcatgaaaaaactttgttttcagatttttgattcngtttgtgatttgctttgggttttacgtggtgatgttgtgatggacatgctcgtgtaatggaggaaagcccctccctcggacccgaagctcattcatttctttccattattcacaaagctctctttttggatctataaaagtaagggaagcttaatctttcttttaaatcctattgaagtacttaaaacacattagaaagaanggttgaataatgtgatggataaaacttagtcttttg

SEQ ID NO: 134391 - DNA, 413 bp, Glycine max
  unsure (1)..(413): unsure at all n locations
aaaaatagactgtaaacgggtactgatgctttattctctangaaaaaaggcatagattaatttcattgtattattgtgaaatgcaagtctctattagcaacaatttcaaactctagggtgagtttaattaggaagcaagtcaaccaagttgcccattcccttgctagggcatttaggtttcatgctagcagccatggttttgaccatatttccaatcgtattttttatgctattctgaacgaaatgcaataagtatatttttccacacaaaaaaaaaaaatctaatctcttaattgtacggataataatcaagctaaatcaattataaaaatagtaactagaanactaaatcaacaacgtaaataatgaanacatcataatgtaaataaggaagcaataatatcagaatgata

SEQ ID NO: 134392 - DNA, 127 bp, Glycine max
gttggttttgactaaacccattccgggttcataaccgttgcccaacataactcgggccatcattaccgctgcatcggacagacaagggtgtccaagagggagttcacggacgaaatgctgaccgcct

SEQ ID NO: 134393 - DNA, 430 bp, Glycine max
  unsure (1)..(430): unsure at all n locations
tgctatgtgctcgcgactggtccctctcttccttcgcaacttaagttcactgttgctaccccacaaagctccgcgaaatttggtacggccatactcttccttgcgagccctcttggtctcttggtcaagggctctcgcggtagttgcattctcttcccgtaatccggcacactccttccggatgtgtgtagcggccaacttgaacttctctttgacaagcttcgcctttcctaactcgcttttgagagcttggacttcttcgtcctcttccggtgcttcaaaactctcttcgccgatgactnttaacttggcgagccaatctaaacctcgtatatgaactntcagccattcatggtacccaccaatgatgccattacgaatgcccctaagttcttgatctttccttaatggggtttcccatgccttatgg

SEQ ID NO: 134394 - DNA, 462 bp, Glycine max
  unsure (1)..(462): unsure at all n locations
tctcgagttatcctccaaccagcgagtcaacttgtgtttatcttcgagtaactatagatctccattgagcatgccaggcttatcctcaataccattgccttgattctgcagtctaactctgaacctcttgtcgtcttgaagcttgtggaaattaattccatcagtgtcgacatccatgatctggtttggttcctctacattcaatcctactagaggtttctcctacgcaagcacaaggactccccaaccatagttgatgtctagccttccacctccgcctttgatggctacttattctctctctcaccgtttcatgtgaattcttcattntccttccatcctagcttttttcatgatggaatttgatgcgttattatgcactattaagcattgaggtggtcgtttggactaatgcattacttaattgctaaatcttggagttatttcttggtgttactttca

SEQ ID NO: 134395 - DNA, 435 bp, Glycine max
ctcaagtcaagaatcaagagtcaagcaagtttcaagaatcaaagagtcgttaagtcaagaatcaagattcaagtaaagaatcaagagaagactcaattaagataagtattaaaagagtttttcaaaatattgaatagcacaattttgatcaagagaatttttcaaaaagaagaatcttttaccaaagagttttactctctggtaatcgattaccagaaggcagtaatcgattaccagtagccaacattcttatcaaactgatttacaaagttgtaatcgattaccatgagcatgtaattgattaccaatattttaaaacgttagatttcaaatgtcaagagtcacaacttgtgataaaacatgttcaaatcatttcacacatgtgtaatcgattacacaatactctgtatcaattactagggttctaaacttctt

SEQ ID NO: 134396 - DNA, 468 bp, Glycine max
acacaagaaattaagctattactagcttgatgtagcactaaatggagctcattactaatttcagctctagaagcacttcgctagtttacctgacttttcctaattgaacagaattgaaattgctatcctcatatgttcgttaatcacacatgatctgtgaatttgtgacaggttcatacataacaactcatttagcagggaaataccagccggattaatatctaaaaaaatcatttttaagtaagcatgcttagcaatggaacaattttcttacatattggtaattatatgcaagtaattgctgtaaatgctcatcgatttgactaggaaatggaatcagtttgaacataatagaacaaggatattttcaactagtcttgttccaagagttaagtaacattcatatttaatttctgctctagctaggatgggattcctgaactatacagacgaaacaagaagcatttt

SEQ ID NO: 134397 - DNA, 416 bp, Glycine max
  unsure (1)..(416): unsure at all n locations
gtgttgaatgcccaaggaggcattttataggatgaatatgtagggggtgacttaaagcatatatgtatttttagattaaaatttatttctcttttcggtttacaattaattgccaacattattttattaagtttttattatttaacaaagggttgaattaaagacaataaagggaaataaaagcaaattggagtaatatgtaattttcatgaaaatttaatcgggtttatattatttatttatgatcgtattgaatgagaaaattgaattcttcattgaatatttaagatggtttgactcgatgggcaactatntattaagcataacatctgcgcaaacaaacgacccncttaagttctcttaatcactctataagacaccatgtcgtatcctatcagatatcagatagacatatt

SEQ ID NO: 134398 - DNA, 279 bp, Glycine max
aagatctaactaactcctaacagctttatcagcacgtgctttgatgggtaacaatcatgcatgcatgcgtgtgtaactcgtgaatgcgtgagttgactcgggagtgcatgcgtgagttaactcgggaatgcatgaatagctaactaacataatcctgtgaggatctaagcttagttatagcacgtgcggatctcgtgggcacaacataagcatcttcatgagtgttatcttcttcttcgtgaacctgagtgctaacaataccgacgacctcgaaaacca

SEQ ID NO: 134399 - DNA, 283 bp, Glycine max
atattatcagtttataggactatgatacattactagctccctgatgaactctcatttaatatgtaactatgtccttaaactactaaaatctggcagtagagtctgtttttcttcttccaaatttattaatgacggccttcgaacatgatgagtgacatcattacaattattcttttcttagaggtaaggatctttattatctcggaccttataactttcaattcaacataattgattgtgtgactagcgaatgccgcttccatttactattattcaccgtgtt

SEQ ID NO: 134400 - DNA, 437 bp, Glycine max
  unsure (1)..(437): unsure at all n locations
cacaattcanaatttgttatttcatgttggtaagctatcaaaagaagtggctaaactaccctttttggtcacaagggaagaaaactntgtagaggttgaagctcgtgaggaaaatcttgtagaagagcatgattcatgagaaaaagatgaagaacaaactaggagagaacaaaacaacaatgggagaaatgctcacaagtagaaaatcaacatgaaagtattattcaagtcaatacacctcctcatcaactgattgttaaggaagaaagatatgaagaatatgataaatctttaagtgtcattctcttcttgatcactagcatgtctcttgcaatgatatggaaggcgtttccgggatacatgagtttcatggagtctctagctaagaggtgaaaatgcaaggaagatgtgttctatgtgactttcatgccaccctg

SEQ ID NO: 134401 - DNA, 441 bp, Glycine max
  unsure (1)..(441): unsure at all n locations
tctacttatgtggcanggccggcttccctcactttcttgtctcaacgcgagctntgaccactgttcttccttcccgcgatgcttcttttcatgtccgcctgagtgggcttatagcctaaaccatacttcccacgatttccttgggtatttatcaggctagttatgccgccgttgtttttgcctaaacccatcccgggttcataaccgttccccaacataactcgggccatcattaccgctgcatcggacagacaaggttgcccaaagagggagtccacggaggaaatgctgaccacctcaaaagactggaaagcagtttctaacgattcttctgcggcttccacataaggcatggaggatgggcagcttaccaagatatcttcctcgcctgacacgatgaccaagtgccccttcacttacgaattcagcttttggtggagt

SEQ ID NO: 134402 - DNA, 476 bp, Glycine max
  unsure (1)..(476): unsure at all n locations
agcttggnntacctccttctntactacatcatgaatcaccgggttgagtcttctctgtggctgtcttactggtatagccccatcctctaaatttattcgatgcatacatgtggatgggctaataccaagaatgtctgccagggtccagcctatagccttcttatgcttcttgagaactgataacagcttctcctcttgctcatcagcaagggaggcatatataattactggaaaacttttgttatcatccaagtaagcatattttaaattcgatggcataagcttcaattctggtgtgggcggctggataatggtagaaagagatggtttctcagcctgtacctcataaagaaagtcagaggtatgtgtacttcctgaaacatggttagttctatctgactctataaaatcaatctcaagaggtaaaacatcaccggacatgtaatcaatatcaaattcagattcactctcagcat

SEQ ID NO: 134403 - DNA, 448 bp, Glycine max
  unsure (1)..(448): unsure at all n locations
tgctctanattacatngatgtttgggaggaggttgtatgctgtttttgttttaagaatagtgtcccactggtaaaactaactttccaaatgtttgccttcgcaggaatggccccgaggaagcttgcctcaaagaggtccacgaaggacaaggcggccgaaggaactagttccgctccggagtacgacagtcaccgctttaggagcgctgtacaccagcagcgcttcgaagccatcaagggatggtcgtttctccgggagcgacgcgtccagctcatggacgatgagtatactgatttttaggaggaaatagggcgccggcggtgggcaccactggttactcctatggccaagtttgatccagaaatagtccttgagtattatgccaatgcttggccaacagaggatggcgtgcgtgacatgatgtcctgcgttatgggtcaatggatc

SEQ ID NO: 134404 - DNA, 471 bp, Glycine max
agcttgaactgtgctagagagaagaacctatgatcaaagtgaacaaagagccatttctagggcaaaattgggtgtggaggagtcaaattttgattcggtggaattttacgtgtaaattcagttggagcaagtttagattgatgttatggacttgtgtgaggtgagactttgctccaaaattacctcattctaaatttcacttttcaaacctagaaaacccattgaattgaggggttttggacacctatattctgtgttgctgtgttttgaagcttgattttgggttacacatgattgatacatgatttgggacttgtaggaattgatttgggcaagattggatgagaggaagtgtgattctcgaaatctgcactctgtgcagattcttgctgagaaattgtgcagcaggattttgcacaagtgcagaacaatgttatgtatttgctggttgtggaaagagtaatgtagagt

SEQ ID NO: 134405 - DNA, 473 bp, Glycine max
  unsure (1)..(473): unsure at all n locations
tgaacgaatataagaaacatcttcttcaaccttggtgattctttactccatctcattgaagcacatgttcacttgtaattccaaagtgtcaaacctttctccaacaatggtttgaagaccgtcaaacctgtccaaaatctttgaaagaagagatgaatcttctccatcatgtccttcttcaccaacatgtcgagcaccttttttcactcaagagccatcatgctctatttgataaccaaaggatgcaatgactgaagcgcctattaggaaggatctcttgattggaacataaggttcagaatcaagagggatgttaaagtgttgaaggaagagagtgactatatgtggatatggcaatggagcattcaatcgcaattccttatgcatgcgatatctaacaagatgtgcccaatcaatntgaagaactntatgaaaggcccacataacaatgagatcttcttcagaaacctatg

SEQ ID NO: 134406 - DNA, 473 bp, Glycine max
  unsure (1)..(473): unsure at all n locations
agcttgagaaacaataattgaatgacatgtttaatccataaaccaatcaattntgattaatttaaccccctttgttttaaaaccgaaataaaataacccaatgaagacccttcggttatccatatctctcgtatgtatgtgccaaagattcttactacaattgatgaagtcttctggaatctcggtgggtcaatgacagatttatctataaactaatcaaaagaaaaataaatatattgcacgcttacataattgagataaatatattcctaatcaacccgctaatcaatggacacaacagctaaggatatgtgacttaattcacacacacacacacccatgagtttcattctattttcgttttcttgcaataaaaaaaatacttcttgattnttatttataaaatccaaatttaaaataatatttatttctttntatatgaattaatctataatnatttttacattaattac

SEQ ID NO: 134407 - DNA, 450 bp, Glycine max
  unsure (1)..(450): unsure at all n locations
tgaggcttagccctacaaacaacctacattatactctatgtttaagccttaataacatgctaactaaacaactaattacagagccactgcagcatcaaaagcagaaaatcacagcacaactaatatgtcttctaccctagggttcagaaaattaaaatgacaatggaataagagaacgtacttggattgtagagaaatttcgtgaaatggaagcaagaagcagagaaccaagggaagcacagtgcaatgatgccaatgattgcaaatgatgtgtgtgtgagaagttataatcttggtgaagtgtaactgcctaaggcagttatgttntatttttggaagtttgatctactcgctaagcacgagtgctctctaagcaagcactcagtgacgtttgaattnttaggatttaaactcacgtgcttagcgagactaactcatttagcccaattc

SEQ ID NO: 134408 - DNA, 376 bp, Glycine max
  unsure (1)..(376): unsure at all n locations
ctcctggcatgtgtcataagatgcttaactaaatcatttgctgaatttgtatccatcaacaacctcataagactgcaatttctcaagtttagttcttccattaaagcttccagccatagagcttgacaggctgccatagcaacagcaatatattctgcttcacatgttgacaaagcaactacactctgcttctttgagcaccaagagattggtgatgttccaaatttgaaaacatacccagcagtgcttntcctatcatccttatcaccacaccaatctgaatcactatacccaaacacttctccttttatattcttctggctgtaaggatataaaatgccaagatccaatgttctttttacataactcacaatcc

SEQ ID NO: 134409 - DNA, 299 bp, Glycine max
  unsure (1)..(299): unsure at all n locations
tattactggaactatgctagggttataaaaatgggaaaatttcataaataccaaacaatatcaatatcatgcggaagctcaaccattaactataccaatataccatacattttatataaggaaaaatcccgaataaatatgaataattntaaattggtaaaaaaatttactatttaaatttttattttattcttcccgggaatagttccaagtctatacataaaaccaaaaagattattttctagacaacacaggtgggaatatcccttcccctcgtccttcactctgtataaatagct

SEQ ID NO: 134410 - DNA, 360 bp, Glycine max
  unsure (1)..(360): unsure at all n locations
gaaacatcttctgtggttcttcaagaaggtgagaaattataagatctcagtgcaaatgagtctcattngactgctgaacctgatcctccacagcttaattctggagtcaatcagagaccaaaaagggtcactaaacctcctgaaagatatggttntgaagacatggctgcctatgcattacatgtagctgaagaaatagattcaaatgaactagccacttatcaagaagctatcaatcatcctgaagctgaaaattggttggtagctatgaaagaggaaatggaatctttatataagaatcaaactctgaaactctgtgaactacctaaaggaagacatgtggtatgttgcaagtggata

SEQ ID NO: 134411 - DNA, 235 bp, Glycine max
ctgataatgattaatctctgagacatgattaatatagatgggaatcctccactactgggacaattaatttgaacctttttttaaatgcaaagacgaaatcaccacctaacctctaggtatgtgcaaccttttagtcttcgattgtctatcactagtactttaactattttggtcgaaactcttatttctgagttatgctcactgctacccaaaggaggacttggctgacgtacaa

SEQ ID NO: 134412 - DNA, 399 bp, Glycine max
taggttacaagaaatataacaatcatttcaaacaagggccaaacaacacttctcatggcacgagtgtcaacatgcactttataaaataatcatattggggtcgtgcttgtttatgacacatacgtatttgcacacataaaaatttgtgtgaagcattttacgatacctatccatgtacatattttttgacaaaccttttcatgctacatcctatatatatacacacattttttggaaggcttcttttgttacctactcacaaatacacatattttgaaaaacacttttacgctacccatccaacactgtgtaaggcacttcatgctatatatattcatattatgcaaggcattctcatgctatatatattcatattttgcaaggcattttattcaactt

SEQ ID NO: 134413 - DNA, 478 bp, Glycine max
  unsure (1)..(478): unsure at all n locations
cggacctatgaaactaagctntatggtttncaagtttctatggagaattntagggattttattactgnggcagcacctcttactgagatttccaagaaaaatgtagcatttaaatgggggaaaaaacaagaacatgcattcactgcacctaaggaaaaattgatgcatgcaccaattcttgcattacctaattttgacaattcctttgaaattgagtgtgatgcatctggggttgggataggggctgttttaatgcaagaggtacatcccattgcctactttagtgaaaaactgaatggggctgtccttaattattccacatatgacaaggagttgtatgcgttggtaagggcattacaaaattggcagcattaccttctacccaaacaatttgtcatacatagtgaccatgaatccttgaagcatcttaagggtcaaggcaaattgagcaagagacatgccacgtgggtggagtttc

SEQ ID NO: 134414 - DNA, 427 bp, Glycine max
  unsure (1)..(427): unsure at all n locations
catatggatgatgttgctacttagcaaccttcttcccggtgaccaccactccaatctccccctaccaaagtgttagctagtttatgccatcatgacataggtaagtatgcacgtggctcaactggtctctgatgccatctactatntgcagggatcgcacccgcaagacacccagtggacctgaagaagtccaacagggccctgnggttctagctctgattatgggcctctgtcggttctatggagtgaccaccactccaatctccccctgccgaagtgtcagctgctttatgccatcatgacataggtaagtatgcatgtggctcaactggtttctgatgccatctactatntgtagggatcgtgcccacaagacacctagtggacccgaagaagttcaacagggtccttgggttctagttctgat

SEQ ID NO: 134415 - DNA, 386 bp, Glycine max
  unsure (1)..(386): unsure at all n locations
caagctttcaaatttaaagtaccaaagtacacaacataaactagtacctactgaataaaaattagtcatatccaactacacatcctaataacaaaataaaacaaaaaatgggtcttcacaacatgcgttcttgcattttgctctagccctctgtttatcattcttcttccacttgaactccctgcccatgaatatgttatactcccttaaggcagatttaaattcagccagagtaccaaactccatccttaatttcaacttctcttcaccaactcgactactttcattatattgaggataaactntgtcaacatcctcatcttcatcatcactactaatggngtttttgagctcctttgaatgataaccatctgtttcaaaatcaa

SEQ ID NO: 134416 - DNA, 386 bp, Glycine max
tcatgcatttgatcattgggaacttgttgtattatctgtacattggagcatatcagcctccctttgaatggtaaaattaagggtttcaatttcttgggaaaggactaagtttaaaacttagaaaatccttttgaaaaatcagtcttttcgctaagcgtctgcttctcggtaagtgcataatcgttcatgcgctaagccatgagtttcaagcacttagcgcacaaccctagcatttgaggctgattattgttgctaagctagccaaggttagctaagccaaaataaattcaagttgaattcagctaagcttcagcctgaatggtaagtgacagcttatctatggctaagcgggatctattatcgccaagcacaattccttatggcct

SEQ ID NO: 134417 - DNA, 270 bp, Glycine max
  unsure (1)..(270): unsure at all n locations
tgctatggaagacatngtngataagctggagcatatctttctttttttcttctaaaagcgtaagttagctcgctgagaagcattctcgtaaatgtacaacttagctactgacacctctctaatacctaagctcaccggcatgatatgagcatgtacagcacatcaccacaccccctatgatatctatgctccctccttgaaccagtcctgatagtcctctatgccgtatacaaaaactataaagcgccctgagccaccgggtagacctat

SEQ ID NO: 134418 - DNA, 474 bp, Glycine max
  unsure (1)..(474): unsure at all n locations
agcttcatgcttaactatgtatggaatttatttattattgttgntcaagacatacaagtgagcttgtaacanatcttctacactcggagtgatcacctgcagtcctcttgaatccttaccacccactctgtcatcatgccgagactcaggaagcccaacaggtttagccttctcaaagtattctgaacaaaattcaatggcttcttttgcaatgtacctctcaacaatagatgcttctggatgatatagattctttgtatacccttttaagatcttcatgtatcgctcaaccgggttcatccaccgtagataaacaggaccacaacatttgatttctctgaccagatgcacaatcaagtgaatcatgatgtcaaagaaagtaaggggaaaatacatctctaactggcatagtataattgcggcctcattttccaactcatcanacatgactggatcaatgactgtgctacatat

SEQ ID NO: 134419 - DNA, 400 bp, Glycine max
  unsure (1)..(400): unsure at all n locations
taacacacatccatatatacacaatacaagacttgatgagaaaacagcttgatgggacatcacaatgttgtcttctgaaacaaattaaacagaaaatagaagcaagcatgtatacacataatttaacaaatgtaacctatttgtttacttgtgtctattctgattgagtgtgtgaaaataatattggaaattggatagataattctttggttattggatcaaacgagggttgttatgattntagcaatggtatttgggaggaatgactttcgtgataagtgttactaatgactctttaattcatcagcggataatggatgtacgagtggngagataaatntttcttaagagagagaaatgttatacgtgtgtcaagaaaaccgatccgtatggattatct

SEQ ID NO: 134420 - DNA, 430 bp, Glycine max
  unsure (1)..(430): unsure at all n locations
ctgcattangcagtaccaatacaacacgaatatggcttctgatcggaaccagcttcagagcatgaccaagcaagaacatgagtctattaaagaatacgcccaaaggtggagagatctcgcagtccatgttgtcccgcccatgaccgagagggagatgatcacaattatggtagatacgttgcctacgttctactatgagaagctgataggatacatggcagctaaccttgcggacctcgtcttcaccggagaaagaatcgagtccggactgagaaaaggcaagtttgaatatgcctccaatgtggcccccaacaacaacagaagagccccagtggtgggcacgaggaanaaggaaggagatacccacgcggtcaccaccgccccaacatggatgaaagcgctcctaaatgtccaatactcataccagcac

SEQ ID NO: 134421 - DNA, 381 bp, Glycine max
  unsure (1)..(381): unsure at all n locations
gatcgctcagtggagggtttgcttctctatgttgatatagnctatgtcacccacaaggagatatagggaagcaccttggcggactatntggctcagtagcgtctcaatgattatcaacccatgtatcccgagttccctgatgaggacatcatggcctcatttgatgagaagctagacaaggacagggacaagtggatcgtgtggtttgatggggcgtcaaatgttctatgccatggcgtcggggcaacattggtctctccggacaatcaatgtataccttccacagccaggctggggttcgactgcaccaataacatggctgaatactaagcatgcgctctgggcgtccaggtagcaattgacttcaacgtctagctactc

SEQ ID NO: 134422 - DNA, 473 bp, Glycine max
  unsure (1)..(473): unsure at all n locations
agcttgggtttgttgaagcattcaatactttgttaacttccaatcactccaattgatgatgaaacactctacttatcttccttgagagacactccaaatttggcttcagaggtcaaatcatcttttgtttagaaagaactctacacacaatagtgacatgtatttttatgtagagaaaaactttaaactttgactcttcactgcatcatccacttcgagagatcctatgaaaaatattcaaacatcccttgcacataggatcaagtaagcaaagtattaacttagccttaaatgctttgcaaaacaatgtatgtttattatcatatgatacaagagacacaaatgcaacacttttcattggtgttagcatttcaaacataactntttaagattagtatttattggtattaaatcaattntattgacggctttgatcgatcatattactcaacataataaataggaagaaaatg

SEQ ID NO: 134423 - DNA, 410 bp, Glycine max
ttgcattaaatgcacatctgttcgcaaccggcaagtgtaccggatcgcacaagtagtataaaactgtaagaaccgagtatcgaattctcgaggaacttgtgttatctacaaagctatttcgataaataggcgtctggtatggaaatatgactgtggttatgaacaggtatttaaactatctacgcaagaagaaagaaaatcacgcaagagaaatactgtgtaaaaacaagtagagaatgcattggtctttctcataagttcctaatactaaaaaagatgttctctatgtaacaatgctcatgcgttcctatgttgtctcctagactgctagaccccgattcctcatgatttcctagcctagtcttgatcaagcattgtccgcagattcctcttgtaagactaaactcaac

SEQ ID NO: 134424 - DNA, 476 bp, Glycine max
  unsure (1)..(476): unsure at all n locations
agcttctgctgttgacaggatatgntatacattcttgtgatatttcgcccttaaaggttcttgttccatgagccagcagtcctcccaaaacctgattttgtccccacaccccactttccaatctattgcagattgaaacagaccatgcacagcttgttcatggatgactgaccttaaatcctgccaccatatggattcattggtaactgatgttccctcctctagagccctccaacctccatacttcgagatgagaatcttaacccaaagatcatcatgcttcgagatgaatattccatgcaaatcaaacaaacagaataaggaggcccaggagagtgttntttgngatgtagccagagaattgggaatgactntcgaagagaattcaggcaacatagtcaagatgaagaatgaattanaacaggctgacatatcaacagcaccacaagctgtgatggtaaaggaacaacttgact

SEQ ID NO: 134425 - DNA, 455 bp, Glycine max
  unsure (1)..(455): unsure at all n locations
tgatactaagctggttactaaggcctgaaggaatcagctcacccaagcgagttgttttcttatggctaaagntttctctttagcccaggcgagctagatgctagcctgagcaaatttatggtcagaaaccttcatgaaatgaccatttttcctttcctttaagctttgttttgggatccatcaaacaaccataaaaaacctacagagtcatggatgaatctttcatatttaagcaaaaatattagtaaatatacaatatatatatatataactaaatttaaaggtaatttggaagaaaactattacaataaaaggataagtgctaacaatttaaacccaaaaacaacttaaatttgacacttatcagccactcttggatggccttgattttctcagggtccacatgcagtcccattttgtaaccacagagcctcataagactacactatcgacac

SEQ ID NO: 134426 - DNA, 450 bp, Glycine max
  unsure (1)..(450): unsure at all n locations
gctttgaaagaagaatatgccagtctcttatcataagtgagccggatcaggagtgagtatgagcagctacgttctgagaatgctgccctcaaggtgattttgaaatgttgatatgttttgatctttgtcttttttgctaattggcaagcactgttgcccataccaagttatacctactatcaataacactcatatttgaaccctggtttggagagaaggaaaaggcctaaatggactaatatgaccattctagttttcaaattccgctcctactaccataaaaggttcattcaaagactgagccagctatctgattacaggatagacttgtggagatacctggtgtcacgacacctgtgaaggaggatcttangtctggccagaatgatcagcatgtgagtaatgacactcaacaaagtggtcagacagatgttgtgcatggcgtacatt

SEQ ID NO: 134427 - DNA, 447 bp, Glycine max
tgcctgtccgatgcagcagtaatgatggcccgattatgttttttactgttatgaacccgaaatgggtttaggcaaagacaacgacggcataactagcctgataaatgctaaaggaaatcgtgggaaatatggtttaggctataaacccactcaggaggatataaagagaagcatcgcgggaagaaagagcggtggtcaaagcttgcggttgagacaagaaagtgaaggaagcccgccctgccacataagtagaagctttataagcgtgggtctgggagacgaaggtcaaggggtcgtgatatacgaagatgatgttccgagtacattggatgtggtacgaccatgccctcctgatttccagctaggaaattggcgagtggaggaacgccccggcatttacgcaacgagcataatgtaaacctttactgttttaaaagctctatagtt

SEQ ID NO: 134428 - DNA, 463 bp, Glycine max
gcttcttagtttcagatgatgcatatgggtttgtagctacctcatgcactcctctaatgactatggcatcatttctggcgctaaactgttgggaagtggaggccatcttctcaattaaatttctggcttcagcaggagtcatgtctccaagggctccaccactggcagcatctatcatacttctctccatattactgagtccttcataaaaatattggagaagaagctgttctgaaatctgatggtgggggcaactggcacatagtttcttaaatctctcccagtactcatacaggctctctccactgagttgtctaatacctgagatatccttcctgatggctgtggtcctggaagcagggcaaaatttttctaagaatactctcttaaggtcatcccagctcgtgatggaccttggagcaaggtaatacagccagtcctttgccactccctctaatgaatg

SEQ ID NO: 134429 - DNA, 454 bp, Glycine max
  unsure (1)..(454): unsure at all n locations
tgtagaatggctagacatgatacatgtcagggtttgtgtttgtntaaggataaaaagggatgccccacattatttccatgacacaaaatgcaaaaaaatgatgatttggaaactttatgcaaaactggtcatgcatgcacctatgcggacactcaagtgtcaaatttttatggtcatgtgatgctagggctcaggattcatttcctctattttaatcaacccaatgtttccaaaatatgttcttttatcaatttgtgcattcatccgagtccatttcgggcgtacggtgaaatttcacagcattcacccttcacgtgtagacacattttccaaaaattggttatgatcaatgaaccttcttttggaaatcgtctcttttcaaaagcatgtcgttttttagctagacaacttattgtctgttattctccttctttttttcttatcattattatca

SEQ ID NO: 134430 - DNA, 343 bp, Glycine max
tgaattggcaacaaaagaaaagatttttttaagatgctgatttctatctatggcataacccgtacttattcaagttaaagggtgacaatttgtttaagagatgtcttactaaagaggaagttcaagacatcttatggcattgccataattcccccatatggtggccattataatggggaaaggacaactagtaaagttttgcaatccaaattatttcggccttcaattttcaatgatgcacacaatcatactcaaagttgtgataaatgccaaagatccagtaatacttcaaagagacatgaaatggccattataaacatcttagagggtgaggtctttggta

SEQ ID NO: 134431 - DNA, 463 bp, Glycine max
  unsure (1)..(463): unsure at all n locations
tattacaatgttnttgcaaaattatcaacttcctcatttttatataaatnctcaaaatcttgcttcatttttccctacttgtcaccaccaccaccaatgaatnttatgaaaaataatgaaatcccttccatcgaaaattctcaaaatcctcctccgtttttttcctacttgccaccaccaccaccaatgatttttatacaaaataatcaaatccctcccactgaaaattctcaaatgtagaagcaagcttcatgatgatgaatcangtggttttgatgatgacaaaaatcccaaaagaatgatttcaagattaagtcaacaagttcaagatcaagattaatttcaagattcattagaagaaatcaagaagaatcaagattcaagagaagatgaattcaagattcaagagaagaaatcaagaagcaacacgtcaagacttcacaagggaagtatcaaaaagaat

SEQ ID NO: 134432 - DNA, 461 bp, Glycine max
  unsure (1)..(461): unsure at all n locations
gctggtctgaattttctaaggtcttatctgcttagaacaatatactngtccttcatttaactgtctttgggcttaggggccacgatcaacaaagtactttcgacacctactgtatgttgatttgaccaacactgttatgggtatgttgtgacaatccttcaaaaccttattgatacattctgagaggttggttgtcatgtggccatatcgacgtgcttctctatcataagtcatcgtccattnttcctttgaaatgtgatcaattcatgttgctatggctagactcagttgacgaaatttttctaaattttgataaaaaaatgtgcttgcaaggagtgtagcgtgcataaaattagntagcaacaacaattttaagtatatatgaaacttaaattaacgcgaccatcataaatgaaatcttacccaatgtcttcaacatttctttttatttggcttattga

SEQ ID NO: 134433 - DNA, 403 bp, Glycine max
aaagaaacattgatataaaacaaaacaattggtttctctatttaaaataatttaactttttctatagaaaataaagaagattcaaattgacaatataaaactagtggctaatttttctctgttcctatttagacgcacaaagatatatttgatttattatgaatttaaaataatatagtggatataccttgatatcttaattttatattcagaaaacattttcctttgctttatgattgaaccttttttatcaaggttttttcgtattaccttttagagtaattttttatgctacatgttatcttatcttcatatttgttttcaatgaggaaatggttaaggaaatatgcccctctgtatatcaaattttgttatatacaatgactcattattttgtatatat

SEQ ID NO: 134434 - DNA, 411 bp, Glycine max
  unsure (1)..(411): unsure at all n locations
tatctcctttatcttagtgagagtgattctcctaaattctcgagtgattcaagagcaccctcggctgtattcaaaggactctcacaacctctgtgtgttgccctcgccggaaagagtgatgtttttcttcctttcatcttcaaccgtgttctttcaaaccataattccagaaaatccacttctgcctagaattatctcgtggccataactcccattttacgcactcaaattaagtgattcttgagcctaaattgaatttcaagacgagacctntcacctcgttttggaatcacctcatttggatccctttagctggagttattgccatttctatatttctgtccagccaccacttaacctgcatgttctcatctcattattccattatatgccaagaaccaccttattaag

SEQ ID NO: 134435 - DNA, 284 bp, Glycine max
gagaggaggcgtcgaccactacggaataagccaaggaagaaggagcttcaccaccaagatgagccctcgataagaagccgggaacgatgctccgatggaggaaaagagagagggagagaacgacagaggtgggacccgaaaccgaggaaaaaagggagagacaacgaactctgagcggcgactcacaagactctcatccatcaacgcacaacaagtgcacacatgcgtctatatagagacgatgaagctcccttgaaaagctacctggagaaaacacccttgag

SEQ ID NO: 134436 - DNA, 463 bp, Glycine max
  unsure (1)..(463): unsure at all n locations
ntgcttaanaacatgtgcttggttcaactccataatccattgtttttaaatttcgattatcaatacttcgacaacatatcgtagagatgaatgactagagcatacttatgctatgcatggcaaatgtaattatgagattgacatgagatgctcgaagaaccatcatttcctagttaaccatgcattaagtaccatgttcacatgattttcaatcattttttaacaaaatgagtgcataatcccaacatggctggtttatagccatcatcatggtacccaacacatgcaactaagaatgtggtgaaaccttcatgctttattgggactntnttttggtctttttttggttntgggttggttctttttgtagaggaaaatgcaacgatgatgcatgagtgaacataacatgtgaactatgaaaatagaatgtatgcaattggcagaacaaaagcatcctaattga

SEQ ID NO: 134437 - DNA, 395 bp, Glycine max
  unsure (1)..(395): unsure at all n locations
agcttgctctaaatntacattgatagtttgattgatgggaagagggtacatgccattgttgctttaagagaaaccgcccactgtgaaaactaacttttcaaatggttgccttcgcaagaatggccccgaagaaacttgcctcaaagaaggccaagaaagaccagggcggccgaggaactaattcccgcccggagtacgacagtcaccggtttaggagcgttgtacaccagcagcgcttcgaaaccatcgagggatggtcgtttctccgggagcgacgcgtccagctcagggacgacgagtatactgattntcaggaggaaatagggcgccggcggtgggcaccacttggtactcctatggccannagttgatcagaaatagtcctttgattttat

SEQ ID NO: 134438 - DNA, 343 bp, Glycine max
tactcgaacctttcccatcgacacagacctatgtctcctttgcgtatcatgatgtcgatgacaccaacaactatcactccttggtattgaagaattcgcagacctgcttcataatccaactcaagtgtggttaatgggaggatgccaccagatgatacgtatgggaggattggcccactaaagtacttatcaccttgagacagggatttatatggctggaatgatatgaaaataaccacagcatgatcaaagaaggccatgggaagggacacactgaacctaggacatgctacagtgaactgactagacatgctcatatcagttggttgtctccatatttgta

SEQ ID NO: 134439 - DNA, 410 bp, Glycine max
  unsure (1)..(410): unsure at all n locations
ngaagaagagcatgaagaagttttttcttttacatgtttctttctgtagagaggcatttgtattgattgttatattttatgttgcatcttagtctctatcatatcatatgtgcatctgttgggttttttgggctcccttcctatgtgcagtaaaggcccaaatgagaaggcctgtatgtctcacttatttaagtggagaggagtcagattagagagtgagatacagttagagggactcatttgaaagggaaaaatagttacaaatcattgagagagaaagaaggagagaaaaaatcattgtgattctcacatacccactagagagtgtttttcagattataattgtggattcattcactattggatcgggctgatttttggacagtaggttctaagcgtgtgatacttga

SEQ ID NO: 134440 - DNA, 425 bp, Glycine max
  unsure (1)..(425): unsure at all n locations
tcatcctcggccagcttagcanaccaaattatcctcatatgcgagggttgagcgctaagcgcttgagacttgcggcttagtgcatgaatagagatgcgcttagcgcgaggcttgcgcttagcgaaaggactgttttttttagaaaaaaatgttntctaagttatttttcagtcctttttccaagaaattgaaacccttatgtttaacattcaaggataagctgatatactccaaagtacagattaaaaagaaagttccacatgatatatgcatgataaacaaaaatagcagaaattaaaactgtgttgcctcccaggaagcgcttctttaacgtcattagcttgacacttttatctcactgngtgatcaaatggacagtgccttgtgtccttgtaaactcttcaccatgaatacaatttaacctc

SEQ ID NO: 134441 - DNA, 403 bp, Glycine max
  unsure (1)..(403): unsure at all n locations
ctccagaacacttttgcattcattccgtggttcattgctccttcaaaacctttcttgggatcgcgccaacacagtggaagttgagaaactacccttcagggccatggattatcaacctatttccacactcttaactattctgggccagaatacaattccgacggaccaggggccaaagcagatggttttggtgcagtggcagggcctgcaccccgacgaaacctcttgngaagattgggcaagtcttcaggagcttcatcaccttgaggacaagggtgttgttgaagatcgtgggaatgttacgagaagcaaccttgaaccgcaagcaaccaggcccaatgaagatggcaacctgagattagctgcaggaaggcccaagagaggaagtaacacccctagctac

SEQ ID NO: 134442 - DNA, 343 bp, Glycine max
agcttgttcacacatcgtgcgcgtgtaagtcatcctctccacaaagatggaagtagaggagaccttctatcctattacgcagcgtggcggacaaaaaagggcagttaactcgaatgaacattatcgacgatgcgggacgtatttagcgctatactatacatggtcacatattaatgtagtttgtggctacgtgagcccgaactactaccaatgaatagagtgcgcaatacagatgagcacatcttaaaagctgactcctcacaatggtgcgctctttgcaatgaagcggctattacttctttaatgacacatggaacttatccctgcccaactacaattgtcg

SEQ ID NO: 134443 - DNA, 307 bp, Glycine max
actatagagcaacatatatatatatacatatatacagatatatacacatatatacatacatagacatatgaacgcacggggagaaagggaatctcacaaacacgcaaatgacatcttgcccgcaactaatgaccatggtcctctacatgagactaacaagtgtatctctagcaactctgaaatgaaagatatgggtgacgcaaactatgtgacaggaataaaaatatcccataatagagcacaaagagagatatgcctaccccacaaagcatatatcaataaagcactagacagattcaagatggaa

SEQ ID NO: 134444 - DNA, 268 bp, Glycine max
aaatacacaggggcgcgggaatcctacacgcggcatatctgtatatcctacgcagatgatgcactactttaaacgagtggtcttgaaaatgtttagcacatgagactgctgaagcgtcaacgtgtcactcacgaccaaaactaagcctagtcatatttttgccagtctatatagagcgagaatctctaacaaccattataatgcaattagtgaagggttagcctcttttggaccaacgttgacttggtcctaaaaagagtacactctt

SEQ ID NO: 134445 - DNA, 343 bp, Glycine max
  unsure (1)..(343): unsure at all n locations
cattgtgagtctactttctacttactggcataagngaaaatggaggcatatagntgtgttttcttcacattgtaagtctactttttgcaagccaatttaagtgaagctagggggtctatagcaagtgtttgtaaaacattgtaagtctactttatgcaaacctcatttagttgaagaagatctgaaatttcacatgtagcaaaattacattagcctagaatgaacattgatgcaggtaatacaatattgatgatgacaacctaatttggttgaaataatgcatcttttagctttctcttattgtcgtcaacaaaaagatgcagagggacatttgttggtaatc

SEQ ID NO: 134446 - DNA, 475 bp, Glycine max
gatccttaagtcaccgcagctgcaagctttaattatgtgcgaaaaattttattgttcactatctgccaacataaaaacaccttgttttgagtttatagtatgagcttcaattacattatccttagagcacctctggctaaagacttataggttgacatatgctttatttagaagtcaacattatgtcacacggatgtgatggatataatattatatcactataatattatgtagcctgtaaaaacatctaaagatgctatgacatggatgtaatggataatataagtcagtataagacaacaatggattttagctttccatatgtgcttatcgcttatacatatcataaacgtcacaatattgttaccaataattcatgacaaacacaataaattaaattagatggatgtgtgtgcctactgctcaactgattaagcgttacatcattcattttattacataaaggactacattt

SEQ ID NO: 134447 - DNA, 456 bp, Glycine max
  unsure (1)..(456): unsure at all n locations
tgcatgattntggatggcgtattggtagaggttatgcgtgtctattcatttaatgccataactaaggagtaaattttttagagtataataataataataattacaattactaatgtagttgtggctgtaacttgtgattaattaaccatttcagcgtgatctctctgtttttcaaatgcctagatcggaattgtttgaggattgactttgacataattggttgttttatgcggngagtgtttttaaggtgatagtattttctagtaagattggaagcatcacctctttgatagggtgcttgataagttgatctttaaaagttatattctaattatgctaaacatttgtgatatctagtaatcccttcagacattcatggtggtcagttggtattgcacatgtcagatgtattcattatatgctggctctacagactctgtttatctgcttgaatct

SEQ ID NO: 134448 - DNA, 498 bp, Glycine max
  unsure (1)..(498): unsure at all n locations
atcttaagtcacctgcngcatgcaagcttggtacaaccaacattctgttctttcttctcattgtggntctaacctaaatgttaagaagattcgataaattctatttagatagggaaactcagatgatagaaagggaagagagatattgcacaaaaattgttgtaaataacacaatttacaatgaaggggttcaaaacaatctcaagctctctaaacctagaatatagagctccttataaaggagacaactattatctgtctaaccaaaaatagctacaacttaaaacaaaaaacaattatagttacaatacaacctatgttaatgaaccaccagactggatgctcccctttatatgactagatgctctaccagattacaggagattagatgaccaacacaaaagacaagagtattagactagacaaccaacactggtatccacctatctctatcgtgcatcatccaacaatcaacagtctncaccttggttaaataac

SEQ ID NO: 134449 - DNA, 431 bp, Glycine max
  unsure (1)..(431): unsure at all n locations
acacataaatactcagctntgaaagngaccatggaagaaaacaanatgtgttgtatttatgtgaaagangacggtctcttacctatgaaatcagttcaaattcaaaaaagaagctcaacaacaaggtctcacactctctaattgtgggttgtcttggaatagaaacgagtgaaataagaattttctatgtcgtggttcagtttggggtcaataaaactaagtatatgactattcttcttctatctattcacaccctatcacttcctaagatcaaccactatgttctcatctcttaaggtcaacacacctcaacccaaacactgttaaacttactatgcacacctaatattagatttttgcatacataatcataaccatatatgcaaacatcacacaccatcctctcataatttattatatatagacacttc

SEQ ID NO: 134450 - DNA, 447 bp, Glycine max
  unsure (1)..(447): unsure at all n locations
agcttncttttagtgcgtcacgtttaaattttatctcgatggtggtgcgagcctttgatggtactcggcgggaagtgatgggggaaatcgacattcccattcagataggcccccacacttgcaatatggtgtttcaagtaatggatataaatcccgcctatagctgcctcttgggaagaccttggattcatgccctgngagtggtcccttcaacacttcaccagaaattgaagtttgcagtgggtggacttttagtgatagtgtcgggtgaagaggatatattagtgagctgcccctcctccgcaccgtacgtagaagcggtggaagaatcattggaaacggctttccaatcctttgaggtggtgagctgcgcctctgtggaaccaagttcatcgctactttctctctcaaagcggcataatggggcgtgtgtatgctaggaatgga

SEQ ID NO: 134451 - DNA, 396 bp, Glycine max
  unsure (1)..(396): unsure at all n locations
accacttgtcatccnctnntgaggttgcctttgttttcaatcccttaacacccttagacctcattcccctcccacttgacacttcttttataaataaagaaggggaatctaggtcagagtttctaaagaagttgcataaaagggttaagacccaaatagagaaccaaacaaaggtgtattcaactaagggcaatagaggaagaaaggagctagttcttaatgaaggggactgggtttggctccatcttangaaggaaagattccctactaaaaggaaatccaagcttagccctagaggggatggaccttttcacgtcttggagaggatcaataataattcctataggcttggacctctaagagagtatggagtcagcaccacttttaatatttctg

SEQ ID NO: 134452 - DNA, 351 bp, Glycine max
  unsure (1)..(351): unsure at all n locations
atgctctacatatgtgatggtgatccaaactcttgtctatgaacgcgatggaagtaggaatggatatttttgcctacaaattttgaatccatcttattgtgatcttggaaatggctggcatgacgcatgtgggaagcctttctatcattctaatttcccaaacttttatattatctctttcggacggtctaatgttccattaacacccttctcgtgggcaacataagacctatgtatccttcactcacctcttggctttgaaatntacatgtgtcttaatgtgccacattcttatcgcgtggttcacgtcctccaattgacagaaatactgaccaacatacagctcaccat

SEQ ID NO: 134453 - DNA, 272 bp, Glycine max
  unsure (1)..(272): unsure at all n locations
acatagatgtgaaactacacttcatcaaagatgtgattgaatccaaaaaagtgaaagtggagaatgtttcaataaaaaaatacccggctgataatgtcacaaagaccctctctaggatcaaggtcaagtactgcctggactcgatcaatttcgaagatgccgaaggaagttcagaagaagagcagccctgaatcacaagatagacactcgctaatntgggtcaaggtggagatatgtggtgtgtgactcaaaatcactataggcacaagtgg

SEQ ID NO: 134454 - DNA, 294 bp, Glycine max
acactcctaacatctaagaggcaaaaattataccataaaaagatcgaggaacactcttatcatcacccggagatttgatgtggctggaaattgacatagtccactagaaagttgctggaaatgacaaccaagggaagatgcccttggtggttgaaagatgcaagaaggttactgtataatgttattagaggttgacagtcaccagatcactagaaagatgctggaaattaaaactgctgttaatttgactagttcagctgtggattctccacagtaggcatgcatcacttataa

SEQ ID NO: 134455 - DNA, 305 bp, Glycine max
agtgagtctgaaacacttggcaataattaacaacattcaagttatgtaaaacacttagcaagatcacctaacatgatggagtcccctgataaatatccacatatatggtcaacctacataatagagtatggctgataagggtcacagacaaatttactaaacattataaaacaaaatacaattctacacatcttaataaacaaattatatctcagttcttaactagtgatcttaggaaactaattaacacttggtcacagaatataatatcactaataggttgttcttaccagcatgagagccta

SEQ ID NO: 134456 - DNA, 413 bp, Glycine max
  unsure (1)..(413): unsure at all n locations
gacctatctcgatgggtcgatccacaaccccacaagcattgagcttggtaggcgtaagtgcttaagtgtattgatagaattgaacctatgaatttatcttggttagatggtacaatttcctaccaagaacttagcatgtaggagttagtgcttaagtactgtcataagctaggtctcaaagacttacctcggtcaaataatccatagtacaacaagtacttatctagataggcataagtgcttaagctttcttgatcaattgttccttagtaacatgagatttactttgatgagtttgacaccctaccccaacatgcatataaatgaaaaacaaacataaaatgcggaatctaattaaagtcaatttcattcaatanaattgtaagtaaatccacatggataaaanggtcaca

SEQ ID NO: 134457 - DNA, 393 bp, Glycine max
  unsure (1)..(393): unsure at all n locations
tgtcatgtgttggtgactatgatgaaggattgattgatcttacctntgattgtctataatgccggaaaaaaattgttgaccatgattcctgtctctatagtatatgtaaatcaaatagaggactgatgtaatctttatttaacatgtagtatagttgcatatgtttgagagatattgtgaacatttgtaataaataaattcataataatttctttgtattatgccgcaatgtagttatttactttgttgcacatggttagttgaatggatcaaggataattattcttattgttagttaacataaatgttaatggaatttctaaagtaatacctctagagctaacacagcttaaggaagattaaaggaactagagaattgaaccaacctgcctc

SEQ ID NO: 134458 - DNA, 428 bp, Glycine max
ctaagctactggctattctacagactggctatatgccaactggtgattttatactagtgatcaactataactccggctaacggtatgatcttcttgagctgatgactttcttcaccattaaacatgatactagagggtctcataccactattcaacattgaattctaccactcttctttgtctttaagaacattaccccatcatcttttaagtacctgagctctgagaatagatttttaaaccttgcttttgggagcacaaatcctagcgtttctataagacctgagctaaatagtgctattcttttcaatacattgtataacatcattctagaaaccacacagacgaggtttaatcttttcatgatacacttggatattactagaaaatattttgtgcttaaggaatgatgagctacatacctaatc

SEQ ID NO: 134459 - DNA, 439 bp, Glycine max
atggaggaagagaatgagagtcttatatacagagcgaccgcgaaatcgaaggagaatacggagagaagctgaactctcgaagtgtgactcacaagttcttcattcatcagagtcgtgacaagtgatataaggtgttctatttatagcctaggccactaactgaagaagcaagtttcatgatgatgaaccaagcgaatttgaggatgccaatagcgccagtgattgattcaagacttaaagatcaagcatcatgaatgcaatccaagattcaagattcaagagaagaaatcatgaagcaactagtcaagacttcatatacgataacgactcataagatttcgtcaaagaccaaatagcacagccgtgtttacatatgagatttctcaatactctaagtaccagagtgatactctctggagaccataccagtgatcagaat

SEQ ID NO: 134460 - DNA, 318 bp, Glycine max
aagccttctcaagaaagtatctcacggacactacctactctataaaaagaagcatgtgtaacacttgctgcaactttgatgaatgacagtcttgtgagacacaaatcacagttcaacttctctccctttttcttccctcaatttcatgctccccactctctctaactctccctctttcttttcctccaatgaagcatcctctccaagcatcttatccaaggctcatcttggtggtgaagctccttcttccatggcttattccctagaggatggcgccgcctattacctcttctactttggcttccactgcatctccat

SEQ ID NO: 134461 - DNA, 430 bp, Glycine max
  unsure (1)..(430): unsure at all n locations
tctcctgacccncgcgacatatcctcaagtaccactctgcggttaactaataaaagttggaagactgactcttccacgctttctcacacatggcttattgggttaaggcgcacccgtcatatgtggcactaggtggcgatctggcaatggcgcaaaaaaaatatcccatttccacaagcccaggcataagcacaccatccctagttgcccacctttaaattgagctcacgtacacgtacgtagcccttctcgttcctctcagcaccgggtccacatcaacccctccaagccttcacaatggcaaatccaatcaattccatttgacatgaaactaccttgaaaataaaacagagtggaggcagaaaccttacacaagaatcatgcgaatccacagagttttcctaccacagacctcaaaaaggcctcatcc

SEQ ID NO: 134462 - DNA, 389 bp, Glycine max
gctaaggactgtctctactttttattgcacatttttttttctgtctcccttgattcaccattttcatgaatcttgcatttccagttctgaaaattctcatactatgattatgacaataaaacatataccccttttgacttttctggataaccaatgaaatatccactgattgttcatgcatccaattttctttcctgtggattataaatccttatttctgcttggcaaccctaaacatgcaagtgccttatactaagtgtctatggaactgccttactatgaaccctattcaacaaatacatggtatttttcaaggcatacatccacaaagatacacgtaaatatgaattacttaacatactcctaaccatatgcattaaaattctatt

SEQ ID NO: 134463 - DNA, 251 bp, Glycine max
atgctataattgatggattaagtatccagtattgcatgcactttatgcccaaacttcgcgttatagtctggtaaccaatgatggaaatcgaacaagacaatttgtggctccagttcccttacgagaagttcgaagtgcttctctgtgctatccatagcggcggcaataagtgcgaacaaagaggagggcacgtctgaagtggtttcagcatcgtgaggaagaccatcaacgtgaggaacattgatggggac

SEQ ID NO: 134464 - DNA, 353 bp, Glycine max
gctaaatatattgtttattcctataagtgagggcgttctattctctatcttacttataatgctctcttagacctttgaaaatatggttattctacttttcatcctaacattttaaacataaaaagagaaaaaaagcatatttgacgagaactaagtgaaaaaatcactacgtgacaaagatcacaaaaatatttacaccgaaactgatttattcttacgaacttaccctatgaatttgtattcttataattagtcacaaatctatccagagtcccgaacatgatccgcttgtcttcctggtcaatagcaagctcaccacaatcaagtatgctcagatctgagggacggaagga

SEQ ID NO: 134465 - DNA, 438 bp, Glycine max
  unsure (1)..(438): unsure at all n locations
cacctctactcttatcgaggcaccactctctactccgaacgacacttctncatgttaaagactcgaccaactcatcaccctcctacttgtcaaggctactaccccaaacaccagacaaactccctacacgcaagataatacccttcgacactgaacaacctttttcgcccgcaagcaagctaagagcttaaggggcttatgtattgttcagggtccacaaagtacatgttttgtgctacgtgacactccattacacatgtcaacactccatgtcagccctgacataggagcatggacacccaacccttagctctgacctcttattatatgaatatattgtcatccctttatctctcggcaggtattcaattatctacaaggctacacattatctgtaagtaataattatctactaacctttatctctaagctatacat

SEQ ID NO: 134466 - DNA, 140 bp, Glycine max
ctcataccggcggtgaagctccgctttacctggcttatcaccgtagggatggcgccgtctttcaccgtatctccttagatgtccggtgcatcatgatggtagcaagacaacatatagggacctccttgaactcagatatc

SEQ ID NO: 134467 - DNA, 459 bp, Glycine max
  unsure (1)..(459): unsure at all n locations
ccctgaaagagtggagtggtttttcttttctccttatttaagagattctgtacaaggcgataattgaatatgagttcttttgacaaatagatcattatcacacatgtgaacaaaaaatcaactttggcttaacttaaagaaattatggaagagtttatcaaatcaagatttcacataatatcatgattttgatgactngaaagaaatctcttttgcttttattgttctctttgtatcaaaagtagttacaaaagaagttacaaaagtacttatatttactttcatgcacatgatattttatttcttattgaactaaatttaaaacaattattaatagtaaaacgtaacaatcattggttttttctcttaccatgtaataaattctggccccctattatgttnttctggttccgaccctagtntgatccattccagctatctcaatctgtattcagtacc

SEQ ID NO: 134468 - DNA, 435 bp, Glycine max
  unsure (1)..(435): unsure at all n locations
gacatcactgacagaatcaaagtaatgatcacctttcataagttttcttcttgaanactttttaacaccagggaaaagaaaggccacacaatttttggagctcagagagccttgattctttagtttctccgagtgccaacctcttgccagtaaatggggccaaacagctgcctagaaaatatcattacttttggctttgcacaaattgttatcccccagtcaaatgtttgattatatcactaggtccaagagaagaaaaagctttgctagtttgtattgaaaacactngggttttcttcacatgttccacagttgggtgagtaaggtcttccttccccttaccaatacctatangctttgcaagaagaccaagtcctacagttgacttcaaagaagtgatatattcttctagagaaattctccnctctgaatatg

SEQ ID NO: 134469 - DNA, 418 bp, Glycine max
  unsure (1)..(418): unsure at all n locations
tactcagcttcacattggatttaataatgataatggtggatattattatggccatagcgatcttaattaaggaaactatctttaggagtctaattaaagtaattatctttagggatctaatcaaaatatttatctatagtgcacctcattaaagtaattatctttagagatcatattagaatatttatctatagtgtgcctaattaaagtaattatctttaaagatcatatcaaaatatatatctataatgtgcctaattaaagtaactatctttatgagtctaccaataagaagttgaagtctatacttacgagattggaaattcattatttagtgtacgttntttaaagctttgagagtgttntaagaagttttgaggcgtggacaacatcgtgaggaacaatcatgaatcatggt

SEQ ID NO: 134470 - DNA, 466 bp, Glycine max
  unsure (1)..(466): unsure at all n locations
agctngaagcttcagctgtcacgttttcttattatatgaattaaaattagaattgaaaacgttccaattcccccgacggtggctagctgagtcatgccaagtagtaaccaatgatgcgtttgcgttccgaggtagctactatgtcatggcttgcaaaggaatgcatggagtgggcctataaactacaagcccacacagctcaacccattgtttttttcttcttcttaatttcataacaagacaagacgtacgtttgaatgattttcatttttttaagtggaaaaatgatctaagactgtgggttgattaatcatgtttatgaacacaattaagccacatatatgaccttctaagagtatcaggtggatactggtcgccatgacctaatcaattaggtgaatattattgcatataagacacttatggagaatgaagttatgaacaatggttgtagctataatccaca

SEQ ID NO: 134471 - DNA, 451 bp, Glycine max
atggaaagctgtagactgacaataatggcttatttttgttagaacacgacttaattaagaaagactctttctgtgtttggatgagcgtgagacacgtgcaatgtgtatgaactctaaagcttaaaatacatactcttgcgttaaattgaaaattctgccgctaagatatagatagatgaacatggaccatggaagtggaaccaaacacatactataaaaagtatctaaaaatccatagaatactggattattttcaaatttgagtaaaaagtaaattaaaaatatctaagaaaaaatgagaattatcaaaatgcataactaatcgaaatatactttataaaatataggaaaatattaaacattaaagctataggtaacaaatatatgcaattaattataaataataataaattgtgttaaaacatgtttgacaatgaggaataattatcac

SEQ ID NO: 134472 - DNA, 430 bp, Glycine max
aacatattttatgaaaatgtttttttattggtctcatgataattgactaaaagatattacttactcttttctaactttttatttaatgaaattctattccagaaaatcaaacttcaaaaaacaatttaaagaaaaaaaagcaatattaaagaaaaactctgactataccttaaggaatagcgagaaaaaaaacaaatattaaagaaaaagaaaaataaaaccacaaaaaaaaaaaaagagagtctacgacgttgtttccttccggtctgaatgccccgtaacgcttcgacaacatggatgcagagaaggcacagcctatattagaagtacaaatacaacccattcttctctctctctctctctctctctctctcacaagccacaatttcaacgccacaccaaaaattccactgcaccaccaccctcccca

SEQ ID NO: 134473 - DNA, 101 bp, Glycine max
aagaagaaaaaaaatggaagaacgaataaaagaaaaccaacagaagaggaagaacaaaaaaaaatgaacttacctgaaggccatggagggggagggaggtt

SEQ ID NO: 134474 - DNA, 408 bp, Glycine max
  unsure (1)..(408): unsure at all n locations
tacaagtacaatatgcatcaatttacttccccatcatcaaaaattgagcgagtagaatgccaaaaataatttttagtattatggagntgaccaagattgtgtgaatattttttgtaatagaaatccttacagagctgtaagatattttagaactcctatccttgggttcaagtatcctgtgaatcccatatatgctagtgatctgaaatgaagcaatttatatattacacagcaagcacgaattanagatttaaaaatgtgaaatatataattntctaaaatgaatagtgacagccaacatcttcagcaaatcatataattaaaagaaaacaacaacataaaatactaaaatatcttacacttgcatgacattgttgtttgagtcacagtanacacgtgaccaagtac

SEQ ID NO: 134475 - DNA, 389 bp, Glycine max
  unsure (1)..(389): unsure at all n locations
cctgtanggaaaccaccaaaatgagttttttttttaaaaaaaaattatcaaatgagactaaaatttaaattaatattctgaaaggaataagtcataccataacctactactttaattaaaagccgcaaattgtattagaatctttttttcgaagtcatcaaaaaatttataactttaattttttgttctttttaaacacggttttaaaattataagagtttttttatgtctttttactcttaggactttaaagtgacaagactttnttttccttttgtatttttttttacccctacgctataaagtcgtaagagtatatttactactttaatgttaatatttcttgcatagttttaacatcgcaagatatgttttatgttaattattta

SEQ ID NO: 134476 - DNA, 380 bp, Glycine max
  unsure (1)..(380): unsure at all n locations
ctggatggccttgattttctcagggtccacttggaccccatttctaccaactacaaaccctaagaaaactatattatctacacaaaaagtacacttctctatatttgcatagagggtgtttttcctaaggactgaaagaacttgcctgagatgtcctaagtgatcatctaggctcctactgtacactaaaatatcatcaaaataaacaactacaaatctacctatgaaatcccttaagacatgatgcataagcctcataaaggtgcttggtgcattagtgagcccaaaaggcatcactagccattcatacaaaccaaacttggtcttgaaagcggntttccactcatcaccctttttcatcctgattnggtgatacccac

SEQ ID NO: 134477 - DNA, 432 bp, Glycine max
  unsure (1)..(432): unsure at all n locations
agggattactgacacgttccatttggagtttcgtagtgtcctctaggtcttgcaaaaggaagataggtctagtaagcacaaaatctgaaatttagttacaattctcaattaagcttaatcatttgccttagaccaaaacttagttaaggtgagaaaataaaggtcaaagagatgttaattgagctaagaagaatagaaaaatattaaagtacaaatgctcaatcaaattcccccacgctttatcttttgcactcctagaaaaactaaaagaaagattaagaaaagaaatcaaacaaaaaaacataatcacaacaaagaaaggtatgaacacggcacacacattntttaagggatcctaacaatgcacaaaaatgagagatatggaaagtggaagaatggtctcaaggtaacaagcaatccatgaacatatga

SEQ ID NO: 134478 - DNA, 343 bp, Glycine max
ggctcgaccccactggaatgccaaggtacgaaaaaggaatatccaactggctacaattaatgaaatgagctgcatccctacaccaaccctgcgattttcccaaacaaccaaactgacttttagcataattgatcttgacgccagaaaccatctcaaagcatctcagaatagattctaggactctaacattatccatatttgtagccccaaaaaacagagtgtcatctgcatattgcaaaagattaacatcctccttatgacttcccacttgatagatgctgaacatattcttagaaatagttgtcctcatcaaacctgtgtggccttcagctactaaattgaa

SEQ ID NO: 134479 - DNA, 459 bp, Glycine max
  unsure (1)..(459): unsure at all n locations
agcctattntctggagagttccttccctgttggtgttntgattggtattacgggtggtgtttggtcttggatgtgcatcacgtggattctgtggccgatttaagggtgacctttgtggataattgggcgttctttggtggtagggtggtgagtaatgggaaggactgatattggctgagtattgatattgttggggaggatattggtacatgggatttaaaggggctagtgggaaatttgattatgttgttactacaagttcttccaggaatggaccggagaaggttccaggttagtataccaggtaatagttgccccgacaagacactatnggaagaaatgcatcaacaacttttcatccttcgcatatgcccccatcttcctacaatacattntcaggtgattcttggacaagtggtcccttgtcttatcaaaatctgcaccttgaactttgaggat

SEQ ID NO: 134480 - DNA, 66 bp, Glycine max
tggggggctacctctcttgatgttgccgtgaacaatgtatttcttgagtgaggagggggggggtcc

SEQ ID NO: 134481 - DNA, 443 bp, Glycine max
  unsure (1)..(443): unsure at all n locations
agctntatagattctctgaagtatnntttgttttgccttcattgaaacctcgtgcaacgaaaggcataatgatctcctccgacggtgcacctctcaagcgtagcctagttgtcttatggctagcatgggattataattaatacaaccccttgttcccatcaaggggacgtttgggaatccttcacatgagcacgacacttcggcccctccttctatccatcgagggaacccactaacggacgctcctaccatacctgccaagacttcttcccaatttgtatttcccttttcggggcacatgcgatgaccttgtagagggcagacaggtctaccttcattgacgaaaatgtgggagaccaaccacacataacaatgtgggctttccttgctgtgatgataagcaagaaaggcgttgatggctgctaagtccactagcccgtgat

SEQ ID NO: 134482 - DNA, 438 bp, Glycine max
  unsure (1)..(438): unsure at all n locations
tatattatgcttttatttattantgatagaaatttgcgatttagtccttattactcattatcagattaatacaatgtaatcaatactgatcctaattgctcattataaatagaggcttagtgtggtcatccaagacacacaacattacaacagttaaaccactgttataataaggaaacatggtaacctatcctaagagataatgaggaaataaggaaagcaattctaaaggataaaggataatccaaaagtcaaaaatatggttaagacaatattggatattcctgacattctaacaaactgattaaaaaaaactgctattatgttttgcacttcaagtggtaacagaattagcaaccaactacaacaaaaggctgtcatttaactaaatattaacagaggtatagaagtctctaaatgtggngtcactgcatcaca

SEQ ID NO: 134483 - DNA, 461 bp, Glycine max
  unsure (1)..(461): unsure at all n locations
agctctccctctnttccctataaatagggtgaggagggaagaacaaanaggttcaaccctcctggtatctgaggatcacttaaaattagtgagaaaaattgttctgtgaagaaaatccaagccaagacgcttccgtatcgcttccgagacgtttccgtgggtgatttcgcatagattttccaccattcttcgttgctcttcggtcttcaactgataagttcccgaaattgaacttttcaattcattctatgtacctttagtggtccccatttgtttcacatgcttttattttcatttcatttactttccgtacccccttttgacgtgctttagtcatttatttaagtcatcttctcgcctaataaaaaanataaaataaatttccaccgatcatttgaattgtaacatcttttaatttctggtagaatganatccgaccgttcagtcatgccgtaaccacg

SEQ ID NO: 134484 - DNA, 449 bp, Glycine max
  unsure (1)..(449): unsure at all n locations
tagactgagttcagcctaccatcctcatactgatggtctttctgttctgaccattcagtcattggaggaccttttaagagcatgtgtcttatagcacaagggaagctgcgagggttttcttccattgatagagatcacttataacaaaagttttcattctaccattggcatggctccctatgaagcttttgttggtagaaggtgtagaacacccctatgttggttagagcccggagaaggcctcaccttatgaccagaagtggtacaacaaaccactgagaaagttaagttaattcacgaaaggatgagaactgctcacagtatgcagaacagttatcatgactagaggaggaaagatctggaattcgaggttggtgatcatgtattcttgagagtcactccatggactgnggtttgtcgagcattgaaatcccaaaactcacacctcg

SEQ ID NO: 134485 - DNA, 451 bp, Glycine max
agcttcggaagagagtgatgagggacatgcttctaaggcagagcttgaaagagcctgggtagtcgaagagaagttcacgtccatagccatcacagtctgaaaagagtatgatgaactaagggatgtcaatatggccaccgatgaagccttggaatgagaaaccaagaaggcccgaaaggaagaacacgaccaaagcaaagttttgaggggctttatagggcagcaatagtgagctcaagctccgaagaggtgaaaggaatcatcacgggtcaaaggcatgatcttgaaggacgagctaaaggtttgccttatgtcgaaaagaaatttgtcccaacagttaagcgagactgaagggaatatgtgggccatcatcgataagtgcaaagagaagctaaatctagcggcgactcacgagcaaaggctagaggatgagtacgccaagatatcaaca

SEQ ID NO: 134486 - DNA, 452 bp, Glycine max
  unsure (1)..(452): unsure at all n locations
gatctggaacattgatagaatactctataatgtctatgcaggatcctatagattttcccattgataaggcctcagcaaccttccctcgagctgcttcatgcctccacaagaccaagaccgtgtttagcaaaggccatctaacatgagaatctgccttcttctgtgtgaagcctaggcccttgagcaataaatccaactgtctacaattaagaaaatcacaattagtaatggcaatgccatgtgagctttccaaatgttttcactaagtaagtaagtaaaaagttgcataaacctttcttatgtcatctagacctccttcagaaaatccatatataagatactcagtggacaccccagccaatgctatacatgaaaatttgttcaacgtctaataacaaaacanaaaagggtggcacataactaaaatttcatgtgtagaatgttgataaagc

SEQ ID NO: 134487 - DNA, 460 bp, Glycine max
  unsure (1)..(460): unsure at all n locations
agcttatngatntgtcatgaattgaacctttttctttaaatgattatctcctaataccttgtttagattctaggagagcatatggttcaaggcaaatntactctaaatttgggggagaaaagttgaaaagaatgaaaagaataaggttaagcatcaacacacacaacaaataagttgtatgttaaaaaagaaaagagaaaataagttgtgttgttacaataaggtcaaaagcaacttaagaaaaaggaatagtgagaaggttatttgtacaaaacaagaaaagatcattggaattagtctaggacttgtgctctcttagaatctaaacttttgaatcctagaaaaaccagtaaattntttgtagccacaacctcactacaagcctgagaaagtccttatgattcntgttttatatctctgagttgatgacatgagatgagatgcaaagatagacctcatg

SEQ ID NO: 134488 - DNA, 436 bp, Glycine max
  unsure (1)..(436): unsure at all n locations
acatagatactaagcttatccttagatccctcttgttggactaggcctaattgagacagccttcttaggtttagactaacttaaagtgagtttcatctcttgtaagactagactcagctcaagcagcttatgaaagtttagcctaagcttcgtctgcagatccctcttgtaagactaggcctagactaaacaacattattgtaacagcataattaaaaccaaaacttaatccgcatatccctcttgtaagattaagttttgatcctgcttcaatcaagttctaaagcaacagtacattttccaatgctaaagtcacctaactatgcacacaaatggatgatcagaccaaaagcatacaaacattaagcattgaaggaagcattgaacacaaaaaacataatcaattagatattaggtatntacatcagttggtcat

SEQ ID NO: 134489 - DNA, 443 bp, Glycine max
  unsure (1)..(443): unsure at all n locations
agcttctgactataagtatgacgcatgatatacagttgcatatatgttaccacactataagatgttactttgttcagatgcttgtttaggctcttngaaaagtctccgttttcatttattttaatggaatttccagttgaacgctaggaataaatctgcagctgcagaatgctatacaagaacagaggtttgtctggaaggtagtacttgatgcactactatttgccagtacaaactctcaggcttgacatgtttgctctttatttatttctgcatgcattaaacaactcttgttgactntggtatcagtattttaaaaagagaacacagtcctatcatataactaattaacatggtctaaacagtctcacaatatatttaacttcttattttcctgggaaggattatattnatggattagctctagtgtttgctataaatat

SEQ ID NO: 134490 - DNA, 301 bp, Glycine max
gtcacgagtatataatataaagaaatgttctaacacactttttaatacactatgttgaacatactttattctattggttgaagctcatccaaaactacaacattgcatgggtctcaaatcttatttaatctttatctctcccaactatgcaatatgtaataatcgaaaataatgtatctcaacgagtgagacaaagacaatgctgccagcactcctctataatatactaagcacgataacgtggtcacatgggattgccgactcatggtgcacaagtaacaataatcgctaacatctaatg

SEQ ID NO: 134491 - DNA, 415 bp, Glycine max
  unsure (1)..(415): unsure at all n locations
agcttncatcaaggaagtaaacttctatgttcttacttctgtagatgcactaaattgcgggctcttctcttcctctcccttcattcatcttcttctaccttcaagctcttatccatggcttcctatggtggtgagcttcttctagagtcatcttctatttgaagtggcatctccattcatcgttctccttctccattccgctgcaatcagacctcaagaaacaaaggaatccattgatgaagaagatccaaggcctacaagctctacatggagctatgatcgacgccgtacccgaatcanataaacattcaaaatgcagtatctaagacgtgatcctaggtcgtctgccaacgagcaatagtcaaccaaacattcataatagatagtaatataacagtaccgaatttgggggggg

SEQ ID NO: 134492 - DNA, 390 bp, Glycine max
aactggatgcgttggtcaacttggttttctatcttgtcttgaatcagaaatctgagcctgtcgcataggattgtggtttgagctcctctgctgaccaccatacagacctttgcccttccatgcagcaacctggagcaattgagcagcctgaagcttatgctgccaatatttacaatagacctgctcaacctcagcaacaaaatcaactacagcagagcaattatgacctttccagcaacagatacaaccctggatggaggaatcaccctaacctcagatggtccagccctcagcaacaacaacagcagactgctccttccttccaaaatgttgctggcccaagcagaccatacattcctgcaccaatccaacaacaactacaaccctaga

SEQ ID NO: 134493 - DNA, 362 bp, Glycine max
agctttgagccagaatcccgacttacttatttatccttgacccagggtgagaatgtcaatccttgcctccgaaagatagcaaaggatgagagagaaattctccattgaagagtgagagaaagcgaataaaagagagaatattcccgatcaaggatcgaaagagcacagaagaaatatgcggaaaggtctttgggccagacaatatctgtacaaaccagaggtgtcaccaggtaaacgataaaaaggatgccacgacctagagtggtcctctccctttgattgctgtcaggacctacccttgggcgggagggcgacgcgggactcacgggatgcgtgttccacgaaaggaatacgcgcggagt

SEQ ID NO: 134494 - DNA, 399 bp, Glycine max
  unsure (1)..(399): unsure at all n locations
taaaactaagctttgcgcatgccacacatactctagcctaattgttgttttatggtccctccncgcattcagggacgcaaatcaaagtcgataataacgtttgagaaaaattgactataacaacggcacaatcacccatatggctaggtttatgattctctctctcacttttttagagtattggagtaatgttaattattaatggttattgacacatggtgttgatcatggataatgatgacgaacaggaggcacgtgcatatgcccaaaataatagagaaatcaatttccatactgtctgatgccggtcttggaatggctatgttcaacttacgtgactggtcgcaaatccattctccaaattcatactctcgcgaaataattntattcttttatcca

SEQ ID NO: 134495 - DNA, 419 bp, Glycine max
gaaatcaagttgaaggcttaccaaaggtcaaagaggagtttgtccgaacaattgagcaagacggaagagaacatgtgggcaatcattgaccaatacaaagaaaagctaagtctagctgcaacctatgaacaaaggatagaaggcgagtatgcgaaggtatcactcctacaagtggaaagggaagcaagagagagagtgatcgattcattacacagagaagcaatgatgtggatggataggttcgctttcgccttaaatgggagtcaagagcttccaagactgctagccaaggccaaggcgatggtggacgtgtactcagcccccgaggaagtcatgggctctttgttattgaagcacatgatcgatttgagacccacattattaggaatcgctaggcatttgattatactctaatttgg

SEQ ID NO: 134496 - DNA, 435 bp, Glycine max
  unsure (1)..(435): unsure at all n locations
aatcactcccgcatcttatctctagcatgcattctttctttctttacccactcctcacgtttggtttttttaggaaaaaacaccataactaaacgcgccacaaggcatccctatcgcaccagatccaaatctataacgatgggtgatcaagaggagacacaggaacagatgaaagccgacatgtcggctctgaaagaacaaatggcatccatgatggaggccatgttaggtatgaggcagctcatggaaaagaacgcggccaccgctgccgctgtcagttcggctgccgaagcagacccaactctcttggcaactgcgcaccatcctccctcaaacatagtaggacggngaagggacacactgtggcacgatggcagccctcacctgtgatacaaccgagcggcttacccttatggattgccgtccaactactca

SEQ ID NO: 134497 - DNA, 400 bp, Glycine max
cttaagatgttgtcaaacagtcacgtccctccttatgaaattgaccatagccttgctaaagctgaccacagtcgtggtcattgcaccatgattgttatcaagtgagaataacatcaaatcctcatgaaattatgcatcttccaaatttttcatttaattgagaggttgtattttgcaaggtaaaattagtgttcaaatgtgagtttttccaagacaatgcatgataataacacaaatatcactcaaaatatggtttatcatccatcatcatttatttaataagaaatgtatctggttaactataaaattagttgagaatattttctatattcgtgggaataattaagacatatcgttggttaaattatctcttcttaggaatatatattataattactaa

SEQ ID NO: 134498 - DNA, 392 bp, Glycine max
ctctaaaagtttctggttctctaaaccttgagaacatgtgctattcatcttttcattctcttctccctttgccaaagagaattcgccaaggactaaccgcttgaattctttttgtgtctctcttatcccttttccaaaagaacaaaggactaaccgcctgaattcttttgtgtctcccttctcccttgtcaaagaattcaaaacgatacagtctaagaattcttttgattcctcccgttccctaatacaaaagtgttcaaaggactaactgcctgagaattcttttgtatccccattcacaaagtatcaaaagtttaacagcctgagatctttgtcttaacacagtggagggtacatcctttgtggtacatgtagagggtacatctacttgg

SEQ ID NO: 134499 - DNA, 228 bp, Glycine max
aaaatagccccgcgaacagtgagcacgacatcaacaacatcaacgttagagtcctccgccaaaaaagtgaaaagctgaaaggcctcctcccaaatgtgacctccgacggagaaagacctgagctagaggcccaagaggtgggggaagaccactccacccaaccacagagcttgccccacgaggaagggccctaatgaacgaaagcccgaaggattggtcaaacacccg

SEQ ID NO: 134500 - DNA, 383 bp, Glycine max
  unsure (1)..(383): unsure at all n locations
taaatactaagcttttattcacgcaatcttggggcgagcgcttntttctttttttattcctagnggaaggggcctccgctctcctcttctnctttgccctccggtgcatctccatggctgaaaatcaccattgaaggacctcattgaagctcaaagatccagcctccatataagctccacaagcaagctttcatcataagggataaaatgaaagtttgatcaaagaaaagttaaaaataagaaagactttaaacaaatgtgagaaattggttgactaaatctaaactaaatgaatcattgaatagtaccaaattaatatattgtttattaagaaatgaacataataaatataacttgacattaaatttatgaagcattaatac

SEQ ID NO: 134501 - DNA, 403 bp, Glycine max
  unsure (1)..(403): unsure at all n locations
cacgcttaacgcacaaaaaacacaaaaatttctaattgtctgagaacacattactcgcttagcgtacagacgcacttagcgagttcataagcaattgaactttcactcaaagaagatgaacgtgcttagcgagacaagatcgcacttagcgagttcatctggaaatctagatgttcaacagaaacgatgaactcgcttagcgcaacaaggcgcttagtgcgctcatcgcgatttccagaanaaagcgagggctaagttaactagcctaaagtttgaaatgtggaaataaaatgaacaaagttaagaagcttacttgtgctatngaatatgggtgcaaagagggagcaaaaatgcaggcaatgcaaggagatngaagtactatggagaggctgagaaaatgctc

SEQ ID NO: 134502 - DNA, 433 bp, Glycine max
ggagctcactgttgctaccccacaaagctccacgaaatttgttatggccatgctcttccttgcgagccctcttggtttcttgttcaagggctctagcagtagctgcattttcttctcgtaacccggcacactctttccggacgtttgtagcgaccaacttgaatttttctttggcaagtcttgcttttcctagttctgtttttagagctcggacttcttcatcctcttccggagcttcaaagttctcttcgttgataatctttaacttggaaagccaatctaaccctcgtgtacgaactttcagccattcatgataaccaccgatgatgccattacgaatgcacctaagttctttatctttccttaacgggctttcccacgccttatggactctttgtataaccttcgaaacttgtacgccgaaatctctcac

SEQ ID NO: 134503 - DNA, 335 bp, Glycine max
agaccgattgaatctttatttcacattgataaacacaggttatgaccaaacgatcgattgaaactctaatttacaatgacctagcgagactactacacaaatgatcggctgaaattctatgttatagtgattaagtgagaatacagctcacacaatcggttgaaattgctctacacaaagacatgagatcactgacggtcgaagaatgagatgaagatatgagaagcaacaagagggacccctaagggagcatagattgaattcacagcttcaaaatcaaatctaactgatcgactaacgaggagcggacgaagaatggaagtatgaatcgatca

SEQ ID NO: 134504 - DNA, 357 bp, Glycine max
  unsure (1)..(357): unsure at all n locations
atcccaaggcgtgagaagtgaaaatgacaatggggtaaattctgagcaaactctcacctcacacaagtctataaccttaatctaaacttgctcaaactgcgtttatgcctaaaattccaccaaatcaaaatttgactcctcaacacccaaattttaccctacaaatggctcttgccttcactctgggtcttttgtttttctctcttgcacagcccaagctttctcataagtcctaaatgacacttaaaactacgactaactcactttaaccttcaatttgtactgaatccagatttagcctntcaaaccctcatagcatcacactatttccactcataacactacattctcactttc

SEQ ID NO: 134505 - DNA, 396 bp, Glycine max
  unsure (1)..(396): unsure at all n locations
ttgagcgnctcgatatattatgcgccttaatcggacctccgagtgaaaagttatgaccatttgaataactcaagagcttccattgttcaatttcgagcgtctcgatatcttatgtgcctgaatctgacctccgtgtgaaaagttatgaccatttgaatttctcgagagcttccgttgttcaatttcgagcgtctcgatatcttatgcgcctgaatcggacctccgagtgaaaagttatgaccatntgaataactcaagagcttccattgttcaatatcgagcgtctcaatatattatgcgcctgaatcggacctccgagtgtaaagttatgaccatttgaattgctcaagagcttccattggtcaatttcgagcgtctcgatttattatgcgcctg

SEQ ID NO: 134506 - DNA, 428 bp, Glycine max
  unsure (1)..(428): unsure at all n locations
taaagaagctagagcttagctacttatacctctctaatagctaagctcacctccttgagatgagaagctagaacttagctacacacccctaataatagctaagctcacccccatgacaaaaaacatgaaaatacaaaaaaaaaagtccttactacaaagactactcaaaatgccccgaaatacaaggctaaaaccctatactactagaatggccaaaatacaaggcccaaccgaaggaaaaacctattctaataattacaaagataagcgggctcatacttagcccatgggctcgaaatctaccctaaggctcatgagaaccctagggccttcccttggatctctagcccaatctacttggagtcttctacccaatgcccttgcgggataggatngcatcacttatgaccatntgaatntctcgagag

SEQ ID NO: 134507 - DNA, 469 bp, Glycine max
  unsure (1)..(469): unsure at all n locations
agcttcttgcgtagccgctcttggactcatattatcccaaaacaaatccctcttattactagctatcttgaattctttagttcctgaatgtacaaccttcaaattgttgctcgttcccctctttgttttctgcaaaaaagaaaatcaatatcaaagaaaacatggatgaagtcctaaggatgccatgtacatgtgtatttctgaagatantagtattatattccatcaagcatacattgactgttgattacatgtaatagactttntataacatggttgccccaaatcacaattaaaaagcacaactaccaatctttcggagtcctttgggtaatttgtcttgtctccttttgtggcggggtttagtttaataatattatactntttccttccaaaaaaaacttatgactgatcctatnttcattaatcctattttgtatgtattgataaaagacatggttctccactg

SEQ ID NO: 134508 - DNA, 424 bp, Glycine max
  unsure (1)..(424): unsure at all n locations
ttctcacttgttgtttaaatcttacttttgcactcttgaaggatggaaattggaatttaaactccctcattcttccttctaaatttcgcggagactgcaagaggtagcgaggtctctccaactcttgaactctaagcttgttgttaaacttccttgaacatgttgtcttgaaattatagtgcttgctgccttgttctagatctgtttgatgagcaattttccttgagtattttatgcaaaaaatgagttctttgagtgttaaaacatagggtcagccttaaatttcacttaaatcaaagttttctagcaaaagttaagaataaaacaagttntagaacattgtactggataaaatctatcatgaaaataatctcgcagtgagaaatgtatggtctggttttattaaatattttacctcaaaaat

SEQ ID NO: 134509 - DNA, 466 bp, Glycine max
  unsure (1)..(466): unsure at all n locations
agcttagcccaactgatacttnttgctatttttaacttagcggttttttcaccttgagatgcaccgatttcatcattaaatccaatggaaatgttctagagacaacgttaaccaaaaaacaatatttatttacaaaatttactccaaaataaccataaattggggaactatacaagctttggaaaatgatttctatacaaaagttagtcgtataaagcgactaacaaaatcccccaaatttatagttttacttgtcctcaagcaaagaaagaacaattcacttgtccttaagtgataaagacagtggccaatcaaaagaaaatggtgtttgattcatcaaggacatcaagcatatgaacttaataccatggaatgcttaaatcaattacttctcacaagcatgtagttnttcaaagataagagcacaagtattagagtcacagctganataagctagtaagcatga

SEQ ID NO: 134510 - DNA, 444 bp, Glycine max
  unsure (1)..(444): unsure at all n locations
tattgcttgaactgtgtgaagataaagagagtaaatattntcttctttggaagaaaaatgagtatgctacatgatgtacaaatacacagattntatactaacttggaagtccacaagcagcctgaggttaaacaagttgctacaccagaaaaagggcacctcaaccctaagtcccaaacctgttatagatagggggagcaacacgagcaacatggtgaacaaactaaggctaaagcttgaagctcaaggaggagcttgaagaagttttgaacaagttttggcttttacatgccaaactcccttgagttacatttgtattaaatgttatctcggttggtgcatcttaggacatttgatatnntgattgcattgtgcatcatcatggataagatgaagaaaattttctaagattgaaactctctcatagacaaaactctatgtttt

SEQ ID NO: 134511 - DNA, 338 bp, Glycine max
  unsure (1)..(338): unsure at all n locations
gggatccttaagtcacctgcggcatgcaagcttatacttcaatagtaagcactgtaatgcctacgagggngagacaggnctgaatggattttgaggtttggcccacttttctcacatggtagatcttgcaggcttctttcaagatcacattggatgtgccttcagagcttgttgctctttccaacatgccaactgttgaagaaataacagatggaaatctcataacagtttcatatcaagaatcaccaatcatgtctacatatttggttgcgggtgatagtggtttggttgattatggggaatatcatacctcacacggtaaaaccatgttacccctg

SEQ ID NO: 134512 - DNA, 383 bp, Glycine max
aatgctcaaaatcacgatgctcaaaacgtataaaatgctgcctaactaatctatgaaatgtcctatctatctcaagatcaaagggttgtaagtcagatggattgcctctagtcatatactacattcagcatgcacaactaggtgccttcttatgcaagtcacagcgtaagattgaactacagctaccctcaaatgatatccaaatgacttgaaatcctgtaagaaaccttataaaatgatgagaagataccacaaaaattttcagacaaaaactcaaattctaactatggaaactacctaacgaaattttagaaaaatcaaacactaaaacttgcaataataccaacaaactagtaaacatgcgactatggatagctagagac

SEQ ID NO: 134513 - DNA, 431 bp, Glycine max
  unsure (1)..(431): unsure at all n locations
agctngcctgngcgagttcccnctgcattttatgactntntctataaatagccatgcaagaagaagagaanaccaaataccactagcctaaattcagtagaaaaacgtacaagaggaaggagaaaaggagaagtggagccgaggcactgtatatttgtgaccgtggatcacttccttcatcatttctcttgntagtcttgtgctctgcacaatgatcggtaagttnttcttaagattggatgtaatctttgtacccttatgtatcccctttgatattatatatgtattaatcttttctacttattgttagtaatttcattctactcttaatggttgattctgtttgatcactagtgtcatgaaattggatttaagttagactgaaagtaatcttagaattgaaccaatgatttactcttatgtacgtgata

SEQ ID NO: 134514 - DNA, 406 bp, Glycine max
cttagatactaagcttagcttcttaactggccagggtctaatattgatggtatccttgtggaaccttcacccgacgaagacactgacaaaaacttatcttctccttcttggataaagtatggcaggctgggggcaagtaaattttcttcccatcagaccttggatgcaactgtgatcgtatacccatatctgccagatcttgacgggtattcaagccatacttcgtcttgccttgaatgttaaggagcgtcccaatcacactgtcacaaacatttttctccacatgcataacatcaatacaatgtctaacgtcaagatcacaccagtaccgaagatcaaagaaaatggacctcttctccatatgcaactctgacttttatccttcttttgggtcttcccaaataca

SEQ ID NO: 134515 - DNA, 277 bp, Glycine max
  unsure (1)..(277): unsure at all n locations
tgcaagctagacttattagagggatctgcgtgttaatatgtgattntatgggtgccgatacaataatgtagttatggttaagtctgctgcgacaagacggctttgaggacatatcttaggacttatgagcctcgacattcatatgcattatctgacgagactagtcctactagagggatctgccggtgaagcttatattgagcccttctaaaccgacgagggctgtgtaaatcgtgcctactccagcgcgagggatctgaggacttagcttggaatg

SEQ ID NO: 134516 - DNA, 375 bp, Glycine max
cataacccgacttatcgtgaatagtttgaagatgcgctatttgactatgaaaacgttctttgttcattaacaaaggtagcagatgggcttgttatacatgttctttcttggcttggatacgacatcaacaactattcatctctctcttgaagctccagacaacatccgtacgatgcatatcactggtgctaccctaagggttgaatctcctcactgtcacagtatgcatgacgcctatgcttgtgaagctttcattccttactctgtgtgcatagatgcatccagggaactaaactatgtgaaaatgactcgaagtgttttcgaacgcaaaagggatgacgaccacactggtatgtgcacccatgatataagatc

SEQ ID NO: 134517 - DNA, 451 bp, Glycine max
  unsure (1)..(451): unsure at all n locations
agcnttcacaacatgcaagcaattcattattcatacatcatgaactatcctaaaccaagataacaggcagaggcaaaaaactcttcccaaaacacatcccaacaccacagctttccctacttaaataccccagtaacattctctgtgttccaattcgttaaccgttggatcgactcaaaaattttactggaggtctctagtacataagtctacatgttgaccgttgggatctgctaaaaacgtccagaacccaatatgtactacctttcccataaccagcaatgcataagcattttctacacaagcacagaattctgctgcacatttcaacatcaattctctgcataatagtgcagattttcgaaatccgtcttgccttcatccgaatttgctctaattggatcctacaagtcctaaatcatgtataagtcatatctaaaccaatgacaag

SEQ ID NO: 134518 - DNA, 360 bp, Glycine max
  unsure (1)..(360): unsure at all n locations
tgagatgaggaagtatagaagggtgaaacttcctgcttttanttttgaccacagagtggtacctggagatatgtcgtgggggtcaggagaccttggggacgtcaggtggggtgctattgcccaaaaccaagcttgaccaatcccgacccaacccgggcatagtcggtcagtgagaacctgtgatgtacctaagcaggcgagctcctggcagtcaacagataaaaggaacaaagaccacaaggcaaggaggcttgtggtggctggccagctgtgaatcttgtgtgatatatgggttatggcctctggtaatcgattaccaagggtgggtaatcgattacaaggcttaataatgaagacaag

SEQ ID NO: 134519 - DNA, 415 bp, Glycine max
  unsure (1)..(415): unsure at all n locations
gcgatatgcgaagatgatattccgagtactttggatttggtacgaccatgccctcctgatttccagctgggaaattggcgagtggagggacgccccggcatttacgcaacaagcataatgtaaacctttacggttttaaaagctctatagttgggcctaggctttagagttcttccttttgttaaggctctgtgtcttttgttcttaaatttataatacaaggatctttcttcatctgttcctggtctctacccattctcattcattggcatgtctacttctttttctgaaacggcagatccgatgacgagtcccccgaatgtactaatacctgggacccgtctatcgacttcgagcaagaaatgaatcanacggaagatgaaggaaatgatgatgtgggactttccccagaact

SEQ ID NO: 134520 - DNA, 404 bp, Glycine max
  unsure (1)..(404): unsure at all n locations
agcagaggagcacaaaccacaaacccttgcgacaggtacaaatttctgattcaaggccagctgggttaccaagttaaccaatgcatccattttgccttcaagcttcttagtttcagatgatgcagatgggtttgtagctacctcatgtactcctctaatgactatggcatcatttctggcgctaaactgctgggagttggaggccatcttctcaattaaatttctggcttcagtaggagtcatgtctccaagggctccaccactggcagcatctatcatacttctctccatattactgagtccttcataaaaatattggagaagaangctgtctgaaatctgatggtgggggcaactggcacatagtntcttaatctcttccagtactcatacaggctctcttc

SEQ ID NO: 134521 - DNA, 422 bp, Glycine max
acacagagaatatttgacctttcagccatggatacaatccaggttagaggaatcatccaaatctaagatggacaagtcctccacaacaacaacagtctgtccctccttttcagaatgctactggtccaagcaagccatatgttcctcctccaatacaacaacaacaacaacaacagtcaccacaaagacaacaagcaactgaggctcctcctcaaccttccttagaagagttagtgaggcaaatgaccatccagaatatgcaatttcagagtctgacaaatcagatcgggcagatggctactcagatgaaccaagctcagtcccaaatttctgacaaatggccttcacaaactgtgcagaattcatatatgtgagtgccatcaccttaaggtctggcaccaaattcaagtgcctccactagt

SEQ ID NO: 134522 - DNA, 290 bp, Glycine max
acaaaacgtgataaacaaaacactcttcactaaaagagactctccttcataaatcgcggtcataatactagaatcaattactgaacttcgctattatcaaaacgaaaagatcatatcatacttttaatggaaaaataacttcataccaaagcgaaatgaataaacatactaatattaaataacacagtcgaactaatataaaaaacgtgttttcaattacgcttttcagcaaattataaacacaaaaatgcattatctgaaaatcataatgagtaaattacaactctaaa

SEQ ID NO: 134523 - DNA, 402 bp, Glycine max
ttaaaggggtgcttaatgaaataacaacaatcacactagaataaaagtgtgtgtgtgtgtgtgtgtctgaaaagaatgacagacagcgctaagagaatgcttaataaaatcggtaagaagagacataaacacttgatttttactaggtcactcaaacaaaaatacttcaaggtctcctttatacaatgataatgggttccactaatcaaaacttgattacaaaacaagtattttgttctgtcacttctagctatacaagtattcgtctagccacttctgacaatggtctagactctccctaaatctaagagaactcaagtattgaataacactaagacacttatggctttcacaaacagtcatttgaatgaatacacgtattcaataatactcagtgagtgg

SEQ ID NO: 134524 - DNA, 463 bp, Glycine max
  unsure (1)..(463): unsure at all n locations
ntagtgttcactntctctattcccatgggtggccatcgctctttttattttgctngcgactaccatctcgaatctttcgttttcctcttcctcttttctagtattaatcttcttctttgatcacccctccttcatctacctactctgtcagtatctatgtgtgaatgttcgatcatgatccacaaatattaacacattccaacctctctctccttttgtaacctactcgcttttataaatcacgcagctactgtcctttttttatcatattctcgttcactcaaatacattcttttcagccagcctcactccctcattcctagatacctacttacacaaaggatacaagttactgttctaacacgggatgtgcctgagcctagctcacttcacaccgccacaaatcaagctcctatgctattactaccacaaaaaagttccatgtctacgattggattcatcg

SEQ ID NO: 134525 - DNA, 375 bp, Glycine max
  unsure (1)..(375): unsure at all n locations
tccaataatttggttttaaatgaaacgggtttatgatcccaacatggttggctcgtggtgcctaacacatgaaactaagaatgtagtgtgaagtttcacgcttcccccttttttggttttgttttctagaggaaaacgcaaggatgagcaaacatgaaaacaaatggtatgcaattntgcagatcaaacagtttgttgaacgcatatgcatgatgatgccatgactcatgcaaaatgtgaggctggaatatgataacggacaaatgcaggatatgtccattatgatgttatgaagagatgcttatgtggtgcatgaatatgaatgcatttacggacacgagagcccggaaaattatctcttcttacttgcgcatt

SEQ ID NO: 134526 - DNA, 468 bp, Glycine max
  unsure (1)..(468): unsure at all n locations
tttatttgatccagcagaggaggagcatacaacctatnttactctagtcacacccatggaattcaagcacaagagactcgatcattgccatcttgaaagaatgctaaacatgaaaaaaaaggaaatatgcaaaagaaaatttgaagaagtttcaaatggaggaatgcaaatctgctagcacactaatgaatcaaaaggagaagttcagaaaagaagaaggtgttgataacattgatgaaggatattatgggagcttgattggatgtctaatgtatctcactacaacaaggccaaacattctatttgctcaaaagaacaaaactggaatttttgttgacaatcaagtagtcattgctattgcaaacaatcctgtgtgtcatgggaagactaaacatttcaacatcaagttctattatttgataaagatgcaacanagtggtgaagtgaacttaatttattgtaagtata

SEQ ID NO: 134527 - DNA, 375 bp, Glycine max
ctgcagctttgcacacaggatggaggggttttgtattttaaggaagcaaaaaaaaggaactatatctggagattcatttaaccacacaccaagcttcatggcagtaaccaacatggttttgggtgccatcttggtccatattctgttacgtggtgagtccattacatacactcggaacctcaaggttttgtcattctcttgcttctcatccattttcaaatattaattcagtttacatgaacatgaacatttttatttataaaattcattggccttccttgagttttttctcgagtggtgttttttgtgcttacgacatgcagagtgtaacgcttaataggggagtgtattctttctatagaggacacttttgga

SEQ ID NO: 134528 - DNA, 127 bp, Glycine max
  unsure (1)..(127): unsure at all n locations
caacacagaacacaagaacatgagtaannagagaaatatcctcatgtgcatcaactcatttgttagaaagacccaacgcttttcacctattgttgtcgaattctacttacttgcctttactggtttt

SEQ ID NO: 134529 - DNA, 453 bp, Glycine max
  unsure (1)..(453): unsure at all n locations
cgcgtttcctccatacctattatcttcaaccttcgattctcactcaattcttcaccaaatcacgtgccgtaaagcccaatcttcctctttttcactcctctttcacttccaccgatcaaaatccagaaaaacttcatcaaatggcagagccatcaaagaagagaaagggatcatcctccaccgctaccgctgctgcccatcgccgtcacggcccatccggagcacccacagcacctattcctccttctttgtcatctccaagatcatcaacactgttttcatccgatgatcaacgtctacggtacctttctcagttttcttctagaataatcttagaccctaagtccctagatgtagagttctttaatgatgaaacattngattgctatcaagtgtttcacaattctggtcttggtgatctcatgtcatttaaatcgccatattatcctgaac

SEQ ID NO: 134530 - DNA, 469 bp, Glycine max
  unsure (1)..(469): unsure at all n locations
acacatgatactcagcttgggattggcttcctggcgaaagacgaatgttctgaaaaggccctatacctgggtccgtgggaacataggaagtggaggtgaatctgtgaccatgctaagtctccgactttcttgatgacagtgaaacctcctttagagcttttctctttgataatatgttgtcgttggtagcccctaccaccaaaaaattgatgtcaaagggaatgatatctctagaaaccattgagagagatataaccgccttgggagttatcactaaaagccttttagttcctcccatttaggttcctaaaataagggcacgcaacaaacttactctggcattttccttgattgaatcattcatctcttcatggcattgcaatggacatatcattcccacatttgtcatttgtcatattcgtgcatcgcattntgcatgaatcactgcattaccacacatctgcattta

SEQ ID NO: 134531 - DNA, 328 bp, Glycine max
ccattagccactagccacggaagacaaccacgcacgctagtgtatatgaagagaccatgagctattactaattactgtaccacctgattatcatcactccttctgtttgacaagcttgaaaatgaatctcaagagtcaagacattagaaagaactgttacaaagcttattacgtaattccatgagcttttctatttttgctcattctaataagggttttgatgaagcatattagaaagttaacttatttctataaattttatgataaaatatatgcttaaatatattatgtattcttaataaatattcaatttgcatgttcgtttcta

SEQ ID NO: 134532 - DNA, 475 bp, Glycine max
  unsure (1)..(475): unsure at all n locations
agctnttatgtgataggatgtgactncnttancatttgaatctaaattncaacgttcaaaggcactggtaatcgattaccaaaacattgtaatcgattacaacattttagaaattaattggaacgttgtaaattcaatttgaaaactttttcaaaacaattttgctactggtaatcgattacaacaatctggtaatcgattaccagagagtaaaaactctttggtaaacatgttctgagaaaaatcatgtgctactcaatttttgagaaaaacttttcatacttatcttgattaagccttctctcgattcttgaatcttgagtcttgaatcttgatcttgattcttgagatcttgaaccttgaatcttgattcttgactataaactttcttcttgagtcttgaattcttcttgattcttatcttgaactcttgaattgttcttgattcacttgagtcgctctttgattgatcttc

SEQ ID NO: 134533 - DNA, 411 bp, Glycine max
  unsure (1)..(411): unsure at all n locations
tagatngggaagctcaatggacgaaaagagagagagagatagatgattgtttagcatgaaatcgaaagaggaaaagatggagagaagctgaactttgaagtgtgtctcacaagactctcattcgtcaaagatacaacaagtgttacacatgcttctatttatagcctaggtagcttccttgagaaacttccttgagaagctttcttgagaaacttccttgagaagctntcttgagaaacttccttgagaaactttcttgagaaatctctctgagaagcttccttgagaagctagagcttagcgacacacacccctataataactaagctcacctccttgagaagccttcttgagaaacttccttgagacgctagagcttaacgacacacaccactctaatatctaagctca

SEQ ID NO: 134534 - DNA, 277 bp, Glycine max
  unsure (1)..(277): unsure at all n locations
atcgcccaggaccaagaagagtgggggctagccacagcccacgagcatagaancgcggatgaagatgcccaagcatacgcggaaaaagaggctagaggaagggtgatcgactctctacaccaagaggcaaccatgcggatggaccggttggctcttaccttgaacgggaagcaagaacttccccgagtgttagccaaggccaaggcgatggcagacacctactccgcccccgaagagatgcatgggctcctcgactatagacagcacaagatagacc

SEQ ID NO: 134535 - DNA, 359 bp, Glycine max
tttattacctatacttaacagaaaatacttataacactacaaaataaccatagtttggatgagtttgatacaatttacacaagttttatacacaaaagttagtcgctttcaccgactaacacataccttcctggcgaaggcgttcttcactcagctttgatacaattgcccatggctcatggcagccaatctcttaccttctataagattcaactgatcaaaccgagtgtgagcccattccaatttctccaatcttgattcggctagaatcctcaacgaaggaacctctacctcatatggaagcacaacctccatcccatacactaaagagaactaggttggcacgtgatgtgcatact

SEQ ID NO: 134536 - DNA, 389 bp, Glycine max
agaaattgtgctaataaatattggtttaaggttaacactgtctctagaacatttccattggatttaatgatgagatctgtgcattttcaggtgaaaacaacgctaagttttgaattgctaaaagtagcagttgggctaagctcaacagatgggctaagcgcataaccaccactaagtgtagctttagcacgcttagcacaaaggagaatctagcagagcatcagcatcaaagccgtgcgctaagcgtgagatcagtgagctaagcacagaatgtgccttcagccaagctaagctcgagactggcgctgaaccctatttcacttactcgcactaagcgcaagggtggcgctcagtgccacgtcccgatatcacaacctatgtaagcctat

SEQ ID NO: 134537 - DNA, 130 bp, Glycine max
cgccacaaacgcgcaaaggcccgatactgggcaaaccgggggagcggaagaaccaagaccgagtgcacaacacgcaaagagcaccaaacccgaactgacacccgaacaagacagaagcggctacgaaacg

SEQ ID NO: 134538 - DNA, 443 bp, Glycine max
  unsure (1)..(443): unsure at all n locations
agctttgcagagtaatcagaaggaatatcttactgtcctgcaacgtanacgcacatgaactcttgaataaccaaatttacaataaataaaaaagagggtaatttgtattttcagatgaaattttcaacccacccagaaggtttaaagaagataacgttaaatttgaaacatgggaaatgaacgacttacagcaatttcttggagaagagtttgagggtcaggttctggatttgggagagtcggactctgttagagcaaaatgcacagcgagaggtttgggaagataaactgtattggttgaggatataggagtgacgaattcgagtgaggttatagaagcgaatcgatgggtgtaacggtgggatagaggtgctatctaagaccagaattgaatcgaagctgaagccattgttntctttccaacttggtttgaagctctatgc

SEQ ID NO: 134539 - DNA, 468 bp, Glycine max
  unsure (1)..(468): unsure at all n locations
tactaagcttatannatcagtcactttaatattctgtacacaaaaacttatatgatattaatttaacaattatttgctcaaaaaggaaagattaaaagaaaaaaattataaattcctatataatttaatttcaaaatatactcataattagccgttatcacggccccatggtggacaccaaatgaacttaccaaaatccggaactatgacacatcaaggtggacatggccaaagtgaacttctggatttcacatgttgactttgagagaggcctttgtcgagacgacaagagagggggacctgcaaaacaaatgactttgacgctcaagtaagtatattagttaggagataaatcaagtatatgcttaagtataagctcaagtgagccaaagagagaggcacanagcttgtgctcatgtgctaaagtgtgtgggattgtattgaggatttgatgaaacttaatattta

SEQ ID NO: 134540 - DNA, 428 bp, Glycine max
agcttcttatacgaagcagattttttttttgaactccttcttcctccgcttattccctattggatggtgcctcccctctcctcttctccttttcctctcgttgcatctccatggtgtaaaatcaccattgaaggacctcattgaagctcaaagatccagcctctatagaagctccacaagaaagcttccatcattttggcccacactctttaaagatgctcactagcatgtgctacactatgatcaatgtcgaaggatgggaggtatatcaagaagaaatgaaatgcctttacaaaatatcatggaggttgaggtatttgattgctggaggatttattttgtaagtacctttcctttgtcttttggaaatgaatatatactaggtgggtgttgactatgcttctaagtgggttgacgcagtggctacc

SEQ ID NO: 134541 - DNA, 419 bp, Glycine max
ctcctctaatgaccatagcatcaattttggcactgaattgctgggagttggaagccatcttctcaattaaatttctggcttcagcaggggtcatgtctccaagggctccaccatgggcagcatctatcatacttctctgcatgttgctgagtccttcataaaaatattggagaagaagctgccctgaaatctggtggtgagggcaactggcacataattttttaaatctctcccagtattcatataggctctctccactgagttgtctaatgcctgaaatatcttttctgatgaccgtggtcctggaagtagggaatatagccagtcctttgccactccttctaaagaatgaggaaagaccttcagaaatatgtgatccttctggacatctggtggtttcatggtggagcagacaatat

SEQ ID NO: 134542 - DNA, 309 bp, Glycine max
gaaccactatatgcaaggaagacatggaccatacctgcgcaggtggaaaactaactgttccaatatgatcttccccagcgaaaccaaagatgccaacagtctggttattagtcacacgctgtccaacctcacacatgttcttgtagaaggaactggaaaggaaaactatcctcagaaaacagaagaattgcttttctataaataaataaaaaaagagtaagacagtacaagagattgtgaaatttctcaagtgacattttatttcagaagcgaacagcaacaatggaacagagaattgtactctaacat

SEQ ID NO: 134543 - DNA, 412 bp, Glycine max
cacaacaagatttccacattcacaatgcgcgcataaacccaccatcccctggtgcccacctccaactgagctcacgtactcccacgtagcccatatcctcgttgctctcaacaccgggtccccatcaatcctctcaagcttccacaacatccaagcagaacaacattcaaacagcacaagctatcacagccaagcaaaacagagcaaaggcagaaaactctgctcaaacaccaaccaaaatcacagcttgttctcgcttaaagaccccagtaacaattccttcgatccaattcgttaaccgttggatcgactcgaatatgttaatggaagtctctagtacataagcctacattgtgaccgttgggatctactagcaaacatccagaactcattcggcactagactattcaca

SEQ ID NO: 134544 - DNA, 370 bp, Glycine max
  unsure (1)..(370): unsure at all n locations
tggagagggttaccactactgganaacccgaatgcaaacttttatcgaggcaatagatctaaatatctgggaagccattgaaatatggccttatatacccaccacagtagaaagagtttcaatagatggtagttcatcaagtgaaagcataaccatagaaaaacctagagatagatggtctgaagaggatagaaaacgagtacaatacaacctaaaagccaaaaacataataacatctgccctaggaatggatgaatatttcagagtttcaaattgcaagagtgctaacgaaatgcgcgacactcttcgtttacacatgaaggaactacagatgtcaaagaactatgataatgccctactcatgagtatg

SEQ ID NO: 134545 - DNA, 437 bp, Glycine max
gcttaagaaaagatggcccgcaagacccataccgaatgttattctatcaaagacctccaatctataatggagagggttaccactactggaaaacccgaatgcaaatttttatcgaggctatagatctaaatatctgggaagccatagaaatacggccttatatacccaccacagcagaaagagtttcaatagatggtccatcatcaagtgaaagcataaccatctgaaaacctatagatagatggtttgaagaggatataaaacgagtacaatacaacttaaaagccaaaaacataataacatctaccctatgaatgaatgaatatttcagggtttcaaattgtaagagtgctaacgagatgtgggacactcttttattaacacatgaaggaactacatatgttaaaagatctaggatagatgcactcactcatgag

SEQ ID NO: 134546 - DNA, 351 bp, Glycine max
gcacaacaagtttaacacatccacaatgcgcacataaacccaccatcccctgtggcccacctacaactgagctcacgtactctcacgtagcccatatccatcgtttctctcaacaccgggtccccattaatcctcccaagctttcccaacatccaagcgaaacaacattcaaacagcacacatgatcacagccaagcaaaacagggcaaaggcagataactctgccaagacaccaaccaaaatcacagctgttctcacttaaagagcccaagaacaattccttcgatccaattttttaaccagtggatcgactccaagaatttactggaagtcgtctagacataaacctac

SEQ ID NO: 134547 - DNA, 383 bp, Glycine max
acacataaaactagctaacaaagcatgcaatggtggaaacacatatctttttcttatggcatcaaacataataaggcagaaggctagatagtagccgatgctctttctcggcgtcatacattactttctatgcttgaaacaaaatcgattgcgcttgaacgtttgaaaagcatgtatgataatgatgaaactcttggagaaattttaaaacaacgcgaaataattccagaagatggttgctttcaacatgaaggctttcttttcaaagaaaacaaagtgcgtgtgcctaaatgttccactacacactaagcttgtttctgaagcacatgaacgaggattaatggggcatcttgggcgccacaagactctacaaacattacaag

SEQ ID NO: 134548 - DNA, 344 bp, Glycine max
  unsure (1)..(344): unsure at all n locations
agctgtgacgaatataacccacatcttcttctatctgtgtgagacggatatncatttcggcaaagcaattatacaaagagtcaaaacgttcaccaacataagtacgaagacctcataactcggagagaacttcagtcataagtgctgaatcatctcgctgaggaggaggagaaggagtacgctcatcgtggggaggaagtgcatctttcttcagccattgaccattccgatccttacggtatccaaatgaagtggctgcaccagcaccaatagcaaaggaacactcgacttgaacaaagggtcatcattaagcgaaatctgaaaatgacggagaaacagaggga

SEQ ID NO: 134549 - DNA, 430 bp, Glycine max
  unsure (1)..(430): unsure at all n locations
actatgaatctcagcttgaggtaacagacgcctggtaacctggaactcttctggtcatgaataaaaaattntcacctgtcgccagactctatggtttatgctcctctattgaccaccacacagacctttgtccttctgtgcaacaatctgaagcaattgaacaacctgaagcttatgctgcaaacatctacaatagacctcctcaacctcagcagcaaaatcagccacaacaaaacaattatgacctctncagcaacaggtacaatcccgggtggaggaatcatcccaaccttagatggtcgaattcttcacaacaacagcaacaacaacaatagccttattttcaaaatgctgctggcccaagcagacatacgtttcttcaccaattcagcagcaacaaccaccaccacaaccccagaaacaaacaaca

SEQ ID NO: 134550 - DNA, 444 bp, Glycine max
  unsure (1)..(444): unsure at all n locations
gcgattttttcntttttcttgagaagcctttgcatgtgtcgtaacctacccttttgtgggcgtggaaaatgtcagaaaaaccgaatgaaaccggtcatgaagaatattccacattcgggagttgtatttacgtttgaggaatgtattagcacctctcacgtttgtcccacaggacaacagccttatattagaattgcgtgaaatcatacatctaaacttttatttcttttttatttttgaggacgacaaaagcggagctcttgctcctacgtaccctccatcgaagaggaaatcagacctacgtagttctttctaaagggcaaatcaagcgattcttatttcttagaaggaggtccttttaaggcgttggaccttaaaatgacccattcttacttggtgagataaactaacgtatcgagcactatattccttttattaattttt

SEQ ID NO: 134551 - DNA, 452 bp, Glycine max
  unsure (1)..(452): unsure at all n locations
catagcacaccacctgacgtgcgaatgttctttgacccccggacatatctccagtaccactctgtggtcaccaaaaaacaagaagttcacccttctacactttctcatctcaagcttgtaagattatggggtacccatcacatgtggtactaagtggccgacgggcgatggtgcacaacaagttttccacatacacaaatcgcgcataaacccaccatcccctgttgcccacctccaactgagctcacgtactcccacgtagcccatatcatcggttctctcaacaccgggtccccatcaatcctcccaagcttgccaacatccaattaattcaacatccaatcatcatggactaacaaaaccaagcacaacagggcanaggcagaatactctgcccaaaacacaactcaaaatcacagcttttctcacttatagaccccagtaacaattcg

SEQ ID NO: 134552 - DNA, 468 bp, Glycine max
agcttgcctcgtggttgtggttgagaacattgctcaatctgaccttcatggttttcttcgagttaaccgtgattctaagcttgttccttggtagtttaagcttatccttgcatcattttctgactttggaaccatcattggatgttctacgctctctttgaaaaaccctagagaaagagactttgtgaaagttatccttttctgaaatgggtgctattttcatgaccttcaatgaaccccggaagcattggcgtgatcagaatttcaaaatgacgctccttttgtagaactcgaaataccccatagccttttcatgtagtgacatgagtatttgactcagggtatcattgtcaactctatttctgaaatccattgtaatgtccttcattgtgatgtatagagacttgcgttggaccatcaagcatgaacgagaaggagacctctatgtgacgcatagaggaacccgac

SEQ ID NO: 134553 - DNA, 463 bp, Glycine max
  unsure (1)..(463): unsure at all n locations
acacaagaatctcagctatgctgcaatattacaatagacctgctcaacctctgtatcttaatcaaccacagcagaactgaaattctgataccaatgacagatgtcgtaccggatgtcacgacatcatgcttcagaacatgcagattatatttgactgtatgaacagattaaacaagtaaataacacaagagaattgttaacccagttcggtgcaacgtcacctacatctgggggctaccaagccagggaggaaatccactaaaatagtgttagttcgaagatctaacagccactgtttacaaccttctgacctaaccactacccgtgcaacctctacctaagagccactcttagatatgagaacccctctcactccctctcaatcactctgccgtgtntacaattaaatcaaagacacaccagagaatgctctctgaacattagagatcaactctacacactc

SEQ ID NO: 134554 - DNA, 435 bp, Glycine max
  unsure (1)..(435): unsure at all n locations
ctcgnccaggcgagcacggatgctgnctctatatatctcagtcttccggaggaatcatctggagggcccaagtgggcctggttgctatttgcacccccattattactaagtacacccccctgccttttgttggtgattcttttttcgtcgagttaccgaaacttacgaatctcgtaacgatacttgttttctttctgtaatgttacggaaccttgcggattacataatcatcctctttttgacttacggaatgttacggaacctcactaattgtgcaacgacgcctccatttgatttctggtgtgtcacagaaccttactgattgtgcatcaatattctctgttgttttctggcatgtcccggaattttacacattgcctaatgatgggtgccaagcacctcacaaagaccataccatagtcgcatgtcatcaaa

SEQ ID NO: 134555 - DNA, 449 bp, Glycine max
  unsure (1)..(449): unsure at all n locations
agcttgaacgacccacctcatcgttatgttatcaccactctaaacagcaagaaatttcaattnttaaatgaaaagtctggtcatttgcttatgaaaaatgaaagtaattttttctcgatatacattcaccagacaatgcgccattacatatagtgaatacatatgtatatataggaatagtaactcagtacacatcattcacataatggaaagtaaattagttcatacatataattaaatttgtgatttacatctttaattcaacaaaagaattatggaaccagctatggaggagttgatttacaaaacacaactctctcccaaaataaccccaacgtcatcacgtcagctccacaaaagaatcttacttctcatactctactactggtattctggctccatgaacaaagggtcgtgatcatcataggtaccaaccacatgggtacaaa

SEQ ID NO: 134556 - DNA, 309 bp, Glycine max
ccgacgaaagatcttatttttctaaaaagaagcaacaatgagcatcatgcttcgataaatggcaaaacacaccacggccaatgaagacggagagaatgacggagaagcccatgccgtgactgccatacctatatggacaagtgtcccacccacctgacaaagtcataactcagccacgaacaacacatctacttacccaccacacaccaatccacaaaggccatccctaaatcacactacaaaacccacccaccacacgaccaatgccaaaacaccacttttagcatgaaccgaagcaccaaccaagaa

SEQ ID NO: 134557 - DNA, 361 bp, Glycine max
  unsure (1)..(361): unsure at all n locations
aaccagttccgctcccgagtatgacagccaccgctttatgagcgctgaacaccagcagcgcttcgaggccatcaagggatagtcatttctccgggagcgacgcgtccagctcagggacgatgagtataccgatttccaggaggagatagttcgccggcggtgggcatcattggttacccccatggccaagttcgacccagacatagtcctcgaattttatgccaatgcttggcctacggaggagggcgtgcgagatatgagatcctgggtgaggggtcaatggatcccgttcgatgcggatgctatcacccagttcctgggatatcctttagtgctggaagagggccangagtgcgagtat

SEQ ID NO: 134558 - DNA, 430 bp, Glycine max
tgtacagcgctaggcaatcaattcatgagactcctatattatatttgagggtggaggatagacaaacagtgcttggcaatcaattcgtggggctacggataagattttagggtggaggaagcatgaatagcgctaggtgtcataccctaatttcgtccggggacctttgcttgatgacatgcgacctttgtttggtccctgtaaggtgcttggcacccatcattatgcaatttgtgaaattccaggacatgccgaagaacaaaagaaaatattgatgcacaatccgtaaggttccgtgacacaccgaaaatcaaatggaagcatcgttgcataattagtgaggttccgtaacattccgtaagtcaaaaaggggatgattatgtaatccgcaaggttctgtaacattacggaaagaaaacaagtatcgtta

SEQ ID NO: 134559 - DNA, 466 bp, Glycine max
  unsure (1)..(466): unsure at all n locations
agcnttgtaaaccaaaagttactgccatgtacaactacccnctatatatatgcattattatgtatatgctaatatgcacaaaggcattagtgtatcctcaccccaaaaccttaaggactgaaaatcatgacaaatacaactttgatgcttaattttgcaatcaattttgatgcttaattttgttaatttagattttgtatgttgttgtatgtcattaatgtactttgctttagatacaactttcgttcataatgagtgaaccttagattcctgtttgagactgaatgcaatgattcttgtggacaatttgaattaatcattgtattcaatcttgaattgtccgtttggacagtttggggagactcatatntttatggtagattcatgcgttaaggttaacaactatttgttgaatttgatgaaaatttggacaatgcatttctagatgctctctgagtgcacactt
